United States Patent Application Publication US 2026/0226133 A1 - sequence listing, part 14

SEQ ID NO: 34037 - DNA, 1878 bp, synthetic construct
  source 1..1878: mol_type = other DNA
atggccttaccagtgaccgccttgctcctgccgctggccttgctgctccacgccgccaggccggacatccagatgacacagagccctagcagcctgtctgccagcgtgggagacagagtgaccatcacatgcaaggccagcgaccacatcaacaactggctggcctggtatcagcagaagcctggacaggcccctaagctgctgatctacggcgctaccacactggaaacaggcgtgcccagcagattttctggcagcggctctggcaccgactacaccctgacaatatccagcctccagcctgaggacttcgccacctactactgtcagcagagctggaacaccccttggacattcggccagggcaccaagctggaaatcaagagactcgagggacagcctaaggccaatcctaccgtgacactgttccctccaagcagcgaagaactccaggccaacaaggccacacttgtgtgcctgatctccgacttctaccctggggctgtgacagtggcttggaaggccgatggatctcctgtgaaagccggcgtggaaaccaccaagccatccaagcagagcaacaacaaatacgccgccagctcctacctgagcctgacacctgagcagtggaagtcccacagatcctacagctgccaagtgacccacgaaggcagcaccgtggaaaagacagtggcccctacagagtgcagcggcagagccgattgcggctttaccagcgagagctaccagcagggcgtgctgagcgccaccatcctgtacgagatcctgctgggcaaggccaccctgtacgccgtgctggtgtctgccctggtgctgatggctatggtcaagcggaaggacagccggggaagggccaagcgatctggatctggagcaacaaacttctcactactcaaacaagcaggtgacgtggaggagaatcccgggcctactagtatggactggatttggcgcatccttttccttgtcggcgctgctaccggcgcgcattccttcgaacaagttcagcttcaacagcctggcgctgagctggtcaaacctggcgcttctgtgaagatgagctgcaaagccagcggctacgccttcagcagctcttggatcaactggatgaagcagaaacccggccagggactcgaatggatcggccaaatctatcccggcgacggcgacaccaactacaacggcaagttcaagggcagagccacactgaccgccgatacctctagcagcacagcctacatgcagctgagcagcctgaccagcgaagatagcgccgtgtacttctgtgcccggtccatcacaacagtcgtgggctgcgctatggactattggggccagggaacaagcgtgaccgtgtctagtacgcgtgcctctacaaagggaccctccgtgtttcctctggctcccagcagcaagtctacaagcggaggaacagccgctctgggctgcctggtcaaggattactttcccgagcctgtgaccgtgtcctggaatagcggagcactgacaagcggcgtgcacacctttccagccgtgctgcaaagcagcggcctgtactctctgagcagcgtggtcacagtgcctagctctagcctgggcacccagacctacatctgcaatgtgaaccacaagcctagcaacaccaaggtggacaagagagtggaacccaagagctgtatccccgaggacacattcttcccaagccccgagagcagctgcgacgtgaagctggtggaaaagagcttcgagacagacaccaacctgaacttccagaacctgagcgtgatcggcttcagaatcctgctgctgaaagtggccggctttaacctgctgatgaccctgcggctgtggtccagc

SEQ ID NO: 34038 - DNA, 1356 bp, synthetic construct
  source 1..1356: mol_type = other DNA
atggccttaccagtgaccgccttgctcctgccgctggccttgctgctccacgccgccaggccggacatccagatgacacagagccctagcagcctgtctgccagcgtgggagacagagtgaccatcacatgcaaggccagcgaccacatcaacaactggctggcctggtatcagcagaagcctggacaggcccctaagctgctgatctacggcgctaccacactggaaacaggcgtgcccagcagattttctggcagcggctctggcaccgactacaccctgacaatatccagcctccagcctgaggacttcgccacctactactgtcagcagagctggaacaccccttggacattcggccagggcaccaagctggaaatcaagagaggcggaggcggaagtggaggcggaggatctggcggcggaggctctcaagttcagcttcaacagcctggcgctgagctggtcaaacctggcgcttctgtgaagatgagctgcaaagccagcggctacgccttcagcagctcttggatcaactggatgaagcagaaacccggccagggactcgaatggatcggccaaatctatcccggcgacggcgacaccaactacaacggcaagttcaagggcagagccacactgaccgccgatacctctagcagcacagcctacatgcagctgagcagcctgaccagcgaagatagcgccgtgtacttctgtgcccggtccatcacaacagtcgtgggctgcgctatggactattggggccagggaacaagcgtgaccgtgtctagtacgcgtgacggtaacgaggagatgggaggaatcactcaaaccccttacaaagtctcaatttcaggaacaactgttatccttacatgtccccagtatcctggcagcgagatcctttggcagcataacgacaagaatatagggggagatgaagacgataagaatatcggatctgacgaggatcacttgagcctgaaagagttctccgagcttgaacaaagcggatattatgtgtgctatccgcgcgggtcaaagccggaagacgctaacttttacctttatctccgagccagagtgtgcgaaaattgcatggaaatggacgttatgtccgttgctacaatagttatcgtagatatatgcatcacgggtggactgcttctgctggtttattattggtccaagaatagaaaggccaaagctaaacccgtgaccagaggcgctggcgcaggcggaaggcaaaggggacaaaacaaagaacggccaccaccagtgccaaatccagattatgagcctattcggaaaggacagagggacctgtactctggcctgaatcagagaagaatc

SEQ ID NO: 34039 - DNA, 1251 bp, synthetic construct
  source 1..1251: mol_type = other DNA
atggccttaccagtgaccgccttgctcctgccgctggccttgctgctccacgccgccaggccggacatccagatgacacagagccctagcagcctgtctgccagcgtgggagacagagtgaccatcacatgcaaggccagcgaccacatcaacaactggctggcctggtatcagcagaagcctggacaggcccctaagctgctgatctacggcgctaccacactggaaacaggcgtgcccagcagattttctggcagcggctctggcaccgactacaccctgacaatatccagcctccagcctgaggacttcgccacctactactgtcagcagagctggaacaccccttggacattcggccagggcaccaagctggaaatcaagagaggcggaggcggaagtggaggcggaggatctggcggcggaggctctcaagttcagcttcaacagcctggcgctgagctggtcaaacctggcgcttctgtgaagatgagctgcaaagccagcggctacgccttcagcagctcttggatcaactggatgaagcagaaacccggccagggactcgaatggatcggccaaatctatcccggcgacggcgacaccaactacaacggcaagttcaagggcagagccacactgaccgccgatacctctagcagcacagcctacatgcagctgagcagcctgaccagcgaagatagcgccgtgtacttctgtgcccggtccatcacaacagtcgtgggctgcgctatggactattggggccagggaacaagcgtgaccgtgtctagtacgcgtttcaagatccccatcgaggaactggaagatcgggtgttcgtgaactgcaacacctctatcacctgggtggaaggcaccgtgggaacactgctgagcgacatcaccagactggacctcggcaagcggattctggaccctcggggcatctacagatgcaacggcaccgacatctacaaggacaaagaaagcaccgtgcaggtccactacagaatgtgccagtcctgcgtggaactggaccctgctacagtggccggcatcatcgtgaccgatgtgatcgctactctgctgctggctctgggagtgttctgcttcgccggacacgaaacaggcagactgtctggcgctgccgatacacaggccctgctgagaaacgaccaagtgtatcagcccctgcgcgacagagatgatgcccagtattctcacctcggcggcaactgggctagaaacaag

SEQ ID NO: 34040 - DNA, 1281 bp, synthetic construct
  source 1..1281: mol_type = other DNA
atggccttaccagtgaccgccttgctcctgccgctggccttgctgctccacgccgccaggccggacatccagatgacacagagccctagcagcctgtctgccagcgtgggagacagagtgaccatcacatgcaaggccagcgaccacatcaacaactggctggcctggtatcagcagaagcctggacaggcccctaagctgctgatctacggcgctaccacactggaaacaggcgtgcccagcagattttctggcagcggctctggcaccgactacaccctgacaatatccagcctccagcctgaggacttcgccacctactactgtcagcagagctggaacaccccttggacattcggccagggcaccaagctggaaatcaagagaggcggaggcggaagtggaggcggaggatctggcggcggaggctctcaagttcagcttcaacagcctggcgctgagctggtcaaacctggcgcttctgtgaagatgagctgcaaagccagcggctacgccttcagcagctcttggatcaactggatgaagcagaaacccggccagggactcgaatggatcggccaaatctatcccggcgacggcgacaccaactacaacggcaagttcaagggcagagccacactgaccgccgatacctctagcagcacagcctacatgcagctgagcagcctgaccagcgaagatagcgccgtgtacttctgtgcccggtccatcacaacagtcgtgggctgcgctatggactattggggccagggaacaagcgtgaccgtgtctagtacgcgtcagagcatcaagggcaaccacctggtcaaggtgtacgactaccaagaggacggcagcgtgctgctgacatgtgatgccgaggccaagaacatcacctggtttaaggacggcaagatgatcggcttcctgaccgaggacaagaagaagtggaacctgggcagcaacgctaaggaccccagaggcatgtatcagtgcaagggcagccagaacaagagcaagcccctccaggtgtactaccggatgtgccagaactgcatcgagctgaacgccgctaccatcagcggctttctgttcgccgagatcgtgtccatcttcgtgctggccgtgggcgtgtactttatcgctggacaggatggcgtgcggcagagcagagcttccgataagcaaaccctgctgcctaacgaccagctgtaccagcctctgaaggacagagaggacgaccagtacagccacctccagggcaatcagctgagaagaaac

SEQ ID NO: 34041 - DNA, 1230 bp, synthetic construct
  source 1..1230: mol_type = other DNA
atggccttaccagtgaccgccttgctcctgccgctggccttgctgctccacgccgccaggccggacatccagatgacacagagccctagcagcctgtctgccagcgtgggagacagagtgaccatcacatgcaaggccagcgaccacatcaacaactggctggcctggtatcagcagaagcctggacaggcccctaagctgctgatctacggcgctaccacactggaaacaggcgtgcccagcagattttctggcagcggctctggcaccgactacaccctgacaatatccagcctccagcctgaggacttcgccacctactactgtcagcagagctggaacaccccttggacattcggccagggcaccaagctggaaatcaagagaggcggaggcggaagtggaggcggaggatctggcggcggaggctctcaagttcagcttcaacagcctggcgctgagctggtcaaacctggcgcttctgtgaagatgagctgcaaagccagcggctacgccttcagcagctcttggatcaactggatgaagcagaaacccggccagggactcgaatggatcggccaaatctatcccggcgacggcgacaccaactacaacggcaagttcaagggcagagccacactgaccgccgatacctctagcagcacagcctacatgcagctgagcagcctgaccagcgaagatagcgccgtgtacttctgtgcccggtccatcacaacagtcgtgggctgcgctatggactattggggccagggaacaagcgtgaccgtgtctagtacgcgtcagagttttgggttgttggaccctaaattgtgctatctgttggacggaatcctgttcatttacggagtgatcctgaccgcattgttcctgcgggttaagttttccagatccgcagacgcacccgcttaccaacaagggcagaaccaactctacaatgaacttaatttggggcggagggaagagtacgacgttctggacaaaaggaggggacgagatcccgagatgggcggaaagcctcagcgaaggaagaatccgcaagaggggctttataacgaactccagaaagataaaatggcagaagcctatagtgagattgggatgaagggagaaaggaggaggggtaaaggtcacgatgggttgtaccaaggattgagcacagccactaaagatacctatgatgcgctccacatgcaggccctgccgccaaga

SEQ ID NO: 34042 - DNA, 1515 bp, synthetic construct
  source 1..1515: mol_type = other DNA
atggccttaccagtgaccgccttgctcctgccgctggccttgctgctccacgccgccaggccggacatccagatgacacagagccctagcagcctgtctgccagcgtgggagacagagtgaccatcacatgcaaggccagcgaccacatcaacaactggctggcctggtatcagcagaagcctggacaggcccctaagctgctgatctacggcgctaccacactggaaacaggcgtgcccagcagattttctggcagcggctctggcaccgactacaccctgacaatatccagcctccagcctgaggacttcgccacctactactgtcagcagagctggaacaccccttggacattcggccagggcaccaagctggaaatcaagagaggcggaggcggaagtggaggcggaggatctggcggcggaggctctcaagttcagcttcaacagcctggcgctgagctggtcaaacctggcgcttctgtgaagatgagctgcaaagccagcggctacgccttcagcagctcttggatcaactggatgaagcagaaacccggccagggactcgaatggatcggccaaatctatcccggcgacggcgacaccaactacaacggcaagttcaagggcagagccacactgaccgccgatacctctagcagcacagcctacatgcagctgagcagcctgaccagcgaagatagcgccgtgtacttctgtgcccggtccatcacaacagtcgtgggctgcgctatggactattggggccagggaacaagcgtgaccgtgtctagtacgcgtggaatgaggactgaggatcttcccaaagctgtcgtctttctcgaaccccaatggtatcgggtgctcgaaaaagactctgtgacactgaaatgccaaggggcctactctcccgaggacaactccacacagtggtttcataatgagtccctcatcagctctcaggccagctcttatttcattgatgccgctacagtggacgactccggcgagtatcggtgtcagaccaatctgtctacactgtctgaccccgtgcagcttgaggtccacattggatggttgctcttgcaagccccacgctgggttttcaaagaggaagatccaatccatctgcggtgccacagctggaaaaacaccgctctccacaaagtcacatacctgcaaaatggcaaaggacgcaaatacttccatcacaattccgatttttacattccgaaggctaccctgaaagacagcggcagctatttctgccggggactcgtcggctccaagaatgtgtcctccgaaaccgtgaatatcacgattacccaaggactggctgtgcctacaatctctagcttctttccgcctggataccaagtctccttctgtcttgtgatggtcctcctgtttgctgtggacacaggactgtacttttccgtgaaaacgaacatccgcagctccacacgcgattggaaagatcacaagtttaaatggcgcaaagatccccaggacaag

SEQ ID NO: 34043 - DNA, 1440 bp, synthetic construct
  source 1..1440: mol_type = other DNA
atggccttaccagtgaccgccttgctcctgccgctggccttgctgctccacgccgccaggccggacatccagatgacacagagccctagcagcctgtctgccagcgtgggagacagagtgaccatcacatgcaaggccagcgaccacatcaacaactggctggcctggtatcagcagaagcctggacaggcccctaagctgctgatctacggcgctaccacactggaaacaggcgtgcccagcagattttctggcagcggctctggcaccgactacaccctgacaatatccagcctccagcctgaggacttcgccacctactactgtcagcagagctggaacaccccttggacattcggccagggcaccaagctggaaatcaagagaggcggaggcggaagtggaggcggaggatctggcggcggaggctctcaagttcagcttcaacagcctggcgctgagctggtcaaacctggcgcttctgtgaagatgagctgcaaagccagcggctacgccttcagcagctcttggatcaactggatgaagcagaaacccggccagggactcgaatggatcggccaaatctatcccggcgacggcgacaccaactacaacggcaagttcaagggcagagccacactgaccgccgatacctctagcagcacagcctacatgcagctgagcagcctgaccagcgaagatagcgccgtgtacttctgtgcccggtccatcacaacagtcgtgggctgcgctatggactattggggccagggaacaagcgtgaccgtgtctagtacgcgtggaatgaggactgaggatcttcccaaagctgtcgtctttctcgaaccccaatggtatcgggtgctcgaaaaagactctgtgacactgaaatgccaaggggcctactctcccgaggacaactccacacagtggtttcataatgagtccctcatcagctctcaggccagctcttatttcattgatgccgctacagtggacgactccggcgagtatcggtgtcagaccaatctgtctacactgtctgaccccgtgcagcttgaggtccacattggatggttgctcttgcaagccccacgctgggttttcaaagaggaagatccaatccatctgcggtgccacagctggaaaaacaccgctctccacaaagtcacatacctgcaaaatggcaaaggacgcaaatacttccatcacaattccgatttttacattccgaaggctaccctgaaagacagcggcagctatttctgccggggactcgtcggctccaagaatgtgtcctccgaaaccgtgaatatcacgattacccaaggactggctgtgcctacaatctctagcttctttccgcctggataccaagtctccttctgtcttgtgatggtcctcctgtttgctgtggacacaggactgtacttttccgtg

SEQ ID NO: 34044 - DNA, 1443 bp, synthetic construct
  source 1..1443: mol_type = other DNA
atggccttaccagtgaccgccttgctcctgccgctggccttgctgctccacgccgccaggccggacatccagatgacacagagccctagcagcctgtctgccagcgtgggagacagagtgaccatcacatgcaaggccagcgaccacatcaacaactggctggcctggtatcagcagaagcctggacaggcccctaagctgctgatctacggcgctaccacactggaaacaggcgtgcccagcagattttctggcagcggctctggcaccgactacaccctgacaatatccagcctccagcctgaggacttcgccacctactactgtcagcagagctggaacaccccttggacattcggccagggcaccaagctggaaatcaagagaggcggaggcggaagtggaggcggaggatctggcggcggaggctctcaagttcagcttcaacagcctggcgctgagctggtcaaacctggcgcttctgtgaagatgagctgcaaagccagcggctacgccttcagcagctcttggatcaactggatgaagcagaaacccggccagggactcgaatggatcggccaaatctatcccggcgacggcgacaccaactacaacggcaagttcaagggcagagccacactgaccgccgatacctctagcagcacagcctacatgcagctgagcagcctgaccagcgaagatagcgccgtgtacttctgtgcccggtccatcacaacagtcgtgggctgcgctatggactattggggccagggaacaagcgtgaccgtgtctagtacgcgtggaatgaggactgaggatcttcccaaagctgtcgtctttctcgaaccccaatggtatcgggtgctcgaaaaagactctgtgacactgaaatgccaaggggcctactctcccgaggacaactccacacagtggtttcataatgagtccctcatcagctctcaggccagctcttatttcattgatgccgctacagtggacgactccggcgagtatcggtgtcagaccaatctgtctacactgtctgaccccgtgcagcttgaggtccacattggatggttgctcttgcaagccccacgctgggttttcaaagaggaagatccaatccatctgcggtgccacagctggaaaaacaccgctctccacaaagtcacatacctgcaaaatggcaaaggacgcaaatacttccatcacaattccgatttttacattccgaaggctaccctgaaagacagcggcagctatttctgccggggactcgtcggctccaagaatgtgtcctccgaaaccgtgaatatcacgattacccaaggactggctgtgcctacaatctctagcttctttccgcctggataccaagtctccttctgtcttgtgatggtcctcctgtttgctgtggacacaggactgtacttttccgtgaaa

SEQ ID NO: 34045 - DNA, 2175 bp, synthetic construct
  source 1..2175: mol_type = other DNA
atggccttaccagtgaccgccttgctcctgccgctggccttgctgctccacgccgccaggccggacatccagatgacacagagccctagcagcctgtctgccagcgtgggagacagagtgaccatcacatgcaaggccagcgaccacatcaacaactggctggcctggtatcagcagaagcctggacaggcccctaagctgctgatctacggcgctaccacactggaaacaggcgtgcccagcagattttctggcagcggctctggcaccgactacaccctgacaatatccagcctccagcctgaggacttcgccacctactactgtcagcagagctggaacaccccttggacattcggccagggcaccaagctggaaatcaagagactcgagggacagcctaaggccaatcctaccgtgacactgttccctccaagcagcgaagaactccaggccaacaaggccacacttgtgtgcctgatctccgacttctaccctggggctgtgacagtggcttggaaggccgatggatctcctgtgaaagccggcgtggaaaccaccaagccatccaagcagagcaacaacaaatacgccgccagctcctacctgagcctgacacctgagcagtggaagtcccacagatcctacagctgccaagtgacccacgaaggcagcaccgtggaaaagacagtggcccctacagagtgcagcggatcccagagcttcggcctgctggaccccaagctgtgctacctgctggatggcatcctgttcatctacggcgtgatcctgaccgccctgttcctgagagtgaagttcagcagaagcgccgacgcccctgcctaccagcagggacagaaccaactgtacaacgagctgaacctgggcagacgggaagagtacgacgtgctggacaagcggagaggcagggaccctgagatgggcggaaagccccagcggagaaagaacccccaggaaggactgtataacgaactccagaaagacaagatggccgaagcctacagcgagatcggcatgaagggcgagcggagaagaggcaagggccacgatggcctgtaccagggcctgagcaccgccaccaaggacacctatgacgccctgcacatgcaggccctgcctccaagaagggccaagcgatctggatctggagcaacaaacttctcactactcaaacaagcaggtgacgtggaggagaatcccgggcctactagtatggactggatttggcgcatccttttccttgtcggcgctgctaccggcgcgcattccttcgaacaagttcagcttcaacagcctggcgctgagctggtcaaacctggcgcttctgtgaagatgagctgcaaagccagcggctacgccttcagcagctcttggatcaactggatgaagcagaaacccggccagggactcgaatggatcggccaaatctatcccggcgacggcgacaccaactacaacggcaagttcaagggcagagccacactgaccgccgatacctctagcagcacagcctacatgcagctgagcagcctgaccagcgaagatagcgccgtgtacttctgtgcccggtccatcacaacagtcgtgggctgcgctatggactattggggccagggaacaagcgtgaccgtgtctagtacgcgtgcctctacaaagggaccctccgtgtttcctctggctcccagcagcaagtctacaagcggaggaacagccgctctgggctgcctggtcaaggattactttcccgagcctgtgaccgtgtcctggaatagcggagcactgacaagcggcgtgcacacctttccagccgtgctgcaaagcagcggcctgtactctctgagcagcgtggtcacagtgcctagctctagcctgggcacccagacctacatctgcaatgtgaaccacaagcctagcaacaccaaggtggacaagagagtggaacccaagagctgtggtaccatcactcaaggtttggcagtgtcaaccatctcatcattctttccacctggctaccaagtgtccttctgcctggtcatggtgctgctgttcgccgtggataccggcctgtacttcagcgtcaagaccaacatccggtccagcaccagagactggaaggaccacaagttcaagtggcggaaggaccctcaggacaag

SEQ ID NO: 34046 - DNA, 2220 bp, synthetic construct
  source 1..2220: mol_type = other DNA
atggccttaccagtgaccgccttgctcctgccgctggccttgctgctccacgccgccaggccggacatccagatgacacagagccctagcagcctgtctgccagcgtgggagacagagtgaccatcacatgcaaggccagcgaccacatcaacaactggctggcctggtatcagcagaagcctggacaggcccctaagctgctgatctacggcgctaccacactggaaacaggcgtgcccagcagattttctggcagcggctctggcaccgactacaccctgacaatatccagcctccagcctgaggacttcgccacctactactgtcagcagagctggaacaccccttggacattcggccagggcaccaagctggaaatcaagagactcgaggacctgaagaacgtgttcccacctgaggtggccgtgttcgagcctagcgaggccgagatcagccacacccagaaagccaccctcgtgtgcctggctaccggcttctaccccgaccatgtggaactgtcttggtgggtcaacggcaaagaggtgcacagcggcgtgtctaccgacccccagccactgaaagaacagcccgccctgaacgacagccggtactgcctgagcagcagactgagagtgtccgccaccttctggcagaacccccggaaccacttcagatgccaggtgcagttctacggcctgagcgagaacgacgagtggacccaggacagagccaagcccgtgacccagatcgtgtctgccgaagcctggggcagagccgattgcggatcccagagcttcggcctgctggaccccaagctgtgctacctgctggatggcatcctgttcatctacggcgtgatcctgaccgccctgttcctgagagtgaagttcagcagaagcgccgacgcccctgcctaccagcagggacagaaccaactgtacaacgagctgaacctgggcagacgggaagagtacgacgtgctggacaagcggagaggcagggaccctgagatgggcggaaagccccagcggagaaagaacccccaggaaggactgtataacgaactccagaaagacaagatggccgaagcctacagcgagatcggcatgaagggcgagcggagaagaggcaagggccacgatggcctgtaccagggcctgagcaccgccaccaaggacacctatgacgccctgcacatgcaggccctgcctccaagaagggccaagcgatctggatctggagcaacaaacttctcactactcaaacaagcaggtgacgtggaggagaatcccgggcctactagtatggactggatttggcgcatccttttccttgtcggcgctgctaccggcgcgcattccttcgaacaagttcagcttcaacagcctggcgctgagctggtcaaacctggcgcttctgtgaagatgagctgcaaagccagcggctacgccttcagcagctcttggatcaactggatgaagcagaaacccggccagggactcgaatggatcggccaaatctatcccggcgacggcgacaccaactacaacggcaagttcaagggcagagccacactgaccgccgatacctctagcagcacagcctacatgcagctgagcagcctgaccagcgaagatagcgccgtgtacttctgtgcccggtccatcacaacagtcgtgggctgcgctatggactattggggccagggaacaagcgtgaccgtgtctagtacgcgtatccagaaccctgatcctgccgtgtaccagctgcgggatagcaagagcagcgacaagagcgtgtgtctgttcaccgacttcgacagccagaccaacgtgtcccagagcaaggactccgacgtgtacatcaccgataagaccgtgctggacatgcggagcatggacttcaagagcaactccgccgtggcctggtccaacaagtccgatttcgcctgcgccaacgccttcaacaacagcattatccccgaggacacattcttcccaagccccgagagcagctgcggtaccatcactcaaggtttggcagtgtcaaccatctcatcattctttccacctggctaccaagtgtccttctgcctggtcatggtgctgctgttcgccgtggataccggcctgtacttcagcgtcaagaccaacatccggtccagcaccagagactggaaggaccacaagttcaagtggcggaaggaccctcaggacaag

SEQ ID NO: 34047 - DNA, 2145 bp, synthetic construct
  source 1..2145: mol_type = other DNA
atggccttaccagtgaccgccttgctcctgccgctggccttgctgctccacgccgccaggccggacatccagatgacacagagccctagcagcctgtctgccagcgtgggagacagagtgaccatcacatgcaaggccagcgaccacatcaacaactggctggcctggtatcagcagaagcctggacaggcccctaagctgctgatctacggcgctaccacactggaaacaggcgtgcccagcagattttctggcagcggctctggcaccgactacaccctgacaatatccagcctccagcctgaggacttcgccacctactactgtcagcagagctggaacaccccttggacattcggccagggcaccaagctggaaatcaagagactcgaggacctgaagaacgtgttcccacctgaggtggccgtgttcgagcctagcgaggccgagatcagccacacccagaaagccaccctcgtgtgcctggctaccggcttctaccccgaccatgtggaactgtcttggtgggtcaacggcaaagaggtgcacagcggcgtgtctaccgacccccagccactgaaagaacagcccgccctgaacgacagccggtactgcctgagcagcagactgagagtgtccgccaccttctggcagaacccccggaaccacttcagatgccaggtgcagttctacggcctgagcgagaacgacgagtggacccaggacagagccaagcccgtgacccagatcgtgtctgccgaagcctggggcagagccgattgcggatcccagagcttcggcctgctggaccccaagctgtgctacctgctggatggcatcctgttcatctacggcgtgatcctgaccgccctgttcctgagagtgaagttcagcagaagcgccgacgcccctgcctaccagcagggacagaaccaactgtacaacgagctgaacctgggcagacgggaagagtacgacgtgctggacaagcggagaggcagggaccctgagatgggcggaaagccccagcggagaaagaacccccaggaaggactgtataacgaactccagaaagacaagatggccgaagcctacagcgagatcggcatgaagggcgagcggagaagaggcaagggccacgatggcctgtaccagggcctgagcaccgccaccaaggacacctatgacgccctgcacatgcaggccctgcctccaagaagggccaagcgatctggatctggagcaacaaacttctcactactcaaacaagcaggtgacgtggaggagaatcccgggcctactagtatggactggatttggcgcatccttttccttgtcggcgctgctaccggcgcgcattccttcgaacaagttcagcttcaacagcctggcgctgagctggtcaaacctggcgcttctgtgaagatgagctgcaaagccagcggctacgccttcagcagctcttggatcaactggatgaagcagaaacccggccagggactcgaatggatcggccaaatctatcccggcgacggcgacaccaactacaacggcaagttcaagggcagagccacactgaccgccgatacctctagcagcacagcctacatgcagctgagcagcctgaccagcgaagatagcgccgtgtacttctgtgcccggtccatcacaacagtcgtgggctgcgctatggactattggggccagggaacaagcgtgaccgtgtctagtacgcgtatccagaaccctgatcctgccgtgtaccagctgcgggatagcaagagcagcgacaagagcgtgtgtctgttcaccgacttcgacagccagaccaacgtgtcccagagcaaggactccgacgtgtacatcaccgataagaccgtgctggacatgcggagcatggacttcaagagcaactccgccgtggcctggtccaacaagtccgatttcgcctgcgccaacgccttcaacaacagcattatccccgaggacacattcttcccaagccccgagagcagctgcggtaccatcactcaaggtttggcagtgtcaaccatctcatcattctttccacctggctaccaagtgtccttctgcctggtcatggtgctgctgttcgccgtggataccggcctgtacttcagcgtc

SEQ ID NO: 34048 - DNA, 2148 bp, synthetic construct
  source 1..2148: mol_type = other DNA
atggccttaccagtgaccgccttgctcctgccgctggccttgctgctccacgccgccaggccggacatccagatgacacagagccctagcagcctgtctgccagcgtgggagacagagtgaccatcacatgcaaggccagcgaccacatcaacaactggctggcctggtatcagcagaagcctggacaggcccctaagctgctgatctacggcgctaccacactggaaacaggcgtgcccagcagattttctggcagcggctctggcaccgactacaccctgacaatatccagcctccagcctgaggacttcgccacctactactgtcagcagagctggaacaccccttggacattcggccagggcaccaagctggaaatcaagagactcgaggacctgaagaacgtgttcccacctgaggtggccgtgttcgagcctagcgaggccgagatcagccacacccagaaagccaccctcgtgtgcctggctaccggcttctaccccgaccatgtggaactgtcttggtgggtcaacggcaaagaggtgcacagcggcgtgtctaccgacccccagccactgaaagaacagcccgccctgaacgacagccggtactgcctgagcagcagactgagagtgtccgccaccttctggcagaacccccggaaccacttcagatgccaggtgcagttctacggcctgagcgagaacgacgagtggacccaggacagagccaagcccgtgacccagatcgtgtctgccgaagcctggggcagagccgattgcggatcccagagcttcggcctgctggaccccaagctgtgctacctgctggatggcatcctgttcatctacggcgtgatcctgaccgccctgttcctgagagtgaagttcagcagaagcgccgacgcccctgcctaccagcagggacagaaccaactgtacaacgagctgaacctgggcagacgggaagagtacgacgtgctggacaagcggagaggcagggaccctgagatgggcggaaagccccagcggagaaagaacccccaggaaggactgtataacgaactccagaaagacaagatggccgaagcctacagcgagatcggcatgaagggcgagcggagaagaggcaagggccacgatggcctgtaccagggcctgagcaccgccaccaaggacacctatgacgccctgcacatgcaggccctgcctccaagaagggccaagcgatctggatctggagcaacaaacttctcactactcaaacaagcaggtgacgtggaggagaatcccgggcctactagtatggactggatttggcgcatccttttccttgtcggcgctgctaccggcgcgcattccttcgaacaagttcagcttcaacagcctggcgctgagctggtcaaacctggcgcttctgtgaagatgagctgcaaagccagcggctacgccttcagcagctcttggatcaactggatgaagcagaaacccggccagggactcgaatggatcggccaaatctatcccggcgacggcgacaccaactacaacggcaagttcaagggcagagccacactgaccgccgatacctctagcagcacagcctacatgcagctgagcagcctgaccagcgaagatagcgccgtgtacttctgtgcccggtccatcacaacagtcgtgggctgcgctatggactattggggccagggaacaagcgtgaccgtgtctagtacgcgtatccagaaccctgatcctgccgtgtaccagctgcgggatagcaagagcagcgacaagagcgtgtgtctgttcaccgacttcgacagccagaccaacgtgtcccagagcaaggactccgacgtgtacatcaccgataagaccgtgctggacatgcggagcatggacttcaagagcaactccgccgtggcctggtccaacaagtccgatttcgcctgcgccaacgccttcaacaacagcattatccccgaggacacattcttcccaagccccgagagcagctgcggtaccatcactcaaggtttggcagtgtcaaccatctcatcattctttccacctggctaccaagtgtccttctgcctggtcatggtgctgctgttcgccgtggataccggcctgtacttcagcgtcaag

SEQ ID NO: 34049 - DNA, 2151 bp, synthetic construct
  source 1..2151: mol_type = other DNA
atggccttaccagtgaccgccttgctcctgccgctggccttgctgctccacgccgccaggccggacatccagatgacacagagccctagcagcctgtctgccagcgtgggagacagagtgaccatcacatgcaaggccagcgaccacatcaacaactggctggcctggtatcagcagaagcctggacaggcccctaagctgctgatctacggcgctaccacactggaaacaggcgtgcccagcagattttctggcagcggctctggcaccgactacaccctgacaatatccagcctccagcctgaggacttcgccacctactactgtcagcagagctggaacaccccttggacattcggccagggcaccaagctggaaatcaagagactcgaggacctgaagaacgtgttcccacctgaggtggccgtgttcgagcctagcgaggccgagatcagccacacccagaaagccaccctcgtgtgcctggctaccggcttctaccccgaccatgtggaactgtcttggtgggtcaacggcaaagaggtgcacagcggcgtgtctaccgacccccagccactgaaagaacagcccgccctgaacgacagccggtactgcctgagcagcagactgagagtgtccgccaccttctggcagaacccccggaaccacttcagatgccaggtgcagttctacggcctgagcgagaacgacgagtggacccaggacagagccaagcccgtgacccagatcgtgtctgccgaagcctggggcagagccgattgcggatcccagagcttcggcctgctggaccccaagctgtgctacctgctggatggcatcctgttcatctacggcgtgatcctgaccgccctgttcctgagagtgaagttcagcagaagcgccgacgcccctgcctaccagcagggacagaaccaactgtacaacgagctgaacctgggcagacgggaagagtacgacgtgctggacaagcggagaggcagggaccctgagatgggcggaaagccccagcggagaaagaacccccaggaaggactgtataacgaactccagaaagacaagatggccgaagcctacagcgagatcggcatgaagggcgagcggagaagaggcaagggccacgatggcctgtaccagggcctgagcaccgccaccaaggacacctatgacgccctgcacatgcaggccctgcctccaagaagggccaagcgatctggatctggagcaacaaacttctcactactcaaacaagcaggtgacgtggaggagaatcccgggcctactagtatggactggatttggcgcatccttttccttgtcggcgctgctaccggcgcgcattccttcgaacaagttcagcttcaacagcctggcgctgagctggtcaaacctggcgcttctgtgaagatgagctgcaaagccagcggctacgccttcagcagctcttggatcaactggatgaagcagaaacccggccagggactcgaatggatcggccaaatctatcccggcgacggcgacaccaactacaacggcaagttcaagggcagagccacactgaccgccgatacctctagcagcacagcctacatgcagctgagcagcctgaccagcgaagatagcgccgtgtacttctgtgcccggtccatcacaacagtcgtgggctgcgctatggactattggggccagggaacaagcgtgaccgtgtctagtacgcgtatccagaaccctgatcctgccgtgtaccagctgcgggatagcaagagcagcgacaagagcgtgtgtctgttcaccgacttcgacagccagaccaacgtgtcccagagcaaggactccgacgtgtacatcaccgataagaccgtgctggacatgcggagcatggacttcaagagcaactccgccgtggcctggtccaacaagtccgatttcgcctgcgccaacgccttcaacaacagcattatccccgaggacacattcttcccaagccccgagagcagctgcggtaccatcactcaaggtttggcagtgtcaaccatctcatcattctttccacctggctaccaagtgtccttctgcctggtcatggtgctgctgttcgccgtggataccggcctgtacttcagcgtcaagacc

SEQ ID NO: 34050 - DNA, 1962 bp, synthetic construct
  source 1..1962: mol_type = other DNA
atggccttaccagtgaccgccttgctcctgccgctggccttgctgctccacgccgccaggccggacatccagatgacacagagccctagcagcctgtctgccagcgtgggagacagagtgaccatcacatgcaaggccagcgaccacatcaacaactggctggcctggtatcagcagaagcctggacaggcccctaagctgctgatctacggcgctaccacactggaaacaggcgtgcccagcagattttctggcagcggctctggcaccgactacaccctgacaatatccagcctccagcctgaggacttcgccacctactactgtcagcagagctggaacaccccttggacattcggccagggcaccaagctggaaatcaagagactcgagggacagcctaaggccaatcctaccgtgacactgttccctccaagcagcgaagaactccaggccaacaaggccacacttgtgtgcctgatctccgacttctaccctggggctgtgacagtggcttggaaggccgatggatctcctgtgaaagccggcgtggaaaccaccaagccatccaagcagagcaacaacaaatacgccgccagctcctacctgagcctgacacctgagcagtggaagtcccacagatcctacagctgccaagtgacccacgaaggcagcaccgtggaaaagacagtggcccctacagagtgcagcggatccctgggagagcctcagctgtgctatatcctggacgccatcctgtttctgtacggcatcgtgctgaccctgctgtactgccggctgaagatccaagtgcggaaggccgccatcaccagctacgagaaatccgacggcgtgtacaccggcctgagcaccagaaatcaagagacatacgagacactgaagcacgaaaagcctccacaaagggccaagcgatctggatctggagcaacaaacttctcactactcaaacaagcaggtgacgtggaggagaatcccgggcctactagtatggactggatttggcgcatccttttccttgtcggcgctgctaccggcgcgcattccttcgaacaagttcagcttcaacagcctggcgctgagctggtcaaacctggcgcttctgtgaagatgagctgcaaagccagcggctacgccttcagcagctcttggatcaactggatgaagcagaaacccggccagggactcgaatggatcggccaaatctatcccggcgacggcgacaccaactacaacggcaagttcaagggcagagccacactgaccgccgatacctctagcagcacagcctacatgcagctgagcagcctgaccagcgaagatagcgccgtgtacttctgtgcccggtccatcacaacagtcgtgggctgcgctatggactattggggccagggaacaagcgtgaccgtgtctagtacgcgtgcctctacaaagggaccctccgtgtttcctctggctcccagcagcaagtctacaagcggaggaacagccgctctgggctgcctggtcaaggattactttcccgagcctgtgaccgtgtcctggaatagcggagcactgacaagcggcgtgcacacctttccagccgtgctgcaaagcagcggcctgtactctctgagcagcgtggtcacagtgcctagctctagcctgggcacccagacctacatctgcaatgtgaaccacaagcctagcaacaccaaggtggacaagagagtggaacccaagagctgtggtaccctcggagaaccacagctctgttacattctggatgctatcctgttcctctatgggatcgtcctgacactcctgtattgcagactcaaaattcaagttcgcaaagccgccattacctcttacgagaagagtgatggggtgtacacaggactgtctacccggaatcaagaaacctacgaaaccctcaaacatgagaagccacctcagtaa

SEQ ID NO: 34051 - DNA, 1869 bp, synthetic construct
  source 1..1869: mol_type = other DNA
atggccttaccagtgaccgccttgctcctgccgctggccttgctgctccacgccgccaggccggacatccagatgacacagagccctagcagcctgtctgccagcgtgggagacagagtgaccatcacatgcaaggccagcgaccacatcaacaactggctggcctggtatcagcagaagcctggacaggcccctaagctgctgatctacggcgctaccacactggaaacaggcgtgcccagcagattttctggcagcggctctggcaccgactacaccctgacaatatccagcctccagcctgaggacttcgccacctactactgtcagcagagctggaacaccccttggacattcggccagggcaccaagctggaaatcaagagactcgaggacctgaagaacgtgttcccacctgaggtggccgtgttcgagcctagcgaggccgagatcagccacacccagaaagccaccctcgtgtgcctggctaccggcttctaccccgaccatgtggaactgtcttggtgggtcaacggcaaagaggtgcacagcggcgtgtgtaccgacccccagccactgaaagaacagcccgccctgaacgacagccggtactgcctgagcagcagactgagagtgtccgccaccttctggcagaacccccggaaccacttcagatgccaggtgcagttctacggcctgagcgagaacgacgagtggacccaggacagagccaagcccgtgacccagatcgtgtctgccgaagcctggggcagagccgattgcggctttaccagcgagagctaccagcagggcgtgctgagcgcctactacatgtacttgttgctgctgctgaagtccgtggtgtacttcgccatcatcacatgctgcctgctgcggagaaccgccttctgctgcaacggcgagaagtctagggccaagcgatctggatctggagcaacaaacttctcactactcaaacaagcaggtgacgtggaggagaatcccgggcctactagtatggactggatttggcgcatccttttccttgtcggcgctgctaccggcgcgcattccttcgaacaagttcagcttcaacagcctggcgctgagctggtcaaacctggcgcttctgtgaagatgagctgcaaagccagcggctacgccttcagcagctcttggatcaactggatgaagcagaaacccggccagggactcgaatggatcggccaaatctatcccggcgacggcgacaccaactacaacggcaagttcaagggcagagccacactgaccgccgatacctctagcagcacagcctacatgcagctgagcagcctgaccagcgaagatagcgccgtgtacttctgtgcccggtccatcacaacagtcgtgggctgcgctatggactattggggccagggaacaagcgtgaccgtgtctagtacgcgtatccagaaccctgatcctgccgtgtaccagctgcgggatagcaagagcagcgacaagagcgtgtgtctgttcaccgacttcgacagccagaccaacgtgtcccagagcaaggactccgacgtgtacatcaccgataagtgcgtgctggacatgcggagcatggacttcaagagcaactccgccgtggcctggtccaacaagtccgatttcgcctgcgccaacgccttcaacaacagcattatccccgaggacacattcttcccaagccccgagagcagctgcgacgtgaagctggtggaaaagagcttcgagacagacaccaacctgaacttccagaacctgagcgtgatcggcttcagaatcctgctgctgaaagtggccggctttaacctgctgatgaccctgcggctgtggtccagc

SEQ ID NO: 34052 - DNA, 1890 bp, synthetic construct
  source 1..1890: mol_type = other DNA
atggccttaccagtgaccgccttgctcctgccgctggccttgctgctccacgccgccaggccggacatccagatgacacagagccctagcagcctgtctgccagcgtgggagacagagtgaccatcacatgcaaggccagcgaccacatcaacaactggctggcctggtatcagcagaagcctggacaggcccctaagctgctgatctacggcgctaccacactggaaacaggcgtgcccagcagattttctggcagcggctctggcaccgactacaccctgacaatatccagcctccagcctgaggacttcgccacctactactgtcagcagagctggaacaccccttggacattcggccagggcaccaagctggaaatcaagagactcgaggacaagcagctggacgccgacgtgtcccccaagcctaccatcttcctgccctctatcgccgagacaaagctccagaaggccggcacctacctgtgcctgctggaaaagttcttcccagatgtgattaagatccactggcaggaaaagaagtccaacaccatcctgggcagccaggaaggcaacaccatgaagaccaacgacacctacatgaagttcagctggctgaccgtgcccgagaagtccctggacaaagaacacagatgcatcgtgcggcacgaaaacaacaagaacggcgtggaccaggaaatcatcttcccacccatcaagaccgatgtgattacaatggaccccaaggacaactgctccaaggacgccaacgataccctgctgctccagctgaccaacaccagcgcctactacatgtacgagatcctgctgggcaaggccaccctgtacgccgtgctggtgtctgccctggtgctgatggctatggtcaagcggaaggacagccggggaagggccaagcgatctggatctggagcaacaaacttctcactactcaaacaagcaggtgacgtggaggagaatcccgggcctactagtatggactggatttggcgcatccttttccttgtcggcgctgctaccggcgcgcattccttcgaacaagttcagcttcaacagcctggcgctgagctggtcaaacctggcgcttctgtgaagatgagctgcaaagccagcggctacgccttcagcagctcttggatcaactggatgaagcagaaacccggccagggactcgaatggatcggccaaatctatcccggcgacggcgacaccaactacaacggcaagttcaagggcagagccacactgaccgccgatacctctagcagcacagcctacatgcagctgagcagcctgaccagcgaagatagcgccgtgtacttctgtgcccggtccatcacaacagtcgtgggctgcgctatggactattggggccagggaacaagcgtgaccgtgtctagtacgcgtagccagcctcacaccaagcccagcgtgttcgtgatgaagaacggcaccaacgtggcctgcctcgtgaaagagttctaccccaaggacatcaggatcaacctggtgtccagcaagaagatcaccgagttcgaccccgccatcgtgatctcccccagcggcaagtacaacgccgtgaagctggggaagtatgaggacagcaacagcgtgacctgctccgtgcagcacgacaacaagaccgtgcacagcaccgactttgaagtgaaaaccgactccaccgaccacgtgaagcccaaagagacagagaacaccaagcagcccagcaagagctgccacaagcccaaggccatcgtgcacaccgagaaagtgaacatgatgagcctgaccgtgatcggcttcagaatcctgctgctgaaagtggccggctttaacctgctgatgaccctgcggctgtggtccagctaa

SEQ ID NO: 34053 - DNA, 1890 bp, synthetic construct
  source 1..1890: mol_type = other DNA
atggccttaccagtgaccgccttgctcctgccgctggccttgctgctccacgccgccaggccggacatccagatgacacagagccctagcagcctgtctgccagcgtgggagacagagtgaccatcacatgcaaggccagcgaccacatcaacaactggctggcctggtatcagcagaagcctggacaggcccctaagctgctgatctacggcgctaccacactggaaacaggcgtgcccagcagattttctggcagcggctctggcaccgactacaccctgacaatatccagcctccagcctgaggacttcgccacctactactgtcagcagagctggaacaccccttggacattcggccagggcaccaagctggaaatcaagagactcgaggacaagcagctggacgccgacgtgtcccccaagcctaccatcttcctgccctctatcgccgagacaaagctccagaaggccggcacctacctgtgcctgctggaaaagttcttcccagatgtgattaagatccactggcaggaaaagaagtccaacaccatcctgggcagccaggaaggcaacaccatgaagaccaacgacacctacatgaagttcagctggctgaccgtgcccgagaagtccctggacaaagaacacagatgcatcgtgcggcacgaaaacaacaagaacggcgtggaccaggaaatcatcttcccacccatcaagaccgatgtgattacaatggaccccaaggacaactgctccaaggacgccaacgataccctgctgctccagctgaccaacaccagcgccaccatcctgtacgagatcctgctgggcaaggccaccctgtacgccgtgctggtgtctgccctggtgctgatggctatggtcaagcggaaggacagccggggaagggccaagcgatctggatctggagcaacaaacttctcactactcaaacaagcaggtgacgtggaggagaatcccgggcctactagtatggactggatttggcgcatccttttccttgtcggcgctgctaccggcgcgcattccttcgaacaagttcagcttcaacagcctggcgctgagctggtcaaacctggcgcttctgtgaagatgagctgcaaagccagcggctacgccttcagcagctcttggatcaactggatgaagcagaaacccggccagggactcgaatggatcggccaaatctatcccggcgacggcgacaccaactacaacggcaagttcaagggcagagccacactgaccgccgatacctctagcagcacagcctacatgcagctgagcagcctgaccagcgaagatagcgccgtgtacttctgtgcccggtccatcacaacagtcgtgggctgcgctatggactattggggccagggaacaagcgtgaccgtgtctagtacgcgtagccagcctcacaccaagcccagcgtgttcgtgatgaagaacggcaccaacgtggcctgcctcgtgaaagagttctaccccaaggacatcaggatcaacctggtgtccagcaagaagatcaccgagttcgaccccgccatcgtgatctcccccagcggcaagtacaacgccgtgaagctggggaagtatgaggacagcaacagcgtgacctgctccgtgcagcacgacaacaagaccgtgcacagcaccgactttgaagtgaaaaccgactccaccgaccacgtgaagcccaaagagacagagaacaccaagcagcccagcaagagctgccacaagcccaaggccatcgtgcacaccgagaaagtgaacatgatgagcctgaccgtgatcggcttcagaatcctgctgctgaaagtggccggctttaacctgctgatgaccctgcggctgtggtccagctaa

SEQ ID NO: 34054 - DNA, 1890 bp, synthetic construct
  source 1..1890: mol_type = other DNA
atggccttaccagtgaccgccttgctcctgccgctggccttgctgctccacgccgccaggccggacatccagatgacacagagccctagcagcctgtctgccagcgtgggagacagagtgaccatcacatgcaaggccagcgaccacatcaacaactggctggcctggtatcagcagaagcctggacaggcccctaagctgctgatctacggcgctaccacactggaaacaggcgtgcccagcagattttctggcagcggctctggcaccgactacaccctgacaatatccagcctccagcctgaggacttcgccacctactactgtcagcagagctggaacaccccttggacattcggccagggcaccaagctggaaatcaagagactcgaggacaagcagctggacgccgacgtgtcccccaagcctaccatcttcctgccctctatcgccgagacaaagctccagaaggccggcacctacctgtgcctgctggaaaagttcttcccagatgtgattaagatccactggcaggaaaagaagtccaacaccatcctgggcagccaggaaggcaacaccatgaagaccaacgacacctacatgaagttcagctggctgaccgtgcccgagaagtccctggacaaagaacacagatgcatcgtgcggcacgaaaacaacaagaacggcgtggaccaggaaatcatcttcccacccatcaagaccgatgtgattacaatggaccccaaggacaactgctccaaggacgccaacgataccctgctgctccagctgaccaacaccagcgcctactacatgtacgagatcctgctgggcaaggccaccctgtacgccgtgctggtgtctgccctggtgctgatggctatggtcaagcggaaggacagccggggaagggccaagcgatctggatctggagcaacaaacttctcactactcaaacaagcaggtgacgtggaggagaatcccgggcctactagtatggactggatttggcgcatccttttccttgtcggcgctgctaccggcgcgcattccttcgaacaagttcagcttcaacagcctggcgctgagctggtcaaacctggcgcttctgtgaagatgagctgcaaagccagcggctacgccttcagcagctcttggatcaactggatgaagcagaaacccggccagggactcgaatggatcggccaaatctatcccggcgacggcgacaccaactacaacggcaagttcaagggcagagccacactgaccgccgatacctctagcagcacagcctacatgcagctgagcagcctgaccagcgaagatagcgccgtgtacttctgtgcccggtccatcacaacagtcgtgggctgcgctatggactattggggccagggaacaagcgtgaccgtgtctagtacgcgtagccagcctcacaccaagcccagcgtgttcgtgatgaagaacggcaccaacgtggcctgcctcgtgaaagagttctaccccaaggacatcaggatcaacctggtgtccagcaagaagatcaccgagttcgaccccgccatcgtgatctcccccagcggcaagtacaacgccgtgaagctggggaagtacgaggacagcaacagcgtgacctgctccgtgcagcacgacaacaagaccgtgcacagcaccgactttgaagtgaaaaccgactccaccgaccacgtgaagcccaaagagacagagaacaccaagcagcccagcaagagctgccacaagcccaaggccatcgtgcacaccgagaaagtgaacatgatgagcctgaccgtgctgggcttcagaatcctgctgctgaaagtggccggctttaacctgctgatgaccctgcggctgtggtccagctaa

SEQ ID NO: 34055 - DNA, 1890 bp, synthetic construct
  source 1..1890: mol_type = other DNA
atggccttaccagtgaccgccttgctcctgccgctggccttgctgctccacgccgccaggccggacatccagatgacacagagccctagcagcctgtctgccagcgtgggagacagagtgaccatcacatgcaaggccagcgaccacatcaacaactggctggcctggtatcagcagaagcctggacaggcccctaagctgctgatctacggcgctaccacactggaaacaggcgtgcccagcagattttctggcagcggctctggcaccgactacaccctgacaatatccagcctccagcctgaggacttcgccacctactactgtcagcagagctggaacaccccttggacattcggccagggcaccaagctggaaatcaagagactcgaggacaagcagctggacgccgacgtgtcccccaagcctaccatcttcctgccctctatcgccgagacaaagctccagaaggccggcacctacctgtgcctgctggaaaagttcttcccagatgtgattaagatccactggcaggaaaagaagtccaacaccatcctgggcagccaggaaggcaacaccatgaagaccaacgacacctacatgaagttcagctggctgaccgtgcccgagaagtccctggacaaagaacacagatgcatcgtgcggcacgaaaacaacaagaacggcgtggaccaggaaatcatcttcccacccatcaagaccgatgtgattacaatggaccccaaggacaactgctccaaggacgccaacgataccctgctgctccagctgaccaacaccagcgccaccatcctgtacgagatcctgctgggcaaggccaccctgtacgccgtgctggtgtctgccctggtgctgatggctatggtcaagcggaaggacagccggggaagggccaagcgatctggatctggagcaacaaacttctcactactcaaacaagcaggtgacgtggaggagaatcccgggcctactagtatggactggatttggcgcatccttttccttgtcggcgctgctaccggcgcgcattccttcgaacaagttcagcttcaacagcctggcgctgagctggtcaaacctggcgcttctgtgaagatgagctgcaaagccagcggctacgccttcagcagctcttggatcaactggatgaagcagaaacccggccagggactcgaatggatcggccaaatctatcccggcgacggcgacaccaactacaacggcaagttcaagggcagagccacactgaccgccgatacctctagcagcacagcctacatgcagctgagcagcctgaccagcgaagatagcgccgtgtacttctgtgcccggtccatcacaacagtcgtgggctgcgctatggactattggggccagggaacaagcgtgaccgtgtctagtacgcgtagccagcctcacaccaagcccagcgtgttcgtgatgaagaacggcaccaacgtggcctgcctcgtgaaagagttctaccccaaggacatcaggatcaacctggtgtccagcaagaagatcaccgagttcgaccccgccatcgtgatctcccccagcggcaagtacaacgccgtgaagctggggaagtacgaggacagcaacagcgtgacctgctccgtgcagcacgacaacaagaccgtgcacagcaccgactttgaagtgaaaaccgactccaccgaccacgtgaagcccaaagagacagagaacaccaagcagcccagcaagagctgccacaagcccaaggccatcgtgcacaccgagaaagtgaacatgatgagcctgaccgtgctgggcttcagaatcctgctgctgaaagtggccggctttaacctgctgatgaccctgcggctgtggtccagctaa

SEQ ID NO: 34056 - DNA, 1872 bp, synthetic construct
  source 1..1872: mol_type = other DNA
atggccttaccagtgaccgccttgctcctgccgctggccttgctgctccacgccgccaggccggacatccagatgacacagagccctagcagcctgtctgccagcgtgggagacagagtgaccatcacatgcaaggccagcgaccacatcaacaactggctggcctggtatcagcagaagcctggacaggcccctaagctgctgatctacggcgctaccacactggaaacaggcgtgcccagcagattttctggcagcggctctggcaccgactacaccctgacaatatccagcctccagcctgaggacttcgccacctactactgtcagcagagctggaacaccccttggacattcggccagggcaccaagctggaaatcaagagactcgaggacctgaagaacgtgttcccacctgaggtggccgtgttcgagcctagcgaggccgagatcagccacacccagaaagccaccctcgtgtgcctggctaccggcttctaccccgaccatgtggaactgtcttggtgggtcaacggcaaagaggtgcacagcggcgtgtgtaccgacccccagccactgaaagaacagcccgccctgaacgacagccggtactgcctgagcagcagactgagagtgtccgccaccttctggcagaacccccggaaccacttcagatgccaggtgcagttctacggcctgagcgagaacgacgagtggacccaggacagagccaagcccgtgacccagatcgtgtctgccgaagcctggggcagagccgattgcggctttaccagcgagagctaccagcagggcgtgctgagcgccaccatcctgtacttgttgctgctgctgaagtccgtggtgtacttcgccatcatcacatgctgcctgctgcggagaaccgccttctgctgcaacggcgagaagtctagggccaagcgatctggatctggagcaacaaacttctcactactcaaacaagcaggtgacgtggaggagaatcccgggcctactagtatggactggatttggcgcatccttttccttgtcggcgctgctaccggcgcgcattccttcgaacaagttcagcttcaacagcctggcgctgagctggtcaaacctggcgcttctgtgaagatgagctgcaaagccagcggctacgccttcagcagctcttggatcaactggatgaagcagaaacccggccagggactcgaatggatcggccaaatctatcccggcgacggcgacaccaactacaacggcaagttcaagggcagagccacactgaccgccgatacctctagcagcacagcctacatgcagctgagcagcctgaccagcgaagatagcgccgtgtacttctgtgcccggtccatcacaacagtcgtgggctgcgctatggactattggggccagggaacaagcgtgaccgtgtctagtacgcgtatccagaaccctgatcctgccgtgtaccagctgcgggatagcaagagcagcgacaagagcgtgtgtctgttcaccgacttcgacagccagaccaacgtgtcccagagcaaggactccgacgtgtacatcaccgataagtgcgtgctggacatgcggagcatggacttcaagagcaactccgccgtggcctggtccaacaagtccgatttcgcctgcgccaacgccttcaacaacagcattatccccgaggacacattcttcccaagccccgagagcagctgcgacgtgaagctggtggaaaagagcttcgagacagacaccaacctgaacttccagaacctgagcgtgatcggcctgcggatgctgttcgccaaaaccgtggccgtgaacttcctgctgaccgccaagctgttcttcctctaa

SEQ ID NO: 34057 - DNA, 1959 bp, synthetic construct
  source 1..1959: mol_type = other DNA
atggccttaccagtgaccgccttgctcctgccgctggccttgctgctccacgccgccaggccggacatccagatgacacagagccctagcagcctgtctgccagcgtgggagacagagtgaccatcacatgcaaggccagcgaccacatcaacaactggctggcctggtatcagcagaagcctggacaggcccctaagctgctgatctacggcgctaccacactggaaacaggcgtgcccagcagattttctggcagcggctctggcaccgactacaccctgacaatatccagcctccagcctgaggacttcgccacctactactgtcagcagagctggaacaccccttggacattcggccagggcaccaagctggaaatcaagagactcgaggacctgaagaacgtgttcccacctgaggtggccgtgttcgagcctagcgaggccgagatcagccacacccagaaagccaccctcgtgtgcctggctaccggcttctaccccgaccatgtggaactgtcttggtgggtcaacggcaaagaggtgcacagcggcgtgtctaccgacccccagccactgaaagaacagcccgccctgaacgacagccggtactgcctgagcagcagactgagagtgtccgccaccttctggcagaacccccggaaccacttcagatgccaggtgcagttctacggcctgagcgagaacgacgagtggacccaggacagagccaagcccgtgacccagatcgtgtctgccgaagcctggggcagagccgattgcggatcctccaaggacgccaacgataccctgctgctccagctgaccaacaccagcgcctactacatgtacttgttgctgctgctgaagtccgtggtgtacttcgccatcatcacatgctgcctgctgcggagaaccgccttctgctgcaacggcgagaagtctagggccaagcgatctggatctggagcaacaaacttctcactactcaaacaagcaggtgacgtggaggagaatcccgggcctactagtatggactggatttggcgcatccttttccttgtcggcgctgctaccggcgcgcattccttcgaacaagttcagcttcaacagcctggcgctgagctggtcaaacctggcgcttctgtgaagatgagctgcaaagccagcggctacgccttcagcagctcttggatcaactggatgaagcagaaacccggccagggactcgaatggatcggccaaatctatcccggcgacggcgacaccaactacaacggcaagttcaagggcagagccacactgaccgccgatacctctagcagcacagcctacatgcagctgagcagcctgaccagcgaagatagcgccgtgtacttctgtgcccggtccatcacaacagtcgtgggctgcgctatggactattggggccagggaacaagcgtgaccgtgtctagtacgcgtatccagaaccctgatcctgccgtgtaccagctgcgggatagcaagagcagcgacaagagcgtgtgtctgttcaccgacttcgacagccagaccaacgtgtcccagagcaaggactccgacgtgtacatcaccgataagaccgtgctggacatgcggagcatggacttcaagagcaactccgccgtggcctggtccaacaagtccgatttcgcctgcgccaacgccttcaacaacagcattatccccgaggacacattcttcccaagccccgagagcagctgcggtaccgaagtgaaaaccgactccaccgaccacgtgaagcccaaagagacagagaacaccaagcagcccagcaagagctgccacaagcccaaggccatcgtgcacaccgagaaagtgaacatgatgagcctgaccgtgctgggcctgcggatgctgttcgccaaaaccgtggccgtgaacttcctgctgaccgccaagctgttcttcctctaa

SEQ ID NO: 34058 - DNA, 1869 bp, synthetic construct
  source 1..1869: mol_type = other DNA
atggccttaccagtgaccgccttgctcctgccgctggccttgctgctccacgccgccaggccggacatccagatgacacagagccctagcagcctgtctgccagcgtgggagacagagtgaccatcacatgcaaggccagcgaccacatcaacaactggctggcctggtatcagcagaagcctggacaggcccctaagctgctgatctacggcgctaccacactggaaacaggcgtgcccagcagattttctggcagcggctctggcaccgactacaccctgacaatatccagcctccagcctgaggacttcgccacctactactgtcagcagagctggaacaccccttggacattcggccagggcaccaagctggaaatcaagagactcgaggacctgaagaacgtgttcccacctgaggtggccgtgttcgagcctagcgaggccgagatcagccacacccagaaagccaccctcgtgtgcctggctaccggcttctaccccgaccatgtggaactgtcttggtgggtcaacggcaaagaggtgcacagcggcgtgtgtaccgacccccagccactgaaagaacagcccgccctgaacgacagccggtactgcctgagcagcagactgagagtgtccgccaccttctggcagaacccccggaaccacttcagatgccaggtgcagttctacggcctgagcgagaacgacgagtggacccaggacagagccaagcccgtgacccagatcgtgtctgccgaagcctggggcagagccgattgcgacgtgaagctggtggaaaagagcttcgagacagacaccaacctgaacttccagaacctgagcgtgatcggcttcagaatcctgctgctgaaagtggccggctttaacctgctgatgaccctgcggctgtggtccagcagggccaagcgatctggatctggagcaacaaacttctcactactcaaacaagcaggtgacgtggaggagaatcccgggcctactagtatggactggatttggcgcatccttttccttgtcggcgctgctaccggcgcgcattccttcgaacaagttcagcttcaacagcctggcgctgagctggtcaaacctggcgcttctgtgaagatgagctgcaaagccagcggctacgccttcagcagctcttggatcaactggatgaagcagaaacccggccagggactcgaatggatcggccaaatctatcccggcgacggcgacaccaactacaacggcaagttcaagggcagagccacactgaccgccgatacctctagcagcacagcctacatgcagctgagcagcctgaccagcgaagatagcgccgtgtacttctgtgcccggtccatcacaacagtcgtgggctgcgctatggactattggggccagggaacaagcgtgaccgtgtctagtacgcgtatccagaaccctgatcctgccgtgtaccagctgcgggatagcaagagcagcgacaagagcgtgtgtctgttcaccgacttcgacagccagaccaacgtgtcccagagcaaggactccgacgtgtacatcaccgataagtgcgtgctggacatgcggagcatggacttcaagagcaactccgccgtggcctggtccaacaagtccgatttcgcctgcgccaacgccttcaacaacagcattatccccgaggacacattcttcccaagccccgagagcagctgcggctttaccagcgagagctaccagcagggcgtgctgagcgccaccatcctgtacgagatcctgctgggcaaggccaccctgtacgccgtgctggtgtctgccctggtgctgatggctatggtcaagcggaaggacagccggggataa

SEQ ID NO: 34059 - DNA, 1869 bp, synthetic construct
  source 1..1869: mol_type = other DNA
atggccttaccagtgaccgccttgctcctgccgctggccttgctgctccacgccgccaggccggacatccagatgacacagagccctagcagcctgtctgccagcgtgggagacagagtgaccatcacatgcaaggccagcgaccacatcaacaactggctggcctggtatcagcagaagcctggacaggcccctaagctgctgatctacggcgctaccacactggaaacaggcgtgcccagcagattttctggcagcggctctggcaccgactacaccctgacaatatccagcctccagcctgaggacttcgccacctactactgtcagcagagctggaacaccccttggacattcggccagggcaccaagctggaaatcaagagactcgaggacctgaagaacgtgttcccacctgaggtggccgtgttcgagcctagcgaggccgagatcagccacacccagaaagccaccctcgtgtgcctggctaccggcttctaccccgaccatgtggaactgtcttggtgggtcaacggcaaagaggtgcacagcggcgtgtgtaccgacccccagccactgaaagaacagcccgccctgaacgacagccggtactgcctgagcagcagactgagagtgtccgccaccttctggcagaacccccggaaccacttcagatgccaggtgcagttctacggcctgagcgagaacgacgagtggacccaggacagagccaagcccgtgacccagatcgtgtctgccgaagcctggggcagagccgattgcggctttaccagcgagagctaccagcagggcgtgctgagcgccaccaacctgagcgtgatcggcttcagaatcctgctgctgaaagtggccggctttaacctgctgatgaccctgcggctgtggtccagcagggccaagcgatctggatctggagcaacaaacttctcactactcaaacaagcaggtgacgtggaggagaatcccgggcctactagtatggactggatttggcgcatccttttccttgtcggcgctgctaccggcgcgcattccttcgaacaagttcagcttcaacagcctggcgctgagctggtcaaacctggcgcttctgtgaagatgagctgcaaagccagcggctacgccttcagcagctcttggatcaactggatgaagcagaaacccggccagggactcgaatggatcggccaaatctatcccggcgacggcgacaccaactacaacggcaagttcaagggcagagccacactgaccgccgatacctctagcagcacagcctacatgcagctgagcagcctgaccagcgaagatagcgccgtgtacttctgtgcccggtccatcacaacagtcgtgggctgcgctatggactattggggccagggaacaagcgtgaccgtgtctagtacgcgtatccagaaccctgatcctgccgtgtaccagctgcgggatagcaagagcagcgacaagagcgtgtgtctgttcaccgacttcgacagccagaccaacgtgtcccagagcaaggactccgacgtgtacatcaccgataagtgcgtgctggacatgcggagcatggacttcaagagcaactccgccgtggcctggtccaacaagtccgatttcgcctgcgccaacgccttcaacaacagcattatccccgaggacacattcttcccaagccccgagagcagctgcgacgtgaagctggtggaaaagagcttcgagacagacaccaacctgaacttccagatcctgtacgagatcctgctgggcaaggccaccctgtacgccgtgctggtgtctgccctggtgctgatggctatggtcaagcggaaggacagccggggataa

SEQ ID NO: 34060 - DNA, 1869 bp, synthetic construct; identical to SEQ ID NO: 34058
  source 1..1869: mol_type = other DNA

SEQ ID NO: 34061 - DNA, 1869 bp, synthetic construct; identical to SEQ ID NO: 34059
  source 1..1869: mol_type = other DNA

SEQ ID NO: 34062 - DNA, 1866 bp, synthetic construct
  source 1..1866: mol_type = other DNA
atggccttaccagtgaccgccttgctcctgccgctggccttgctgctccacgccgccaggccggacatccagatgacacagagccctagcagcctgtctgccagcgtgggagacagagtgaccatcacatgcaaggccagcgaccacatcaacaactggctggcctggtatcagcagaagcctggacaggcccctaagctgctgatctacggcgctaccacactggaaacaggcgtgcccagcagattttctggcagcggctctggcaccgactacaccctgacaatatccagcctccagcctgaggacttcgccacctactactgtcagcagagctggaacaccccttggacattcggccagggcaccaagctggaaatcaagagactcgaggacctgaagaacgtgttcccacctgaggtggccgtgttcgagcctagcgaggccgagatcagccacacccagaaagccaccctcgtgtgcctggctaccggcttctaccccgaccatgtggaactgtcttggtgggtcaacggcaaagaggtgcacagcggcgtgtgtaccgacccccagccactgaaagaacagcccgccctgaacgacagccggtactgcctgagcagcagactgagagtgtccgccaccttctggcagaacccccggaaccacttcagatgccaggtgcagttctacggcctgagcgagaacgacgagtggacccaggacagagccaagcccgtgacccagatcgtgtctgccgaagcctggggcagagccgattgcgacgtgaagctggtggaaaagagcttcgagacagacaccaacctgaacttccagaacctgagcgtgatcggcttcagaatcctgctgctgaaagtggccggctttaacctgctgatgaccctgcggctgtggtccagcagggccaagcgatctggatctggagcaacaaacttctcactactcaaacaagcaggtgacgtggaggagaatcccgggcctactagtatggactggatttggcgcatccttttccttgtcggcgctgctaccggcgcgcattccttcgaacaagttcagcttcaacagcctggcgctgagctggtcaaacctggcgcttctgtgaagatgagctgcaaagccagcggctacgccttcagcagctcttggatcaactggatgaagcagaaacccggccagggactcgaatggatcggccaaatctatcccggcgacggcgacaccaactacaacggcaagttcaagggcagagccacactgaccgccgatacctctagcagcacagcctacatgcagctgagcagcctgaccagcgaagatagcgccgtgtacttctgtgcccggtccatcacaacagtcgtgggctgcgctatggactattggggccagggaacaagcgtgaccgtgtctagtacgcgtatccagaaccctgatcctgccgtgtaccagctgcgggatagcaagagcagcgacaagagcgtgtgtctgttcaccgacttcgacagccagaccaacgtgtcccagagcaaggactccgacgtgtacatcaccgataagtgcgtgctggacatgcggagcatggacttcaagagcaactccgccgtggcctggtccaacaagtccgatttcgcctgcgccaacgccttcaacaacagcattatccccgaggacacattcttcccaagccccgagagcagctgcggctttaccagcgagagctaccagcagggcgtgctgagcgccaccatcctgtacgagatcctgctgggcaaggccaccctgtacgccgtgctggtgtctgccctggtgctgatggctatggtcaagcggaaggacagccgggga

SEQ ID NO: 34063 - DNA, 1878 bp, synthetic construct
  source 1..1878: mol_type = other DNA
atggccttaccagtgaccgccttgctcctgccgctggccttgctgctccacgccgccaggccggacatccagatgacacagagccctagcagcctgtctgccagcgtgggagacagagtgaccatcacatgcaaggccagcgaccacatcaacaactggctggcctggtatcagcagaagcctggacaggcccctaagctgctgatctacggcgctaccacactggaaacaggcgtgcccagcagattttctggcagcggctctggcaccgactacaccctgacaatatccagcctccagcctgaggacttcgccacctactactgtcagcagagctggaacaccccttggacattcggccagggcaccaagctggaaatcaagagactcgaggccgacgtgtcccccaagcctaccatcttcctgccctctatcgccgagacaaagctccagaaggccggcacctacctgtgcctgctggaaaagttcttcccagatgtgattaagatccactggcaggaaaagaagtccaacaccatcctgggcagccaggaaggcaacaccatgaagaccaacgacacctacatgaagttcagctggctgaccgtgcccgagaagtccctggacaaagaacacagatgcatcgtgcggcacgaaaacaacaagaacggcgtggaccaggaaatcatcttcccacccatcaagaccgatgtgattacaatggaccccaaggacaactgctccaaggacgccaacgataccctgctgctccagctgaccaacaccagcgcctactacatgtacttgttgctgctgctgaagtccgtggtgtacttcgccatcatcacatgctgcctgctgcggagaaccgccttctgctgcaacggcgagaagtctagggccaagcgatctggatctggagcaacaaacttctcactactcaaacaagcaggtgacgtggaggagaatcccgggcctactagtatggactggatttggcgcatccttttccttgtcggcgctgctaccggcgcgcattccttcgaacaagttcagcttcaacagcctggcgctgagctggtcaaacctggcgcttctgtgaagatgagctgcaaagccagcggctacgccttcagcagctcttggatcaactggatgaagcagaaacccggccagggactcgaatggatcggccaaatctatcccggcgacggcgacaccaactacaacggcaagttcaagggcagagccacactgaccgccgatacctctagcagcacagcctacatgcagctgagcagcctgaccagcgaagatagcgccgtgtacttctgtgcccggtccatcacaacagtcgtgggctgcgctatggactattggggccagggaacaagcgtgaccgtgtctagtacgcgtagccagcctcacaccaagcccagcgtgttcgtgatgaagaacggcaccaacgtggcctgcctcgtgaaagagttctaccccaaggacatcaggatcaacctggtgtccagcaagaagatcaccgagttcgaccccgccatcgtgatctcccccagcggcaagtacaacgccgtgaagctggggaagtatgaggacagcaacagcgtgacctgctccgtgcagcacgacaacaagaccgtgcacagcaccgactttgaagtgaaaaccgactccaccgaccacgtgaagcccaaagagacagagaacaccaagcagcccagcaagagctgccacaagcccaaggccatcgtgcacaccgagaaagtgaacatgatgagcctgaccgtgatcggcttcagaatcctgctgctgaaagtggccggctttaacctgctgatgaccctgcggctgtggtccagctaa

SEQ ID NO: 34064 - DNA, 1878 bp, synthetic construct
  source 1..1878: mol_type = other DNA
atggccttaccagtgaccgccttgctcctgccgctggccttgctgctccacgccgccaggccggacatccagatgacacagagccctagcagcctgtctgccagcgtgggagacagagtgaccatcacatgcaaggccagcgaccacatcaacaactggctggcctggtatcagcagaagcctggacaggcccctaagctgctgatctacggcgctaccacactggaaacaggcgtgcccagcagattttctggcagcggctctggcaccgactacaccctgacaatatccagcctccagcctgaggacttcgccacctactactgtcagcagagctggaacaccccttggacattcggccagggcaccaagctggaaatcaagagactcgaggccgacgtgtcccccaagcctaccatcttcctgccctctatcgccgagacaaagctccagaaggccggcacctacctgtgcctgctggaaaagttcttcccagatgtgattaagatccactggcaggaaaagaagtccaacaccatcctgggcagccaggaaggcaacaccatgaagaccaacgacacctacatgaagttcagctggctgaccgtgcccgagaagtccctggacaaagaacacagatgcatcgtgcggcacgaaaacaacaagaacggcgtggaccaggaaatcatcttcccacccatcaagaccgatgtgattacaatggaccccaaggacaactgctccaaggacgccaacgataccctgctgctccagctgaccaacaccagcgcctactacatgtacttgttgctgctgctgaagtccgtggtgtacttcgccatcatcacatgctgcctgctgcggagaaccgccttctgctgcaacggcgagaagtctagggccaagcgatctggatctggagcaacaaacttctcactactcaaacaagcaggtgacgtggaggagaatcccgggcctactagtatggactggatttggcgcatccttttccttgtcggcgctgctaccggcgcgcattccttcgaacaagttcagcttcaacagcctggcgctgagctggtcaaacctggcgcttctgtgaagatgagctgcaaagccagcggctacgccttcagcagctcttggatcaactggatgaagcagaaacccggccagggactcgaatggatcggccaaatctatcccggcgacggcgacaccaactacaacggcaagttcaagggcagagccacactgaccgccgatacctctagcagcacagcctacatgcagctgagcagcctgaccagcgaagatagcgccgtgtacttctgtgcccggtccatcacaacagtcgtgggctgcgctatggactattggggccagggaacaagcgtgaccgtgtctagtacgcgtagccagcctcacaccaagcccagcgtgttcgtgatgaagaacggcaccaacgtggcctgcctcgtgaaagagttctaccccaaggacatcaggatcaacctggtgtccagcaagaagatcaccgagttcgaccccgccatcgtgatctcccccagcggcaagtacaacgccgtgaagctggggaagtacgaggacagcaacagcgtgacctgctccgtgcagcacgacaacaagaccgtgcacagcaccgactttgaagtgaaaaccgactccaccgaccacgtgaagcccaaagagacagagaacaccaagcagcccagcaagagctgccacaagcccaaggccatcgtgcacaccgagaaagtgaacatgatgagcctgaccgtgctgggcttcagaatcctgctgctgaaagtggccggctttaacctgctgatgaccctgcggctgtggtccagctaa

SEQ ID NO: 34065 - DNA, 1866 bp, synthetic construct; identical to SEQ ID NO: 34062
  source 1..1866: mol_type = other DNA

SEQ ID NO: 34066 - DNA, 1878 bp, synthetic construct
  source 1..1878: mol_type = other DNA
atggccttaccagtgaccgccttgctcctgccgctggccttgctgctccacgccgccaggccggacatccagatgacacagagccctagcagcctgtctgccagcgtgggagacagagtgaccatcacatgcaaggccagcgaccacatcaacaactggctggcctggtatcagcagaagcctggacaggcccctaagctgctgatctacggcgctaccacactggaaacaggcgtgcccagcagattttctggcagcggctctggcaccgactacaccctgacaatatccagcctccagcctgaggacttcgccacctactactgtcagcagagctggaacaccccttggacattcggccagggcaccaagctggaaatcaagagactcgagatccagaaccctgatcctgccgtgtaccagctgcgggatagcaagagcagcgacaagagcgtgtgtctgttcaccgacttcgacagccagaccaacgtgtcccagagcaaggactccgacgtgtacatcaccgataagtgcgtgctggacatgcggagcatggacttcaagagcaactccgccgtggcctggtccaacaagtccgatttcgcctgcgccaacgccttcaacaacagcattatccccgaggacacattcttcccaagccccgagagcagctgcggctttaccagcgagagctaccagcagggcgtgctgagcgccaccatcctgtacgagatcctgctgggcaaggccaccctgtacgccgtgctggtgtctgccctggtgctgatggctatggtcaagcggaaggacagccggggacgcgccaagagaagcggatctggcgtgaagcagaccctgaatttcgacctgctgaagctggctggcgacgtggaatccaacccaggccctactagtatggactggatttggcgcatccttttccttgtcggcgctgctaccggcgcgcattccttcgaacaagttcagcttcaacagcctggcgctgagctggtcaaacctggcgcttctgtgaagatgagctgcaaagccagcggctacgccttcagcagctcttggatcaactggatgaagcagaaacccggccagggactcgaatggatcggccaaatctatcccggcgacggcgacaccaactacaacggcaagttcaagggcagagccacactgaccgccgatacctctagcagcacagcctacatgcagctgagcagcctgaccagcgaagatagcgccgtgtacttctgtgcccggtccatcacaacagtcgtgggctgcgctatggactattggggccagggaacaagcgtgaccgtgtctagtacgcgtgaggacctgaagaacgtgttcccacctgaggtggccgtgttcgagcctagcgaggccgagatcagccacacccagaaagccaccctcgtgtgcctggctaccggcttctaccccgaccatgtggaactgtcttggtgggtcaacggcaaagaggtgcacagcggcgtgtgtaccgacccccagccactgaaagaacagcccgccctgaacgacagccggtactgcctgagcagcagactgagagtgtccgccaccttctggcagaacccccggaaccacttcagatgccaggtgcagttctacggcctgagcgagaacgacgagtggacccaggacagagccaagcccgtgacccagatcgtgtctgccgaagcctggggcagagccgattgcgacgtgaagctggtggaaaagagcttcgagacagacaccaacctgaacttccagaacctgagcgtgatcggcttcagaatcctgctgctgaaagtggccggctttaacctgctgatgaccctgcggctgtggtccagc

SEQ ID NO: 34067 - DNA, 2271 bp, synthetic construct
  source 1..2271: mol_type = other DNA
atggccttaccagtgaccgccttgctcctgccgctggccttgctgctccacgccgccaggccggaagtgcagctggttgaatctggcggaggactggttcagcctggcggatctctgagactgtcttgtgccgccagcggcttcagcttcagcgacttttggatgagctgggtccgacaggcccctggcaaaggacttgaatgggtcgccacaatcagccaggccggcagcgagaaggactacgtggactctgtgaagggcagattcaccatcagccgggacaacgccaagaagtccctgtacctccagatgaacagcctgagagccgaggacaccgccgtgtactattgtgcctctggcgtgtacagcttcgactacagaggccagggcaccctggtcacagtctcttctggtaccggcggaggcggatctggcggcggaggtagcggtggcggaggatctgaattcgacatccagatgacacagagccctagcagcctgtctgccagcgtgggagacagagtgaccatcacatgcaaggccagcgaccacatcaacaactggctggcctggtatcagcagaagcctggacaggcccctaagctgctgatctacggcgctaccacactggaaacaggcgtgcccagcagattttctggcagcggctctggcaccgactacaccctgacaatatccagcctccagcctgaggacttcgccacctactactgtcagcagagctggaacaccccttggacattcggccagggcaccaagctggaaatcaagagactcgaggacctgaagaacgtgttcccacctgaggtggccgtgttcgagcctagcgaggccgagatcagccacacccagaaagccaccctcgtgtgcctggctaccggcttctaccccgaccatgtggaactgtcttggtgggtcaacggcaaagaggtgcacagcggcgtgtgtaccgacccccagccactgaaagaacagcccgccctgaacgacagccggtactgcctgagcagcagactgagagtgtccgccaccttctggcagaacccccggaaccacttcagatgccaggtgcagttctacggcctgagcgagaacgacgagtggacccaggacagagccaagcccgtgacccagatcgtgtctgccgaagcctggggcagagccgattgcgacgtgaagctggtggaaaagagcttcgagacagacaccaacctgaacttccagaacctgagcgtgatcggcttcagaatcctgctgctgaaagtggccggctttaacctgctgatgaccctgcggctgtggtccagcagggccaagcgatctggatctggagcaacaaacttctcactactcaaacaagcaggtgacgtggaggagaatcccgggcctactagtatggactggatttggcgcatccttttccttgtcggcgctgctaccggcgcgcattccttcgaacaagttcagcttcaacagcctggcgctgagctggtcaaacctggcgcttctgtgaagatgagctgcaaagccagcggctacgccttcagcagctcttggatcaactggatgaagcagaaacccggccagggactcgaatggatcggccaaatctatcccggcgacggcgacaccaactacaacggcaagttcaagggcagagccacactgaccgccgatacctctagcagcacagcctacatgcagctgagcagcctgaccagcgaagatagcgccgtgtacttctgtgcccggtccatcacaacagtcgtgggctgcgctatggactattggggccagggaacaagcgtgaccgtgtctagtacgcgtatccagaaccctgatcctgccgtgtaccagctgcgggatagcaagagcagcgacaagagcgtgtgtctgttcaccgacttcgacagccagaccaacgtgtcccagagcaaggactccgacgtgtacatcaccgataagtgcgtgctggacatgcggagcatggacttcaagagcaactccgccgtggcctggtccaacaagtccgatttcgcctgcgccaacgccttcaacaacagcattatccccgaggacacattcttcccaagccccgagagcagctgcggctttaccagcgagagctaccagcagggcgtgctgagcgccaccatcctgtacgagatcctgctgggcaaggccaccctgtacgccgtgctggtgtctgccctggtgctgatggctatggtcaagcggaaggacagccgggga

SEQ ID NO: 34068 - DNA, 2283 bp, synthetic construct
  source 1..2283: mol_type = other DNA
atggccttaccagtgaccgccttgctcctgccgctggccttgctgctccacgccgccaggccggaagtgcagctggttgaatctggcggaggactggttcagcctggcggatctctgagactgtcttgtgccgccagcggcttcagcttcagcgacttttggatgagctgggtccgacaggcccctggcaaaggacttgaatgggtcgccacaatcagccaggccggcagcgagaaggactacgtggactctgtgaagggcagattcaccatcagccgggacaacgccaagaagtccctgtacctccagatgaacagcctgagagccgaggacaccgccgtgtactattgtgcctctggcgtgtacagcttcgactacagaggccagggcaccctggtcacagtctcttctggtaccggcggaggcggatctggcggcggaggtagcggtggcggaggatctgaattcgacatccagatgacacagagccctagcagcctgtctgccagcgtgggagacagagtgaccatcacatgcaaggccagcgaccacatcaacaactggctggcctggtatcagcagaagcctggacaggcccctaagctgctgatctacggcgctaccacactggaaacaggcgtgcccagcagattttctggcagcggctctggcaccgactacaccctgacaatatccagcctccagcctgaggacttcgccacctactactgtcagcagagctggaacaccccttggacattcggccagggcaccaagctggaaatcaagagactcgagatccagaaccctgatcctgccgtgtaccagctgcgggatagcaagagcagcgacaagagcgtgtgtctgttcaccgacttcgacagccagaccaacgtgtcccagagcaaggactccgacgtgtacatcaccgataagtgcgtgctggacatgcggagcatggacttcaagagcaactccgccgtggcctggtccaacaagtccgatttcgcctgcgccaacgccttcaacaacagcattatccccgaggacacattcttcccaagccccgagagcagctgcggctttaccagcgagagctaccagcagggcgtgctgagcgccaccatcctgtacgagatcctgctgggcaaggccaccctgtacgccgtgctggtgtctgccctggtgctgatggctatggtcaagcggaaggacagccggggacgcgccaagagaagcggatctggcgtgaagcagaccctgaatttcgacctgctgaagctggctggcgacgtggaatccaacccaggccctactagtatggactggatttggcgcatccttttccttgtcggcgctgctaccggcgcgcattccttcgaacaagttcagcttcaacagcctggcgctgagctggtcaaacctggcgcttctgtgaagatgagctgcaaagccagcggctacgccttcagcagctcttggatcaactggatgaagcagaaacccggccagggactcgaatggatcggccaaatctatcccggcgacggcgacaccaactacaacggcaagttcaagggcagagccacactgaccgccgatacctctagcagcacagcctacatgcagctgagcagcctgaccagcgaagatagcgccgtgtacttctgtgcccggtccatcacaacagtcgtgggctgcgctatggactattggggccagggaacaagcgtgaccgtgtctagtacgcgtgaggacctgaagaacgtgttcccacctgaggtggccgtgttcgagcctagcgaggccgagatcagccacacccagaaagccaccctcgtgtgcctggctaccggcttctaccccgaccatgtggaactgtcttggtgggtcaacggcaaagaggtgcacagcggcgtgtgtaccgacccccagccactgaaagaacagcccgccctgaacgacagccggtactgcctgagcagcagactgagagtgtccgccaccttctggcagaacccccggaaccacttcagatgccaggtgcagttctacggcctgagcgagaacgacgagtggacccaggacagagccaagcccgtgacccagatcgtgtctgccgaagcctggggcagagccgattgcgacgtgaagctggtggaaaagagcttcgagacagacaccaacctgaacttccagaacctgagcgtgatcggcttcagaatcctgctgctgaaagtggccggctttaacctgctgatgaccctgcggctgtggtccagc

SEQ ID NO: 34069 - DNA, 2682 bp, synthetic construct
  source 1..2682: mol_type = other DNA
atggccttaccagtgaccgccttgctcctgccgctggccttgctgctccacgccgccaggccggaagtgcagctggttgaatctggcggaggactggttcagcctggcggatctctgagactgtcttgtgccgccagcggcttcagcttcagcgacttttggatgagctgggtccgacaggcccctggcaaaggacttgaatgggtcgccacaatcagccaggccggcagcgagaaggactacgtggactctgtgaagggcagattcaccatcagccgggacaacgccaagaagtccctgtacctccagatgaacagcctgagagccgaggacaccgccgtgtactattgtgcctctggcgtgtacagcttcgactacagaggccagggcaccctggtcacagtctcttctggtaccggcggaggcggatctggcggcggaggtagcggtggcggaggatctgaattcgacatccagatgacacagagccctagcagcctgtctgccagcgtgggagacagagtgaccatcacatgcaaggccagcgaccacatcaacaactggctggcctggtatcagcagaagcctggacaggcccctaagctgctgatctacggcgctaccacactggaaacaggcgtgcccagcagattttctggcagcggctctggcaccgactacaccctgacaatatccagcctccagcctgaggacttcgccacctactactgtcagcagagctggaacaccccttggacattcggccagggcaccaagctggaaatcaagagactcgaggacctgaagaacgtgttcccacctgaggtggccgtgttcgagcctagcgaggccgagatcagccacacccagaaagccaccctcgtgtgcctggctaccggcttctaccccgaccatgtggaactgtcttggtgggtcaacggcaaagaggtgcacagcggcgtgtgtaccgacccccagccactgaaagaacagcccgccctgaacgacagccggtactgcctgagcagcagactgagagtgtccgccaccttctggcagaacccccggaaccacttcagatgccaggtgcagttctacggcctgagcgagaacgacgagtggacccaggacagagccaagcccgtgacccagatcgtgtctgccgaagcctggggcagagccgattgcgacgtgaagctggtggaaaagagcttcgagacagacaccaacctgaacttccagaacctgagcgtgatcggcttcagaatcctgctgctgaaagtggccggctttaacctgctgatgaccctgcggctgtggtccagcagggccaagcgatctggatctggagcaacaaacttctcactactcaaacaagcaggtgacgtggaggagaatcccgggcctactagtatggactggatttggcgcatccttttccttgtcggcgctgctaccggcgcgcattccgggccccagctccagctgcaagagtctggacctggcctggtcaagcctagcgagacactgagcctgacctgtaccgtgtccggcgatagcatcagcagcggcgattactactggggctggatcagacagcctcctggcaaaggactggaatggatcggccacatctactacagcggcgtgacctactacaaccccagcctgaagtccagagtgaccatcagcgtggacaccagccggaaccagttctccctgaagctgtctagcgtgacagccgccgataccgccgtgtactactgcaccagagaggacagcagcaactggcggagtagaggccagggaacactggtcacagttagctctggatccggcggaggcggaagtggaggcggaggatctggcggcggaggctctttcgaacaagttcagcttcaacagcctggcgctgagctggtcaaacctggcgcttctgtgaagatgagctgcaaagccagcggctacgccttcagcagctcttggatcaactggatgaagcagaaacccggccagggactcgaatggatcggccaaatctatcccggcgacggcgacaccaactacaacggcaagttcaagggcagagccacactgaccgccgatacctctagcagcacagcctacatgcagctgagcagcctgaccagcgaagatagcgccgtgtacttctgtgcccggtccatcacaacagtcgtgggctgcgctatggactattggggccagggaacaagcgtgaccgtgtctagtacgcgtatccagaaccctgatcctgccgtgtaccagctgcgggatagcaagagcagcgacaagagcgtgtgtctgttcaccgacttcgacagccagaccaacgtgtcccagagcaaggactccgacgtgtacatcaccgataagtgcgtgctggacatgcggagcatggacttcaagagcaactccgccgtggcctggtccaacaagtccgatttcgcctgcgccaacgccttcaacaacagcattatccccgaggacacattcttcccaagccccgagagcagctgcggctttaccagcgagagctaccagcagggcgtgctgagcgccaccatcctgtacgagatcctgctgggcaaggccaccctgtacgccgtgctggtgtctgccctggtgctgatggctatggtcaagcggaaggacagccgggga

SEQ ID NO: 34070 - DNA, 2694 bp, synthetic construct
  source 1..2694: mol_type = other DNA
atggccttaccagtgaccgccttgctcctgccgctggccttgctgctccacgccgccaggccggaagtgcagctggttgaatctggcggaggactggttcagcctggcggatctctgagactgtcttgtgccgccagcggcttcagcttcagcgacttttggatgagctgggtccgacaggcccctggcaaaggacttgaatgggtcgccacaatcagccaggccggcagcgagaaggactacgtggactctgtgaagggcagattcaccatcagccgggacaacgccaagaagtccctgtacctccagatgaacagcctgagagccgaggacaccgccgtgtactattgtgcctctggcgtgtacagcttcgactacagaggccagggcaccctggtcacagtctcttctggtaccggcggaggcggatctggcggcggaggtagcggtggcggaggatctgaattcgacatccagatgacacagagccctagcagcctgtctgccagcgtgggagacagagtgaccatcacatgcaaggccagcgaccacatcaacaactggctggcctggtatcagcagaagcctggacaggcccctaagctgctgatctacggcgctaccacactggaaacaggcgtgcccagcagattttctggcagcggctctggcaccgactacaccctgacaatatccagcctccagcctgaggacttcgccacctactactgtcagcagagctggaacaccccttggacattcggccagggcaccaagctggaaatcaagagactcgagatccagaaccctgatcctgccgtgtaccagctgcgggatagcaagagcagcgacaagagcgtgtgtctgttcaccgacttcgacagccagaccaacgtgtcccagagcaaggactccgacgtgtacatcaccgataagtgcgtgctggacatgcggagcatggacttcaagagcaactccgccgtggcctggtccaacaagtccgatttcgcctgcgccaacgccttcaacaacagcattatccccgaggacacattcttcccaagccccgagagcagctgcggctttaccagcgagagctaccagcagggcgtgctgagcgccaccatcctgtacgagatcctgctgggcaaggccaccctgtacgccgtgctggtgtctgccctggtgctgatggctatggtcaagcggaaggacagccggggacgcgccaagagaagcggatctggcgtgaagcagaccctgaatttcgacctgctgaagctggctggcgacgtggaatccaacccaggccctactagtatggactggatttggcgcatccttttccttgtcggcgctgctaccggcgcgcattccgggccccagctccagctgcaagagtctggacctggcctggtcaagcctagcgagacactgagcctgacctgtaccgtgtccggcgatagcatcagcagcggcgattactactggggctggatcagacagcctcctggcaaaggactggaatggatcggccacatctactacagcggcgtgacctactacaaccccagcctgaagtccagagtgaccatcagcgtggacaccagccggaaccagttctccctgaagctgtctagcgtgacagccgccgataccgccgtgtactactgcaccagagaggacagcagcaactggcggagtagaggccagggaacactggtcacagttagctctggatccggcggaggcggaagtggaggcggaggatctggcggcggaggctctttcgaacaagttcagcttcaacagcctggcgctgagctggtcaaacctggcgcttctgtgaagatgagctgcaaagccagcggctacgccttcagcagctcttggatcaactggatgaagcagaaacccggccagggactcgaatggatcggccaaatctatcccggcgacggcgacaccaactacaacggcaagttcaagggcagagccacactgaccgccgatacctctagcagcacagcctacatgcagctgagcagcctgaccagcgaagatagcgccgtgtacttctgtgcccggtccatcacaacagtcgtgggctgcgctatggactattggggccagggaacaagcgtgaccgtgtctagtacgcgtgaggacctgaagaacgtgttcccacctgaggtggccgtgttcgagcctagcgaggccgagatcagccacacccagaaagccaccctcgtgtgcctggctaccggcttctaccccgaccatgtggaactgtcttggtgggtcaacggcaaagaggtgcacagcggcgtgtgtaccgacccccagccactgaaagaacagcccgccctgaacgacagccggtactgcctgagcagcagactgagagtgtccgccaccttctggcagaacccccggaaccacttcagatgccaggtgcagttctacggcctgagcgagaacgacgagtggacccaggacagagccaagcccgtgacccagatcgtgtctgccgaagcctggggcagagccgattgcgacgtgaagctggtggaaaagagcttcgagacagacaccaacctgaacttccagaacctgagcgtgatcggcttcagaatcctgctgctgaaagtggccggctttaacctgctgatgaccctgcggctgtggtccagc

SEQ ID NO: 34071 - DNA, 2076 bp, synthetic construct
  source 1..2076: mol_type = other DNA
atggccttaccagtgaccgccttgctcctgccgctggccttgctgctccacgccgccaggccggacatccagatgacacagagccctagcagcctgtctgccagcgtgggagacagagtgaccatcacatgcaaggccagcgaccacatcaacaactggctggcctggtatcagcagaagcctggacaggcccctaagctgctgatctacggcgctaccacactggaaacaggcgtgcccagcagattttctggcagcggctctggcaccgactacaccctgacaatatccagcctccagcctgaggacttcgccacctactactgtcagcagagctggaacaccccttggacattcggccagggcaccaagctggaaatcaagagactcgaggacctgaagaacgtgttcccacctgaggtggccgtgttcgagcctagcgaggccgagatcagccacacccagaaagccaccctcgtgtgcctggctaccggcttctaccccgaccatgtggaactgtcttggtgggtcaacggcaaagaggtgcacagcggcgtgtgtaccgacccccagccactgaaagaacagcccgccctgaacgacagccggtactgcctgagcagcagactgagagtgtccgccaccttctggcagaacccccggaaccacttcagatgccaggtgcagttctacggcctgagcgagaacgacgagtggacccaggacagagccaagcccgtgacccagatcgtgtctgccgaagcctggggcagagccgattgcgacgtgaagctggtggaaaagagcttcgagacagacaccaacctgaacttccagaacctgagcgtgatcggcttcagaatcctgctgctgaaagtggccggctttaacctgctgatgaccctgcggctgtggtccagcagggccaagcgatctggatctggagcaacaaacttctcactactcaaacaagcaggtgacgtggaggagaatcccgggcctactagtatggactggatttggcgcatccttttccttgtcggcgctgctaccggcgcccattccgggcccatggaccccgacctggaaatcagagccgccttcctgcggcagagaaacacagccctgagaacagaggtggccgagctggaacaagaggtgcagcggctggaaaacgaggtgtcccagtacgagacaagatacggccctctcggaggcggaaaaggatccggcggcggaggatctggcggaggcggatctgggggcggaggctctttcgaacaagttcagcttcaacagcctggcgctgagctggtcaaacctggcgcttctgtgaagatgagctgcaaagccagcggctacgccttcagcagctcttggatcaactggatgaagcagaaacccggccagggactcgaatggatcggccaaatctatcccggcgacggcgacaccaactacaacggcaagttcaagggcagagccacactgaccgccgatacctctagcagcacagcctacatgcagctgagcagcctgaccagcgaagatagcgccgtgtacttctgtgcccggtccatcacaacagtcgtgggctgcgctatggactattggggccagggaacaagcgtgaccgtgtctagtacgcgtatccagaaccctgatcctgccgtgtaccagctgcgggatagcaagagcagcgacaagagcgtgtgtctgttcaccgacttcgacagccagaccaacgtgtcccagagcaaggactccgacgtgtacatcaccgataagtgcgtgctggacatgcggagcatggacttcaagagcaactccgccgtggcctggtccaacaagtccgatttcgcctgcgccaacgccttcaacaacagcattatccccgaggacacattcttcccaagccccgagagcagctgcggctttaccagcgagagctaccagcagggcgtgctgagcgccaccatcctgtacgagatcctgctgggcaaggccaccctgtacgccgtgctggtgtctgccctggtgctgatggctatggtcaagcggaaggacagccgggga

SEQ ID NO: 34072 - DNA, 2088 bp, synthetic construct
  source 1..2088: mol_type = other DNA
atggccttaccagtgaccgccttgctcctgccgctggccttgctgctccacgccgccaggccggacatccagatgacacagagccctagcagcctgtctgccagcgtgggagacagagtgaccatcacatgcaaggccagcgaccacatcaacaactggctggcctggtatcagcagaagcctggacaggcccctaagctgctgatctacggcgctaccacactggaaacaggcgtgcccagcagattttctggcagcggctctggcaccgactacaccctgacaatatccagcctccagcctgaggacttcgccacctactactgtcagcagagctggaacaccccttggacattcggccagggcaccaagctggaaatcaagagactcgagatccagaaccctgatcctgccgtgtaccagctgcgggatagcaagagcagcgacaagagcgtgtgtctgttcaccgacttcgacagccagaccaacgtgtcccagagcaaggactccgacgtgtacatcaccgataagtgcgtgctggacatgcggagcatggacttcaagagcaactccgccgtggcctggtccaacaagtccgatttcgcctgcgccaacgccttcaacaacagcattatccccgaggacacattcttcccaagccccgagagcagctgcggctttaccagcgagagctaccagcagggcgtgctgagcgccaccatcctgtacgagatcctgctgggcaaggccaccctgtacgccgtgctggtgtctgccctggtgctgatggctatggtcaagcggaaggacagccggggacgcgccaagagaagcggatctggcgtgaagcagaccctgaatttcgacctgctgaagctggctggcgacgtggaatccaacccaggccctactagtatggactggatttggcgcatccttttccttgtcggcgctgctaccggcgcccattccgggcccatggaccccgacctggaaatcagagccgccttcctgcggcagagaaacacagccctgagaacagaggtggccgagctggaacaagaggtgcagcggctggaaaacgaggtgtcccagtacgagacaagatacggccctctcggaggcggaaaaggatccggcggcggaggatctggcggaggcggatctgggggcggaggctctttcgaacaagttcagcttcaacagcctggcgctgagctggtcaaacctggcgcttctgtgaagatgagctgcaaagccagcggctacgccttcagcagctcttggatcaactggatgaagcagaaacccggccagggactcgaatggatcggccaaatctatcccggcgacggcgacaccaactacaacggcaagttcaagggcagagccacactgaccgccgatacctctagcagcacagcctacatgcagctgagcagcctgaccagcgaagatagcgccgtgtacttctgtgcccggtccatcacaacagtcgtgggctgcgctatggactattggggccagggaacaagcgtgaccgtgtctagtacgcgtgaggacctgaagaacgtgttcccacctgaggtggccgtgttcgagcctagcgaggccgagatcagccacacccagaaagccaccctcgtgtgcctggctaccggcttctaccccgaccatgtggaactgtcttggtgggtcaacggcaaagaggtgcacagcggcgtgtgtaccgacccccagccactgaaagaacagcccgccctgaacgacagccggtactgcctgagcagcagactgagagtgtccgccaccttctggcagaacccccggaaccacttcagatgccaggtgcagttctacggcctgagcgagaacgacgagtggacccaggacagagccaagcccgtgacccagatcgtgtctgccgaagcctggggcagagccgattgcgacgtgaagctggtggaaaagagcttcgagacagacaccaacctgaacttccagaacctgagcgtgatcggcttcagaatcctgctgctgaaagtggccggctttaacctgctgatgaccctgcggctgtggtccagc

SEQ ID NO: 34073 - DNA, 2007 bp, synthetic construct
  source 1..2007: mol_type = other DNA
atggccttaccagtgaccgccttgctcctgccgctggccttgctgctccacgccgccaggccggacatccagatgacacagagccctagcagcctgtctgccagcgtgggagacagagtgaccatcacatgcaaggccagcgaccacatcaacaactggctggcctggtatcagcagaagcctggacaggcccctaagctgctgatctacggcgctaccacactggaaacaggcgtgcccagcagattttctggcagcggctctggcaccgactacaccctgacaatatccagcctccagcctgaggacttcgccacctactactgtcagcagagctggaacaccccttggacattcggccagggcaccaagctggaaatcaagagactcgaggacctgaagaacgtgttcccacctgaggtggccgtgttcgagcctagcgaggccgagatcagccacacccagaaagccaccctcgtgtgcctggctaccggcttctaccccgaccatgtggaactgtcttggtgggtcaacggcaaagaggtgcacagcggcgtgtgtaccgacccccagccactgaaagaacagcccgccctgaacgacagccggtactgcctgagcagcagactgagagtgtccgccaccttctggcagaacccccggaaccacttcagatgccaggtgcagttctacggcctgagcgagaacgacgagtggacccaggacagagccaagcccgtgacccagatcgtgtctgccgaagcctggggcagagccgattgcgacgtgaagctggtggaaaagagcttcgagacagacaccaacctgaacttccagaacctgagcgtgatcggcttcagaatcctgctgctgaaagtggccggctttaacctgctgatgaccctgcggctgtggtccagcagggccaagcgatctggatctggagcaacaaacttctcactactcaaacaagcaggtgacgtggaggagaatcccgggcctactagtatggactggatttggcgcatccttttccttgtcggcgctgctaccggcgcccattccgggcccgaagttgctgccctcgagaaggaggtagcagctttggaaaaagaagtcgcagcccttgagaaagaagttgcggctctggagaagggatccggcggcggaggatctggcggaggcggatctgggggcggaggctctttcgaacaagttcagcttcaacagcctggcgctgagctggtcaaacctggcgcttctgtgaagatgagctgcaaagccagcggctacgccttcagcagctcttggatcaactggatgaagcagaaacccggccagggactcgaatggatcggccaaatctatcccggcgacggcgacaccaactacaacggcaagttcaagggcagagccacactgaccgccgatacctctagcagcacagcctacatgcagctgagcagcctgaccagcgaagatagcgccgtgtacttctgtgcccggtccatcacaacagtcgtgggctgcgctatggactattggggccagggaacaagcgtgaccgtgtctagtacgcgtatccagaaccctgatcctgccgtgtaccagctgcgggatagcaagagcagcgacaagagcgtgtgtctgttcaccgacttcgacagccagaccaacgtgtcccagagcaaggactccgacgtgtacatcaccgataagtgcgtgctggacatgcggagcatggacttcaagagcaactccgccgtggcctggtccaacaagtccgatttcgcctgcgccaacgccttcaacaacagcattatccccgaggacacattcttcccaagccccgagagcagctgcggctttaccagcgagagctaccagcagggcgtgctgagcgccaccatcctgtacgagatcctgctgggcaaggccaccctgtacgccgtgctggtgtctgccctggtgctgatggctatggtcaagcggaaggacagccgggga

SEQ ID NO: 34074 - DNA, 2019 bp, synthetic construct
  source 1..2019: mol_type = other DNA
atggccttaccagtgaccgccttgctcctgccgctggccttgctgctccacgccgccaggccggacatccagatgacacagagccctagcagcctgtctgccagcgtgggagacagagtgaccatcacatgcaaggccagcgaccacatcaacaactggctggcctggtatcagcagaagcctggacaggcccctaagctgctgatctacggcgctaccacactggaaacaggcgtgcccagcagattttctggcagcggctctggcaccgactacaccctgacaatatccagcctccagcctgaggacttcgccacctactactgtcagcagagctggaacaccccttggacattcggccagggcaccaagctggaaatcaagagactcgagatccagaaccctgatcctgccgtgtaccagctgcgggatagcaagagcagcgacaagagcgtgtgtctgttcaccgacttcgacagccagaccaacgtgtcccagagcaaggactccgacgtgtacatcaccgataagtgcgtgctggacatgcggagcatggacttcaagagcaactccgccgtggcctggtccaacaagtccgatttcgcctgcgccaacgccttcaacaacagcattatccccgaggacacattcttcccaagccccgagagcagctgcggctttaccagcgagagctaccagcagggcgtgctgagcgccaccatcctgtacgagatcctgctgggcaaggccaccctgtacgccgtgctggtgtctgccctggtgctgatggctatggtcaagcggaaggacagccggggacgcgccaagagaagcggatctggcgtgaagcagaccctgaatttcgacctgctgaagctggctggcgacgtggaatccaacccaggccctactagtatggactggatttggcgcatccttttccttgtcggcgctgctaccggcgcccattccgggcccgaagttgctgccctcgagaaggaggtagcagctttggaaaaagaagtcgcagcccttgagaaagaagttgcggctctggagaagggatccggcggcggaggatctggcggaggcggatctgggggcggaggctctttcgaacaagttcagcttcaacagcctggcgctgagctggtcaaacctggcgcttctgtgaagatgagctgcaaagccagcggctacgccttcagcagctcttggatcaactggatgaagcagaaacccggccagggactcgaatggatcggccaaatctatcccggcgacggcgacaccaactacaacggcaagttcaagggcagagccacactgaccgccgatacctctagcagcacagcctacatgcagctgagcagcctgaccagcgaagatagcgccgtgtacttctgtgcccggtccatcacaacagtcgtgggctgcgctatggactattggggccagggaacaagcgtgaccgtgtctagtacgcgtgaggacctgaagaacgtgttcccacctgaggtggccgtgttcgagcctagcgaggccgagatcagccacacccagaaagccaccctcgtgtgcctggctaccggcttctaccccgaccatgtggaactgtcttggtgggtcaacggcaaagaggtgcacagcggcgtgtgtaccgacccccagccactgaaagaacagcccgccctgaacgacagccggtactgcctgagcagcagactgagagtgtccgccaccttctggcagaacccccggaaccacttcagatgccaggtgcagttctacggcctgagcgagaacgacgagtggacccaggacagagccaagcccgtgacccagatcgtgtctgccgaagcctggggcagagccgattgcgacgtgaagctggtggaaaagagcttcgagacagacaccaacctgaacttccagaacctgagcgtgatcggcttcagaatcctgctgctgaaagtggccggctttaacctgctgatgaccctgcggctgtggtccagc

SEQ ID NO: 34075 - DNA, 2277 bp, synthetic construct
  source 1..2277: mol_type = other DNA
atggccttaccagtgaccgccttgctcctgccgctggccttgctgctccacgccgccaggccggacatccagatgacacagagccctagcagcctgtctgccagcgtgggagacagagtgaccatcacatgcaaggccagcgaccacatcaacaactggctggcctggtatcagcagaagcctggacaggcccctaagctgctgatctacggcgctaccacactggaaacaggcgtgcccagcagattttctggcagcggctctggcaccgactacaccctgacaatatccagcctccagcctgaggacttcgccacctactactgtcagcagagctggaacaccccttggacattcggccagggcaccaagctggaaatcaagagactcgaggacctgaagaacgtgttcccacctgaggtggccgtgttcgagcctagcgaggccgagatcagccacacccagaaagccaccctcgtgtgcctggctaccggcttctaccccgaccatgtggaactgtcttggtgggtcaacggcaaagaggtgcacagcggcgtgtgtaccgacccccagccactgaaagaacagcccgccctgaacgacagccggtactgcctgagcagcagactgagagtgtccgccaccttctggcagaacccccggaaccacttcagatgccaggtgcagttctacggcctgagcgagaacgacgagtggacccaggacagagccaagcccgtgacccagatcgtgtctgccgaagcctggggcagagccgattgcgacgtgaagctggtggaaaagagcttcgagacagacaccaacctgaacttccagaacctgagcgtgatcggcttcagaatcctgctgctgaaagtggccggctttaacctgctgatgaccctgcggctgtggtccagcagggccaagcgatctggatctggagcaacaaacttctcactactcaaacaagcaggtgacgtggaggagaatcccgggcctactagtatggactggatttggcgcatccttttccttgtcggcgctgctaccggcgcccattccgggccccaggttcagctgcaagagtctggcggaggacttgctcaagctggcggaagcctgagactgtcttgtgccgcctctggcagaaccttcagcatgggctggtttagacaggcccctggcaaagagagagagttcgtcgccgccatcacatacagcggcggcagcccttactacgcctcttctgtcagaggccggttcaccatcagccgggacaacgccaagaacaccgtgtacctccagatgaacagcctgaagccagaggacaccgccgtgtactactgtgccgccaatccaacctacggcagcgactggaatgccgagaattggggccagggcacccaagtgacagtgtctagtggatccggcggcggaggatctggcggaggcggatctgggggcggaggctctttcgaacaagttcagcttcaacagcctggcgctgagctggtcaaacctggcgcttctgtgaagatgagctgcaaagccagcggctacgccttcagcagctcttggatcaactggatgaagcagaaacccggccagggactcgaatggatcggccaaatctatcccggcgacggcgacaccaactacaacggcaagttcaagggcagagccacactgaccgccgatacctctagcagcacagcctacatgcagctgagcagcctgaccagcgaagatagcgccgtgtacttctgtgcccggtccatcacaacagtcgtgggctgcgctatggactattggggccagggaacaagcgtgaccgtgtctagtacgcgtatccagaaccctgatcctgccgtgtaccagctgcgggatagcaagagcagcgacaagagcgtgtgtctgttcaccgacttcgacagccagaccaacgtgtcccagagcaaggactccgacgtgtacatcaccgataagtgcgtgctggacatgcggagcatggacttcaagagcaactccgccgtggcctggtccaacaagtccgatttcgcctgcgccaacgccttcaacaacagcattatccccgaggacacattcttcccaagccccgagagcagctgcggctttaccagcgagagctaccagcagggcgtgctgagcgccaccatcctgtacgagatcctgctgggcaaggccaccctgtacgccgtgctggtgtctgccctggtgctgatggctatggtcaagcggaaggacagccgggga

SEQ ID NO: 34076 - DNA, 2289 bp, synthetic construct
  source 1..2289: mol_type = other DNA
atggccttaccagtgaccgccttgctcctgccgctggccttgctgctccacgccgccaggccggacatccagatgacacagagccctagcagcctgtctgccagcgtgggagacagagtgaccatcacatgcaaggccagcgaccacatcaacaactggctggcctggtatcagcagaagcctggacaggcccctaagctgctgatctacggcgctaccacactggaaacaggcgtgcccagcagattttctggcagcggctctggcaccgactacaccctgacaatatccagcctccagcctgaggacttcgccacctactactgtcagcagagctggaacaccccttggacattcggccagggcaccaagctggaaatcaagagactcgagatccagaaccctgatcctgccgtgtaccagctgcgggatagcaagagcagcgacaagagcgtgtgtctgttcaccgacttcgacagccagaccaacgtgtcccagagcaaggactccgacgtgtacatcaccgataagtgcgtgctggacatgcggagcatggacttcaagagcaactccgccgtggcctggtccaacaagtccgatttcgcctgcgccaacgccttcaacaacagcattatccccgaggacacattcttcccaagccccgagagcagctgcggctttaccagcgagagctaccagcagggcgtgctgagcgccaccatcctgtacgagatcctgctgggcaaggccaccctgtacgccgtgctggtgtctgccctggtgctgatggctatggtcaagcggaaggacagccggggacgcgccaagagaagcggatctggcgtgaagcagaccctgaatttcgacctgctgaagctggctggcgacgtggaatccaacccaggccctactagtatggactggatttggcgcatccttttccttgtcggcgctgctaccggcgcccattccgggccccaggttcagctgcaagagtctggcggaggacttgctcaagctggcggaagcctgagactgtcttgtgccgcctctggcagaaccttcagcatgggctggtttagacaggcccctggcaaagagagagagttcgtcgccgccatcacatacagcggcggcagcccttactacgcctcttctgtcagaggccggttcaccatcagccgggacaacgccaagaacaccgtgtacctccagatgaacagcctgaagccagaggacaccgccgtgtactactgtgccgccaatccaacctacggcagcgactggaatgccgagaattggggccagggcacccaagtgacagtgtctagtggatccggcggcggaggatctggcggaggcggatctgggggcggaggctctttcgaacaagttcagcttcaacagcctggcgctgagctggtcaaacctggcgcttctgtgaagatgagctgcaaagccagcggctacgccttcagcagctcttggatcaactggatgaagcagaaacccggccagggactcgaatggatcggccaaatctatcccggcgacggcgacaccaactacaacggcaagttcaagggcagagccacactgaccgccgatacctctagcagcacagcctacatgcagctgagcagcctgaccagcgaagatagcgccgtgtacttctgtgcccggtccatcacaacagtcgtgggctgcgctatggactattggggccagggaacaagcgtgaccgtgtctagtacgcgtgaggacctgaagaacgtgttcccacctgaggtggccgtgttcgagcctagcgaggccgagatcagccacacccagaaagccaccctcgtgtgcctggctaccggcttctaccccgaccatgtggaactgtcttggtgggtcaacggcaaagaggtgcacagcggcgtgtgtaccgacccccagccactgaaagaacagcccgccctgaacgacagccggtactgcctgagcagcagactgagagtgtccgccaccttctggcagaacccccggaaccacttcagatgccaggtgcagttctacggcctgagcgagaacgacgagtggacccaggacagagccaagcccgtgacccagatcgtgtctgccgaagcctggggcagagccgattgcgacgtgaagctggtggaaaagagcttcgagacagacaccaacctgaacttccagaacctgagcgtgatcggcttcagaatcctgctgctgaaagtggccggctttaacctgctgatgaccctgcggctgtggtccagc

SEQ ID NO: 34077 - DNA, 2295 bp, synthetic construct
  source 1..2295: mol_type = other DNA
atggccttaccagtgaccgccttgctcctgccgctggccttgctgctccacgccgccaggccggaagtgcaactggtggaatctggaggctctctggtgcagccagggggaagcctgagactgtcttgtgccgcttccggcttcaccttcgacgactacgccatgagctgggtgcgccaggtgccaggcaaaggcctggaatgggtgtccagcatcaactggagcggcacccacaccgattacgccgactccgtgaaaggcagattcacaatcagcagaaacaacgccaacaataccctgtacctgcagatgaactccctgaagtctgaggatacagcagtgtattattgcgccaagaactggcgggacgccggcaccacttggtttgagaaaagcggctctgccggacagggaacccaagtgacagtgtcctccggtaccggcggaggcggatctggcggcggaggtagcggtggcggaggatctgaattcgacatccagatgacacagagccctagcagcctgtctgccagcgtgggagacagagtgaccatcacatgcaaggccagcgaccacatcaacaactggctggcctggtatcagcagaagcctggacaggcccctaagctgctgatctacggcgctaccacactggaaacaggcgtgcccagcagattttctggcagcggctctggcaccgactacaccctgacaatatccagcctccagcctgaggacttcgccacctactactgtcagcagagctggaacaccccttggacattcggccagggcaccaagctggaaatcaagagactcgaggacctgaagaacgtgttcccacctgaggtggccgtgttcgagcctagcgaggccgagatcagccacacccagaaagccaccctcgtgtgcctggctaccggcttctaccccgaccatgtggaactgtcttggtgggtcaacggcaaagaggtgcacagcggcgtgtgtaccgacccccagccactgaaagaacagcccgccctgaacgacagccggtactgcctgagcagcagactgagagtgtccgccaccttctggcagaacccccggaaccacttcagatgccaggtgcagttctacggcctgagcgagaacgacgagtggacccaggacagagccaagcccgtgacccagatcgtgtctgccgaagcctggggcagagccgattgcgacgtgaagctggtggaaaagagcttcgagacagacaccaacctgaacttccagaacctgagcgtgatcggcttcagaatcctgctgctgaaagtggccggctttaacctgctgatgaccctgcggctgtggtccagcagggccaagcgatctggatctggagcaacaaacttctcactactcaaacaagcaggtgacgtggaggagaatcccgggcctactagtatggactggatttggcgcatccttttccttgtcggcgctgctaccggcgcgcattccttcgaacaagttcagcttcaacagcctggcgctgagctggtcaaacctggcgcttctgtgaagatgagctgcaaagccagcggctacgccttcagcagctcttggatcaactggatgaagcagaaacccggccagggactcgaatggatcggccaaatctatcccggcgacggcgacaccaactacaacggcaagttcaagggcagagccacactgaccgccgatacctctagcagcacagcctacatgcagctgagcagcctgaccagcgaagatagcgccgtgtacttctgtgcccggtccatcacaacagtcgtgggctgcgctatggactattggggccagggaacaagcgtgaccgtgtctagtacgcgtatccagaaccctgatcctgccgtgtaccagctgcgggatagcaagagcagcgacaagagcgtgtgtctgttcaccgacttcgacagccagaccaacgtgtcccagagcaaggactccgacgtgtacatcaccgataagtgcgtgctggacatgcggagcatggacttcaagagcaactccgccgtggcctggtccaacaagtccgatttcgcctgcgccaacgccttcaacaacagcattatccccgaggacacattcttcccaagccccgagagcagctgcggctttaccagcgagagctaccagcagggcgtgctgagcgccaccatcctgtacgagatcctgctgggcaaggccaccctgtacgccgtgctggtgtctgccctggtgctgatggctatggtcaagcggaaggacagccgggga

SEQ ID NO: 34078 - DNA, 2307 bp, synthetic construct
  source 1..2307: mol_type = other DNA
atggccttaccagtgaccgccttgctcctgccgctggccttgctgctccacgccgccaggccggaagtgcaactggtggaatctggaggctctctggtgcagccagggggaagcctgagactgtcttgtgccgcttccggcttcaccttcgacgactacgccatgagctgggtgcgccaggtgccaggcaaaggcctggaatgggtgtccagcatcaactggagcggcacccacaccgattacgccgactccgtgaaaggcagattcacaatcagcagaaacaacgccaacaataccctgtacctgcagatgaactccctgaagtctgaggatacagcagtgtattattgcgccaagaactggcgggacgccggcaccacttggtttgagaaaagcggctctgccggacagggaacccaagtgacagtgtcctccggtaccggcggaggcggatctggcggcggaggtagcggtggcggaggatctgaattcgacatccagatgacacagagccctagcagcctgtctgccagcgtgggagacagagtgaccatcacatgcaaggccagcgaccacatcaacaactggctggcctggtatcagcagaagcctggacaggcccctaagctgctgatctacggcgctaccacactggaaacaggcgtgcccagcagattttctggcagcggctctggcaccgactacaccctgacaatatccagcctccagcctgaggacttcgccacctactactgtcagcagagctggaacaccccttggacattcggccagggcaccaagctggaaatcaagagactcgagatccagaaccctgatcctgccgtgtaccagctgcgggatagcaagagcagcgacaagagcgtgtgtctgttcaccgacttcgacagccagaccaacgtgtcccagagcaaggactccgacgtgtacatcaccgataagtgcgtgctggacatgcggagcatggacttcaagagcaactccgccgtggcctggtccaacaagtccgatttcgcctgcgccaacgccttcaacaacagcattatccccgaggacacattcttcccaagccccgagagcagctgcggctttaccagcgagagctaccagcagggcgtgctgagcgccaccatcctgtacgagatcctgctgggcaaggccaccctgtacgccgtgctggtgtctgccctggtgctgatggctatggtcaagcggaaggacagccggggacgcgccaagagaagcggatctggcgtgaagcagaccctgaatttcgacctgctgaagctggctggcgacgtggaatccaacccaggccctactagtatggactggatttggcgcatccttttccttgtcggcgctgctaccggcgcgcattccttcgaacaagttcagcttcaacagcctggcgctgagctggtcaaacctggcgcttctgtgaagatgagctgcaaagccagcggctacgccttcagcagctcttggatcaactggatgaagcagaaacccggccagggactcgaatggatcggccaaatctatcccggcgacggcgacaccaactacaacggcaagttcaagggcagagccacactgaccgccgatacctctagcagcacagcctacatgcagctgagcagcctgaccagcgaagatagcgccgtgtacttctgtgcccggtccatcacaacagtcgtgggctgcgctatggactattggggccagggaacaagcgtgaccgtgtctagtacgcgtgaggacctgaagaacgtgttcccacctgaggtggccgtgttcgagcctagcgaggccgagatcagccacacccagaaagccaccctcgtgtgcctggctaccggcttctaccccgaccatgtggaactgtcttggtgggtcaacggcaaagaggtgcacagcggcgtgtgtaccgacccccagccactgaaagaacagcccgccctgaacgacagccggtactgcctgagcagcagactgagagtgtccgccaccttctggcagaacccccggaaccacttcagatgccaggtgcagttctacggcctgagcgagaacgacgagtggacccaggacagagccaagcccgtgacccagatcgtgtctgccgaagcctggggcagagccgattgcgacgtgaagctggtggaaaagagcttcgagacagacaccaacctgaacttccagaacctgagcgtgatcggcttcagaatcctgctgctgaaagtggccggctttaacctgctgatgaccctgcggctgtggtccagc

SEQ ID NO: 34079 - DNA, 2289 bp, synthetic construct
  source 1..2289: mol_type = other DNA
atggccttaccagtgaccgccttgctcctgccgctggccttgctgctccacgccgccaggccggaagttcagctgcttgagtctggcggaggactggttcaacctggcggaagcctgagactgtcttgtgccgccagcggcttcatcttcagcagctacgccatgagctgggtccgacaggctcctggaaagggccaagaatgggtttccggcgttagcggcacaggcgtgaacacctactacgccgatagcgtgaagggcagattcaccatcagccgggacaacagcaagaacaccctgtacctccagatgaacagcctgagagccgaggacaccgccgtgtactattgtgcctctggcaaaggctgggacagcggctcttggtacgaggactatagaggccagggcaccctggtcacagtttcttcaggtaccggcggaggcggatctggcggcggaggtagcggtggcggaggatctgaattcgacatccagatgacacagagccctagcagcctgtctgccagcgtgggagacagagtgaccatcacatgcaaggccagcgaccacatcaacaactggctggcctggtatcagcagaagcctggacaggcccctaagctgctgatctacggcgctaccacactggaaacaggcgtgcccagcagattttctggcagcggctctggcaccgactacaccctgacaatatccagcctccagcctgaggacttcgccacctactactgtcagcagagctggaacaccccttggacattcggccagggcaccaagctggaaatcaagagactcgaggacctgaagaacgtgttcccacctgaggtggccgtgttcgagcctagcgaggccgagatcagccacacccagaaagccaccctcgtgtgcctggctaccggcttctaccccgaccatgtggaactgtcttggtgggtcaacggcaaagaggtgcacagcggcgtgtgtaccgacccccagccactgaaagaacagcccgccctgaacgacagccggtactgcctgagcagcagactgagagtgtccgccaccttctggcagaacccccggaaccacttcagatgccaggtgcagttctacggcctgagcgagaacgacgagtggacccaggacagagccaagcccgtgacccagatcgtgtctgccgaagcctggggcagagccgattgcgacgtgaagctggtggaaaagagcttcgagacagacaccaacctgaacttccagaacctgagcgtgatcggcttcagaatcctgctgctgaaagtggccggctttaacctgctgatgaccctgcggctgtggtccagcagggccaagcgatctggatctggagcaacaaacttctcactactcaaacaagcaggtgacgtggaggagaatcccgggcctactagtatggactggatttggcgcatccttttccttgtcggcgctgctaccggcgcgcattccttcgaacaagttcagcttcaacagcctggcgctgagctggtcaaacctggcgcttctgtgaagatgagctgcaaagccagcggctacgccttcagcagctcttggatcaactggatgaagcagaaacccggccagggactcgaatggatcggccaaatctatcccggcgacggcgacaccaactacaacggcaagttcaagggcagagccacactgaccgccgatacctctagcagcacagcctacatgcagctgagcagcctgaccagcgaagatagcgccgtgtacttctgtgcccggtccatcacaacagtcgtgggctgcgctatggactattggggccagggaacaagcgtgaccgtgtctagtacgcgtatccagaaccctgatcctgccgtgtaccagctgcgggatagcaagagcagcgacaagagcgtgtgtctgttcaccgacttcgacagccagaccaacgtgtcccagagcaaggactccgacgtgtacatcaccgataagtgcgtgctggacatgcggagcatggacttcaagagcaactccgccgtggcctggtccaacaagtccgatttcgcctgcgccaacgccttcaacaacagcattatccccgaggacacattcttcccaagccccgagagcagctgcggctttaccagcgagagctaccagcagggcgtgctgagcgccaccatcctgtacgagatcctgctgggcaaggccaccctgtacgccgtgctggtgtctgccctggtgctgatggctatggtcaagcggaaggacagccgggga

SEQ ID NO: 34080 - DNA, 2301 bp, synthetic construct
  source 1..2301: mol_type = other DNA
atggccttaccagtgaccgccttgctcctgccgctggccttgctgctccacgccgccaggccggaagttcagctgcttgagtctggcggaggactggttcaacctggcggaagcctgagactgtcttgtgccgccagcggcttcatcttcagcagctacgccatgagctgggtccgacaggctcctggaaagggccaagaatgggtttccggcgttagcggcacaggcgtgaacacctactacgccgatagcgtgaagggcagattcaccatcagccgggacaacagcaagaacaccctgtacctccagatgaacagcctgagagccgaggacaccgccgtgtactattgtgcctctggcaaaggctgggacagcggctcttggtacgaggactatagaggccagggcaccctggtcacagtttcttcaggtaccggcggaggcggatctggcggcggaggtagcggtggcggaggatctgaattcgacatccagatgacacagagccctagcagcctgtctgccagcgtgggagacagagtgaccatcacatgcaaggccagcgaccacatcaacaactggctggcctggtatcagcagaagcctggacaggcccctaagctgctgatctacggcgctaccacactggaaacaggcgtgcccagcagattttctggcagcggctctggcaccgactacaccctgacaatatccagcctccagcctgaggacttcgccacctactactgtcagcagagctggaacaccccttggacattcggccagggcaccaagctggaaatcaagagactcgagatccagaaccctgatcctgccgtgtaccagctgcgggatagcaagagcagcgacaagagcgtgtgtctgttcaccgacttcgacagccagaccaacgtgtcccagagcaaggactccgacgtgtacatcaccgataagtgcgtgctggacatgcggagcatggacttcaagagcaactccgccgtggcctggtccaacaagtccgatttcgcctgcgccaacgccttcaacaacagcattatccccgaggacacattcttcccaagccccgagagcagctgcggctttaccagcgagagctaccagcagggcgtgctgagcgccaccatcctgtacgagatcctgctgggcaaggccaccctgtacgccgtgctggtgtctgccctggtgctgatggctatggtcaagcggaaggacagccggggacgcgccaagagaagcggatctggcgtgaagcagaccctgaatttcgacctgctgaagctggctggcgacgtggaatccaacccaggccctactagtatggactggatttggcgcatccttttccttgtcggcgctgctaccggcgcgcattccttcgaacaagttcagcttcaacagcctggcgctgagctggtcaaacctggcgcttctgtgaagatgagctgcaaagccagcggctacgccttcagcagctcttggatcaactggatgaagcagaaacccggccagggactcgaatggatcggccaaatctatcccggcgacggcgacaccaactacaacggcaagttcaagggcagagccacactgaccgccgatacctctagcagcacagcctacatgcagctgagcagcctgaccagcgaagatagcgccgtgtacttctgtgcccggtccatcacaacagtcgtgggctgcgctatggactattggggccagggaacaagcgtgaccgtgtctagtacgcgtgaggacctgaagaacgtgttcccacctgaggtggccgtgttcgagcctagcgaggccgagatcagccacacccagaaagccaccctcgtgtgcctggctaccggcttctaccccgaccatgtggaactgtcttggtgggtcaacggcaaagaggtgcacagcggcgtgtgtaccgacccccagccactgaaagaacagcccgccctgaacgacagccggtactgcctgagcagcagactgagagtgtccgccaccttctggcagaacccccggaaccacttcagatgccaggtgcagttctacggcctgagcgagaacgacgagtggacccaggacagagccaagcccgtgacccagatcgtgtctgccgaagcctggggcagagccgattgcgacgtgaagctggtggaaaagagcttcgagacagacaccaacctgaacttccagaacctgagcgtgatcggcttcagaatcctgctgctgaaagtggccggctttaacctgctgatgaccctgcggctgtggtccagc

SEQ ID NO: 34081 - DNA, 2193 bp, synthetic construct
  source 1..2193: mol_type = other DNA
atggccttaccagtgaccgccttgctcctgccgctggccttgctgctccacgccgccaggccgatgctgcccgctcctaagaatctggtggtgtccagaatcaccgaggacagcgccagactgtcttggacagctcctgatgccgccttcgacagcttccccatccggtacatcgagacactgatctggggcgaagccatctggctggatgtgcctggaagcgagagaagctacgacctgaccggactgaagcctggcacagagtatgccgtggtcatcaccggcgtgaaaggcggcagattctctagccctctggtggcctctttcaccaccggtaccggcggaggcggatctggcggcggaggtagcggtggcggaggatctgaattcgacatccagatgacacagagccctagcagcctgtctgccagcgtgggagacagagtgaccatcacatgcaaggccagcgaccacatcaacaactggctggcctggtatcagcagaagcctggacaggcccctaagctgctgatctacggcgctaccacactggaaacaggcgtgcccagcagattttctggcagcggctctggcaccgactacaccctgacaatatccagcctccagcctgaggacttcgccacctactactgtcagcagagctggaacaccccttggacattcggccagggcaccaagctggaaatcaagagactcgaggacctgaagaacgtgttcccacctgaggtggccgtgttcgagcctagcgaggccgagatcagccacacccagaaagccaccctcgtgtgcctggctaccggcttctaccccgaccatgtggaactgtcttggtgggtcaacggcaaagaggtgcacagcggcgtgtgtaccgacccccagccactgaaagaacagcccgccctgaacgacagccggtactgcctgagcagcagactgagagtgtccgccaccttctggcagaacccccggaaccacttcagatgccaggtgcagttctacggcctgagcgagaacgacgagtggacccaggacagagccaagcccgtgacccagatcgtgtctgccgaagcctggggcagagccgattgcgacgtgaagctggtggaaaagagcttcgagacagacaccaacctgaacttccagaacctgagcgtgatcggcttcagaatcctgctgctgaaagtggccggctttaacctgctgatgaccctgcggctgtggtccagcagggccaagcgatctggatctggagcaacaaacttctcactactcaaacaagcaggtgacgtggaggagaatcccgggcctactagtatggactggatttggcgcatccttttccttgtcggcgctgctaccggcgcgcattccttcgaacaagttcagcttcaacagcctggcgctgagctggtcaaacctggcgcttctgtgaagatgagctgcaaagccagcggctacgccttcagcagctcttggatcaactggatgaagcagaaacccggccagggactcgaatggatcggccaaatctatcccggcgacggcgacaccaactacaacggcaagttcaagggcagagccacactgaccgccgatacctctagcagcacagcctacatgcagctgagcagcctgaccagcgaagatagcgccgtgtacttctgtgcccggtccatcacaacagtcgtgggctgcgctatggactattggggccagggaacaagcgtgaccgtgtctagtacgcgtatccagaaccctgatcctgccgtgtaccagctgcgggatagcaagagcagcgacaagagcgtgtgtctgttcaccgacttcgacagccagaccaacgtgtcccagagcaaggactccgacgtgtacatcaccgataagtgcgtgctggacatgcggagcatggacttcaagagcaactccgccgtggcctggtccaacaagtccgatttcgcctgcgccaacgccttcaacaacagcattatccccgaggacacattcttcccaagccccgagagcagctgcggctttaccagcgagagctaccagcagggcgtgctgagcgccaccatcctgtacgagatcctgctgggcaaggccaccctgtacgccgtgctggtgtctgccctggtgctgatggctatggtcaagcggaaggacagccgggga

SEQ ID NO: 34082 - DNA, 2205 bp, synthetic construct
  source 1..2205: mol_type = other DNA
atggccttaccagtgaccgccttgctcctgccgctggccttgctgctccacgccgccaggccgatgctgcccgctcctaagaatctggtggtgtccagaatcaccgaggacagcgccagactgtcttggacagctcctgatgccgccttcgacagcttccccatccggtacatcgagacactgatctggggcgaagccatctggctggatgtgcctggaagcgagagaagctacgacctgaccggactgaagcctggcacagagtatgccgtggtcatcaccggcgtgaaaggcggcagattctctagccctctggtggcctctttcaccaccggtaccggcggaggcggatctggcggcggaggtagcggtggcggaggatctgaattcgacatccagatgacacagagccctagcagcctgtctgccagcgtgggagacagagtgaccatcacatgcaaggccagcgaccacatcaacaactggctggcctggtatcagcagaagcctggacaggcccctaagctgctgatctacggcgctaccacactggaaacaggcgtgcccagcagattttctggcagcggctctggcaccgactacaccctgacaatatccagcctccagcctgaggacttcgccacctactactgtcagcagagctggaacaccccttggacattcggccagggcaccaagctggaaatcaagagactcgagatccagaaccctgatcctgccgtgtaccagctgcgggatagcaagagcagcgacaagagcgtgtgtctgttcaccgacttcgacagccagaccaacgtgtcccagagcaaggactccgacgtgtacatcaccgataagtgcgtgctggacatgcggagcatggacttcaagagcaactccgccgtggcctggtccaacaagtccgatttcgcctgcgccaacgccttcaacaacagcattatccccgaggacacattcttcccaagccccgagagcagctgcggctttaccagcgagagctaccagcagggcgtgctgagcgccaccatcctgtacgagatcctgctgggcaaggccaccctgtacgccgtgctggtgtctgccctggtgctgatggctatggtcaagcggaaggacagccggggacgcgccaagagaagcggatctggcgtgaagcagaccctgaatttcgacctgctgaagctggctggcgacgtggaatccaacccaggccctactagtatggactggatttggcgcatccttttccttgtcggcgctgctaccggcgcgcattccttcgaacaagttcagcttcaacagcctggcgctgagctggtcaaacctggcgcttctgtgaagatgagctgcaaagccagcggctacgccttcagcagctcttggatcaactggatgaagcagaaacccggccagggactcgaatggatcggccaaatctatcccggcgacggcgacaccaactacaacggcaagttcaagggcagagccacactgaccgccgatacctctagcagcacagcctacatgcagctgagcagcctgaccagcgaagatagcgccgtgtacttctgtgcccggtccatcacaacagtcgtgggctgcgctatggactattggggccagggaacaagcgtgaccgtgtctagtacgcgtgaggacctgaagaacgtgttcccacctgaggtggccgtgttcgagcctagcgaggccgagatcagccacacccagaaagccaccctcgtgtgcctggctaccggcttctaccccgaccatgtggaactgtcttggtgggtcaacggcaaagaggtgcacagcggcgtgtgtaccgacccccagccactgaaagaacagcccgccctgaacgacagccggtactgcctgagcagcagactgagagtgtccgccaccttctggcagaacccccggaaccacttcagatgccaggtgcagttctacggcctgagcgagaacgacgagtggacccaggacagagccaagcccgtgacccagatcgtgtctgccgaagcctggggcagagccgattgcgacgtgaagctggtggaaaagagcttcgagacagacaccaacctgaacttccagaacctgagcgtgatcggcttcagaatcctgctgctgaaagtggccggctttaacctgctgatgaccctgcggctgtggtccagc

SEQ ID NO: 34083 - DNA, 2280 bp, synthetic construct
  source 1..2280: mol_type = other DNA
atggccttaccagtgaccgccttgctcctgccgctggccttgctgctccacgccgccaggccggaggtgcagctggttgaatctggcggaggactggttcagcctggcggatctctgagactgtcttgtgccgccagcggcttcaacatcaaggatacctgtatcggctgggttcgcagagcccctggcaaagaggaagaactggtcgccaaaatctgcaagtacagcggccacaccagatacgccgacagcgtgaagggcagattcaccatcagcgccgacaccagcaagaacaccgcctacctccagatgaacagcctgagagccgaggacaccgccgtgtactattgtgccgctgtgtccgtcagagatgggcactacaattactggggccagggcaccaccgtgaccgtttcttcaggtaccggcggaggcggatctggcggcggaggtagcggtggcggaggatctgaattcgacatccagatgacacagagccctagcagcctgtctgccagcgtgggagacagagtgaccatcacatgcaaggccagcgaccacatcaacaactggctggcctggtatcagcagaagcctggacaggcccctaagctgctgatctacggcgctaccacactggaaacaggcgtgcccagcagattttctggcagcggctctggcaccgactacaccctgacaatatccagcctccagcctgaggacttcgccacctactactgtcagcagagctggaacaccccttggacattcggccagggcaccaagctggaaatcaagagactcgaggacctgaagaacgtgttcccacctgaggtggccgtgttcgagcctagcgaggccgagatcagccacacccagaaagccaccctcgtgtgcctggctaccggcttctaccccgaccatgtggaactgtcttggtgggtcaacggcaaagaggtgcacagcggcgtgtgtaccgacccccagccactgaaagaacagcccgccctgaacgacagccggtactgcctgagcagcagactgagagtgtccgccaccttctggcagaacccccggaaccacttcagatgccaggtgcagttctacggcctgagcgagaacgacgagtggacccaggacagagccaagcccgtgacccagatcgtgtctgccgaagcctggggcagagccgattgcgacgtgaagctggtggaaaagagcttcgagacagacaccaacctgaacttccagaacctgagcgtgatcggcttcagaatcctgctgctgaaagtggccggctttaacctgctgatgaccctgcggctgtggtccagcagggccaagcgatctggatctggagcaacaaacttctcactactcaaacaagcaggtgacgtggaggagaatcccgggcctactagtatggactggatttggcgcatccttttccttgtcggcgctgctaccggcgcgcattccttcgaacaagttcagcttcaacagcctggcgctgagctggtcaaacctggcgcttctgtgaagatgagctgcaaagccagcggctacgccttcagcagctcttggatcaactggatgaagcagaaacccggccagggactcgaatggatcggccaaatctatcccggcgacggcgacaccaactacaacggcaagttcaagggcagagccacactgaccgccgatacctctagcagcacagcctacatgcagctgagcagcctgaccagcgaagatagcgccgtgtacttctgtgcccggtccatcacaacagtcgtgggctgcgctatggactattggggccagggaacaagcgtgaccgtgtctagtacgcgtatccagaaccctgatcctgccgtgtaccagctgcgggatagcaagagcagcgacaagagcgtgtgtctgttcaccgacttcgacagccagaccaacgtgtcccagagcaaggactccgacgtgtacatcaccgataagtgcgtgctggacatgcggagcatggacttcaagagcaactccgccgtggcctggtccaacaagtccgatttcgcctgcgccaacgccttcaacaacagcattatccccgaggacacattcttcccaagccccgagagcagctgcggctttaccagcgagagctaccagcagggcgtgctgagcgccaccatcctgtacgagatcctgctgggcaaggccaccctgtacgccgtgctggtgtctgccctggtgctgatggctatggtcaagcggaaggacagccgggga

SEQ ID NO: 34084 - DNA, 2292 bp, synthetic construct
  source 1..2292: mol_type = other DNA
atggccttaccagtgaccgccttgctcctgccgctggccttgctgctccacgccgccaggccggaggtgcagctggttgaatctggcggaggactggttcagcctggcggatctctgagactgtcttgtgccgccagcggcttcaacatcaaggatacctgtatcggctgggttcgcagagcccctggcaaagaggaagaactggtcgccaaaatctgcaagtacagcggccacaccagatacgccgacagcgtgaagggcagattcaccatcagcgccgacaccagcaagaacaccgcctacctccagatgaacagcctgagagccgaggacaccgccgtgtactattgtgccgctgtgtccgtcagagatgggcactacaattactggggccagggcaccaccgtgaccgtttcttcaggtaccggcggaggcggatctggcggcggaggtagcggtggcggaggatctgaattcgacatccagatgacacagagccctagcagcctgtctgccagcgtgggagacagagtgaccatcacatgcaaggccagcgaccacatcaacaactggctggcctggtatcagcagaagcctggacaggcccctaagctgctgatctacggcgctaccacactggaaacaggcgtgcccagcagattttctggcagcggctctggcaccgactacaccctgacaatatccagcctccagcctgaggacttcgccacctactactgtcagcagagctggaacaccccttggacattcggccagggcaccaagctggaaatcaagagactcgagatccagaaccctgatcctgccgtgtaccagctgcgggatagcaagagcagcgacaagagcgtgtgtctgttcaccgacttcgacagccagaccaacgtgtcccagagcaaggactccgacgtgtacatcaccgataagtgcgtgctggacatgcggagcatggacttcaagagcaactccgccgtggcctggtccaacaagtccgatttcgcctgcgccaacgccttcaacaacagcattatccccgaggacacattcttcccaagccccgagagcagctgcggctttaccagcgagagctaccagcagggcgtgctgagcgccaccatcctgtacgagatcctgctgggcaaggccaccctgtacgccgtgctggtgtctgccctggtgctgatggctatggtcaagcggaaggacagccggggacgcgccaagagaagcggatctggcgtgaagcagaccctgaatttcgacctgctgaagctggctggcgacgtggaatccaacccaggccctactagtatggactggatttggcgcatccttttccttgtcggcgctgctaccggcgcgcattccttcgaacaagttcagcttcaacagcctggcgctgagctggtcaaacctggcgcttctgtgaagatgagctgcaaagccagcggctacgccttcagcagctcttggatcaactggatgaagcagaaacccggccagggactcgaatggatcggccaaatctatcccggcgacggcgacaccaactacaacggcaagttcaagggcagagccacactgaccgccgatacctctagcagcacagcctacatgcagctgagcagcctgaccagcgaagatagcgccgtgtacttctgtgcccggtccatcacaacagtcgtgggctgcgctatggactattggggccagggaacaagcgtgaccgtgtctagtacgcgtgaggacctgaagaacgtgttcccacctgaggtggccgtgttcgagcctagcgaggccgagatcagccacacccagaaagccaccctcgtgtgcctggctaccggcttctaccccgaccatgtggaactgtcttggtgggtcaacggcaaagaggtgcacagcggcgtgtgtaccgacccccagccactgaaagaacagcccgccctgaacgacagccggtactgcctgagcagcagactgagagtgtccgccaccttctggcagaacccccggaaccacttcagatgccaggtgcagttctacggcctgagcgagaacgacgagtggacccaggacagagccaagcccgtgacccagatcgtgtctgccgaagcctggggcagagccgattgcgacgtgaagctggtggaaaagagcttcgagacagacaccaacctgaacttccagaacctgagcgtgatcggcttcagaatcctgctgctgaaagtggccggctttaacctgctgatgaccctgcggctgtggtccagc

SEQ ID NO: 34085 - DNA, 3396 bp, synthetic construct
  source 1..3396: mol_type = other DNA
atggccttaccagtgaccgccttgctcctgccgctggccttgctgctccacgccgccaggccggaagtgcagctggttgaatctggcggaggactggttcaggctggcggatctctgagactgtcttgtgccgccagcggcagaacctttagcatgggctggtttagacaggcccctggcaaagagagagagttcgtcgccgccatcacatactctggcggcagcccttactacgccgactctgtgaagggcagattcaccatcagccgggacaacgccaagaacaccgtgtacctccagatgaacagcctgaagcctgaggacaccgccgtgtactactgcgccgccaatccaacatacggcagcgactggaacgccgagaattggggccagggaacccaagtgacagtgtctagcggtaccggcggaggcggatctggcggcggaggtagcggtggcggaggatctgaattcgacatccagatgacacagagccctagcagcctgtctgccagcgtgggagacagagtgaccatcacatgcaaggccagcgaccacatcaacaactggctggcctggtatcagcagaagcctggacaggcccctaagctgctgatctacggcgctaccacactggaaacaggcgtgcccagcagattttctggcagcggctctggcaccgactacaccctgacaatatccagcctccagcctgaggacttcgccacctactactgtcagcagagctggaacaccccttggacattcggccagggcaccaagctggaaatcaagagactcgaggacctgaagaacgtgttcccacctgaggtggccgtgttcgagcctagcgaggccgagatcagccacacccagaaagccaccctcgtgtgcctggctaccggcttctaccccgaccatgtggaactgtcttggtgggtcaacggcaaagaggtgcacagcggcgtgtgtaccgacccccagccactgaaagaacagcccgccctgaacgacagccggtactgcctgagcagcagactgagagtgtccgccaccttctggcagaacccccggaaccacttcagatgccaggtgcagttctacggcctgagcgagaacgacgagtggacccaggacagagccaagcccgtgacccagatcgtgtctgccgaagcctggggcagagccgattgcgacgtgaagctggtggaaaagagcttcgagacagacaccaacctgaacttccagaacctgagcgtgatcggcttcagaatcctgctgctgaaagtggccggctttaacctgctgatgaccctgcggctgtggtccagcagggccaagcgatctggatctggagcaacaaacttctcactactcaaacaagcaggtgacgtggaggagaatcccgggcctactagtgccaccatggactggatttggcgcatccttttccttgtcggcgctgctaccggcgcccattccgggcccgaagtgcaactggttgaatccggtggcggcctggtgcaagcaggcggatctctcagacttagctgtgccgcctccggcagaaccttcacaatgggatggtttaggcaggctccagggaaagagagagagttcgtcgccgccatctctctgtctcccacactggcctactacgccgactctgtgaaaggccggttcaccatctccagagataatgccaagaacaccgtggtgctgcaaatgaactctctgaaacccgaggatacagccctgtactattgtgccgctgaccggaagtccgtgatgagcatcagacccgattactggggacagggcacacaagtcacagtgtcctctggatccggcggcggaggatctggcggaggcggatctgggggcggaggctctttcgaacaagttcagcttcaacagcctggcgctgagctggtcaaacctggcgcttctgtgaagatgagctgcaaagccagcggctacgccttcagcagctcttggatcaactggatgaagcagaaacccggccagggactcgaatggatcggccaaatctatcccggcgacggcgacaccaactacaacggcaagttcaagggcagagccacactgaccgccgatacctctagcagcacagcctacatgcagctgagcagcctgaccagcgaagatagcgccgtgtacttctgtgcccggtccatcacaacagtcgtgggctgcgctatggactattggggccagggaacaagcgtgaccgtgtctagtacgcgtatccagaaccctgatcctgccgtgtaccagctgcgggatagcaagagcagcgacaagagcgtgtgtctgttcaccgacttcgacagccagaccaacgtgtcccagagcaaggactccgacgtgtacatcaccgataagtgcgtgctggacatgcggagcatggacttcaagagcaactccgccgtggcctggtccaacaagtccgatttcgcctgcgccaacgccttcaacaacagcattatccccgaggacacattcttcccaagccccgagagcagctgcggctttaccagcgagagctaccagcagggcgtgctgagcgccaccatcctgtacgagatcctgctgggcaaggccaccctgtacgccgtgctggtgtctgccctggtgctgatggctatggtcaagcggaaggacagccggggacgcgccaagagaagcggatctggcgtgaagcagaccctgaatttcgacctgctgaagctggctggcgacgtggaatccaacccaggcccttctagaggccatatgaccgagtacaagcccacggtgcgcctcgccacccgcgacgacgtccccagggccgtacgcaccctcgccgccgcgttcgccgactaccccgccacgcgccacaccgtcgatccggaccgccacatcgagcgggtcaccgagctgcaagaactcttcctcacgcgcgtcgggctcgacatcggcaaggtgtgggtcgcggacgacggcgccgcggtggcggtctggaccacgccggagagcgtcgaagcgggggcggtgttcgccgagatcggcccgcgcatggccgagttgagcggttcccggctggccgcgcagcaacagatggaaggcctcctggcgccgcaccggcccaaggagcccgcgtggttcctggccaccgtcggcgtctcgcccgaccaccagggcaagggtctgggcagcgccgtcgtgctccccggagtggaggcggccgagcgcgccggggtgcccgccttcctggagacctccgcgccccgcaacctccccttctacgagcggctcggcttcaccgtcaccgccgacgtcgaggtgcccgaaggaccgcgcacctggtgcatgacccgcaagcccggtgcctga

SEQ ID NO: 34086 - DNA, 2310 bp, synthetic construct
  source 1..2310: mol_type = other DNA
atggccttaccagtgaccgccttgctcctgccgctggccttgctgctccacgccgccaggccggaagtgcagctggttgaatctggcggaggactggttcagcctggcggatctctgagactgtcttgtgccgcctctggcttcgccagcgactactatatcatcggctggttcagacaggcccctggcaaagagagagagggcgtcagctgtatcagcagcagatacgccaacaccaactacgccgacagcgtgaagggcagattcaccatcagccgggacaacgccaagaacaccgtgtacctccagatgaacagcctgaagcctgaggacaccgccgtgtactactgtgccgccgacaccagaagatacacctgtcctgacattgccaccatgcaccggaacttcgattcttggggccagggcacactggtcaccgtttcttctggtaccggcggaggcggatctggcggcggaggtagcggtggcggaggatctgaattcgacatccagatgacacagagccctagcagcctgtctgccagcgtgggagacagagtgaccatcacatgcaaggccagcgaccacatcaacaactggctggcctggtatcagcagaagcctggacaggcccctaagctgctgatctacggcgctaccacactggaaacaggcgtgcccagcagattttctggcagcggctctggcaccgactacaccctgacaatatccagcctccagcctgaggacttcgccacctactactgtcagcagagctggaacaccccttggacattcggccagggcaccaagctggaaatcaagagactcgaggacctgaagaacgtgttcccacctgaggtggccgtgttcgagcctagcgaggccgagatcagccacacccagaaagccaccctcgtgtgcctggctaccggcttctaccccgaccatgtggaactgtcttggtgggtcaacggcaaagaggtgcacagcggcgtgtgtaccgacccccagccactgaaagaacagcccgccctgaacgacagccggtactgcctgagcagcagactgagagtgtccgccaccttctggcagaacccccggaaccacttcagatgccaggtgcagttctacggcctgagcgagaacgacgagtggacccaggacagagccaagcccgtgacccagatcgtgtctgccgaagcctggggcagagccgattgcgacgtgaagctggtggaaaagagcttcgagacagacaccaacctgaacttccagaacctgagcgtgatcggcttcagaatcctgctgctgaaagtggccggctttaacctgctgatgaccctgcggctgtggtccagcagggccaagcgatctggatctggagcaacaaacttctcactactcaaacaagcaggtgacgtggaggagaatcccgggcctactagtatggactggatttggcgcatccttttccttgtcggcgctgctaccggcgcgcattccttcgaacaagttcagcttcaacagcctggcgctgagctggtcaaacctggcgcttctgtgaagatgagctgcaaagccagcggctacgccttcagcagctcttggatcaactggatgaagcagaaacccggccagggactcgaatggatcggccaaatctatcccggcgacggcgacaccaactacaacggcaagttcaagggcagagccacactgaccgccgatacctctagcagcacagcctacatgcagctgagcagcctgaccagcgaagatagcgccgtgtacttctgtgcccggtccatcacaacagtcgtgggctgcgctatggactattggggccagggaacaagcgtgaccgtgtctagtacgcgtatccagaaccctgatcctgccgtgtaccagctgcgggatagcaagagcagcgacaagagcgtgtgtctgttcaccgacttcgacagccagaccaacgtgtcccagagcaaggactccgacgtgtacatcaccgataagtgcgtgctggacatgcggagcatggacttcaagagcaactccgccgtggcctggtccaacaagtccgatttcgcctgcgccaacgccttcaacaacagcattatccccgaggacacattcttcccaagccccgagagcagctgcggctttaccagcgagagctaccagcagggcgtgctgagcgccaccatcctgtacgagatcctgctgggcaaggccaccctgtacgccgtgctggtgtctgccctggtgctgatggctatggtcaagcggaaggacagccggggataa

SEQ ID NO: 34087 - DNA, 2310 bp, synthetic construct
  source 1..2310: mol_type = other DNA
atggccttaccagtgaccgccttgctcctgccgctggccttgctgctccacgccgccaggccggaagtgcagctggttgaatctggcggaggactggttcagcctggcggatctctgagactgagctgtgaagccagcggcttcgccagcgacgattacatcatcggctggttcagacaggcccctggcaaagagagagagggcgtcagctgcatcagctctaagtacgccaacaccgtgtacaccgacagcgtgaagggcagattcagactgagcagaggcaccgccaagaataccgtgtacctccagatgagcgccctgaagcctgaggataccgccgtgtactactgcgctatggacagccgcagagtgacatgccctgagatcagcaccatgcaccggaacttcgattcttggggccagggcacactggtcacagtgtcatctggtaccggcggaggcggatctggcggcggaggtagcggtggcggaggatctgaattcgacatccagatgacacagagccctagcagcctgtctgccagcgtgggagacagagtgaccatcacatgcaaggccagcgaccacatcaacaactggctggcctggtatcagcagaagcctggacaggcccctaagctgctgatctacggcgctaccacactggaaacaggcgtgcccagcagattttctggcagcggctctggcaccgactacaccctgacaatatccagcctccagcctgaggacttcgccacctactactgtcagcagagctggaacaccccttggacattcggccagggcaccaagctggaaatcaagagactcgaggacctgaagaacgtgttcccacctgaggtggccgtgttcgagcctagcgaggccgagatcagccacacccagaaagccaccctcgtgtgcctggctaccggcttctaccccgaccatgtggaactgtcttggtgggtcaacggcaaagaggtgcacagcggcgtgtgtaccgacccccagccactgaaagaacagcccgccctgaacgacagccggtactgcctgagcagcagactgagagtgtccgccaccttctggcagaacccccggaaccacttcagatgccaggtgcagttctacggcctgagcgagaacgacgagtggacccaggacagagccaagcccgtgacccagatcgtgtctgccgaagcctggggcagagccgattgcgacgtgaagctggtggaaaagagcttcgagacagacaccaacctgaacttccagaacctgagcgtgatcggcttcagaatcctgctgctgaaagtggccggctttaacctgctgatgaccctgcggctgtggtccagcagggccaagcgatctggatctggagcaacaaacttctcactactcaaacaagcaggtgacgtggaggagaatcccgggcctactagtatggactggatttggcgcatccttttccttgtcggcgctgctaccggcgcgcattccttcgaacaagttcagcttcaacagcctggcgctgagctggtcaaacctggcgcttctgtgaagatgagctgcaaagccagcggctacgccttcagcagctcttggatcaactggatgaagcagaaacccggccagggactcgaatggatcggccaaatctatcccggcgacggcgacaccaactacaacggcaagttcaagggcagagccacactgaccgccgatacctctagcagcacagcctacatgcagctgagcagcctgaccagcgaagatagcgccgtgtacttctgtgcccggtccatcacaacagtcgtgggctgcgctatggactattggggccagggaacaagcgtgaccgtgtctagtacgcgtatccagaaccctgatcctgccgtgtaccagctgcgggatagcaagagcagcgacaagagcgtgtgtctgttcaccgacttcgacagccagaccaacgtgtcccagagcaaggactccgacgtgtacatcaccgataagtgcgtgctggacatgcggagcatggacttcaagagcaactccgccgtggcctggtccaacaagtccgatttcgcctgcgccaacgccttcaacaacagcattatccccgaggacacattcttcccaagccccgagagcagctgcggctttaccagcgagagctaccagcagggcgtgctgagcgccaccatcctgtacgagatcctgctgggcaaggccaccctgtacgccgtgctggtgtctgccctggtgctgatggctatggtcaagcggaaggacagccggggataa

SEQ ID NO: 34088 - DNA, 2307 bp, synthetic construct
  source 1..2307: mol_type = other DNA
atggccttaccagtgaccgccttgctcctgccgctggccttgctgctccacgccgccaggccggaagtgcagctggttgaatctggcggaggactggttcagcctggcggatctctgagactgtcttgtgccgcctctggcttcgccagcgactactatatcatcggctggttcagacaggcccctggcaaagagagagagggcgtcagctgtatcagcagcagatacgccaacaccaactacgccgacagcgtgaagggcagattcaccatcagccgggacaacgccaagaacaccgtgtacctccagatgaacagcctgaagcctgaggacaccgccgtgtactactgtgccgccgacaccagaagatacacctgtcctgacattgccaccatgcaccggaacttcgattcttggggccagggcacactggtcaccgtttcttctggtaccggcggaggcggatctggcggcggaggtagcggtggcggaggatctgaattcgacatccagatgacacagagccctagcagcctgtctgccagcgtgggagacagagtgaccatcacatgcaaggccagcgaccacatcaacaactggctggcctggtatcagcagaagcctggacaggcccctaagctgctgatctacggcgctaccacactggaaacaggcgtgcccagcagattttctggcagcggctctggcaccgactacaccctgacaatatccagcctccagcctgaggacttcgccacctactactgtcagcagagctggaacaccccttggacattcggccagggcaccaagctggaaatcaagagactcgagatccagaaccctgatcctgccgtgtaccagctgcgggatagcaagagcagcgacaagagcgtgtgtctgttcaccgacttcgacagccagaccaacgtgtcccagagcaaggactccgacgtgtacatcaccgataagtgcgtgctggacatgcggagcatggacttcaagagcaactccgccgtggcctggtccaacaagtccgatttcgcctgcgccaacgccttcaacaacagcattatccccgaggacacattcttcccaagccccgagagcagctgcggctttaccagcgagagctaccagcagggcgtgctgagcgccaccatcctgtacgagatcctgctgggcaaggccaccctgtacgccgtgctggtgtctgccctggtgctgatggctatggtcaagcggaaggacagccggggaagggccaagcgatctggatctggagcaacaaacttctcactactcaaacaagcaggtgacgtggaggagaatcccgggcctactagtatggactggatttggcgcatccttttccttgtcggcgctgctaccggcgcgcattccttcgaacaagttcagcttcaacagcctggcgctgagctggtcaaacctggcgcttctgtgaagatgagctgcaaagccagcggctacgccttcagcagctcttggatcaactggatgaagcagaaacccggccagggactcgaatggatcggccaaatctatcccggcgacggcgacaccaactacaacggcaagttcaagggcagagccacactgaccgccgatacctctagcagcacagcctacatgcagctgagcagcctgaccagcgaagatagcgccgtgtacttctgtgcccggtccatcacaacagtcgtgggctgcgctatggactattggggccagggaacaagcgtgaccgtgtctagtacgcgtgacctgaagaacgtgttcccacctgaggtggccgtgttcgagcctagcgaggccgagatcagccacacccagaaagccaccctcgtgtgcctggctaccggcttctaccccgaccatgtggaactgtcttggtgggtcaacggcaaagaggtgcacagcggcgtgtgtaccgacccccagccactgaaagaacagcccgccctgaacgacagccggtactgcctgagcagcagactgagagtgtccgccaccttctggcagaacccccggaaccacttcagatgccaggtgcagttctacggcctgagcgagaacgacgagtggacccaggacagagccaagcccgtgacccagatcgtgtctgccgaagcctggggcagagccgattgcgacgtgaagctggtggaaaagagcttcgagacagacaccaacctgaacttccagaacctgagcgtgatcggcttcagaatcctgctgctgaaagtggccggctttaacctgctgatgaccctgcggctgtggtccagc

SEQ ID NO: 34089 - DNA, 2307 bp, synthetic construct
  source 1..2307: mol_type = other DNA
atggccttaccagtgaccgccttgctcctgccgctggccttgctgctccacgccgccaggccggaagtgcagctggttgaatctggcggaggactggttcagcctggcggatctctgagactgagctgtgaagccagcggcttcgccagcgacgattacatcatcggctggttcagacaggcccctggcaaagagagagagggcgtcagctgcatcagctctaagtacgccaacaccgtgtacaccgacagcgtgaagggcagattcagactgagcagaggcaccgccaagaataccgtgtacctccagatgagcgccctgaagcctgaggataccgccgtgtactactgcgctatggacagccgcagagtgacatgccctgagatcagcaccatgcaccggaacttcgattcttggggccagggcacactggtcacagtgtcatctggtaccggcggaggcggatctggcggcggaggtagcggtggcggaggatctgaattcgacatccagatgacacagagccctagcagcctgtctgccagcgtgggagacagagtgaccatcacatgcaaggccagcgaccacatcaacaactggctggcctggtatcagcagaagcctggacaggcccctaagctgctgatctacggcgctaccacactggaaacaggcgtgcccagcagattttctggcagcggctctggcaccgactacaccctgacaatatccagcctccagcctgaggacttcgccacctactactgtcagcagagctggaacaccccttggacattcggccagggcaccaagctggaaatcaagagactcgagatccagaaccctgatcctgccgtgtaccagctgcgggatagcaagagcagcgacaagagcgtgtgtctgttcaccgacttcgacagccagaccaacgtgtcccagagcaaggactccgacgtgtacatcaccgataagtgcgtgctggacatgcggagcatggacttcaagagcaactccgccgtggcctggtccaacaagtccgatttcgcctgcgccaacgccttcaacaacagcattatccccgaggacacattcttcccaagccccgagagcagctgcggctttaccagcgagagctaccagcagggcgtgctgagcgccaccatcctgtacgagatcctgctgggcaaggccaccctgtacgccgtgctggtgtctgccctggtgctgatggctatggtcaagcggaaggacagccggggaagggccaagcgatctggatctggagcaacaaacttctcactactcaaacaagcaggtgacgtggaggagaatcccgggcctactagtatggactggatttggcgcatccttttccttgtcggcgctgctaccggcgcgcattccttcgaacaagttcagcttcaacagcctggcgctgagctggtcaaacctggcgcttctgtgaagatgagctgcaaagccagcggctacgccttcagcagctcttggatcaactggatgaagcagaaacccggccagggactcgaatggatcggccaaatctatcccggcgacggcgacaccaactacaacggcaagttcaagggcagagccacactgaccgccgatacctctagcagcacagcctacatgcagctgagcagcctgaccagcgaagatagcgccgtgtacttctgtgcccggtccatcacaacagtcgtgggctgcgctatggactattggggccagggaacaagcgtgaccgtgtctagtacgcgtgacctgaagaacgtgttcccacctgaggtggccgtgttcgagcctagcgaggccgagatcagccacacccagaaagccaccctcgtgtgcctggctaccggcttctaccccgaccatgtggaactgtcttggtgggtcaacggcaaagaggtgcacagcggcgtgtgtaccgacccccagccactgaaagaacagcccgccctgaacgacagccggtactgcctgagcagcagactgagagtgtccgccaccttctggcagaacccccggaaccacttcagatgccaggtgcagttctacggcctgagcgagaacgacgagtggacccaggacagagccaagcccgtgacccagatcgtgtctgccgaagcctggggcagagccgattgcgacgtgaagctggtggaaaagagcttcgagacagacaccaacctgaacttccagaacctgagcgtgatcggcttcagaatcctgctgctgaaagtggccggctttaacctgctgatgaccctgcggctgtggtccagc

SEQ ID NO: 34090 - DNA, 2280 bp, synthetic construct
  source 1..2280: mol_type = other DNA
atggccttaccagtgaccgccttgctcctgccgctggccttgctgctccacgccgccaggccgcaagtcaaactggaagaaagcggtggcggcctggtgcaacctggcgaatctctgagactgagctgtagcgccagcggctccatcttcaaggtgttcagagtgttcgccatgagctggtacaggcaaggccctggcaagcagagagagctggtcgcctctatcagcagcggcgagacaaccacatacgccgaatctgtgaaaggccggttcaccatcagccgggataatgccaagaataccgcctatctccagatggactccctgaagcctgaagatacagctgtgtactactgcaacgccgaccataccttcaccggcgatttttggggccagggaacccaagtgaccgtgtctagtggtaccggcggaggcggatctggcggcggaggtagcggtggcggaggatctgaattcgacatccagatgacacagagccctagcagcctgtctgccagcgtgggagacagagtgaccatcacatgcaaggccagcgaccacatcaacaactggctggcctggtatcagcagaagcctggacaggcccctaagctgctgatctacggcgctaccacactggaaacaggcgtgcccagcagattttctggcagcggctctggcaccgactacaccctgacaatatccagcctccagcctgaggacttcgccacctactactgtcagcagagctggaacaccccttggacattcggccagggcaccaagctggaaatcaagagactcgagatccagaaccctgatcctgccgtgtaccagctgcgggatagcaagagcagcgacaagagcgtgtgtctgttcaccgacttcgacagccagaccaacgtgtcccagagcaaggactccgacgtgtacatcaccgataagtgcgtgctggacatgcggagcatggacttcaagagcaactccgccgtggcctggtccaacaagtccgatttcgcctgcgccaacgccttcaacaacagcattatccccgaggacacattcttcccaagccccgagagcagctgcggctttaccagcgagagctaccagcagggcgtgctgagcgccaccatcctgtacgagatcctgctgggcaaggccaccctgtacgccgtgctggtgtctgccctggtgctgatggctatggtcaagcggaaggacagccggggaagggccaagcgatctggatctggagcaacaaacttctcactactcaaacaagcaggtgacgtggaggagaatcccgggcctactagtatggactggatttggcgcatccttttccttgtcggcgctgctaccggcgcgcattccttcgaacaagttcagcttcaacagcctggcgctgagctggtcaaacctggcgcttctgtgaagatgagctgcaaagccagcggctacgccttcagcagctcttggatcaactggatgaagcagaaacccggccagggactcgaatggatcggccaaatctatcccggcgacggcgacaccaactacaacggcaagttcaagggcagagccacactgaccgccgatacctctagcagcacagcctacatgcagctgagcagcctgaccagcgaagatagcgccgtgtacttctgtgcccggtccatcacaacagtcgtgggctgcgctatggactattggggccagggaacaagcgtgaccgtgtctagtacgcgtgacctgaagaacgtgttcccacctgaggtggccgtgttcgagcctagcgaggccgagatcagccacacccagaaagccaccctcgtgtgcctggctaccggcttctaccccgaccatgtggaactgtcttggtgggtcaacggcaaagaggtgcacagcggcgtgtgtaccgacccccagccactgaaagaacagcccgccctgaacgacagccggtactgcctgagcagcagactgagagtgtccgccaccttctggcagaacccccggaaccacttcagatgccaggtgcagttctacggcctgagcgagaacgacgagtggacccaggacagagccaagcccgtgacccagatcgtgtctgccgaagcctggggcagagccgattgcgacgtgaagctggtggaaaagagcttcgagacagacaccaacctgaacttccagaacctgagcgtgatcggcttcagaatcctgctgctgaaagtggccggctttaacctgctgatgaccctgcggctgtggtccagc

SEQ ID NO: 34091 - DNA, 2286 bp, synthetic construct
  source 1..2286: mol_type = other DNA
atggccttaccagtgaccgccttgctcctgccgctggccttgctgctccacgccgccaggccggacatccagatgacacagagccctagcagcctgtctgccagcgtgggagacagagtgaccatcacatgcaaggccagcgaccacatcaacaactggctggcctggtatcagcagaagcctggacaggcccctaagctgctgatctacggcgctaccacactggaaacaggcgtgcccagcagattttctggcagcggctctggcaccgactacaccctgacaatatccagcctccagcctgaggacttcgccacctactactgtcagcagagctggaacaccccttggacattcggccagggcaccaagctggaaatcaagagactcgaggacctgaagaacgtgttcccacctgaggtggccgtgttcgagcctagcgaggccgagatcagccacacccagaaagccaccctcgtgtgcctggctaccggcttctaccccgaccatgtggaactgtcttggtgggtcaacggcaaagaggtgcacagcggcgtgtgtaccgacccccagccactgaaagaacagcccgccctgaacgacagccggtactgcctgagcagcagactgagagtgtccgccaccttctggcagaacccccggaaccacttcagatgccaggtgcagttctacggcctgagcgagaacgacgagtggacccaggacagagccaagcccgtgacccagatcgtgtctgccgaagcctggggcagagccgattgcgacgtgaagctggtggaaaagagcttcgagacagacaccaacctgaacttccagaacctgagcgtgatcggcttcagaatcctgctgctgaaagtggccggctttaacctgctgatgaccctgcggctgtggtccagcagggccaagcgatctggatctggagcaacaaacttctcactactcaaacaagcaggtgacgtggaggagaatcccgggcctactagtgccaccatggactggatttggcgcatccttttccttgtcggcgctgctaccggcgcccattccgggcccgaagtgcagctggttgaatctggcggaggactggttcaggctggcggatctctgagactgtcttgtgccgccagcggcagaacctttagcatgggctggtttagacaggcccctggcaaagagagagagttcgtcgccgccatcacatactctggcggcagcccttactacgccgactctgtgaagggcagattcaccatcagccgggacaacgccaagaacaccgtgtacctccagatgaacagcctgaagcctgaggacaccgccgtgtactactgcgccgccaatccaacatacggcagcgactggaacgccgagaattggggccagggaacccaagtgacagtgtctagcggatccggcggcggaggatctggcggaggcggatctgggggcggaggctctttcgaacaagttcagcttcaacagcctggcgctgagctggtcaaacctggcgcttctgtgaagatgagctgcaaagccagcggctacgccttcagcagctcttggatcaactggatgaagcagaaacccggccagggactcgaatggatcggccaaatctatcccggcgacggcgacaccaactacaacggcaagttcaagggcagagccacactgaccgccgatacctctagcagcacagcctacatgcagctgagcagcctgaccagcgaagatagcgccgtgtacttctgtgcccggtccatcacaacagtcgtgggctgcgctatggactattggggccagggaacaagcgtgaccgtgtctagtacgcgtatccagaaccctgatcctgccgtgtaccagctgcgggatagcaagagcagcgacaagagcgtgtgtctgttcaccgacttcgacagccagaccaacgtgtcccagagcaaggactccgacgtgtacatcaccgataagtgcgtgctggacatgcggagcatggacttcaagagcaactccgccgtggcctggtccaacaagtccgatttcgcctgcgccaacgccttcaacaacagcattatccccgaggacacattcttcccaagccccgagagcagctgcggctttaccagcgagagctaccagcagggcgtgctgagcgccaccatcctgtacgagatcctgctgggcaaggccaccctgtacgccgtgctggtgtctgccctggtgctgatggctatggtcaagcggaaggacagccggggataa

SEQ ID NO: 34092 - DNA, 2289 bp, synthetic construct
  source 1..2289: mol_type = other DNA
atggccttaccagtgaccgccttgctcctgccgctggccttgctgctccacgccgccaggccggacatccagatgacacagagccctagcagcctgtctgccagcgtgggagacagagtgaccatcacatgcaaggccagcgaccacatcaacaactggctggcctggtatcagcagaagcctggacaggcccctaagctgctgatctacggcgctaccacactggaaacaggcgtgcccagcagattttctggcagcggctctggcaccgactacaccctgacaatatccagcctccagcctgaggacttcgccacctactactgtcagcagagctggaacaccccttggacattcggccagggcaccaagctggaaatcaagagactcgaggacctgaagaacgtgttcccacctgaggtggccgtgttcgagcctagcgaggccgagatcagccacacccagaaagccaccctcgtgtgcctggctaccggcttctaccccgaccatgtggaactgtcttggtgggtcaacggcaaagaggtgcacagcggcgtgtgtaccgacccccagccactgaaagaacagcccgccctgaacgacagccggtactgcctgagcagcagactgagagtgtccgccaccttctggcagaacccccggaaccacttcagatgccaggtgcagttctacggcctgagcgagaacgacgagtggacccaggacagagccaagcccgtgacccagatcgtgtctgccgaagcctggggcagagccgattgcgacgtgaagctggtggaaaagagcttcgagacagacaccaacctgaacttccagaacctgagcgtgatcggcttcagaatcctgctgctgaaagtggccggctttaacctgctgatgaccctgcggctgtggtccagcagggccaagcgatctggatctggagcaacaaacttctcactactcaaacaagcaggtgacgtggaggagaatcccgggcctactagtgccaccatggactggatttggcgcatccttttccttgtcggcgctgctaccggcgcccattccgggcccgaagtgcaactggtggaatctgggggcggactggtgcagccaggcggaagtctgaggctgtcttgtgccgcctccggcagcatcttcggcttcaacgacatggcctggtatcggcaggctcccggaaaacagcgcgagctggtggctctgattagcagagtgggcgtgaccagcagcgccgactctgtgaagggcagattcacaatctccagagtgaacgccaaggatacagtgtacctccagatgaactctctgaaacctgaggatacagcagtgtactattgctacatggaccagcggctggacggcagcacactggcctactggggacagggaactcaagtgacagtgtctagcggatccggcggcggaggatctggcggaggcggatctgggggcggaggctctttcgaacaagttcagcttcaacagcctggcgctgagctggtcaaacctggcgcttctgtgaagatgagctgcaaagccagcggctacgccttcagcagctcttggatcaactggatgaagcagaaacccggccagggactcgaatggatcggccaaatctatcccggcgacggcgacaccaactacaacggcaagttcaagggcagagccacactgaccgccgatacctctagcagcacagcctacatgcagctgagcagcctgaccagcgaagatagcgccgtgtacttctgtgcccggtccatcacaacagtcgtgggctgcgctatggactattggggccagggaacaagcgtgaccgtgtctagtacgcgtatccagaaccctgatcctgccgtgtaccagctgcgggatagcaagagcagcgacaagagcgtgtgtctgttcaccgacttcgacagccagaccaacgtgtcccagagcaaggactccgacgtgtacatcaccgataagtgcgtgctggacatgcggagcatggacttcaagagcaactccgccgtggcctggtccaacaagtccgatttcgcctgcgccaacgccttcaacaacagcattatccccgaggacacattcttcccaagccccgagagcagctgcggctttaccagcgagagctaccagcagggcgtgctgagcgccaccatcctgtacgagatcctgctgggcaaggccaccctgtacgccgtgctggtgtctgccctggtgctgatggctatggtcaagcggaaggacagccggggataa

SEQ ID NO: 34093 - DNA, 2277 bp, synthetic construct
  source 1..2277: mol_type = other DNA
atggccttaccagtgaccgccttgctcctgccgctggccttgctgctccacgccgccaggccggacatccagatgacacagagccctagcagcctgtctgccagcgtgggagacagagtgaccatcacatgcaaggccagcgaccacatcaacaactggctggcctggtatcagcagaagcctggacaggcccctaagctgctgatctacggcgctaccacactggaaacaggcgtgcccagcagattttctggcagcggctctggcaccgactacaccctgacaatatccagcctccagcctgaggacttcgccacctactactgtcagcagagctggaacaccccttggacattcggccagggcaccaagctggaaatcaagagactcgaggacctgaagaacgtgttcccacctgaggtggccgtgttcgagcctagcgaggccgagatcagccacacccagaaagccaccctcgtgtgcctggctaccggcttctaccccgaccatgtggaactgtcttggtgggtcaacggcaaagaggtgcacagcggcgtgtgtaccgacccccagccactgaaagaacagcccgccctgaacgacagccggtactgcctgagcagcagactgagagtgtccgccaccttctggcagaacccccggaaccacttcagatgccaggtgcagttctacggcctgagcgagaacgacgagtggacccaggacagagccaagcccgtgacccagatcgtgtctgccgaagcctggggcagagccgattgcgacgtgaagctggtggaaaagagcttcgagacagacaccaacctgaacttccagaacctgagcgtgatcggcttcagaatcctgctgctgaaagtggccggctttaacctgctgatgaccctgcggctgtggtccagcagggccaagcgatctggatctggagcaacaaacttctcactactcaaacaagcaggtgacgtggaggagaatcccgggcctactagtgccaccatggactggatttggcgcatccttttccttgtcggcgctgctaccggcgcccattccgggcccgaggtgcagctggttgaatctggcggaggactggttcaggctggcggatctctgagactgtcttgtgccgccagcggctctgtgttcagcggcaatgtgatgggctggtacagacaggcccctggcaaagaaagagagtgggttgccgccattgccagcggcggcagcatctactacagagactctgtgaagggcagattcaccatcagccgggacaacgccaagaacaccgtgtacctccagatgaacagcctgaagcctgaggacaccgccgtgtactactgcaactctcaccctcctacactgccctattggggcctgggaacccaagtgacagtgtcctctggatccggcggcggaggatctggcggaggcggatctgggggcggaggctctttcgaacaagttcagcttcaacagcctggcgctgagctggtcaaacctggcgcttctgtgaagatgagctgcaaagccagcggctacgccttcagcagctcttggatcaactggatgaagcagaaacccggccagggactcgaatggatcggccaaatctatcccggcgacggcgacaccaactacaacggcaagttcaagggcagagccacactgaccgccgatacctctagcagcacagcctacatgcagctgagcagcctgaccagcgaagatagcgccgtgtacttctgtgcccggtccatcacaacagtcgtgggctgcgctatggactattggggccagggaacaagcgtgaccgtgtctagtacgcgtatccagaaccctgatcctgccgtgtaccagctgcgggatagcaagagcagcgacaagagcgtgtgtctgttcaccgacttcgacagccagaccaacgtgtcccagagcaaggactccgacgtgtacatcaccgataagtgcgtgctggacatgcggagcatggacttcaagagcaactccgccgtggcctggtccaacaagtccgatttcgcctgcgccaacgccttcaacaacagcattatccccgaggacacattcttcccaagccccgagagcagctgcggctttaccagcgagagctaccagcagggcgtgctgagcgccaccatcctgtacgagatcctgctgggcaaggccaccctgtacgccgtgctggtgtctgccctggtgctgatggctatggtcaagcggaaggacagccggggataa

SEQ ID NO: 34094 - DNA, 2271 bp, synthetic construct
  source 1..2271: mol_type = other DNA
atggccttaccagtgaccgccttgctcctgccgctggccttgctgctccacgccgccaggccggacatccagatgacacagagccctagcagcctgtctgccagcgtgggagacagagtgaccatcacatgcaaggccagcgaccacatcaacaactggctggcctggtatcagcagaagcctggacaggcccctaagctgctgatctacggcgctaccacactggaaacaggcgtgcccagcagattttctggcagcggctctggcaccgactacaccctgacaatatccagcctccagcctgaggacttcgccacctactactgtcagcagagctggaacaccccttggacattcggccagggcaccaagctggaaatcaagagactcgaggacctgaagaacgtgttcccacctgaggtggccgtgttcgagcctagcgaggccgagatcagccacacccagaaagccaccctcgtgtgcctggctaccggcttctaccccgaccatgtggaactgtcttggtgggtcaacggcaaagaggtgcacagcggcgtgtgtaccgacccccagccactgaaagaacagcccgccctgaacgacagccggtactgcctgagcagcagactgagagtgtccgccaccttctggcagaacccccggaaccacttcagatgccaggtgcagttctacggcctgagcgagaacgacgagtggacccaggacagagccaagcccgtgacccagatcgtgtctgccgaagcctggggcagagccgattgcgacgtgaagctggtggaaaagagcttcgagacagacaccaacctgaacttccagaacctgagcgtgatcggcttcagaatcctgctgctgaaagtggccggctttaacctgctgatgaccctgcggctgtggtccagcagggccaagcgatctggatctggagcaacaaacttctcactactcaaacaagcaggtgacgtggaggagaatcccgggcctactagtgccaccatggactggatttggcgcatccttttccttgtcggcgctgctaccggcgcccattccgggcccgaagttcagctgctggaatctggcggaggactcgttcaacctggcggctctctgagactgagctgtgccgcttctggcttcagcttctctagctacgccctgagctgggttcgacaagctcccggaaagggccttgaatgggtgtccagcatcggcgagaatgacggcaccacagactatgccgatgccgtgaaaggccggtttaccatcagcagagacaattccaagaacacgctctatctgcaaatgaactccctgcgcgtggaagatacagccgtgtattattgcgtgaaggacggcatccactggggacagggaaccctggttacagtgtctagcggatccggcggcggaggatctggcggaggcggatctgggggcggaggctctttcgaacaagttcagcttcaacagcctggcgctgagctggtcaaacctggcgcttctgtgaagatgagctgcaaagccagcggctacgccttcagcagctcttggatcaactggatgaagcagaaacccggccagggactcgaatggatcggccaaatctatcccggcgacggcgacaccaactacaacggcaagttcaagggcagagccacactgaccgccgatacctctagcagcacagcctacatgcagctgagcagcctgaccagcgaagatagcgccgtgtacttctgtgcccggtccatcacaacagtcgtgggctgcgctatggactattggggccagggaacaagcgtgaccgtgtctagtacgcgtatccagaaccctgatcctgccgtgtaccagctgcgggatagcaagagcagcgacaagagcgtgtgtctgttcaccgacttcgacagccagaccaacgtgtcccagagcaaggactccgacgtgtacatcaccgataagtgcgtgctggacatgcggagcatggacttcaagagcaactccgccgtggcctggtccaacaagtccgatttcgcctgcgccaacgccttcaacaacagcattatccccgaggacacattcttcccaagccccgagagcagctgcggctttaccagcgagagctaccagcagggcgtgctgagcgccaccatcctgtacgagatcctgctgggcaaggccaccctgtacgccgtgctggtgtctgccctggtgctgatggctatggtcaagcggaaggacagccggggataa

SEQ ID NO: 34095 - DNA, 3378 bp, synthetic construct
  source 1..3378: mol_type = other DNA
atgggacccagactgctgttttgggctctgctgtgtctgctcggcacaggacctgttgaagctggcgtgacacagagccccacacacctgattaagaccagaggccagcaggccacactgagatgcagccctatcagcggccacaccagcgtgtactggtatcagcaggctctcggactgggcctccagttcctgctttggtacgacgagggcgaagagagaaaccggggcaacttccctcctcggttttccggcagacagttccccaactacagcagcgagctgaacgtgaacgccctggaactggaagatagcgccctgtacctgtgtgcctcttctcttggtggacctcgcggactggctggactgagaggggatgagcagtttttcggccctggcaccagactgaccgtgctggaaggtaccggcggaggcggatctggcggcggagaattcgacatccagatgacacagagccctagcagcctgtctgccagcgtgggagacagagtgaccatcacatgcaaggccagcgaccacatcaacaactggctggcctggtatcagcagaagcctggacaggcccctaagctgctgatctacggcgctaccacactggaaacaggcgtgcccagcagattttctggcagcggctctggcaccgactacaccctgacaatatccagcctccagcctgaggacttcgccacctactactgtcagcagagctggaacaccccttggacattcggccagggcaccaagctggaaatcaagagactcgaggacctgaagaacgtgttcccacctgaggtggccgtgttcgagcctagcgaggccgagatcagccacacccagaaagccaccctcgtgtgcctggctaccggcttctaccccgaccatgtggaactgtcttggtgggtcaacggcaaagaggtgcacagcggcgtgtgtaccgacccccagccactgaaagaacagcccgccctgaacgacagccggtactgcctgagcagcagactgagagtgtccgccaccttctggcagaacccccggaaccacttcagatgccaggtgcagttctacggcctgagcgagaacgacgagtggacccaggacagagccaagcccgtgacccagatcgtgtctgccgaagcctggggcagagccgattgcgacgtgaagctggtggaaaagagcttcgagacagacaccaacctgaacttccagaacctgagcgtgatcggcttcagaatcctgctgctgaaagtggccggctttaacctgctgatgaccctgcggctgtggtccagcagggccaagcgatctggatctggagcaacaaacttctcactactcaaacaagcaggtgacgtggaggagaatcccgggcctactagtgccaccatggactggatttggcgcatccttttccttgtcggcgctgctaccggcgcccattccgggcccgaagtgcagctggttgaatctggcggaggactggttcaggctggcggatctctgagactgtcttgtgccgccagcggcagaacctttagcatgggctggtttagacaggcccctggcaaagagagagagttcgtcgccgccatcacatactctggcggcagcccttactacgccgactctgtgaagggcagattcaccatcagccgggacaacgccaagaacaccgtgtacctccagatgaacagcctgaagcctgaggacaccgccgtgtactactgcgccgccaatccaacatacggcagcgactggaacgccgagaattggggccagggaacccaagtgacagtgtctagcggatccggcggcggaggatctggcggaggcggatctgggggcggaggctctttcgaacaagttcagcttcaacagcctggcgctgagctggtcaaacctggcgcttctgtgaagatgagctgcaaagccagcggctacgccttcagcagctcttggatcaactggatgaagcagaaacccggccagggactcgaatggatcggccaaatctatcccggcgacggcgacaccaactacaacggcaagttcaagggcagagccacactgaccgccgatacctctagcagcacagcctacatgcagctgagcagcctgaccagcgaagatagcgccgtgtacttctgtgcccggtccatcacaacagtcgtgggctgcgctatggactattggggccagggaacaagcgtgaccgtgtctagtacgcgtatccagaaccctgatcctgccgtgtaccagctgcgggatagcaagagcagcgacaagagcgtgtgtctgttcaccgacttcgacagccagaccaacgtgtcccagagcaaggactccgacgtgtacatcaccgataagtgcgtgctggacatgcggagcatggacttcaagagcaactccgccgtggcctggtccaacaagtccgatttcgcctgcgccaacgccttcaacaacagcattatccccgaggacacattcttcccaagccccgagagcagctgcggctttaccagcgagagctaccagcagggcgtgctgagcgccaccatcctgtacgagatcctgctgggcaaggccaccctgtacgccgtgctggtgtctgccctggtgctgatggctatggtcaagcggaaggacagccggggacgcgccaagagaagcggatctggcgtgaagcagaccctgaatttcgacctgctgaagctggctggcgacgtggaatccaacccaggcccttctagaggccatatgaccgagtacaagcccacggtgcgcctcgccacccgcgacgacgtccccagggccgtacgcaccctcgccgccgcgttcgccgactaccccgccacgcgccacaccgtcgatccggaccgccacatcgagcgggtcaccgagctgcaagaactcttcctcacgcgcgtcgggctcgacatcggcaaggtgtgggtcgcggacgacggcgccgcggtggcggtctggaccacgccggagagcgtcgaagcgggggcggtgttcgccgagatcggcccgcgcatggccgagttgagcggttcccggctggccgcgcagcaacagatggaaggcctcctggcgccgcaccggcccaaggagcccgcgtggttcctggccaccgtcggcgtctcgcccgaccaccagggcaagggtctgggcagcgccgtcgtgctccccggagtggaggcggccgagcgcgccggggtgcccgccttcctggagacctccgcgccccgcaacctccccttctacgagcggctcggcttcaccgtcaccgccgacgtcgaggtgcccgaaggaccgcgcacctggtgcatgacccgcaagcccggtgcctga

SEQ ID NO: 34096 - DNA, 3375 bp, synthetic construct
  source 1..3375: mol_type = other DNA
atgggacccagactgctgttttgggctctgctgtgtctgctcggcacaggacctgttgaagctggcgtgacacagagccccacacacctgattaagaccagaggccagcaggccacactgagatgcagccctatcagcggccacaccagcgtgtactggtatcagcaggctctcggactgggcctccagttcctgctttggtacgacgagggcgaagagagaaaccggggcaacttccctcctcggttttccggcagacagttccccaactacagcagcgagctgaacgtgaacgccctggaactggaagatagcgccctgtacctgtgtgccagctctctcggcggagatgaactgggagccgatggcaacgagcagttctttggccctggcaccagactgaccgtgctggaaggtaccggcggaggcggatctggcggcggaagcgaattcgacatccagatgacacagagccctagcagcctgtctgccagcgtgggagacagagtgaccatcacatgcaaggccagcgaccacatcaacaactggctggcctggtatcagcagaagcctggacaggcccctaagctgctgatctacggcgctaccacactggaaacaggcgtgcccagcagattttctggcagcggctctggcaccgactacaccctgacaatatccagcctccagcctgaggacttcgccacctactactgtcagcagagctggaacaccccttggacattcggccagggcaccaagctggaaatcaagagactcgaggacctgaagaacgtgttcccacctgaggtggccgtgttcgagcctagcgaggccgagatcagccacacccagaaagccaccctcgtgtgcctggctaccggcttctaccccgaccatgtggaactgtcttggtgggtcaacggcaaagaggtgcacagcggcgtgtgtaccgacccccagccactgaaagaacagcccgccctgaacgacagccggtactgcctgagcagcagactgagagtgtccgccaccttctggcagaacccccggaaccacttcagatgccaggtgcagttctacggcctgagcgagaacgacgagtggacccaggacagagccaagcccgtgacccagatcgtgtctgccgaagcctggggcagagccgattgcgacgtgaagctggtggaaaagagcttcgagacagacaccaacctgaacttccagaacctgagcgtgatcggcttcagaatcctgctgctgaaagtggccggctttaacctgctgatgaccctgcggctgtggtccagcagggccaagcgatctggatctggagcaacaaacttctcactactcaaacaagcaggtgacgtggaggagaatcccgggcctactagtgccaccatggactggatttggcgcatccttttccttgtcggcgctgctaccggcgcccattccgggcccgaagtgcagctggttgaatctggcggaggactggttcaggctggcggatctctgagactgtcttgtgccgccagcggcagaacctttagcatgggctggtttagacaggcccctggcaaagagagagagttcgtcgccgccatcacatactctggcggcagcccttactacgccgactctgtgaagggcagattcaccatcagccgggacaacgccaagaacaccgtgtacctccagatgaacagcctgaagcctgaggacaccgccgtgtactactgcgccgccaatccaacatacggcagcgactggaacgccgagaattggggccagggaacccaagtgacagtgtctagcggatccggcggcggaggatctggcggaggcggatctgggggcggaggctctttcgaacaagttcagcttcaacagcctggcgctgagctggtcaaacctggcgcttctgtgaagatgagctgcaaagccagcggctacgccttcagcagctcttggatcaactggatgaagcagaaacccggccagggactcgaatggatcggccaaatctatcccggcgacggcgacaccaactacaacggcaagttcaagggcagagccacactgaccgccgatacctctagcagcacagcctacatgcagctgagcagcctgaccagcgaagatagcgccgtgtacttctgtgcccggtccatcacaacagtcgtgggctgcgctatggactattggggccagggaacaagcgtgaccgtgtctagtacgcgtatccagaaccctgatcctgccgtgtaccagctgcgggatagcaagagcagcgacaagagcgtgtgtctgttcaccgacttcgacagccagaccaacgtgtcccagagcaaggactccgacgtgtacatcaccgataagtgcgtgctggacatgcggagcatggacttcaagagcaactccgccgtggcctggtccaacaagtccgatttcgcctgcgccaacgccttcaacaacagcattatccccgaggacacattcttcccaagccccgagagcagctgcggctttaccagcgagagctaccagcagggcgtgctgagcgccaccatcctgtacgagatcctgctgggcaaggccaccctgtacgccgtgctggtgtctgccctggtgctgatggctatggtcaagcggaaggacagccggggacgcgccaagagaagcggatctggcgtgaagcagaccctgaatttcgacctgctgaagctggctggcgacgtggaatccaacccaggcccttctagaggccatatgaccgagtacaagcccacggtgcgcctcgccacccgcgacgacgtccccagggccgtacgcaccctcgccgccgcgttcgccgactaccccgccacgcgccacaccgtcgatccggaccgccacatcgagcgggtcaccgagctgcaagaactcttcctcacgcgcgtcgggctcgacatcggcaaggtgtgggtcgcggacgacggcgccgcggtggcggtctggaccacgccggagagcgtcgaagcgggggcggtgttcgccgagatcggcccgcgcatggccgagttgagcggttcccggctggccgcgcagcaacagatggaaggcctcctggcgccgcaccggcccaaggagcccgcgtggttcctggccaccgtcggcgtctcgcccgaccaccagggcaagggtctgggcagcgccgtcgtgctccccggagtggaggcggccgagcgcgccggggtgcccgccttcctggagacctccgcgccccgcaacctccccttctacgagcggctcggcttcaccgtcaccgccgacgtcgaggtgcccgaaggaccgcgcacctggtgcatgacccgcaagcccggtgcctga

SEQ ID NO: 34097 - DNA, 2850 bp, synthetic construct
  source 1..2850: mol_type = other DNA
atggccttaccagtgaccgccttgctcctgccgctggccttgctgctccacgccgccaggccggacatccagatgacacagagccctagcagcctgtctgccagcgtgggagacagagtgaccatcacatgcaaggccagcgaccacatcaacaactggctggcctggtatcagcagaagcctggacaggcccctaagctgctgatctacggcgctaccacactggaaacaggcgtgcccagcagattttctggcagcggctctggcaccgactacaccctgacaatatccagcctccagcctgaggacttcgccacctactactgtcagcagagctggaacaccccttggacattcggccagggcaccaagctggaaatcaagagactcgaggacctgaagaacgtgttcccacctgaggtggccgtgttcgagcctagcgaggccgagatcagccacacccagaaagccaccctcgtgtgcctggctaccggcttctaccccgaccatgtggaactgtcttggtgggtcaacggcaaagaggtgcacagcggcgtgtgtaccgacccccagccactgaaagaacagcccgccctgaacgacagccggtactgcctgagcagcagactgagagtgtccgccaccttctggcagaacccccggaaccacttcagatgccaggtgcagttctacggcctgagcgagaacgacgagtggacccaggacagagccaagcccgtgacccagatcgtgtctgccgaagcctggggcagagccgattgcgacgtgaagctggtggaaaagagcttcgagacagacaccaacctgaacttccagaacctgagcgtgatcggcttcagaatcctgctgctgaaagtggccggctttaacctgctgatgaccctgcggctgtggtccagcagggccaagcgatctggatctggagcaacaaacttctcactactcaaacaagcaggtgacgtggaggagaatcccgggcctactagtgccaccatggactggatttggcgcatccttttccttgtcggcgctgctaccggcgcccattccgggcccatgggaagctggcttgagttctaccacagactcaacgccattgacagcaggctgtgggcacttggcggaagcgaagctgaactcgccgcttttgaaaaagaaattgccgctttcgagtccgagcttcaggcttacaaaggcaaagggaatcctgaggtcgagagcctgagagatcacgctgcccacattagagagtggttgcaggcataccggcacaatggatccggcggcggaggatctggcggaggcggatctgggggcggaggctctttcgaacaagttcagcttcaacagcctggcgctgagctggtcaaacctggcgcttctgtgaagatgagctgcaaagccagcggctacgccttcagcagctcttggatcaactggatgaagcagaaacccggccagggactcgaatggatcggccaaatctatcccggcgacggcgacaccaactacaacggcaagttcaagggcagagccacactgaccgccgatacctctagcagcacagcctacatgcagctgagcagcctgaccagcgaagatagcgccgtgtacttctgtgcccggtccatcacaacagtcgtgggctgcgctatggactattggggccagggaacaagcgtgaccgtgtctagtacgcgtatccagaaccctgatcctgccgtgtaccagctgcgggatagcaagagcagcgacaagagcgtgtgtctgttcaccgacttcgacagccagaccaacgtgtcccagagcaaggactccgacgtgtacatcaccgataagtgcgtgctggacatgcggagcatggacttcaagagcaactccgccgtggcctggtccaacaagtccgatttcgcctgcgccaacgccttcaacaacagcattatccccgaggacacattcttcccaagccccgagagcagctgcggctttaccagcgagagctaccagcagggcgtgctgagcgccaccatcctgtacgagatcctgctgggcaaggccaccctgtacgccgtgctggtgtctgccctggtgctgatggctatggtcaagcggaaggacagccggggacgcgccaagagaagcggatctggcgtgaagcagaccctgaatttcgacctgctgaagctggctggcgacgtggaatccaacccaggcccttctagaggccatatgaccgagtacaagcccacggtgcgcctcgccacccgcgacgacgtccccagggccgtacgcaccctcgccgccgcgttcgccgactaccccgccacgcgccacaccgtcgatccggaccgccacatcgagcgggtcaccgagctgcaagaactcttcctcacgcgcgtcgggctcgacatcggcaaggtgtgggtcgcggacgacggcgccgcggtggcggtctggaccacgccggagagcgtcgaagcgggggcggtgttcgccgagatcggcccgcgcatggccgagttgagcggttcccggctggccgcgcagcaacagatggaaggcctcctggcgccgcaccggcccaaggagcccgcgtggttcctggccaccgtcggcgtctcgcccgaccaccagggcaagggtctgggcagcgccgtcgtgctccccggagtggaggcggccgagcgcgccggggtgcccgccttcctggagacctccgcgccccgcaacctccccttctacgagcggctcggcttcaccgtcaccgccgacgtcgaggtgcccgaaggaccgcgcacctggtgcatgacccgcaagcccggtgcctga

SEQ ID NO: 34098 - DNA, 2850 bp, synthetic construct
  source 1..2850: mol_type = other DNA
atggccttaccagtgaccgccttgctcctgccgctggccttgctgctccacgccgccaggccggcatgcatgggcagttggttcgagttctacgaccggctgaatgccatcgacgccagactgtgggctctcggaggatctgaagctgagctggccgccttcgagaaagagatcgccgcctttgagagcgagctgcaagcctacaaaggcaagggcaaccccgaggtggaaaacctgagagtgcacgccgctgccatcagagaatggctccaggcttacagacacaacggtaccggcggaggcggatctggcggcggaggtagcggtggcggaggatctgaattcgacatccagatgacacagagccctagcagcctgtctgccagcgtgggagacagagtgaccatcacatgcaaggccagcgaccacatcaacaactggctggcctggtatcagcagaagcctggacaggcccctaagctgctgatctacggcgctaccacactggaaacaggcgtgcccagcagattttctggcagcggctctggcaccgactacaccctgacaatatccagcctccagcctgaggacttcgccacctactactgtcagcagagctggaacaccccttggacattcggccagggcaccaagctggaaatcaagagactcgaggacctgaagaacgtgttcccacctgaggtggccgtgttcgagcctagcgaggccgagatcagccacacccagaaagccaccctcgtgtgcctggctaccggcttctaccccgaccatgtggaactgtcttggtgggtcaacggcaaagaggtgcacagcggcgtgtgtaccgacccccagccactgaaagaacagcccgccctgaacgacagccggtactgcctgagcagcagactgagagtgtccgccaccttctggcagaacccccggaaccacttcagatgccaggtgcagttctacggcctgagcgagaacgacgagtggacccaggacagagccaagcccgtgacccagatcgtgtctgccgaagcctggggcagagccgattgcgacgtgaagctggtggaaaagagcttcgagacagacaccaacctgaacttccagaacctgagcgtgatcggcttcagaatcctgctgctgaaagtggccggctttaacctgctgatgaccctgcggctgtggtccagcagggccaagcgatctggatctggagcaacaaacttctcactactcaaacaagcaggtgacgtggaggagaatcccgggcctactagtatggactggatttggcgcatccttttccttgtcggcgctgctaccggcgcgcattccttcgaacaagttcagcttcaacagcctggcgctgagctggtcaaacctggcgcttctgtgaagatgagctgcaaagccagcggctacgccttcagcagctcttggatcaactggatgaagcagaaacccggccagggactcgaatggatcggccaaatctatcccggcgacggcgacaccaactacaacggcaagttcaagggcagagccacactgaccgccgatacctctagcagcacagcctacatgcagctgagcagcctgaccagcgaagatagcgccgtgtacttctgtgcccggtccatcacaacagtcgtgggctgcgctatggactattggggccagggaacaagcgtgaccgtgtctagtacgcgtatccagaaccctgatcctgccgtgtaccagctgcgggatagcaagagcagcgacaagagcgtgtgtctgttcaccgacttcgacagccagaccaacgtgtcccagagcaaggactccgacgtgtacatcaccgataagtgcgtgctggacatgcggagcatggacttcaagagcaactccgccgtggcctggtccaacaagtccgatttcgcctgcgccaacgccttcaacaacagcattatccccgaggacacattcttcccaagccccgagagcagctgcggctttaccagcgagagctaccagcagggcgtgctgagcgccaccatcctgtacgagatcctgctgggcaaggccaccctgtacgccgtgctggtgtctgccctggtgctgatggctatggtcaagcggaaggacagccggggacgcgccaagagaagcggatctggcgtgaagcagaccctgaatttcgacctgctgaagctggctggcgacgtggaatccaacccaggcccttctagaggccatatgaccgagtacaagcccacggtgcgcctcgccacccgcgacgacgtccccagggccgtacgcaccctcgccgccgcgttcgccgactaccccgccacgcgccacaccgtcgatccggaccgccacatcgagcgggtcaccgagctgcaagaactcttcctcacgcgcgtcgggctcgacatcggcaaggtgtgggtcgcggacgacggcgccgcggtggcggtctggaccacgccggagagcgtcgaagcgggggcggtgttcgccgagatcggcccgcgcatggccgagttgagcggttcccggctggccgcgcagcaacagatggaaggcctcctggcgccgcaccggcccaaggagcccgcgtggttcctggccaccgtcggcgtctcgcccgaccaccagggcaagggtctgggcagcgccgtcgtgctccccggagtggaggcggccgagcgcgccggggtgcccgccttcctggagacctccgcgccccgcaacctccccttctacgagcggctcggcttcaccgtcaccgccgacgtcgaggtgcccgaaggaccgcgcacctggtgcatgacccgcaagcccggtgcctga

SEQ ID NO: 34099 - DNA, 3201 bp, synthetic construct
  source 1..3201: mol_type = other DNA
atggccttaccagtgaccgccttgctcctgccgctggccttgctgctccacgccgccaggccggcatgcatggaccccgacctggaaatcagagccgccttcctgcggcagagaaacacagccctgagaacagaggtggccgagctggaacaagaggtgcagcggctggaaaacgaggtgtcccagtacgagacaagatacggccctctcggaggcggaaaaggtaccggcggaggcggatctggcggcggaggtagcggtggcggaggatctgaattcgacatccagatgacacagagccctagcagcctgtctgccagcgtgggagacagagtgaccatcacatgcaaggccagcgaccacatcaacaactggctggcctggtatcagcagaagcctggacaggcccctaagctgctgatctacggcgctaccacactggaaacaggcgtgcccagcagattttctggcagcggctctggcaccgactacaccctgacaatatccagcctccagcctgaggacttcgccacctactactgtcagcagagctggaacaccccttggacattcggccagggcaccaagctggaaatcaagagactcgaggacctgaagaacgtgttcccacctgaggtggccgtgttcgagcctagcgaggccgagatcagccacacccagaaagccaccctcgtgtgcctggctaccggcttctaccccgaccatgtggaactgtcttggtgggtcaacggcaaagaggtgcacagcggcgtgtgtaccgacccccagccactgaaagaacagcccgccctgaacgacagccggtactgcctgagcagcagactgagagtgtccgccaccttctggcagaacccccggaaccacttcagatgccaggtgcagttctacggcctgagcgagaacgacgagtggacccaggacagagccaagcccgtgacccagatcgtgtctgccgaagcctggggcagagccgattgcgacgtgaagctggtggaaaagagcttcgagacagacaccaacctgaacttccagaacctgagcgtgatcggcttcagaatcctgctgctgaaagtggccggctttaacctgctgatgaccctgcggctgtggtccagcagggccaagcgatctggatctggagcaacaaacttctcactactcaaacaagcaggtgacgtggaggagaatcccgggcctactagtgccaccatggactggatttggcgcatccttttccttgtcggcgctgctaccggcgcccattccgggcccgaagtgcagctggttgaatctggcggaggactggttcaggctggcggatctctgagactgtcttgtgccgccagcggcagaacctttagcatgggctggtttagacaggcccctggcaaagagagagagttcgtcgccgccatcacatactctggcggcagcccttactacgccgactctgtgaagggcagattcaccatcagccgggacaacgccaagaacaccgtgtacctccagatgaacagcctgaagcctgaggacaccgccgtgtactactgcgccgccaatccaacatacggcagcgactggaacgccgagaattggggccagggaacccaagtgacagtgtctagcggatccggcggcggaggatctggcggaggcggatctgggggcggaggctctttcgaacaagttcagcttcaacagcctggcgctgagctggtcaaacctggcgcttctgtgaagatgagctgcaaagccagcggctacgccttcagcagctcttggatcaactggatgaagcagaaacccggccagggactcgaatggatcggccaaatctatcccggcgacggcgacaccaactacaacggcaagttcaagggcagagccacactgaccgccgatacctctagcagcacagcctacatgcagctgagcagcctgaccagcgaagatagcgccgtgtacttctgtgcccggtccatcacaacagtcgtgggctgcgctatggactattggggccagggaacaagcgtgaccgtgtctagtacgcgtatccagaaccctgatcctgccgtgtaccagctgcgggatagcaagagcagcgacaagagcgtgtgtctgttcaccgacttcgacagccagaccaacgtgtcccagagcaaggactccgacgtgtacatcaccgataagtgcgtgctggacatgcggagcatggacttcaagagcaactccgccgtggcctggtccaacaagtccgatttcgcctgcgccaacgccttcaacaacagcattatccccgaggacacattcttcccaagccccgagagcagctgcggctttaccagcgagagctaccagcagggcgtgctgagcgccaccatcctgtacgagatcctgctgggcaaggccaccctgtacgccgtgctggtgtctgccctggtgctgatggctatggtcaagcggaaggacagccggggacgcgccaagagaagcggatctggcgtgaagcagaccctgaatttcgacctgctgaagctggctggcgacgtggaatccaacccaggcccttctagaggccatatgaccgagtacaagcccacggtgcgcctcgccacccgcgacgacgtccccagggccgtacgcaccctcgccgccgcgttcgccgactaccccgccacgcgccacaccgtcgatccggaccgccacatcgagcgggtcaccgagctgcaagaactcttcctcacgcgcgtcgggctcgacatcggcaaggtgtgggtcgcggacgacggcgccgcggtggcggtctggaccacgccggagagcgtcgaagcgggggcggtgttcgccgagatcggcccgcgcatggccgagttgagcggttcccggctggccgcgcagcaacagatggaaggcctcctggcgccgcaccggcccaaggagcccgcgtggttcctggccaccgtcggcgtctcgcccgaccaccagggcaagggtctgggcagcgccgtcgtgctccccggagtggaggcggccgagcgcgccggggtgcccgccttcctggagacctccgcgccccgcaacctccccttctacgagcggctcggcttcaccgtcaccgccgacgtcgaggtgcccgaaggaccgcgcacctggtgcatgacccgcaagcccggtgcctga

SEQ ID NO: 34100 - DNA, 2850 bp, synthetic construct
  source 1..2850: mol_type = other DNA
atggccttaccagtgaccgccttgctcctgccgctggccttgctgctccacgccgccaggccggacatccagatgacacagagccctagcagcctgtctgccagcgtgggagacagagtgaccatcacatgcaaggccagcgaccacatcaacaactggctggcctggtatcagcagaagcctggacaggcccctaagctgctgatctacggcgctaccacactggaaacaggcgtgcccagcagattttctggcagcggctctggcaccgactacaccctgacaatatccagcctccagcctgaggacttcgccacctactactgtcagcagagctggaacaccccttggacattcggccagggcaccaagctggaaatcaagagactcgaggacctgaagaacgtgttcccacctgaggtggccgtgttcgagcctagcgaggccgagatcagccacacccagaaagccaccctcgtgtgcctggctaccggcttctaccccgaccatgtggaactgtcttggtgggtcaacggcaaagaggtgcacagcggcgtgtgtaccgacccccagccactgaaagaacagcccgccctgaacgacagccggtactgcctgagcagcagactgagagtgtccgccaccttctggcagaacccccggaaccacttcagatgccaggtgcagttctacggcctgagcgagaacgacgagtggacccaggacagagccaagcccgtgacccagatcgtgtctgccgaagcctggggcagagccgattgcgacgtgaagctggtggaaaagagcttcgagacagacaccaacctgaacttccagaacctgagcgtgatcggcttcagaatcctgctgctgaaagtggccggctttaacctgctgatgaccctgcggctgtggtccagcagggccaagcgatctggatctggagcaacaaacttctcactactcaaacaagcaggtgacgtggaggagaatcccgggcctactagtgccaccatggactggatttggcgcatccttttccttgtcggcgctgctaccggcgcccattccgggcccatgggatcttggagcgagttttacgatcggctgcacgccattcaccaccggctgtatgctctcggaggaagcgaagctgagctggccgcttttgaaaaagaaattgccgctttcgagtccgagcttcaggcttacaaaggcaaagggaatcctgaggtcgaggccctgagagataccgccgccttcatcagaacccggttgcaggcataccggcacaacggatccggcggcggaggatctggcggaggcggatctgggggcggaggctctttcgaacaagttcagcttcaacagcctggcgctgagctggtcaaacctggcgcttctgtgaagatgagctgcaaagccagcggctacgccttcagcagctcttggatcaactggatgaagcagaaacccggccagggactcgaatggatcggccaaatctatcccggcgacggcgacaccaactacaacggcaagttcaagggcagagccacactgaccgccgatacctctagcagcacagcctacatgcagctgagcagcctgaccagcgaagatagcgccgtgtacttctgtgcccggtccatcacaacagtcgtgggctgcgctatggactattggggccagggaacaagcgtgaccgtgtctagtacgcgtatccagaaccctgatcctgccgtgtaccagctgcgggatagcaagagcagcgacaagagcgtgtgtctgttcaccgacttcgacagccagaccaacgtgtcccagagcaaggactccgacgtgtacatcaccgataagtgcgtgctggacatgcggagcatggacttcaagagcaactccgccgtggcctggtccaacaagtccgatttcgcctgcgccaacgccttcaacaacagcattatccccgaggacacattcttcccaagccccgagagcagctgcggctttaccagcgagagctaccagcagggcgtgctgagcgccaccatcctgtacgagatcctgctgggcaaggccaccctgtacgccgtgctggtgtctgccctggtgctgatggctatggtcaagcggaaggacagccggggacgcgccaagagaagcggatctggcgtgaagcagaccctgaatttcgacctgctgaagctggctggcgacgtggaatccaacccaggcccttctagaggccatatgaccgagtacaagcccacggtgcgcctcgccacccgcgacgacgtccccagggccgtacgcaccctcgccgccgcgttcgccgactaccccgccacgcgccacaccgtcgatccggaccgccacatcgagcgggtcaccgagctgcaagaactcttcctcacgcgcgtcgggctcgacatcggcaaggtgtgggtcgcggacgacggcgccgcggtggcggtctggaccacgccggagagcgtcgaagcgggggcggtgttcgccgagatcggcccgcgcatggccgagttgagcggttcccggctggccgcgcagcaacagatggaaggcctcctggcgccgcaccggcccaaggagcccgcgtggttcctggccaccgtcggcgtctcgcccgaccaccagggcaagggtctgggcagcgccgtcgtgctccccggagtggaggcggccgagcgcgccggggtgcccgccttcctggagacctccgcgccccgcaacctccccttctacgagcggctcggcttcaccgtcaccgccgacgtcgaggtgcccgaaggaccgcgcacctggtgcatgacccgcaagcccggtgcctga

SEQ ID NO: 34101 - DNA, 3480 bp, synthetic construct
  source 1..3480: mol_type = other DNA
atggccttaccagtgaccgccttgctcctgccgctggccttgctgctccacgccgccaggccggacatccagatgacacagagccctagcagcctgtctgccagcgtgggagacagagtgaccatcacatgcaaggccagcgaccacatcaacaactggctggcctggtatcagcagaagcctggacaggcccctaagctgctgatctacggcgctaccacactggaaacaggcgtgcccagcagattttctggcagcggctctggcaccgactacaccctgacaatatccagcctccagcctgaggacttcgccacctactactgtcagcagagctggaacaccccttggacattcggccagggcaccaagctggaaatcaagagactcgaggacctgaagaacgtgttcccacctgaggtggccgtgttcgagcctagcgaggccgagatcagccacacccagaaagccaccctcgtgtgcctggctaccggcttctaccccgaccatgtggaactgtcttggtgggtcaacggcaaagaggtgcacagcggcgtgtgtaccgacccccagccactgaaagaacagcccgccctgaacgacagccggtactgcctgagcagcagactgagagtgtccgccaccttctggcagaacccccggaaccacttcagatgccaggtgcagttctacggcctgagcgagaacgacgagtggacccaggacagagccaagcccgtgacccagatcgtgtctgccgaagcctggggcagagccgattgcgacgtgaagctggtggaaaagagcttcgagacagacaccaacctgaacttccagaacctgagcgtgatcggcttcagaatcctgctgctgaaagtggccggctttaacctgctgatgaccctgcggctgtggtccagcagggccaagcgatctggatctggagcaacaaacttctcactactcaaacaagcaggtgacgtggaggagaatcccgggcctactagtaccatggactggatttggcgcatccttttccttgtcggcgctgctaccggcgcccattccctgttcaatcaagaggtgcagatccctctgaccgagagctactgtggcccctgtcctaagaactggatctgctacaagaacaactgctaccagttcttcgacgagagcaagaattggtacgagagccaggccagctgcatgagccagaatgccagcctgctgaaggtgtacagcaaagaggaccaggacctgctgaaactggtcaagagcgcccactggatgggccttgtgcacatccccaccaatggctcttggcagtgggaggacggcagcattctgagccctaacctgctgaccatcatcgagatgcagaagggcgactgcgccctgtacgccagcagctttaagggctacatcgagaattgcagcaccccgaacacctacatctgtatgcagagaaccgtttctggcggaggcggctctggaggaggcggaagtggcggcggaggcgacctctttaatcaagaagtccagattccactcaccgaatcctactgcggaccttgtccaaaaaattggatttgttataagaacaactgttatcaattctttgatgagtctaaaaattggtatgagtcccaggcttcctgcatgtctcagaacgcttctctgctgaaagtctactctaaagaagatcaggatctcctgaagctcgtcaagtctgcccattggatggggctcgtccacattcctaccaacggaagctggcaatgggaagatggctccatcctgtctccaaatctgctcacgattattgaaatgcagaaaggggattgtgctctctacgccagctccttcaagggatatattgagaactgtagcacgcccaatacttatatctgtatgcaacggaccgtgggatccggcggcggaggatctggcggaggcggatctgggggcggaggctctttcgaacaagttcagcttcaacagcctggcgctgagctggtcaaacctggcgcttctgtgaagatgagctgcaaagccagcggctacgccttcagcagctcttggatcaactggatgaagcagaaacccggccagggactcgaatggatcggccaaatctatcccggcgacggcgacaccaactacaacggcaagttcaagggcagagccacactgaccgccgatacctctagcagcacagcctacatgcagctgagcagcctgaccagcgaagatagcgccgtgtacttctgtgcccggtccatcacaacagtcgtgggctgcgctatggactattggggccagggaacaagcgtgaccgtgtctagtacgcgtatccagaaccctgatcctgccgtgtaccagctgcgggatagcaagagcagcgacaagagcgtgtgtctgttcaccgacttcgacagccagaccaacgtgtcccagagcaaggactccgacgtgtacatcaccgataagtgcgtgctggacatgcggagcatggacttcaagagcaactccgccgtggcctggtccaacaagtccgatttcgcctgcgccaacgccttcaacaacagcattatccccgaggacacattcttcccaagccccgagagcagctgcggctttaccagcgagagctaccagcagggcgtgctgagcgccaccatcctgtacgagatcctgctgggcaaggccaccctgtacgccgtgctggtgtctgccctggtgctgatggctatggtcaagcggaaggacagccggggacgcgccaagagaagcggatctggcgtgaagcagaccctgaatttcgacctgctgaagctggctggcgacgtggaatccaacccaggcccttctagaggccatatgaccgagtacaagcccacggtgcgcctcgccacccgcgacgacgtccccagggccgtacgcaccctcgccgccgcgttcgccgactaccccgccacgcgccacaccgtcgatccggaccgccacatcgagcgggtcaccgagctgcaagaactcttcctcacgcgcgtcgggctcgacatcggcaaggtgtgggtcgcggacgacggcgccgcggtggcggtctggaccacgccggagagcgtcgaagcgggggcggtgttcgccgagatcggcccgcgcatggccgagttgagcggttcccggctggccgcgcagcaacagatggaaggcctcctggcgccgcaccggcccaaggagcccgcgtggttcctggccaccgtcggcgtctcgcccgaccaccagggcaagggtctgggcagcgccgtcgtgctccccggagtggaggcggccgagcgcgccggggtgcccgccttcctggagacctccgcgccccgcaacctccccttctacgagcggctcggcttcaccgtcaccgccgacgtcgaggtgcccgaaggaccgcgcacctggtgcatgacccgcaagcccggtgcctga

SEQ ID NO: 34102 - DNA, 1866 bp, synthetic construct
  source 1..1866: mol_type = other DNA
atggccttaccagtgaccgccttgctcctgccgctggccttgctgctccacgccgccaggccggacatccagatgacacagagccctagcagcctgtctgccagcgtgggagacagagtgaccatcacatgcaaggccagcgaccacatcaacaactggctggcctggtatcagcagaagcctggacaggcccctaagctgctgatctacggcgctaccacactggaaacaggcgtgcccagcagattttctggcagcggctctggcaccgactacaccctgacaatatccagcctccagcctgaggacttcgccacctactactgtcagcagagctggaacaccccttggacattcggccagggcaccaagctggaaatcaagagactcgaggacctgaagaacgtgttcccacctgaggtggccgtgttcgagcctagcgaggccgagatcagccacacccagaaagccaccctcgtgtgcctggctaccggcttctaccccgaccatgtggaactgtcttggtgggtcaacggcaaagaggtgcacagcggcgtgtgtaccgacccccagccactgaaagaacagcccgccctgaacgacagccggtactgcctgagcagcagactgagagtgtccgccaccttctggcagaacccccggaaccacttcagatgccaggtgcagttctacggcctgagcgagaacgacgagtggacccaggacagagccaagcccgtgacccagatcgtgtctgccgaagcctggggcagagccgattgcggctttaccagcgagagctaccagcagggcgtgctgagcgccaccaacctgagcgtgatcggcttcagaatcctgctgctgaaagtggccggctttaacctgctgatgaccctgcggctgtggtccagcagggccaagcgatctggatctggagcaacaaacttctcactactcaaacaagcaggtgacgtggaggagaatcccgggcctactagtatggactggatttggcgcatccttttccttgtcggcgctgctaccggcgcgcattccttcgaacaagttcagcttcaacagcctggcgctgagctggtcaaacctggcgcttctgtgaagatgagctgcaaagccagcggctacgccttcagcagctcttggatcaactggatgaagcagaaacccggccagggactcgaatggatcggccaaatctatcccggcgacggcgacaccaactacaacggcaagttcaagggcagagccacactgaccgccgatacctctagcagcacagcctacatgcagctgagcagcctgaccagcgaagatagcgccgtgtacttctgtgcccggtccatcacaacagtcgtgggctgcgctatggactattggggccagggaacaagcgtgaccgtgtctagtacgcgtatccagaaccctgatcctgccgtgtaccagctgcgggatagcaagagcagcgacaagagcgtgtgtctgttcaccgacttcgacagccagaccaacgtgtcccagagcaaggactccgacgtgtacatcaccgataagtgcgtgctggacatgcggagcatggacttcaagagcaactccgccgtggcctggtccaacaagtccgatttcgcctgcgccaacgccttcaacaacagcattatccccgaggacacattcttcccaagccccgagagcagctgcgacgtgaagctggtggaaaagagcttcgagacagacaccaacctgaacttccagatcctgtacgagatcctgctgggcaaggccaccctgtacgccgtgctggtgtctgccctggtgctgatggctatggtcaagcggaaggacagccgggga

SEQ ID NO: 34103 - DNA, 1878 bp, synthetic construct
  source 1..1878: mol_type = other DNA
atggccttaccagtgaccgccttgctcctgccgctggccttgctgctccacgccgccaggccggacatccagatgacacagagccctagcagcctgtctgccagcgtgggagacagagtgaccatcacatgcaaggccagcgaccacatcaacaactggctggcctggtatcagcagaagcctggacaggcccctaagctgctgatctacggcgctaccacactggaaacaggcgtgcccagcagattttctggcagcggctctggcaccgactacaccctgacaatatccagcctccagcctgaggacttcgccacctactactgtcagcagagctggaacaccccttggacattcggccagggcaccaagctggaaatcaagagactcgagatccagaaccctgatcctgccgtgtaccagctgcgggatagcaagagcagcgacaagagcgtgtgtctgttcaccgacttcgacagccagaccaacgtgtcccagagcaaggactccgacgtgtacatcaccgataagtgcgtgctggacatgcggagcatggacttcaagagcaactccgccgtggcctggtccaacaagtccgatttcgcctgcgccaacgccttcaacaacagcattatccccgaggacacattcttcccaagccccgagagcagctgcgacgtgaagctggtggaaaagagcttcgagacagacaccaacctgaacttccagatcctgtacgagatcctgctgggcaaggccaccctgtacgccgtgctggtgtctgccctggtgctgatggctatggtcaagcggaaggacagccggggacgcgccaagagaagcggatctggcgtgaagcagaccctgaatttcgacctgctgaagctggctggcgacgtggaatccaacccaggccctactagtatggactggatttggcgcatccttttccttgtcggcgctgctaccggcgcgcattccttcgaacaagttcagcttcaacagcctggcgctgagctggtcaaacctggcgcttctgtgaagatgagctgcaaagccagcggctacgccttcagcagctcttggatcaactggatgaagcagaaacccggccagggactcgaatggatcggccaaatctatcccggcgacggcgacaccaactacaacggcaagttcaagggcagagccacactgaccgccgatacctctagcagcacagcctacatgcagctgagcagcctgaccagcgaagatagcgccgtgtacttctgtgcccggtccatcacaacagtcgtgggctgcgctatggactattggggccagggaacaagcgtgaccgtgtctagtacgcgtgaggacctgaagaacgtgttcccacctgaggtggccgtgttcgagcctagcgaggccgagatcagccacacccagaaagccaccctcgtgtgcctggctaccggcttctaccccgaccatgtggaactgtcttggtgggtcaacggcaaagaggtgcacagcggcgtgtgtaccgacccccagccactgaaagaacagcccgccctgaacgacagccggtactgcctgagcagcagactgagagtgtccgccaccttctggcagaacccccggaaccacttcagatgccaggtgcagttctacggcctgagcgagaacgacgagtggacccaggacagagccaagcccgtgacccagatcgtgtctgccgaagcctggggcagagccgattgcggctttaccagcgagagctaccagcagggcgtgctgagcgccaccaacctgagcgtgatcggcttcagaatcctgctgctgaaagtggccggctttaacctgctgatgaccctgcggctgtggtccagc

SEQ ID NO: 34104 - DNA, 2271 bp, synthetic construct
  source 1..2271: mol_type = other DNA
atggccttaccagtgaccgccttgctcctgccgctggccttgctgctccacgccgccaggccggaagtgcagctggttgaatctggcggaggactggttcagcctggcggatctctgagactgtcttgtgccgccagcggcttcagcttcagcgacttttggatgagctgggtccgacaggcccctggcaaaggacttgaatgggtcgccacaatcagccaggccggcagcgagaaggactacgtggactctgtgaagggcagattcaccatcagccgggacaacgccaagaagtccctgtacctccagatgaacagcctgagagccgaggacaccgccgtgtactattgtgcctctggcgtgtacagcttcgactacagaggccagggcaccctggtcacagtctcttctggtaccggcggaggcggatctggcggcggaggtagcggtggcggaggatctgaattcgacatccagatgacacagagccctagcagcctgtctgccagcgtgggagacagagtgaccatcacatgcaaggccagcgaccacatcaacaactggctggcctggtatcagcagaagcctggacaggcccctaagctgctgatctacggcgctaccacactggaaacaggcgtgcccagcagattttctggcagcggctctggcaccgactacaccctgacaatatccagcctccagcctgaggacttcgccacctactactgtcagcagagctggaacaccccttggacattcggccagggcaccaagctggaaatcaagagactcgaggacctgaagaacgtgttcccacctgaggtggccgtgttcgagcctagcgaggccgagatcagccacacccagaaagccaccctcgtgtgcctggctaccggcttctaccccgaccatgtggaactgtcttggtgggtcaacggcaaagaggtgcacagcggcgtgtgtaccgacccccagccactgaaagaacagcccgccctgaacgacagccggtactgcctgagcagcagactgagagtgtccgccaccttctggcagaacccccggaaccacttcagatgccaggtgcagttctacggcctgagcgagaacgacgagtggacccaggacagagccaagcccgtgacccagatcgtgtctgccgaagcctggggcagagccgattgcggctttaccagcgagagctaccagcagggcgtgctgagcgccaccaacctgagcgtgatcggcttcagaatcctgctgctgaaagtggccggctttaacctgctgatgaccctgcggctgtggtccagcagggccaagcgatctggatctggagcaacaaacttctcactactcaaacaagcaggtgacgtggaggagaatcccgggcctactagtatggactggatttggcgcatccttttccttgtcggcgctgctaccggcgcgcattccttcgaacaagttcagcttcaacagcctggcgctgagctggtcaaacctggcgcttctgtgaagatgagctgcaaagccagcggctacgccttcagcagctcttggatcaactggatgaagcagaaacccggccagggactcgaatggatcggccaaatctatcccggcgacggcgacaccaactacaacggcaagttcaagggcagagccacactgaccgccgatacctctagcagcacagcctacatgcagctgagcagcctgaccagcgaagatagcgccgtgtacttctgtgcccggtccatcacaacagtcgtgggctgcgctatggactattggggccagggaacaagcgtgaccgtgtctagtacgcgtatccagaaccctgatcctgccgtgtaccagctgcgggatagcaagagcagcgacaagagcgtgtgtctgttcaccgacttcgacagccagaccaacgtgtcccagagcaaggactccgacgtgtacatcaccgataagtgcgtgctggacatgcggagcatggacttcaagagcaactccgccgtggcctggtccaacaagtccgatttcgcctgcgccaacgccttcaacaacagcattatccccgaggacacattcttcccaagccccgagagcagctgcgacgtgaagctggtggaaaagagcttcgagacagacaccaacctgaacttccagatcctgtacgagatcctgctgggcaaggccaccctgtacgccgtgctggtgtctgccctggtgctgatggctatggtcaagcggaaggacagccgggga

SEQ ID NO: 34105 - DNA, 2283 bp, synthetic construct
  source 1..2283: mol_type = other DNA
atggccttaccagtgaccgccttgctcctgccgctggccttgctgctccacgccgccaggccggaagtgcagctggttgaatctggcggaggactggttcagcctggcggatctctgagactgtcttgtgccgccagcggcttcagcttcagcgacttttggatgagctgggtccgacaggcccctggcaaaggacttgaatgggtcgccacaatcagccaggccggcagcgagaaggactacgtggactctgtgaagggcagattcaccatcagccgggacaacgccaagaagtccctgtacctccagatgaacagcctgagagccgaggacaccgccgtgtactattgtgcctctggcgtgtacagcttcgactacagaggccagggcaccctggtcacagtctcttctggtaccggcggaggcggatctggcggcggaggtagcggtggcggaggatctgaattcgacatccagatgacacagagccctagcagcctgtctgccagcgtgggagacagagtgaccatcacatgcaaggccagcgaccacatcaacaactggctggcctggtatcagcagaagcctggacaggcccctaagctgctgatctacggcgctaccacactggaaacaggcgtgcccagcagattttctggcagcggctctggcaccgactacaccctgacaatatccagcctccagcctgaggacttcgccacctactactgtcagcagagctggaacaccccttggacattcggccagggcaccaagctggaaatcaagagactcgagatccagaaccctgatcctgccgtgtaccagctgcgggatagcaagagcagcgacaagagcgtgtgtctgttcaccgacttcgacagccagaccaacgtgtcccagagcaaggactccgacgtgtacatcaccgataagtgcgtgctggacatgcggagcatggacttcaagagcaactccgccgtggcctggtccaacaagtccgatttcgcctgcgccaacgccttcaacaacagcattatccccgaggacacattcttcccaagccccgagagcagctgcgacgtgaagctggtggaaaagagcttcgagacagacaccaacctgaacttccagatcctgtacgagatcctgctgggcaaggccaccctgtacgccgtgctggtgtctgccctggtgctgatggctatggtcaagcggaaggacagccggggacgcgccaagagaagcggatctggcgtgaagcagaccctgaatttcgacctgctgaagctggctggcgacgtggaatccaacccaggccctactagtatggactggatttggcgcatccttttccttgtcggcgctgctaccggcgcgcattccttcgaacaagttcagcttcaacagcctggcgctgagctggtcaaacctggcgcttctgtgaagatgagctgcaaagccagcggctacgccttcagcagctcttggatcaactggatgaagcagaaacccggccagggactcgaatggatcggccaaatctatcccggcgacggcgacaccaactacaacggcaagttcaagggcagagccacactgaccgccgatacctctagcagcacagcctacatgcagctgagcagcctgaccagcgaagatagcgccgtgtacttctgtgcccggtccatcacaacagtcgtgggctgcgctatggactattggggccagggaacaagcgtgaccgtgtctagtacgcgtgaggacctgaagaacgtgttcccacctgaggtggccgtgttcgagcctagcgaggccgagatcagccacacccagaaagccaccctcgtgtgcctggctaccggcttctaccccgaccatgtggaactgtcttggtgggtcaacggcaaagaggtgcacagcggcgtgtgtaccgacccccagccactgaaagaacagcccgccctgaacgacagccggtactgcctgagcagcagactgagagtgtccgccaccttctggcagaacccccggaaccacttcagatgccaggtgcagttctacggcctgagcgagaacgacgagtggacccaggacagagccaagcccgtgacccagatcgtgtctgccgaagcctggggcagagccgattgcggctttaccagcgagagctaccagcagggcgtgctgagcgccaccaacctgagcgtgatcggcttcagaatcctgctgctgaaagtggccggctttaacctgctgatgaccctgcggctgtggtccagc

SEQ ID NO: 34106 - DNA, 2682 bp, synthetic construct
  source 1..2682: mol_type = other DNA
atggccttaccagtgaccgccttgctcctgccgctggccttgctgctccacgccgccaggccggaagtgcagctggttgaatctggcggaggactggttcagcctggcggatctctgagactgtcttgtgccgccagcggcttcagcttcagcgacttttggatgagctgggtccgacaggcccctggcaaaggacttgaatgggtcgccacaatcagccaggccggcagcgagaaggactacgtggactctgtgaagggcagattcaccatcagccgggacaacgccaagaagtccctgtacctccagatgaacagcctgagagccgaggacaccgccgtgtactattgtgcctctggcgtgtacagcttcgactacagaggccagggcaccctggtcacagtctcttctggtaccggcggaggcggatctggcggcggaggtagcggtggcggaggatctgaattcgacatccagatgacacagagccctagcagcctgtctgccagcgtgggagacagagtgaccatcacatgcaaggccagcgaccacatcaacaactggctggcctggtatcagcagaagcctggacaggcccctaagctgctgatctacggcgctaccacactggaaacaggcgtgcccagcagattttctggcagcggctctggcaccgactacaccctgacaatatccagcctccagcctgaggacttcgccacctactactgtcagcagagctggaacaccccttggacattcggccagggcaccaagctggaaatcaagagactcgaggacctgaagaacgtgttcccacctgaggtggccgtgttcgagcctagcgaggccgagatcagccacacccagaaagccaccctcgtgtgcctggctaccggcttctaccccgaccatgtggaactgtcttggtgggtcaacggcaaagaggtgcacagcggcgtgtgtaccgacccccagccactgaaagaacagcccgccctgaacgacagccggtactgcctgagcagcagactgagagtgtccgccaccttctggcagaacccccggaaccacttcagatgccaggtgcagttctacggcctgagcgagaacgacgagtggacccaggacagagccaagcccgtgacccagatcgtgtctgccgaagcctggggcagagccgattgcggctttaccagcgagagctaccagcagggcgtgctgagcgccaccaacctgagcgtgatcggcttcagaatcctgctgctgaaagtggccggctttaacctgctgatgaccctgcggctgtggtccagcagggccaagcgatctggatctggagcaacaaacttctcactactcaaacaagcaggtgacgtggaggagaatcccgggcctactagtatggactggatttggcgcatccttttccttgtcggcgctgctaccggcgcgcattccgggccccagctccagctgcaagagtctggacctggcctggtcaagcctagcgagacactgagcctgacctgtaccgtgtccggcgatagcatcagcagcggcgattactactggggctggatcagacagcctcctggcaaaggactggaatggatcggccacatctactacagcggcgtgacctactacaaccccagcctgaagtccagagtgaccatcagcgtggacaccagccggaaccagttctccctgaagctgtctagcgtgacagccgccgataccgccgtgtactactgcaccagagaggacagcagcaactggcggagtagaggccagggaacactggtcacagttagctctggatccggcggaggcggaagtggaggcggaggatctggcggcggaggctctttcgaacaagttcagcttcaacagcctggcgctgagctggtcaaacctggcgcttctgtgaagatgagctgcaaagccagcggctacgccttcagcagctcttggatcaactggatgaagcagaaacccggccagggactcgaatggatcggccaaatctatcccggcgacggcgacaccaactacaacggcaagttcaagggcagagccacactgaccgccgatacctctagcagcacagcctacatgcagctgagcagcctgaccagcgaagatagcgccgtgtacttctgtgcccggtccatcacaacagtcgtgggctgcgctatggactattggggccagggaacaagcgtgaccgtgtctagtacgcgtatccagaaccctgatcctgccgtgtaccagctgcgggatagcaagagcagcgacaagagcgtgtgtctgttcaccgacttcgacagccagaccaacgtgtcccagagcaaggactccgacgtgtacatcaccgataagtgcgtgctggacatgcggagcatggacttcaagagcaactccgccgtggcctggtccaacaagtccgatttcgcctgcgccaacgccttcaacaacagcattatccccgaggacacattcttcccaagccccgagagcagctgcgacgtgaagctggtggaaaagagcttcgagacagacaccaacctgaacttccagatcctgtacgagatcctgctgggcaaggccaccctgtacgccgtgctggtgtctgccctggtgctgatggctatggtcaagcggaaggacagccgggga

SEQ ID NO: 34107 - DNA, 2694 bp, synthetic construct
  source 1..2694: mol_type = other DNA
atggccttaccagtgaccgccttgctcctgccgctggccttgctgctccacgccgccaggccggaagtgcagctggttgaatctggcggaggactggttcagcctggcggatctctgagactgtcttgtgccgccagcggcttcagcttcagcgacttttggatgagctgggtccgacaggcccctggcaaaggacttgaatgggtcgccacaatcagccaggccggcagcgagaaggactacgtggactctgtgaagggcagattcaccatcagccgggacaacgccaagaagtccctgtacctccagatgaacagcctgagagccgaggacaccgccgtgtactattgtgcctctggcgtgtacagcttcgactacagaggccagggcaccctggtcacagtctcttctggtaccggcggaggcggatctggcggcggaggtagcggtggcggaggatctgaattcgacatccagatgacacagagccctagcagcctgtctgccagcgtgggagacagagtgaccatcacatgcaaggccagcgaccacatcaacaactggctggcctggtatcagcagaagcctggacaggcccctaagctgctgatctacggcgctaccacactggaaacaggcgtgcccagcagattttctggcagcggctctggcaccgactacaccctgacaatatccagcctccagcctgaggacttcgccacctactactgtcagcagagctggaacaccccttggacattcggccagggcaccaagctggaaatcaagagactcgagatccagaaccctgatcctgccgtgtaccagctgcgggatagcaagagcagcgacaagagcgtgtgtctgttcaccgacttcgacagccagaccaacgtgtcccagagcaaggactccgacgtgtacatcaccgataagtgcgtgctggacatgcggagcatggacttcaagagcaactccgccgtggcctggtccaacaagtccgatttcgcctgcgccaacgccttcaacaacagcattatccccgaggacacattcttcccaagccccgagagcagctgcgacgtgaagctggtggaaaagagcttcgagacagacaccaacctgaacttccagatcctgtacgagatcctgctgggcaaggccaccctgtacgccgtgctggtgtctgccctggtgctgatggctatggtcaagcggaaggacagccggggacgcgccaagagaagcggatctggcgtgaagcagaccctgaatttcgacctgctgaagctggctggcgacgtggaatccaacccaggccctactagtatggactggatttggcgcatccttttccttgtcggcgctgctaccggcgcgcattccgggccccagctccagctgcaagagtctggacctggcctggtcaagcctagcgagacactgagcctgacctgtaccgtgtccggcgatagcatcagcagcggcgattactactggggctggatcagacagcctcctggcaaaggactggaatggatcggccacatctactacagcggcgtgacctactacaaccccagcctgaagtccagagtgaccatcagcgtggacaccagccggaaccagttctccctgaagctgtctagcgtgacagccgccgataccgccgtgtactactgcaccagagaggacagcagcaactggcggagtagaggccagggaacactggtcacagttagctctggatccggcggaggcggaagtggaggcggaggatctggcggcggaggctctttcgaacaagttcagcttcaacagcctggcgctgagctggtcaaacctggcgcttctgtgaagatgagctgcaaagccagcggctacgccttcagcagctcttggatcaactggatgaagcagaaacccggccagggactcgaatggatcggccaaatctatcccggcgacggcgacaccaactacaacggcaagttcaagggcagagccacactgaccgccgatacctctagcagcacagcctacatgcagctgagcagcctgaccagcgaagatagcgccgtgtacttctgtgcccggtccatcacaacagtcgtgggctgcgctatggactattggggccagggaacaagcgtgaccgtgtctagtacgcgtgaggacctgaagaacgtgttcccacctgaggtggccgtgttcgagcctagcgaggccgagatcagccacacccagaaagccaccctcgtgtgcctggctaccggcttctaccccgaccatgtggaactgtcttggtgggtcaacggcaaagaggtgcacagcggcgtgtgtaccgacccccagccactgaaagaacagcccgccctgaacgacagccggtactgcctgagcagcagactgagagtgtccgccaccttctggcagaacccccggaaccacttcagatgccaggtgcagttctacggcctgagcgagaacgacgagtggacccaggacagagccaagcccgtgacccagatcgtgtctgccgaagcctggggcagagccgattgcggctttaccagcgagagctaccagcagggcgtgctgagcgccaccaacctgagcgtgatcggcttcagaatcctgctgctgaaagtggccggctttaacctgctgatgaccctgcggctgtggtccagc

SEQ ID NO: 34108 - DNA, 2178 bp, synthetic construct
  source 1..2178: mol_type = other DNA
atggccttaccagtgaccgccttgctcctgccgctggccttgctgctccacgccgccaggccggacatccagatgacacagagccctagcagcctgtctgccagcgtgggagacagagtgaccatcacatgcaaggccagcgaccacatcaacaactggctggcctggtatcagcagaagcctggacaggcccctaagctgctgatctacggcgctaccacactggaaacaggcgtgcccagcagattttctggcagcggctctggcaccgactacaccctgacaatatccagcctccagcctgaggacttcgccacctactactgtcagcagagctggaacaccccttggacattcggccagggcaccaagctggaaatcaagagactcgaggacctgaagaacgtgttcccacctgaggtggccgtgttcgagcctagcgaggccgagatcagccacacccagaaagccaccctcgtgtgcctggctaccggcttctaccccgaccatgtggaactgtcttggtgggtcaacggcaaagaggtgcacagcggcgtgtgtaccgacccccagccactgaaagaacagcccgccctgaacgacagccggtactgcctgagcagcagactgagagtgtccgccaccttctggcagaacccccggaaccacttcagatgccaggtgcagttctacggcctgagcgagaacgacgagtggacccaggacagagccaagcccgtgacccagatcgtgtctgccgaagcctggggcagagccgatgatgtgattaagatccactggcaggaaaagaagtccaacaccatcctgggcagccaggaaggcaacaccatgaagaccaacgacacctacatgaagttcagctggctgaccgtgcccgagaagtccctggacaaagaacacagatgcatcgtgcggcacgaaaacaacaagaacggcgtggaccaggaaatcatcttcccacccatcaagaccgatgtgattacaatggaccccaaggacaactgctccaaggacgccaacgataccctgctgctccagctgaccaacaccagcgcctactacatgtacttgttgctgctgctgaagtccgtggtgtacttcgccatcatcacatgctgcctgctgatggctatggtcaagcggaaggacagccggggaagggccaagcgatctggatctggagcaacaaacttctcactactcaaacaagcaggtgacgtggaggagaatcccgggcctactagtatggactggatttggcgcatccttttccttgtcggcgctgctaccggcgcgcattccttcgaacaagttcagcttcaacagcctggcgctgagctggtcaaacctggcgcttctgtgaagatgagctgcaaagccagcggctacgccttcagcagctcttggatcaactggatgaagcagaaacccggccagggactcgaatggatcggccaaatctatcccggcgacggcgacaccaactacaacggcaagttcaagggcagagccacactgaccgccgatacctctagcagcacagcctacatgcagctgagcagcctgaccagcgaagatagcgccgtgtacttctgtgcccggtccatcacaacagtcgtgggctgcgctatggactattggggccagggaacaagcgtgaccgtgtctagtacgcgtatccagaaccctgatcctgccgtgtaccagctgcgggatagcaagagcagcgacaagagcgtgtgtctgttcaccgacttcgacagccagaccaacgtgtcccagagcaaggactccgacgtgtacatcaccgataagtgcgtgctggacatgcggagcatggacttcaagagcaactccgccgtggcctggtccaacaagtccgatttcgcctgcgccaacgccttcaacaacagcattatccccgaggacacattcttcccaagccccgagagcagcgactccaccgaccacgtgaagcccaaagagacagagaacaccaagcagcccagcaagagctgccacaagcccaaggccatcgtgcacaccgagaaagtgaacatgatgagcctgaccgtgctgggcctgcggatgctgttcgccaaaaccgtggccgtgaacttcctgctgaccgccaagctgttcttcctcctcaccgcc

SEQ ID NO: 34109 - DNA, 2190 bp, synthetic construct
  source 1..2190: mol_type = other DNA
atggccttaccagtgaccgccttgctcctgccgctggccttgctgctccacgccgccaggccggacatccagatgacacagagccctagcagcctgtctgccagcgtgggagacagagtgaccatcacatgcaaggccagcgaccacatcaacaactggctggcctggtatcagcagaagcctggacaggcccctaagctgctgatctacggcgctaccacactggaaacaggcgtgcccagcagattttctggcagcggctctggcaccgactacaccctgacaatatccagcctccagcctgaggacttcgccacctactactgtcagcagagctggaacaccccttggacattcggccagggcaccaagctggaaatcaagagactcgagatccagaaccctgatcctgccgtgtaccagctgcgggatagcaagagcagcgacaagagcgtgtgtctgttcaccgacttcgacagccagaccaacgtgtcccagagcaaggactccgacgtgtacatcaccgataagtgcgtgctggacatgcggagcatggacttcaagagcaactccgccgtggcctggtccaacaagtccgatttcgcctgcgccaacgccttcaacaacagcattatccccgaggacacattcttcccaagccccgagagcagcgactccaccgaccacgtgaagcccaaagagacagagaacaccaagcagcccagcaagagctgccacaagcccaaggccatcgtgcacaccgagaaagtgaacatgatgagcctgaccgtgctgggcctgcggatgctgttcgccaaaaccgtggccgtgaacttcctgctgaccgccaagctgttcttcctcctcaccgcccgcgccaagagaagcggatctggcgtgaagcagaccctgaatttcgacctgctgaagctggctggcgacgtggaatccaacccaggccctactagtatggactggatttggcgcatccttttccttgtcggcgctgctaccggcgcgcattccttcgaacaagttcagcttcaacagcctggcgctgagctggtcaaacctggcgcttctgtgaagatgagctgcaaagccagcggctacgccttcagcagctcttggatcaactggatgaagcagaaacccggccagggactcgaatggatcggccaaatctatcccggcgacggcgacaccaactacaacggcaagttcaagggcagagccacactgaccgccgatacctctagcagcacagcctacatgcagctgagcagcctgaccagcgaagatagcgccgtgtacttctgtgcccggtccatcacaacagtcgtgggctgcgctatggactattggggccagggaacaagcgtgaccgtgtctagtacgcgtgaggacctgaagaacgtgttcccacctgaggtggccgtgttcgagcctagcgaggccgagatcagccacacccagaaagccaccctcgtgtgcctggctaccggcttctaccccgaccatgtggaactgtcttggtgggtcaacggcaaagaggtgcacagcggcgtgtgtaccgacccccagccactgaaagaacagcccgccctgaacgacagccggtactgcctgagcagcagactgagagtgtccgccaccttctggcagaacccccggaaccacttcagatgccaggtgcagttctacggcctgagcgagaacgacgagtggacccaggacagagccaagcccgtgacccagatcgtgtctgccgaagcctggggcagagccgatgatgtgattaagatccactggcaggaaaagaagtccaacaccatcctgggcagccaggaaggcaacaccatgaagaccaacgacacctacatgaagttcagctggctgaccgtgcccgagaagtccctggacaaagaacacagatgcatcgtgcggcacgaaaacaacaagaacggcgtggaccaggaaatcatcttcccacccatcaagaccgatgtgattacaatggaccccaaggacaactgctccaaggacgccaacgataccctgctgctccagctgaccaacaccagcgcctactacatgtacttgttgctgctgctgaagtccgtggtgtacttcgccatcatcacatgctgcctgctgatggctatggtcaagcggaaggacagccgggga

SEQ ID NO: 34110 - DNA, 2583 bp, synthetic construct
  source 1..2583: mol_type = other DNA
atggccttaccagtgaccgccttgctcctgccgctggccttgctgctccacgccgccaggccggaagtgcagctggttgaatctggcggaggactggttcagcctggcggatctctgagactgtcttgtgccgccagcggcttcagcttcagcgacttttggatgagctgggtccgacaggcccctggcaaaggacttgaatgggtcgccacaatcagccaggccggcagcgagaaggactacgtggactctgtgaagggcagattcaccatcagccgggacaacgccaagaagtccctgtacctccagatgaacagcctgagagccgaggacaccgccgtgtactattgtgcctctggcgtgtacagcttcgactacagaggccagggcaccctggtcacagtctcttctggtaccggcggaggcggatctggcggcggaggtagcggtggcggaggatctgaattcgacatccagatgacacagagccctagcagcctgtctgccagcgtgggagacagagtgaccatcacatgcaaggccagcgaccacatcaacaactggctggcctggtatcagcagaagcctggacaggcccctaagctgctgatctacggcgctaccacactggaaacaggcgtgcccagcagattttctggcagcggctctggcaccgactacaccctgacaatatccagcctccagcctgaggacttcgccacctactactgtcagcagagctggaacaccccttggacattcggccagggcaccaagctggaaatcaagagactcgaggacctgaagaacgtgttcccacctgaggtggccgtgttcgagcctagcgaggccgagatcagccacacccagaaagccaccctcgtgtgcctggctaccggcttctaccccgaccatgtggaactgtcttggtgggtcaacggcaaagaggtgcacagcggcgtgtgtaccgacccccagccactgaaagaacagcccgccctgaacgacagccggtactgcctgagcagcagactgagagtgtccgccaccttctggcagaacccccggaaccacttcagatgccaggtgcagttctacggcctgagcgagaacgacgagtggacccaggacagagccaagcccgtgacccagatcgtgtctgccgaagcctggggcagagccgatgatgtgattaagatccactggcaggaaaagaagtccaacaccatcctgggcagccaggaaggcaacaccatgaagaccaacgacacctacatgaagttcagctggctgaccgtgcccgagaagtccctggacaaagaacacagatgcatcgtgcggcacgaaaacaacaagaacggcgtggaccaggaaatcatcttcccacccatcaagaccgatgtgattacaatggaccccaaggacaactgctccaaggacgccaacgataccctgctgctccagctgaccaacaccagcgcctactacatgtacttgttgctgctgctgaagtccgtggtgtacttcgccatcatcacatgctgcctgctgatggctatggtcaagcggaaggacagccggggaagggccaagcgatctggatctggagcaacaaacttctcactactcaaacaagcaggtgacgtggaggagaatcccgggcctactagtatggactggatttggcgcatccttttccttgtcggcgctgctaccggcgcgcattccttcgaacaagttcagcttcaacagcctggcgctgagctggtcaaacctggcgcttctgtgaagatgagctgcaaagccagcggctacgccttcagcagctcttggatcaactggatgaagcagaaacccggccagggactcgaatggatcggccaaatctatcccggcgacggcgacaccaactacaacggcaagttcaagggcagagccacactgaccgccgatacctctagcagcacagcctacatgcagctgagcagcctgaccagcgaagatagcgccgtgtacttctgtgcccggtccatcacaacagtcgtgggctgcgctatggactattggggccagggaacaagcgtgaccgtgtctagtacgcgtatccagaaccctgatcctgccgtgtaccagctgcgggatagcaagagcagcgacaagagcgtgtgtctgttcaccgacttcgacagccagaccaacgtgtcccagagcaaggactccgacgtgtacatcaccgataagtgcgtgctggacatgcggagcatggacttcaagagcaactccgccgtggcctggtccaacaagtccgatttcgcctgcgccaacgccttcaacaacagcattatccccgaggacacattcttcccaagccccgagagcagcgactccaccgaccacgtgaagcccaaagagacagagaacaccaagcagcccagcaagagctgccacaagcccaaggccatcgtgcacaccgagaaagtgaacatgatgagcctgaccgtgctgggcctgcggatgctgttcgccaaaaccgtggccgtgaacttcctgctgaccgccaagctgttcttcctcctcaccgcc

SEQ ID NO: 34111 - DNA, 2595 bp, synthetic construct
  source 1..2595: mol_type = other DNA
atggccttaccagtgaccgccttgctcctgccgctggccttgctgctccacgccgccaggccggaagtgcagctggttgaatctggcggaggactggttcagcctggcggatctctgagactgtcttgtgccgccagcggcttcagcttcagcgacttttggatgagctgggtccgacaggcccctggcaaaggacttgaatgggtcgccacaatcagccaggccggcagcgagaaggactacgtggactctgtgaagggcagattcaccatcagccgggacaacgccaagaagtccctgtacctccagatgaacagcctgagagccgaggacaccgccgtgtactattgtgcctctggcgtgtacagcttcgactacagaggccagggcaccctggtcacagtctcttctggtaccggcggaggcggatctggcggcggaggtagcggtggcggaggatctgaattcgacatccagatgacacagagccctagcagcctgtctgccagcgtgggagacagagtgaccatcacatgcaaggccagcgaccacatcaacaactggctggcctggtatcagcagaagcctggacaggcccctaagctgctgatctacggcgctaccacactggaaacaggcgtgcccagcagattttctggcagcggctctggcaccgactacaccctgacaatatccagcctccagcctgaggacttcgccacctactactgtcagcagagctggaacaccccttggacattcggccagggcaccaagctggaaatcaagagactcgagatccagaaccctgatcctgccgtgtaccagctgcgggatagcaagagcagcgacaagagcgtgtgtctgttcaccgacttcgacagccagaccaacgtgtcccagagcaaggactccgacgtgtacatcaccgataagtgcgtgctggacatgcggagcatggacttcaagagcaactccgccgtggcctggtccaacaagtccgatttcgcctgcgccaacgccttcaacaacagcattatccccgaggacacattcttcccaagccccgagagcagcgactccaccgaccacgtgaagcccaaagagacagagaacaccaagcagcccagcaagagctgccacaagcccaaggccatcgtgcacaccgagaaagtgaacatgatgagcctgaccgtgctgggcctgcggatgctgttcgccaaaaccgtggccgtgaacttcctgctgaccgccaagctgttcttcctcctcaccgcccgcgccaagagaagcggatctggcgtgaagcagaccctgaatttcgacctgctgaagctggctggcgacgtggaatccaacccaggccctactagtatggactggatttggcgcatccttttccttgtcggcgctgctaccggcgcgcattccttcgaacaagttcagcttcaacagcctggcgctgagctggtcaaacctggcgcttctgtgaagatgagctgcaaagccagcggctacgccttcagcagctcttggatcaactggatgaagcagaaacccggccagggactcgaatggatcggccaaatctatcccggcgacggcgacaccaactacaacggcaagttcaagggcagagccacactgaccgccgatacctctagcagcacagcctacatgcagctgagcagcctgaccagcgaagatagcgccgtgtacttctgtgcccggtccatcacaacagtcgtgggctgcgctatggactattggggccagggaacaagcgtgaccgtgtctagtacgcgtgaggacctgaagaacgtgttcccacctgaggtggccgtgttcgagcctagcgaggccgagatcagccacacccagaaagccaccctcgtgtgcctggctaccggcttctaccccgaccatgtggaactgtcttggtgggtcaacggcaaagaggtgcacagcggcgtgtgtaccgacccccagccactgaaagaacagcccgccctgaacgacagccggtactgcctgagcagcagactgagagtgtccgccaccttctggcagaacccccggaaccacttcagatgccaggtgcagttctacggcctgagcgagaacgacgagtggacccaggacagagccaagcccgtgacccagatcgtgtctgccgaagcctggggcagagccgatgatgtgattaagatccactggcaggaaaagaagtccaacaccatcctgggcagccaggaaggcaacaccatgaagaccaacgacacctacatgaagttcagctggctgaccgtgcccgagaagtccctggacaaagaacacagatgcatcgtgcggcacgaaaacaacaagaacggcgtggaccaggaaatcatcttcccacccatcaagaccgatgtgattacaatggaccccaaggacaactgctccaaggacgccaacgataccctgctgctccagctgaccaacaccagcgcctactacatgtacttgttgctgctgctgaagtccgtggtgtacttcgccatcatcacatgctgcctgctgatggctatggtcaagcggaaggacagccgggga

SEQ ID NO: 34112 - DNA, 2994 bp, synthetic construct
  source 1..2994: mol_type = other DNA
atggccttaccagtgaccgccttgctcctgccgctggccttgctgctccacgccgccaggccggaagtgcagctggttgaatctggcggaggactggttcagcctggcggatctctgagactgtcttgtgccgccagcggcttcagcttcagcgacttttggatgagctgggtccgacaggcccctggcaaaggacttgaatgggtcgccacaatcagccaggccggcagcgagaaggactacgtggactctgtgaagggcagattcaccatcagccgggacaacgccaagaagtccctgtacctccagatgaacagcctgagagccgaggacaccgccgtgtactattgtgcctctggcgtgtacagcttcgactacagaggccagggcaccctggtcacagtctcttctggtaccggcggaggcggatctggcggcggaggtagcggtggcggaggatctgaattcgacatccagatgacacagagccctagcagcctgtctgccagcgtgggagacagagtgaccatcacatgcaaggccagcgaccacatcaacaactggctggcctggtatcagcagaagcctggacaggcccctaagctgctgatctacggcgctaccacactggaaacaggcgtgcccagcagattttctggcagcggctctggcaccgactacaccctgacaatatccagcctccagcctgaggacttcgccacctactactgtcagcagagctggaacaccccttggacattcggccagggcaccaagctggaaatcaagagactcgaggacctgaagaacgtgttcccacctgaggtggccgtgttcgagcctagcgaggccgagatcagccacacccagaaagccaccctcgtgtgcctggctaccggcttctaccccgaccatgtggaactgtcttggtgggtcaacggcaaagaggtgcacagcggcgtgtgtaccgacccccagccactgaaagaacagcccgccctgaacgacagccggtactgcctgagcagcagactgagagtgtccgccaccttctggcagaacccccggaaccacttcagatgccaggtgcagttctacggcctgagcgagaacgacgagtggacccaggacagagccaagcccgtgacccagatcgtgtctgccgaagcctggggcagagccgatgatgtgattaagatccactggcaggaaaagaagtccaacaccatcctgggcagccaggaaggcaacaccatgaagaccaacgacacctacatgaagttcagctggctgaccgtgcccgagaagtccctggacaaagaacacagatgcatcgtgcggcacgaaaacaacaagaacggcgtggaccaggaaatcatcttcccacccatcaagaccgatgtgattacaatggaccccaaggacaactgctccaaggacgccaacgataccctgctgctccagctgaccaacaccagcgcctactacatgtacttgttgctgctgctgaagtccgtggtgtacttcgccatcatcacatgctgcctgctgatggctatggtcaagcggaaggacagccggggaagggccaagcgatctggatctggagcaacaaacttctcactactcaaacaagcaggtgacgtggaggagaatcccgggcctactagtatggactggatttggcgcatccttttccttgtcggcgctgctaccggcgcgcattccgggccccagctccagctgcaagagtctggacctggcctggtcaagcctagcgagacactgagcctgacctgtaccgtgtccggcgatagcatcagcagcggcgattactactggggctggatcagacagcctcctggcaaaggactggaatggatcggccacatctactacagcggcgtgacctactacaaccccagcctgaagtccagagtgaccatcagcgtggacaccagccggaaccagttctccctgaagctgtctagcgtgacagccgccgataccgccgtgtactactgcaccagagaggacagcagcaactggcggagtagaggccagggaacactggtcacagttagctctggatccggcggaggcggaagtggaggcggaggatctggcggcggaggctctttcgaacaagttcagcttcaacagcctggcgctgagctggtcaaacctggcgcttctgtgaagatgagctgcaaagccagcggctacgccttcagcagctcttggatcaactggatgaagcagaaacccggccagggactcgaatggatcggccaaatctatcccggcgacggcgacaccaactacaacggcaagttcaagggcagagccacactgaccgccgatacctctagcagcacagcctacatgcagctgagcagcctgaccagcgaagatagcgccgtgtacttctgtgcccggtccatcacaacagtcgtgggctgcgctatggactattggggccagggaacaagcgtgaccgtgtctagtacgcgtatccagaaccctgatcctgccgtgtaccagctgcgggatagcaagagcagcgacaagagcgtgtgtctgttcaccgacttcgacagccagaccaacgtgtcccagagcaaggactccgacgtgtacatcaccgataagtgcgtgctggacatgcggagcatggacttcaagagcaactccgccgtggcctggtccaacaagtccgatttcgcctgcgccaacgccttcaacaacagcattatccccgaggacacattcttcccaagccccgagagcagcgactccaccgaccacgtgaagcccaaagagacagagaacaccaagcagcccagcaagagctgccacaagcccaaggccatcgtgcacaccgagaaagtgaacatgatgagcctgaccgtgctgggcctgcggatgctgttcgccaaaaccgtggccgtgaacttcctgctgaccgccaagctgttcttcctcctcaccgcc

SEQ ID NO: 34113 - DNA, 3006 bp, synthetic construct
  source 1..3006: mol_type = other DNA
atggccttaccagtgaccgccttgctcctgccgctggccttgctgctccacgccgccaggccggaagtgcagctggttgaatctggcggaggactggttcagcctggcggatctctgagactgtcttgtgccgccagcggcttcagcttcagcgacttttggatgagctgggtccgacaggcccctggcaaaggacttgaatgggtcgccacaatcagccaggccggcagcgagaaggactacgtggactctgtgaagggcagattcaccatcagccgggacaacgccaagaagtccctgtacctccagatgaacagcctgagagccgaggacaccgccgtgtactattgtgcctctggcgtgtacagcttcgactacagaggccagggcaccctggtcacagtctcttctggtaccggcggaggcggatctggcggcggaggtagcggtggcggaggatctgaattcgacatccagatgacacagagccctagcagcctgtctgccagcgtgggagacagagtgaccatcacatgcaaggccagcgaccacatcaacaactggctggcctggtatcagcagaagcctggacaggcccctaagctgctgatctacggcgctaccacactggaaacaggcgtgcccagcagattttctggcagcggctctggcaccgactacaccctgacaatatccagcctccagcctgaggacttcgccacctactactgtcagcagagctggaacaccccttggacattcggccagggcaccaagctggaaatcaagagactcgagatccagaaccctgatcctgccgtgtaccagctgcgggatagcaagagcagcgacaagagcgtgtgtctgttcaccgacttcgacagccagaccaacgtgtcccagagcaaggactccgacgtgtacatcaccgataagtgcgtgctggacatgcggagcatggacttcaagagcaactccgccgtggcctggtccaacaagtccgatttcgcctgcgccaacgccttcaacaacagcattatccccgaggacacattcttcccaagccccgagagcagcgactccaccgaccacgtgaagcccaaagagacagagaacaccaagcagcccagcaagagctgccacaagcccaaggccatcgtgcacaccgagaaagtgaacatgatgagcctgaccgtgctgggcctgcggatgctgttcgccaaaaccgtggccgtgaacttcctgctgaccgccaagctgttcttcctcctcaccgcccgcgccaagagaagcggatctggcgtgaagcagaccctgaatttcgacctgctgaagctggctggcgacgtggaatccaacccaggccctactagtatggactggatttggcgcatccttttccttgtcggcgctgctaccggcgcgcattccgggccccagctccagctgcaagagtctggacctggcctggtcaagcctagcgagacactgagcctgacctgtaccgtgtccggcgatagcatcagcagcggcgattactactggggctggatcagacagcctcctggcaaaggactggaatggatcggccacatctactacagcggcgtgacctactacaaccccagcctgaagtccagagtgaccatcagcgtggacaccagccggaaccagttctccctgaagctgtctagcgtgacagccgccgataccgccgtgtactactgcaccagagaggacagcagcaactggcggagtagaggccagggaacactggtcacagttagctctggatccggcggaggcggaagtggaggcggaggatctggcggcggaggctctttcgaacaagttcagcttcaacagcctggcgctgagctggtcaaacctggcgcttctgtgaagatgagctgcaaagccagcggctacgccttcagcagctcttggatcaactggatgaagcagaaacccggccagggactcgaatggatcggccaaatctatcccggcgacggcgacaccaactacaacggcaagttcaagggcagagccacactgaccgccgatacctctagcagcacagcctacatgcagctgagcagcctgaccagcgaagatagcgccgtgtacttctgtgcccggtccatcacaacagtcgtgggctgcgctatggactattggggccagggaacaagcgtgaccgtgtctagtacgcgtgaggacctgaagaacgtgttcccacctgaggtggccgtgttcgagcctagcgaggccgagatcagccacacccagaaagccaccctcgtgtgcctggctaccggcttctaccccgaccatgtggaactgtcttggtgggtcaacggcaaagaggtgcacagcggcgtgtgtaccgacccccagccactgaaagaacagcccgccctgaacgacagccggtactgcctgagcagcagactgagagtgtccgccaccttctggcagaacccccggaaccacttcagatgccaggtgcagttctacggcctgagcgagaacgacgagtggacccaggacagagccaagcccgtgacccagatcgtgtctgccgaagcctggggcagagccgatgatgtgattaagatccactggcaggaaaagaagtccaacaccatcctgggcagccaggaaggcaacaccatgaagaccaacgacacctacatgaagttcagctggctgaccgtgcccgagaagtccctggacaaagaacacagatgcatcgtgcggcacgaaaacaacaagaacggcgtggaccaggaaatcatcttcccacccatcaagaccgatgtgattacaatggaccccaaggacaactgctccaaggacgccaacgataccctgctgctccagctgaccaacaccagcgcctactacatgtacttgttgctgctgctgaagtccgtggtgtacttcgccatcatcacatgctgcctgctgatggctatggtcaagcggaaggacagccgggga

SEQ ID NO: 34114 - DNA, 2172 bp, synthetic construct
  source 1..2172: mol_type = other DNA
atggccttaccagtgaccgccttgctcctgccgctggccttgctgctccacgccgccaggccggacatccagatgacacagagccctagcagcctgtctgccagcgtgggagacagagtgaccatcacatgcaaggccagcgaccacatcaacaactggctggcctggtatcagcagaagcctggacaggcccctaagctgctgatctacggcgctaccacactggaaacaggcgtgcccagcagattttctggcagcggctctggcaccgactacaccctgacaatatccagcctccagcctgaggacttcgccacctactactgtcagcagagctggaacaccccttggacattcggccagggcaccaagctggaaatcaagagactcgaggacctgaagaacgtgttcccacctgaggtggccgtgttcgagcctagcgaggccgagatcagccacacccagaaagccaccctcgtgtgcctggctaccggcttctaccccgaccatgtggaactgtcttggtgggtcaacggcaaagaggtgcacagcggcgtgtgtaccgacccccagccactgaaagaacagcccgccctgaacgacagccggtactgcctgagcagcagactgagagtgtccgccaccttctggcagaacccccggaaccacttcagatgccaggtgcagttctacggcctgagcgagaacgacgagtggacccaggacagagccaagcccgtgacccagatcgtgtctgccgaagcctggggcagagccgatgatgtgattaagatccactggcaggaaaagaagtccaacaccatcctgggcagccaggaaggcaacaccatgaagaccaacgacacctacatgaagttcagctggctgaccgtgcccgagaagtccctggacaaagaacacagatgcatcgtgcggcacgaaaacaacaagaacggcgtggaccaggaaatcatcttcccacccatcaagaccgatgtgattacaatggaccccaaggacaactgctccaaggacgccaacgataccctgctgctccagctgaccaacaccagcgcctactacatgtacttgttgctgctgctgaagtccgtggtgtacttcgccatcatcacatgctgcctgctgcggagaaccgccttctgctgcaacggcgagaagtctagggccaagcgatctggatctggagcaacaaacttctcactactcaaacaagcaggtgacgtggaggagaatcccgggcctactagtatggactggatttggcgcatccttttccttgtcggcgctgctaccggcgcgcattccttcgaacaagttcagcttcaacagcctggcgctgagctggtcaaacctggcgcttctgtgaagatgagctgcaaagccagcggctacgccttcagcagctcttggatcaactggatgaagcagaaacccggccagggactcgaatggatcggccaaatctatcccggcgacggcgacaccaactacaacggcaagttcaagggcagagccacactgaccgccgatacctctagcagcacagcctacatgcagctgagcagcctgaccagcgaagatagcgccgtgtacttctgtgcccggtccatcacaacagtcgtgggctgcgctatggactattggggccagggaacaagcgtgaccgtgtctagtacgcgtatccagaaccctgatcctgccgtgtaccagctgcgggatagcaagagcagcgacaagagcgtgtgtctgttcaccgacttcgacagccagaccaacgtgtcccagagcaaggactccgacgtgtacatcaccgataagtgcgtgctggacatgcggagcatggacttcaagagcaactccgccgtggcctggtccaacaagtccgatttcgcctgcgccaacgccttcaacaacagcattatccccgaggacacattcttcccaagccccgagagcagcgactccaccgaccacgtgaagcccaaagagacagagaacaccaagcagcccagcaagagctgccacaagcccaaggccatcgtgcacaccgagaaagtgaacatgatgagcctgaccgtgctgggcctgcggatgctgttcgccaaaaccgtggccgtgaacttcctgctgaccgccaagctgttcttcctc

SEQ ID NO: 34115 - DNA, 2184 bp, synthetic construct
  source 1..2184: mol_type = other DNA
atggccttaccagtgaccgccttgctcctgccgctggccttgctgctccacgccgccaggccggacatccagatgacacagagccctagcagcctgtctgccagcgtgggagacagagtgaccatcacatgcaaggccagcgaccacatcaacaactggctggcctggtatcagcagaagcctggacaggcccctaagctgctgatctacggcgctaccacactggaaacaggcgtgcccagcagattttctggcagcggctctggcaccgactacaccctgacaatatccagcctccagcctgaggacttcgccacctactactgtcagcagagctggaacaccccttggacattcggccagggcaccaagctggaaatcaagagactcgagatccagaaccctgatcctgccgtgtaccagctgcgggatagcaagagcagcgacaagagcgtgtgtctgttcaccgacttcgacagccagaccaacgtgtcccagagcaaggactccgacgtgtacatcaccgataagtgcgtgctggacatgcggagcatggacttcaagagcaactccgccgtggcctggtccaacaagtccgatttcgcctgcgccaacgccttcaacaacagcattatccccgaggacacattcttcccaagccccgagagcagcgactccaccgaccacgtgaagcccaaagagacagagaacaccaagcagcccagcaagagctgccacaagcccaaggccatcgtgcacaccgagaaagtgaacatgatgagcctgaccgtgctgggcctgcggatgctgttcgccaaaaccgtggccgtgaacttcctgctgaccgccaagctgttcttcctccgcgccaagagaagcggatctggcgtgaagcagaccctgaatttcgacctgctgaagctggctggcgacgtggaatccaacccaggccctactagtatggactggatttggcgcatccttttccttgtcggcgctgctaccggcgcgcattccttcgaacaagttcagcttcaacagcctggcgctgagctggtcaaacctggcgcttctgtgaagatgagctgcaaagccagcggctacgccttcagcagctcttggatcaactggatgaagcagaaacccggccagggactcgaatggatcggccaaatctatcccggcgacggcgacaccaactacaacggcaagttcaagggcagagccacactgaccgccgatacctctagcagcacagcctacatgcagctgagcagcctgaccagcgaagatagcgccgtgtacttctgtgcccggtccatcacaacagtcgtgggctgcgctatggactattggggccagggaacaagcgtgaccgtgtctagtacgcgtgaggacctgaagaacgtgttcccacctgaggtggccgtgttcgagcctagcgaggccgagatcagccacacccagaaagccaccctcgtgtgcctggctaccggcttctaccccgaccatgtggaactgtcttggtgggtcaacggcaaagaggtgcacagcggcgtgtgtaccgacccccagccactgaaagaacagcccgccctgaacgacagccggtactgcctgagcagcagactgagagtgtccgccaccttctggcagaacccccggaaccacttcagatgccaggtgcagttctacggcctgagcgagaacgacgagtggacccaggacagagccaagcccgtgacccagatcgtgtctgccgaagcctggggcagagccgatgatgtgattaagatccactggcaggaaaagaagtccaacaccatcctgggcagccaggaaggcaacaccatgaagaccaacgacacctacatgaagttcagctggctgaccgtgcccgagaagtccctggacaaagaacacagatgcatcgtgcggcacgaaaacaacaagaacggcgtggaccaggaaatcatcttcccacccatcaagaccgatgtgattacaatggaccccaaggacaactgctccaaggacgccaacgataccctgctgctccagctgaccaacaccagcgcctactacatgtacttgttgctgctgctgaagtccgtggtgtacttcgccatcatcacatgctgcctgctgcggagaaccgccttctgctgcaacggcgagaagtct

SEQ ID NO: 34116 - DNA, 2577 bp, synthetic construct
  source 1..2577: mol_type = other DNA
atggccttaccagtgaccgccttgctcctgccgctggccttgctgctccacgccgccaggccggaagtgcagctggttgaatctggcggaggactggttcagcctggcggatctctgagactgtcttgtgccgccagcggcttcagcttcagcgacttttggatgagctgggtccgacaggcccctggcaaaggacttgaatgggtcgccacaatcagccaggccggcagcgagaaggactacgtggactctgtgaagggcagattcaccatcagccgggacaacgccaagaagtccctgtacctccagatgaacagcctgagagccgaggacaccgccgtgtactattgtgcctctggcgtgtacagcttcgactacagaggccagggcaccctggtcacagtctcttctggtaccggcggaggcggatctggcggcggaggtagcggtggcggaggatctgaattcgacatccagatgacacagagccctagcagcctgtctgccagcgtgggagacagagtgaccatcacatgcaaggccagcgaccacatcaacaactggctggcctggtatcagcagaagcctggacaggcccctaagctgctgatctacggcgctaccacactggaaacaggcgtgcccagcagattttctggcagcggctctggcaccgactacaccctgacaatatccagcctccagcctgaggacttcgccacctactactgtcagcagagctggaacaccccttggacattcggccagggcaccaagctggaaatcaagagactcgaggacctgaagaacgtgttcccacctgaggtggccgtgttcgagcctagcgaggccgagatcagccacacccagaaagccaccctcgtgtgcctggctaccggcttctaccccgaccatgtggaactgtcttggtgggtcaacggcaaagaggtgcacagcggcgtgtgtaccgacccccagccactgaaagaacagcccgccctgaacgacagccggtactgcctgagcagcagactgagagtgtccgccaccttctggcagaacccccggaaccacttcagatgccaggtgcagttctacggcctgagcgagaacgacgagtggacccaggacagagccaagcccgtgacccagatcgtgtctgccgaagcctggggcagagccgatgatgtgattaagatccactggcaggaaaagaagtccaacaccatcctgggcagccaggaaggcaacaccatgaagaccaacgacacctacatgaagttcagctggctgaccgtgcccgagaagtccctggacaaagaacacagatgcatcgtgcggcacgaaaacaacaagaacggcgtggaccaggaaatcatcttcccacccatcaagaccgatgtgattacaatggaccccaaggacaactgctccaaggacgccaacgataccctgctgctccagctgaccaacaccagcgcctactacatgtacttgttgctgctgctgaagtccgtggtgtacttcgccatcatcacatgctgcctgctgcggagaaccgccttctgctgcaacggcgagaagtctagggccaagcgatctggatctggagcaacaaacttctcactactcaaacaagcaggtgacgtggaggagaatcccgggcctactagtatggactggatttggcgcatccttttccttgtcggcgctgctaccggcgcgcattccttcgaacaagttcagcttcaacagcctggcgctgagctggtcaaacctggcgcttctgtgaagatgagctgcaaagccagcggctacgccttcagcagctcttggatcaactggatgaagcagaaacccggccagggactcgaatggatcggccaaatctatcccggcgacggcgacaccaactacaacggcaagttcaagggcagagccacactgaccgccgatacctctagcagcacagcctacatgcagctgagcagcctgaccagcgaagatagcgccgtgtacttctgtgcccggtccatcacaacagtcgtgggctgcgctatggactattggggccagggaacaagcgtgaccgtgtctagtacgcgtatccagaaccctgatcctgccgtgtaccagctgcgggatagcaagagcagcgacaagagcgtgtgtctgttcaccgacttcgacagccagaccaacgtgtcccagagcaaggactccgacgtgtacatcaccgataagtgcgtgctggacatgcggagcatggacttcaagagcaactccgccgtggcctggtccaacaagtccgatttcgcctgcgccaacgccttcaacaacagcattatccccgaggacacattcttcccaagccccgagagcagcgactccaccgaccacgtgaagcccaaagagacagagaacaccaagcagcccagcaagagctgccacaagcccaaggccatcgtgcacaccgagaaagtgaacatgatgagcctgaccgtgctgggcctgcggatgctgttcgccaaaaccgtggccgtgaacttcctgctgaccgccaagctgttcttcctc

SEQ ID NO: 34117 - DNA, 2988 bp, synthetic construct
  source 1..2988: mol_type = other DNA
atggccttaccagtgaccgccttgctcctgccgctggccttgctgctccacgccgccaggccggaagtgcagctggttgaatctggcggaggactggttcagcctggcggatctctgagactgtcttgtgccgccagcggcttcagcttcagcgacttttggatgagctgggtccgacaggcccctggcaaaggacttgaatgggtcgccacaatcagccaggccggcagcgagaaggactacgtggactctgtgaagggcagattcaccatcagccgggacaacgccaagaagtccctgtacctccagatgaacagcctgagagccgaggacaccgccgtgtactattgtgcctctggcgtgtacagcttcgactacagaggccagggcaccctggtcacagtctcttctggtaccggcggaggcggatctggcggcggaggtagcggtggcggaggatctgaattcgacatccagatgacacagagccctagcagcctgtctgccagcgtgggagacagagtgaccatcacatgcaaggccagcgaccacatcaacaactggctggcctggtatcagcagaagcctggacaggcccctaagctgctgatctacggcgctaccacactggaaacaggcgtgcccagcagattttctggcagcggctctggcaccgactacaccctgacaatatccagcctccagcctgaggacttcgccacctactactgtcagcagagctggaacaccccttggacattcggccagggcaccaagctggaaatcaagagactcgaggacctgaagaacgtgttcccacctgaggtggccgtgttcgagcctagcgaggccgagatcagccacacccagaaagccaccctcgtgtgcctggctaccggcttctaccccgaccatgtggaactgtcttggtgggtcaacggcaaagaggtgcacagcggcgtgtgtaccgacccccagccactgaaagaacagcccgccctgaacgacagccggtactgcctgagcagcagactgagagtgtccgccaccttctggcagaacccccggaaccacttcagatgccaggtgcagttctacggcctgagcgagaacgacgagtggacccaggacagagccaagcccgtgacccagatcgtgtctgccgaagcctggggcagagccgatgatgtgattaagatccactggcaggaaaagaagtccaacaccatcctgggcagccaggaaggcaacaccatgaagaccaacgacacctacatgaagttcagctggctgaccgtgcccgagaagtccctggacaaagaacacagatgcatcgtgcggcacgaaaacaacaagaacggcgtggaccaggaaatcatcttcccacccatcaagaccgatgtgattacaatggaccccaaggacaactgctccaaggacgccaacgataccctgctgctccagctgaccaacaccagcgcctactacatgtacttgttgctgctgctgaagtccgtggtgtacttcgccatcatcacatgctgcctgctgcggagaaccgccttctgctgcaacggcgagaagtctagggccaagcgatctggatctggagcaacaaacttctcactactcaaacaagcaggtgacgtggaggagaatcccgggcctactagtatggactggatttggcgcatccttttccttgtcggcgctgctaccggcgcgcattccgggccccagctccagctgcaagagtctggacctggcctggtcaagcctagcgagacactgagcctgacctgtaccgtgtccggcgatagcatcagcagcggcgattactactggggctggatcagacagcctcctggcaaaggactggaatggatcggccacatctactacagcggcgtgacctactacaaccccagcctgaagtccagagtgaccatcagcgtggacaccagccggaaccagttctccctgaagctgtctagcgtgacagccgccgataccgccgtgtactactgcaccagagaggacagcagcaactggcggagtagaggccagggaacactggtcacagttagctctggatccggcggaggcggaagtggaggcggaggatctggcggcggaggctctttcgaacaagttcagcttcaacagcctggcgctgagctggtcaaacctggcgcttctgtgaagatgagctgcaaagccagcggctacgccttcagcagctcttggatcaactggatgaagcagaaacccggccagggactcgaatggatcggccaaatctatcccggcgacggcgacaccaactacaacggcaagttcaagggcagagccacactgaccgccgatacctctagcagcacagcctacatgcagctgagcagcctgaccagcgaagatagcgccgtgtacttctgtgcccggtccatcacaacagtcgtgggctgcgctatggactattggggccagggaacaagcgtgaccgtgtctagtacgcgtatccagaaccctgatcctgccgtgtaccagctgcgggatagcaagagcagcgacaagagcgtgtgtctgttcaccgacttcgacagccagaccaacgtgtcccagagcaaggactccgacgtgtacatcaccgataagtgcgtgctggacatgcggagcatggacttcaagagcaactccgccgtggcctggtccaacaagtccgatttcgcctgcgccaacgccttcaacaacagcattatccccgaggacacattcttcccaagccccgagagcagcgactccaccgaccacgtgaagcccaaagagacagagaacaccaagcagcccagcaagagctgccacaagcccaaggccatcgtgcacaccgagaaagtgaacatgatgagcctgaccgtgctgggcctgcggatgctgttcgccaaaaccgtggccgtgaacttcctgctgaccgccaagctgttcttcctc

SEQ ID NO: 34118 - DNA, 1866 bp, synthetic construct
  source 1..1866: mol_type = other DNA
atggccttaccagtgaccgccttgctcctgccgctggccttgctgctccacgccgccaggccggacatccagatgacacagagccctagcagcctgtctgccagcgtgggagacagagtgaccatcacatgcaaggccagcgaccacatcaacaactggctggcctggtatcagcagaagcctggacaggcccctaagctgctgatctacggcgctaccacactggaaacaggcgtgcccagcagattttctggcagcggctctggcaccgactacaccctgacaatatccagcctccagcctgaggacttcgccacctactactgtcagcagagctggaacaccccttggacattcggccagggcaccaagctggaaatcaagagactcgaggacctgaagaacgtgttcccacctgaggtggccgtgttcgagcctagcgaggccgagatcagccacacccagaaagccaccctcgtgtgcctggctaccggcttctaccccgaccatgtggaactgtcttggtgggtcaacggcaaagaggtgcacagcggcgtgtctaccgacccccagccactgaaagaacagcccgccctgaacgacagccggtactgcctgagcagcagactgagagtgtccgccaccttctggcagaacccccggaaccacttcagatgccaggtgcagttctacggcctgagcgagaacgacgagtggacccaggacagagccaagcccgtgacccagatcgtgtctgccgaagcctggggcagagccgattgcgacgtgaagctggtggaaaagagcttcgagacagacaccaacctgaacttccagaacctgagcgtgatcggcttcagaatcctgctgctgaaagtggccggctttaacctgctgatgaccctgcggctgtggtccagcagggccaagcgatctggatctggagcaacaaacttctcactactcaaacaagcaggtgacgtggaggagaatcccgggcctactagtatggactggatttggcgcatccttttccttgtcggcgctgctaccggcgcgcattccttcgaacaagttcagcttcaacagcctggcgctgagctggtcaaacctggcgcttctgtgaagatgagctgcaaagccagcggctacgccttcagcagctcttggatcaactggatgaagcagaaacccggccagggactcgaatggatcggccaaatctatcccggcgacggcgacaccaactacaacggcaagttcaagggcagagccacactgaccgccgatacctctagcagcacagcctacatgcagctgagcagcctgaccagcgaagatagcgccgtgtacttctgtgcccggtccatcacaacagtcgtgggctgcgctatggactattggggccagggaacaagcgtgaccgtgtctagtacgcgtatccagaaccctgatcctgccgtgtaccagctgcgggatagcaagagcagcgacaagagcgtgtgtctgttcaccgacttcgacagccagaccaacgtgtcccagagcaaggactccgacgtgtacatcaccgataagaccgtgctggacatgcggagcatggacttcaagagcaactccgccgtggcctggtccaacaagtccgatttcgcctgcgccaacgccttcaacaacagcattatccccgaggacacattcttcccaagccccgagagcagctgcggctttaccagcgagagctaccagcagggcgtgctgagcgccaccatcctgtacgagatcctgctgggcaaggccaccctgtacgccgtgctggtgtctgccctggtgctgatggctatggtcaagcggaaggacagccgggga

SEQ ID NO: 34119 - DNA, 1866 bp, synthetic construct
  source 1..1866: mol_type = other DNA
atggccttaccagtgaccgccttgctcctgccgctggccttgctgctccacgccgccaggccggacatccagatgacacagagccctagcagcctgtctgccagcgtgggagacagagtgaccatcacatgcaaggccagcgaccacatcaacaactggctggcctggtatcagcagaagcctggacaggcccctaagctgctgatctacggcgctaccacactggaaacaggcgtgcccagcagattttctggcagcggctctggcaccgactacaccctgacaatatccagcctccagcctgaggacttcgccacctactactgtcagcagagctggaacaccccttggacattcggccagggcaccaagctggaaatcaagagactcgaggacctgaagaacgtgttcccacctgaggtggccgtgttcgagcctagcgaggccgagatcagccacacccagaaagccaccctcgtgtgcctggctaccggcttctaccccgaccatgtggaactgtcttggtgggtcaacggcaaagaggtgcacagcggcgtgtctaccgacccccagccactgaaagaacagcccgccctgaacgacagccggtactgcctgagcagcagactgagagtgtccgccaccttctggcagaacccccggaaccacttcagatgccaggtgcagttctacggcctgagcgagaacgacgagtggacccaggacagagccaagcccgtgacccagatcgtgtctgccgaagcctggggcagagccgattgcggctttaccagcgagagctaccagcagggcgtgctgagcgccaccaacctgagcgtgatcggcttcagaatcctgctgctgaaagtggccggctttaacctgctgatgaccctgcggctgtggtccagcagggccaagcgatctggatctggagcaacaaacttctcactactcaaacaagcaggtgacgtggaggagaatcccgggcctactagtatggactggatttggcgcatccttttccttgtcggcgctgctaccggcgcgcattccttcgaacaagttcagcttcaacagcctggcgctgagctggtcaaacctggcgcttctgtgaagatgagctgcaaagccagcggctacgccttcagcagctcttggatcaactggatgaagcagaaacccggccagggactcgaatggatcggccaaatctatcccggcgacggcgacaccaactacaacggcaagttcaagggcagagccacactgaccgccgatacctctagcagcacagcctacatgcagctgagcagcctgaccagcgaagatagcgccgtgtacttctgtgcccggtccatcacaacagtcgtgggctgcgctatggactattggggccagggaacaagcgtgaccgtgtctagtacgcgtatccagaaccctgatcctgccgtgtaccagctgcgggatagcaagagcagcgacaagagcgtgtgtctgttcaccgacttcgacagccagaccaacgtgtcccagagcaaggactccgacgtgtacatcaccgataagaccgtgctggacatgcggagcatggacttcaagagcaactccgccgtggcctggtccaacaagtccgatttcgcctgcgccaacgccttcaacaacagcattatccccgaggacacattcttcccaagccccgagagcagctgcgacgtgaagctggtggaaaagagcttcgagacagacaccaacctgaacttccagatcctgtacgagatcctgctgggcaaggccaccctgtacgccgtgctggtgtctgccctggtgctgatggctatggtcaagcggaaggacagccgggga

SEQ ID NO: 34120 - DNA, 2178 bp, synthetic construct
  source 1..2178: mol_type = other DNA
atggccttaccagtgaccgccttgctcctgccgctggccttgctgctccacgccgccaggccggacatccagatgacacagagccctagcagcctgtctgccagcgtgggagacagagtgaccatcacatgcaaggccagcgaccacatcaacaactggctggcctggtatcagcagaagcctggacaggcccctaagctgctgatctacggcgctaccacactggaaacaggcgtgcccagcagattttctggcagcggctctggcaccgactacaccctgacaatatccagcctccagcctgaggacttcgccacctactactgtcagcagagctggaacaccccttggacattcggccagggcaccaagctggaaatcaagagactcgaggacctgaagaacgtgttcccacctgaggtggccgtgttcgagcctagcgaggccgagatcagccacacccagaaagccaccctcgtgtgcctggctaccggcttctaccccgaccatgtggaactgtcttggtgggtcaacggcaaagaggtgcacagcggcgtgtctaccgacccccagccactgaaagaacagcccgccctgaacgacagccggtactgcctgagcagcagactgagagtgtccgccaccttctggcagaacccccggaaccacttcagatgccaggtgcagttctacggcctgagcgagaacgacgagtggacccaggacagagccaagcccgtgacccagatcgtgtctgccgaagcctggggcagagccgatgatgtgattaagatccactggcaggaaaagaagtccaacaccatcctgggcagccaggaaggcaacaccatgaagaccaacgacacctacatgaagttcagctggctgaccgtgcccgagaagtccctggacaaagaacacagatgcatcgtgcggcacgaaaacaacaagaacggcgtggaccaggaaatcatcttcccacccatcaagaccgatgtgattacaatggaccccaaggacaactgctccaaggacgccaacgataccctgctgctccagctgaccaacaccagcgcctactacatgtacttgttgctgctgctgaagtccgtggtgtacttcgccatcatcacatgctgcctgctgatggctatggtcaagcggaaggacagccggggaagggccaagcgatctggatctggagcaacaaacttctcactactcaaacaagcaggtgacgtggaggagaatcccgggcctactagtatggactggatttggcgcatccttttccttgtcggcgctgctaccggcgcgcattccttcgaacaagttcagcttcaacagcctggcgctgagctggtcaaacctggcgcttctgtgaagatgagctgcaaagccagcggctacgccttcagcagctcttggatcaactggatgaagcagaaacccggccagggactcgaatggatcggccaaatctatcccggcgacggcgacaccaactacaacggcaagttcaagggcagagccacactgaccgccgatacctctagcagcacagcctacatgcagctgagcagcctgaccagcgaagatagcgccgtgtacttctgtgcccggtccatcacaacagtcgtgggctgcgctatggactattggggccagggaacaagcgtgaccgtgtctagtacgcgtatccagaaccctgatcctgccgtgtaccagctgcgggatagcaagagcagcgacaagagcgtgtgtctgttcaccgacttcgacagccagaccaacgtgtcccagagcaaggactccgacgtgtacatcaccgataagaccgtgctggacatgcggagcatggacttcaagagcaactccgccgtggcctggtccaacaagtccgatttcgcctgcgccaacgccttcaacaacagcattatccccgaggacacattcttcccaagccccgagagcagcgactccaccgaccacgtgaagcccaaagagacagagaacaccaagcagcccagcaagagctgccacaagcccaaggccatcgtgcacaccgagaaagtgaacatgatgagcctgaccgtgctgggcctgcggatgctgttcgccaaaaccgtggccgtgaacttcctgctgaccgccaagctgttcttcctcctcaccgcc

SEQ ID NO: 34121 - DNA, 2172 bp, synthetic construct
  source 1..2172: mol_type = other DNA
atggccttaccagtgaccgccttgctcctgccgctggccttgctgctccacgccgccaggccggacatccagatgacacagagccctagcagcctgtctgccagcgtgggagacagagtgaccatcacatgcaaggccagcgaccacatcaacaactggctggcctggtatcagcagaagcctggacaggcccctaagctgctgatctacggcgctaccacactggaaacaggcgtgcccagcagattttctggcagcggctctggcaccgactacaccctgacaatatccagcctccagcctgaggacttcgccacctactactgtcagcagagctggaacaccccttggacattcggccagggcaccaagctggaaatcaagagactcgaggacctgaagaacgtgttcccacctgaggtggccgtgttcgagcctagcgaggccgagatcagccacacccagaaagccaccctcgtgtgcctggctaccggcttctaccccgaccatgtggaactgtcttggtgggtcaacggcaaagaggtgcacagcggcgtgtctaccgacccccagccactgaaagaacagcccgccctgaacgacagccggtactgcctgagcagcagactgagagtgtccgccaccttctggcagaacccccggaaccacttcagatgccaggtgcagttctacggcctgagcgagaacgacgagtggacccaggacagagccaagcccgtgacccagatcgtgtctgccgaagcctggggcagagccgatgatgtgattaagatccactggcaggaaaagaagtccaacaccatcctgggcagccaggaaggcaacaccatgaagaccaacgacacctacatgaagttcagctggctgaccgtgcccgagaagtccctggacaaagaacacagatgcatcgtgcggcacgaaaacaacaagaacggcgtggaccaggaaatcatcttcccacccatcaagaccgatgtgattacaatggaccccaaggacaactgctccaaggacgccaacgataccctgctgctccagctgaccaacaccagcgcctactacatgtacttgttgctgctgctgaagtccgtggtgtacttcgccatcatcacatgctgcctgctgcggagaaccgccttctgctgcaacggcgagaagtctagggccaagcgatctggatctggagcaacaaacttctcactactcaaacaagcaggtgacgtggaggagaatcccgggcctactagtatggactggatttggcgcatccttttccttgtcggcgctgctaccggcgcgcattccttcgaacaagttcagcttcaacagcctggcgctgagctggtcaaacctggcgcttctgtgaagatgagctgcaaagccagcggctacgccttcagcagctcttggatcaactggatgaagcagaaacccggccagggactcgaatggatcggccaaatctatcccggcgacggcgacaccaactacaacggcaagttcaagggcagagccacactgaccgccgatacctctagcagcacagcctacatgcagctgagcagcctgaccagcgaagatagcgccgtgtacttctgtgcccggtccatcacaacagtcgtgggctgcgctatggactattggggccagggaacaagcgtgaccgtgtctagtacgcgtatccagaaccctgatcctgccgtgtaccagctgcgggatagcaagagcagcgacaagagcgtgtgtctgttcaccgacttcgacagccagaccaacgtgtcccagagcaaggactccgacgtgtacatcaccgataagaccgtgctggacatgcggagcatggacttcaagagcaactccgccgtggcctggtccaacaagtccgatttcgcctgcgccaacgccttcaacaacagcattatccccgaggacacattcttcccaagccccgagagcagcgactccaccgaccacgtgaagcccaaagagacagagaacaccaagcagcccagcaagagctgccacaagcccaaggccatcgtgcacaccgagaaagtgaacatgatgagcctgaccgtgctgggcctgcggatgctgttcgccaaaaccgtggccgtgaacttcctgctgaccgccaagctgttcttcctc

SEQ ID NO: 34122 - DNA, 2604 bp, synthetic construct
  source 1..2604: mol_type = other DNA
atggccttaccagtgaccgccttgctcctgccgctggccttgctgctccacgccgccaggccgctcgaggaggacctgaagaacgtgttcccacctgaggtggccgtgttcgagcctagcgaggccgagatcagccacacccagaaagccaccctcgtgtgcctggctaccggcttctaccccgaccatgtggaactgtcttggtgggtcaacggcaaagaggtgcacagcggcgtgtgtaccgacccccagccactgaaagaacagcccgccctgaacgacagccggtactgcctgagcagcagactgagagtgtccgccaccttctggcagaacccccggaaccacttcagatgccaggtgcagttctacggcctgagcgagaacgacgagtggacccaggacagagccaagcccgtgacccagatcgtgtctgccgaagcctggggcagagccgattgcggctttaccagcgagagctaccagcagggcgtgctgagcgccaccaacctgagcgtgatcggcttcagaatcctgctgctgaaagtggccggctttaacctgctgatgaccctgcggctgtggtccagcagggccaagcgatctggatctggagcaacaaacttctcactactcaaacaagcaggtgacgtggaggagaatcccgggcctactagcatggccttaccagtgaccgccttgctcctgccgctggccttgctgctccacgccgccaggccggacatccagatgacacagagccctagcagcctgtctgccagcgtgggagacagagtgaccatcacatgcaaggccagcgaccacatcaacaactggctggcctggtatcagcagaagcctggacaggcccctaagctgctgatctacggcgctaccacactggaaacaggcgtgcccagcagattttctggcagcggctctggcaccgactacaccctgacaatatccagcctccagcctgaggacttcgccacctactactgtcagcagagctggaacaccccttggacattcggccagggcaccaagctggaaatcaagagaggcggaggcggaagtggaggcggaggatctggcggcggaggctctcaagttcagcttcaacagcctggcgctgagctggtcaaacctggcgcttctgtgaagatgagctgcaaagccagcggctacgccttcagcagctcttggatcaactggatgaagcagaaacccggccagggactcgaatggatcggccaaatctatcccggcgacggcgacaccaactacaacggcaagttcaagggcagagccacactgaccgccgatacctctagcagcacagcctacatgcagctgagcagcctgaccagcgaagatagcgccgtgtacttctgtgcccggtccatcacaacagtcgtgggctgcgctatggactattggggccagggaacaagcgtgaccgtgtctagtacgcgtatccagaaccctgatcctgccgtgtaccagctgcgggatagcaagagcagcgacaagagcgtgtgtctgttcaccgacttcgacagccagaccaacgtgtcccagagcaaggactccgacgtgtacatcaccgataagtgcgtgctggacatgcggagcatggacttcaagagcaactccgccgtggcctggtccaacaagtccgatttcgcctgcgccaacgccttcaacaacagcattatccccgaggacacattcttcccaagccccgagagcagctgcgacgtgaagctggtggaaaagagcttcgagacagacaccaacctgaacttccagatcctgtacgaggtgatcggcttcagaatcctgctgctgaaagtggccggctttaacctgctgatgaccctgcggctgtggtccagccgcgccaagagaagcggatctggcgtgaagcagaccctgaatttcgacctgctgaagctggctggcgacgtggaatccaacccaggcccttctagaggccatatgaccgagtacaagcccacggtgcgcctcgccacccgcgacgacgtccccagggccgtacgcaccctcgccgccgcgttcgccgactaccccgccacgcgccacaccgtcgatccggaccgccacatcgagcgggtcaccgagctgcaagaactcttcctcacgcgcgtcgggctcgacatcggcaaggtgtgggtcgcggacgacggcgccgcggtggcggtctggaccacgccggagagcgtcgaagcgggggcggtgttcgccgagatcggcccgcgcatggccgagttgagcggttcccggctggccgcgcagcaacagatggaaggcctcctggcgccgcaccggcccaaggagcccgcgtggttcctggccaccgtcggcgtctcgcccgaccaccagggcaagggtctgggcagcgccgtcgtgctccccggagtggaggcggccgagcgcgccggggtgcccgccttcctggagacctccgcgccccgcaacctccccttctacgagcggctcggcttcaccgtcaccgccgacgtcgaggtgcccgaaggaccgcgcacctggtgcatgacccgcaagcccggtgcctga

SEQ ID NO: 34123 - DNA, 2604 bp, synthetic construct
  source 1..2604: mol_type = other DNA
atggccttaccagtgaccgccttgctcctgccgctggccttgctgctccacgccgccaggccgctcgagatccagaaccctgatcctgccgtgtaccagctgcgggatagcaagagcagcgacaagagcgtgtgtctgttcaccgacttcgacagccagaccaacgtgtcccagagcaaggactccgacgtgtacatcaccgataagtgcgtgctggacatgcggagcatggacttcaagagcaactccgccgtggcctggtccaacaagtccgatttcgcctgcgccaacgccttcaacaacagcattatccccgaggacacattcttcccaagccccgagagcagctgcgacgtgaagctggtggaaaagagcttcgagacagacaccaacctgaacttccagatcctgtacgaggtgatcggcttcagaatcctgctgctgaaagtggccggctttaacctgctgatgaccctgcggctgtggtccagcagggccaagcgatctggatctggagcaacaaacttctcactactcaaacaagcaggtgacgtggaggagaatcccgggcctactagcatggccttaccagtgaccgccttgctcctgccgctggccttgctgctccacgccgccaggccggacatccagatgacacagagccctagcagcctgtctgccagcgtgggagacagagtgaccatcacatgcaaggccagcgaccacatcaacaactggctggcctggtatcagcagaagcctggacaggcccctaagctgctgatctacggcgctaccacactggaaacaggcgtgcccagcagattttctggcagcggctctggcaccgactacaccctgacaatatccagcctccagcctgaggacttcgccacctactactgtcagcagagctggaacaccccttggacattcggccagggcaccaagctggaaatcaagagaggcggaggcggaagtggaggcggaggatctggcggcggaggctctcaagttcagcttcaacagcctggcgctgagctggtcaaacctggcgcttctgtgaagatgagctgcaaagccagcggctacgccttcagcagctcttggatcaactggatgaagcagaaacccggccagggactcgaatggatcggccaaatctatcccggcgacggcgacaccaactacaacggcaagttcaagggcagagccacactgaccgccgatacctctagcagcacagcctacatgcagctgagcagcctgaccagcgaagatagcgccgtgtacttctgtgcccggtccatcacaacagtcgtgggctgcgctatggactattggggccagggaacaagcgtgaccgtgtctagtacgcgtgaggacctgaagaacgtgttcccacctgaggtggccgtgttcgagcctagcgaggccgagatcagccacacccagaaagccaccctcgtgtgcctggctaccggcttctaccccgaccatgtggaactgtcttggtgggtcaacggcaaagaggtgcacagcggcgtgtgtaccgacccccagccactgaaagaacagcccgccctgaacgacagccggtactgcctgagcagcagactgagagtgtccgccaccttctggcagaacccccggaaccacttcagatgccaggtgcagttctacggcctgagcgagaacgacgagtggacccaggacagagccaagcccgtgacccagatcgtgtctgccgaagcctggggcagagccgattgcggctttaccagcgagagctaccagcagggcgtgctgagcgccaccaacctgagcgtgatcggcttcagaatcctgctgctgaaagtggccggctttaacctgctgatgaccctgcggctgtggtccagccgcgccaagagaagcggatctggcgtgaagcagaccctgaatttcgacctgctgaagctggctggcgacgtggaatccaacccaggcccttctagaggccatatgaccgagtacaagcccacggtgcgcctcgccacccgcgacgacgtccccagggccgtacgcaccctcgccgccgcgttcgccgactaccccgccacgcgccacaccgtcgatccggaccgccacatcgagcgggtcaccgagctgcaagaactcttcctcacgcgcgtcgggctcgacatcggcaaggtgtgggtcgcggacgacggcgccgcggtggcggtctggaccacgccggagagcgtcgaagcgggggcggtgttcgccgagatcggcccgcgcatggccgagttgagcggttcccggctggccgcgcagcaacagatggaaggcctcctggcgccgcaccggcccaaggagcccgcgtggttcctggccaccgtcggcgtctcgcccgaccaccagggcaagggtctgggcagcgccgtcgtgctccccggagtggaggcggccgagcgcgccggggtgcccgccttcctggagacctccgcgccccgcaacctccccttctacgagcggctcggcttcaccgtcaccgccgacgtcgaggtgcccgaaggaccgcgcacctggtgcatgacccgcaagcccggtgcctga

SEQ ID NO: 34124 - DNA, 2604 bp, synthetic construct; identical to SEQ ID NO: 34122
  source 1..2604: mol_type = other DNA

SEQ ID NO: 34125 - DNA, 2928 bp, synthetic construct
  source 1..2928: mol_type = other DNA
atggccttaccagtgaccgccttgctcctgccgctggccttgctgctccacgccgccaggccgctcgaggaggacctgaagaacgtgttcccacctgaggtggccgtgttcgagcctagcgaggccgagatcagccacacccagaaagccaccctcgtgtgcctggctaccggcttctaccccgaccatgtggaactgtcttggtgggtcaacggcaaagaggtgcacagcggcgtgtctaccgacccccagccactgaaagaacagcccgccctgaacgacagccggtactgcctgagcagcagactgagagtgtccgccaccttctggcagaacccccggaaccacttcagatgccaggtgcagttctacggcctgagcgagaacgacgagtggacccaggacagagccaagcccgtgacccagatcgtgtctgccgaagcctggggcagagccgatgatgtgattaagatccactggcaggaaaagaagtccaacaccatcctgggcagccaggaaggcaacaccatgaagaccaacgacacctacatgaagttcagctggctgaccgtgcccgagaagtccctggacaaagaacacagatgcatcgtgcggcacgaaaacaacaagaacggcgtggaccaggaaatcatcttcccacccatcaagaccgatgtgattacaatggaccccaaggacaactgctccaaggacgccaacgataccctgctgctccagctgaccaacaccagcgcctactacatgtacttgttgctgctgctgaagtccgtggtgtacttcgccatcatcacatgctgcctgctgatggctatggtcaagcggaaggacagccggggaagggccaagcgatctggatctggagcaacaaacttctcactactcaaacaagcaggtgacgtggaggagaatcccgggcctactagcatggccttaccagtgaccgccttgctcctgccgctggccttgctgctccacgccgccaggccggacatccagatgacacagagccctagcagcctgtctgccagcgtgggagacagagtgaccatcacatgcaaggccagcgaccacatcaacaactggctggcctggtatcagcagaagcctggacaggcccctaagctgctgatctacggcgctaccacactggaaacaggcgtgcccagcagattttctggcagcggctctggcaccgactacaccctgacaatatccagcctccagcctgaggacttcgccacctactactgtcagcagagctggaacaccccttggacattcggccagggcaccaagctggaaatcaagagaggcggaggcggaagtggaggcggaggatctggcggcggaggctctcaagttcagcttcaacagcctggcgctgagctggtcaaacctggcgcttctgtgaagatgagctgcaaagccagcggctacgccttcagcagctcttggatcaactggatgaagcagaaacccggccagggactcgaatggatcggccaaatctatcccggcgacggcgacaccaactacaacggcaagttcaagggcagagccacactgaccgccgatacctctagcagcacagcctacatgcagctgagcagcctgaccagcgaagatagcgccgtgtacttctgtgcccggtccatcacaacagtcgtgggctgcgctatggactattggggccagggaacaagcgtgaccgtgtctagtacgcgtatccagaaccctgatcctgccgtgtaccagctgcgggatagcaagagcagcgacaagagcgtgtgtctgttcaccgacttcgacagccagaccaacgtgtcccagagcaaggactccgacgtgtacatcaccgataagaccgtgctggacatgcggagcatggacttcaagagcaactccgccgtggcctggtccaacaagtccgatttcgcctgcgccaacgccttcaacaacagcattatccccgaggacacattcttcccaagccccgagagcagcgactccaccgaccacgtgaagcccaaagagacagagaacaccaagcagcccagcaagagctgccacaagcccaaggccatcgtgcacaccgagaaagtgaacatgatgagcctgaccgtgctgggcctgcggatgctgttcgccaaaaccgtggccgtgaacttcctgctgaccgccaagctgttcttcctcctcaccgcccgcgccaagagaagcggatctggcgtgaagcagaccctgaatttcgacctgctgaagctggctggcgacgtggaatccaacccaggcccttctagaggccatatgaccgagtacaagcccacggtgcgcctcgccacccgcgacgacgtccccagggccgtacgcaccctcgccgccgcgttcgccgactaccccgccacgcgccacaccgtcgatccggaccgccacatcgagcgggtcaccgagctgcaagaactcttcctcacgcgcgtcgggctcgacatcggcaaggtgtgggtcgcggacgacggcgccgcggtggcggtctggaccacgccggagagcgtcgaagcgggggcggtgttcgccgagatcggcccgcgcatggccgagttgagcggttcccggctggccgcgcagcaacagatggaaggcctcctggcgccgcaccggcccaaggagcccgcgtggttcctggccaccgtcggcgtctcgcccgaccaccagggcaagggtctgggcagcgccgtcgtgctccccggagtggaggcggccgagcgcgccggggtgcccgccttcctggagacctccgcgccccgcaacctccccttctacgagcggctcggcttcaccgtcaccgccgacgtcgaggtgcccgaaggaccgcgcacctggtgcatgacccgcaagcccggtgcctga

SEQ ID NO: 34126 - DNA, 2928 bp, synthetic construct
  source 1..2928: mol_type = other DNA
atggccttaccagtgaccgccttgctcctgccgctggccttgctgctccacgccgccaggccgctcgagatccagaaccctgatcctgccgtgtaccagctgcgggatagcaagagcagcgacaagagcgtgtgtctgttcaccgacttcgacagccagaccaacgtgtcccagagcaaggactccgacgtgtacatcaccgataagaccgtgctggacatgcggagcatggacttcaagagcaactccgccgtggcctggtccaacaagtccgatttcgcctgcgccaacgccttcaacaacagcattatccccgaggacacattcttcccaagccccgagagcagcgactccaccgaccacgtgaagcccaaagagacagagaacaccaagcagcccagcaagagctgccacaagcccaaggccatcgtgcacaccgagaaagtgaacatgatgagcctgaccgtgctgggcctgcggatgctgttcgccaaaaccgtggccgtgaacttcctgctgaccgccaagctgttcttcctcctcaccgccagggccaagcgatctggatctggagcaacaaacttctcactactcaaacaagcaggtgacgtggaggagaatcccgggcctactagcatggccttaccagtgaccgccttgctcctgccgctggccttgctgctccacgccgccaggccggacatccagatgacacagagccctagcagcctgtctgccagcgtgggagacagagtgaccatcacatgcaaggccagcgaccacatcaacaactggctggcctggtatcagcagaagcctggacaggcccctaagctgctgatctacggcgctaccacactggaaacaggcgtgcccagcagattttctggcagcggctctggcaccgactacaccctgacaatatccagcctccagcctgaggacttcgccacctactactgtcagcagagctggaacaccccttggacattcggccagggcaccaagctggaaatcaagagaggcggaggcggaagtggaggcggaggatctggcggcggaggctctcaagttcagcttcaacagcctggcgctgagctggtcaaacctggcgcttctgtgaagatgagctgcaaagccagcggctacgccttcagcagctcttggatcaactggatgaagcagaaacccggccagggactcgaatggatcggccaaatctatcccggcgacggcgacaccaactacaacggcaagttcaagggcagagccacactgaccgccgatacctctagcagcacagcctacatgcagctgagcagcctgaccagcgaagatagcgccgtgtacttctgtgcccggtccatcacaacagtcgtgggctgcgctatggactattggggccagggaacaagcgtgaccgtgtctagtacgcgtgaggacctgaagaacgtgttcccacctgaggtggccgtgttcgagcctagcgaggccgagatcagccacacccagaaagccaccctcgtgtgcctggctaccggcttctaccccgaccatgtggaactgtcttggtgggtcaacggcaaagaggtgcacagcggcgtgtctaccgacccccagccactgaaagaacagcccgccctgaacgacagccggtactgcctgagcagcagactgagagtgtccgccaccttctggcagaacccccggaaccacttcagatgccaggtgcagttctacggcctgagcgagaacgacgagtggacccaggacagagccaagcccgtgacccagatcgtgtctgccgaagcctggggcagagccgatgatgtgattaagatccactggcaggaaaagaagtccaacaccatcctgggcagccaggaaggcaacaccatgaagaccaacgacacctacatgaagttcagctggctgaccgtgcccgagaagtccctggacaaagaacacagatgcatcgtgcggcacgaaaacaacaagaacggcgtggaccaggaaatcatcttcccacccatcaagaccgatgtgattacaatggaccccaaggacaactgctccaaggacgccaacgataccctgctgctccagctgaccaacaccagcgcctactacatgtacttgttgctgctgctgaagtccgtggtgtacttcgccatcatcacatgctgcctgctgatggctatggtcaagcggaaggacagccggggacgcgccaagagaagcggatctggcgtgaagcagaccctgaatttcgacctgctgaagctggctggcgacgtggaatccaacccaggcccttctagaggccatatgaccgagtacaagcccacggtgcgcctcgccacccgcgacgacgtccccagggccgtacgcaccctcgccgccgcgttcgccgactaccccgccacgcgccacaccgtcgatccggaccgccacatcgagcgggtcaccgagctgcaagaactcttcctcacgcgcgtcgggctcgacatcggcaaggtgtgggtcgcggacgacggcgccgcggtggcggtctggaccacgccggagagcgtcgaagcgggggcggtgttcgccgagatcggcccgcgcatggccgagttgagcggttcccggctggccgcgcagcaacagatggaaggcctcctggcgccgcaccggcccaaggagcccgcgtggttcctggccaccgtcggcgtctcgcccgaccaccagggcaagggtctgggcagcgccgtcgtgctccccggagtggaggcggccgagcgcgccggggtgcccgccttcctggagacctccgcgccccgcaacctccccttctacgagcggctcggcttcaccgtcaccgccgacgtcgaggtgcccgaaggaccgcgcacctggtgcatgacccgcaagcccggtgcctga

SEQ ID NO: 34127 - DNA, 2922 bp, synthetic construct
  source 1..2922: mol_type = other DNA
atggccttaccagtgaccgccttgctcctgccgctggccttgctgctccacgccgccaggccgctcgaggaggacctgaagaacgtgttcccacctgaggtggccgtgttcgagcctagcgaggccgagatcagccacacccagaaagccaccctcgtgtgcctggctaccggcttctaccccgaccatgtggaactgtcttggtgggtcaacggcaaagaggtgcacagcggcgtgtgtaccgacccccagccactgaaagaacagcccgccctgaacgacagccggtactgcctgagcagcagactgagagtgtccgccaccttctggcagaacccccggaaccacttcagatgccaggtgcagttctacggcctgagcgagaacgacgagtggacccaggacagagccaagcccgtgacccagatcgtgtctgccgaagcctggggcagagccgatgatgtgattaagatccactggcaggaaaagaagtccaacaccatcctgggcagccaggaaggcaacaccatgaagaccaacgacacctacatgaagttcagctggctgaccgtgcccgagaagtccctggacaaagaacacagatgcatcgtgcggcacgaaaacaacaagaacggcgtggaccaggaaatcatcttcccacccatcaagaccgatgtgattacaatggaccccaaggacaactgctccaaggacgccaacgataccctgctgctccagctgaccaacaccagcgcctactacatgtacttgttgctgctgctgaagtccgtggtgtacttcgccatcatcacatgctgcctgctgcggagaaccgccttctgctgcaacggcgagaagtctagggccaagcgatctggatctggagcaacaaacttctcactactcaaacaagcaggtgacgtggaggagaatcccgggcctactagcatggccttaccagtgaccgccttgctcctgccgctggccttgctgctccacgccgccaggccggacatccagatgacacagagccctagcagcctgtctgccagcgtgggagacagagtgaccatcacatgcaaggccagcgaccacatcaacaactggctggcctggtatcagcagaagcctggacaggcccctaagctgctgatctacggcgctaccacactggaaacaggcgtgcccagcagattttctggcagcggctctggcaccgactacaccctgacaatatccagcctccagcctgaggacttcgccacctactactgtcagcagagctggaacaccccttggacattcggccagggcaccaagctggaaatcaagagaggcggaggcggaagtggaggcggaggatctggcggcggaggctctcaagttcagcttcaacagcctggcgctgagctggtcaaacctggcgcttctgtgaagatgagctgcaaagccagcggctacgccttcagcagctcttggatcaactggatgaagcagaaacccggccagggactcgaatggatcggccaaatctatcccggcgacggcgacaccaactacaacggcaagttcaagggcagagccacactgaccgccgatacctctagcagcacagcctacatgcagctgagcagcctgaccagcgaagatagcgccgtgtacttctgtgcccggtccatcacaacagtcgtgggctgcgctatggactattggggccagggaacaagcgtgaccgtgtctagtacgcgtatccagaaccctgatcctgccgtgtaccagctgcgggatagcaagagcagcgacaagagcgtgtgtctgttcaccgacttcgacagccagaccaacgtgtcccagagcaaggactccgacgtgtacatcaccgataagtgcgtgctggacatgcggagcatggacttcaagagcaactccgccgtggcctggtccaacaagtccgatttcgcctgcgccaacgccttcaacaacagcattatccccgaggacacattcttcccaagccccgagagcagcgactccaccgaccacgtgaagcccaaagagacagagaacaccaagcagcccagcaagagctgccacaagcccaaggccatcgtgcacaccgagaaagtgaacatgatgagcctgaccgtgctgggcctgcggatgctgttcgccaaaaccgtggccgtgaacttcctgctgaccgccaagctgttcttcctccgcgccaagagaagcggatctggcgtgaagcagaccctgaatttcgacctgctgaagctggctggcgacgtggaatccaacccaggcccttctagaggccatatgaccgagtacaagcccacggtgcgcctcgccacccgcgacgacgtccccagggccgtacgcaccctcgccgccgcgttcgccgactaccccgccacgcgccacaccgtcgatccggaccgccacatcgagcgggtcaccgagctgcaagaactcttcctcacgcgcgtcgggctcgacatcggcaaggtgtgggtcgcggacgacggcgccgcggtggcggtctggaccacgccggagagcgtcgaagcgggggcggtgttcgccgagatcggcccgcgcatggccgagttgagcggttcccggctggccgcgcagcaacagatggaaggcctcctggcgccgcaccggcccaaggagcccgcgtggttcctggccaccgtcggcgtctcgcccgaccaccagggcaagggtctgggcagcgccgtcgtgctccccggagtggaggcggccgagcgcgccggggtgcccgccttcctggagacctccgcgccccgcaacctccccttctacgagcggctcggcttcaccgtcaccgccgacgtcgaggtgcccgaaggaccgcgcacctggtgcatgacccgcaagcccggtgcctga

SEQ ID NO: 34128 - DNA, 2922 bp, synthetic construct
  source 1..2922: mol_type = other DNA
atggccttaccagtgaccgccttgctcctgccgctggccttgctgctccacgccgccaggccgctcgagatccagaaccctgatcctgccgtgtaccagctgcgggatagcaagagcagcgacaagagcgtgtgtctgttcaccgacttcgacagccagaccaacgtgtcccagagcaaggactccgacgtgtacatcaccgataagtgcgtgctggacatgcggagcatggacttcaagagcaactccgccgtggcctggtccaacaagtccgatttcgcctgcgccaacgccttcaacaacagcattatccccgaggacacattcttcccaagccccgagagcagcgactccaccgaccacgtgaagcccaaagagacagagaacaccaagcagcccagcaagagctgccacaagcccaaggccatcgtgcacaccgagaaagtgaacatgatgagcctgaccgtgctgggcctgcggatgctgttcgccaaaaccgtggccgtgaacttcctgctgaccgccaagctgttcttcctcagggccaagcgatctggatctggagcaacaaacttctcactactcaaacaagcaggtgacgtggaggagaatcccgggcctactagcatggccttaccagtgaccgccttgctcctgccgctggccttgctgctccacgccgccaggccggacatccagatgacacagagccctagcagcctgtctgccagcgtgggagacagagtgaccatcacatgcaaggccagcgaccacatcaacaactggctggcctggtatcagcagaagcctggacaggcccctaagctgctgatctacggcgctaccacactggaaacaggcgtgcccagcagattttctggcagcggctctggcaccgactacaccctgacaatatccagcctccagcctgaggacttcgccacctactactgtcagcagagctggaacaccccttggacattcggccagggcaccaagctggaaatcaagagaggcggaggcggaagtggaggcggaggatctggcggcggaggctctcaagttcagcttcaacagcctggcgctgagctggtcaaacctggcgcttctgtgaagatgagctgcaaagccagcggctacgccttcagcagctcttggatcaactggatgaagcagaaacccggccagggactcgaatggatcggccaaatctatcccggcgacggcgacaccaactacaacggcaagttcaagggcagagccacactgaccgccgatacctctagcagcacagcctacatgcagctgagcagcctgaccagcgaagatagcgccgtgtacttctgtgcccggtccatcacaacagtcgtgggctgcgctatggactattggggccagggaacaagcgtgaccgtgtctagtacgcgtgaggacctgaagaacgtgttcccacctgaggtggccgtgttcgagcctagcgaggccgagatcagccacacccagaaagccaccctcgtgtgcctggctaccggcttctaccccgaccatgtggaactgtcttggtgggtcaacggcaaagaggtgcacagcggcgtgtgtaccgacccccagccactgaaagaacagcccgccctgaacgacagccggtactgcctgagcagcagactgagagtgtccgccaccttctggcagaacccccggaaccacttcagatgccaggtgcagttctacggcctgagcgagaacgacgagtggacccaggacagagccaagcccgtgacccagatcgtgtctgccgaagcctggggcagagccgatgatgtgattaagatccactggcaggaaaagaagtccaacaccatcctgggcagccaggaaggcaacaccatgaagaccaacgacacctacatgaagttcagctggctgaccgtgcccgagaagtccctggacaaagaacacagatgcatcgtgcggcacgaaaacaacaagaacggcgtggaccaggaaatcatcttcccacccatcaagaccgatgtgattacaatggaccccaaggacaactgctccaaggacgccaacgataccctgctgctccagctgaccaacaccagcgcctactacatgtacttgttgctgctgctgaagtccgtggtgtacttcgccatcatcacatgctgcctgctgcggagaaccgccttctgctgcaacggcgagaagtctcgcgccaagagaagcggatctggcgtgaagcagaccctgaatttcgacctgctgaagctggctggcgacgtggaatccaacccaggcccttctagaggccatatgaccgagtacaagcccacggtgcgcctcgccacccgcgacgacgtccccagggccgtacgcaccctcgccgccgcgttcgccgactaccccgccacgcgccacaccgtcgatccggaccgccacatcgagcgggtcaccgagctgcaagaactcttcctcacgcgcgtcgggctcgacatcggcaaggtgtgggtcgcggacgacggcgccgcggtggcggtctggaccacgccggagagcgtcgaagcgggggcggtgttcgccgagatcggcccgcgcatggccgagttgagcggttcccggctggccgcgcagcaacagatggaaggcctcctggcgccgcaccggcccaaggagcccgcgtggttcctggccaccgtcggcgtctcgcccgaccaccagggcaagggtctgggcagcgccgtcgtgctccccggagtggaggcggccgagcgcgccggggtgcccgccttcctggagacctccgcgccccgcaacctccccttctacgagcggctcggcttcaccgtcaccgccgacgtcgaggtgcccgaaggaccgcgcacctggtgcatgacccgcaagcccggtgcctga

SEQ ID NO: 34129 - DNA, 2922 bp, synthetic construct
  source 1..2922: mol_type = other DNA
atggccttaccagtgaccgccttgctcctgccgctggccttgctgctccacgccgccaggccgctcgaggaggacctgaagaacgtgttcccacctgaggtggccgtgttcgagcctagcgaggccgagatcagccacacccagaaagccaccctcgtgtgcctggctaccggcttctaccccgaccatgtggaactgtcttggtgggtcaacggcaaagaggtgcacagcggcgtgtctaccgacccccagccactgaaagaacagcccgccctgaacgacagccggtactgcctgagcagcagactgagagtgtccgccaccttctggcagaacccccggaaccacttcagatgccaggtgcagttctacggcctgagcgagaacgacgagtggacccaggacagagccaagcccgtgacccagatcgtgtctgccgaagcctggggcagagccgatgatgtgattaagatccactggcaggaaaagaagtccaacaccatcctgggcagccaggaaggcaacaccatgaagaccaacgacacctacatgaagttcagctggctgaccgtgcccgagaagtccctggacaaagaacacagatgcatcgtgcggcacgaaaacaacaagaacggcgtggaccaggaaatcatcttcccacccatcaagaccgatgtgattacaatggaccccaaggacaactgctccaaggacgccaacgataccctgctgctccagctgaccaacaccagcgcctactacatgtacttgttgctgctgctgaagtccgtggtgtacttcgccatcatcacatgctgcctgctgcggagaaccgccttctgctgcaacggcgagaagtctagggccaagcgatctggatctggagcaacaaacttctcactactcaaacaagcaggtgacgtggaggagaatcccgggcctactagcatggccttaccagtgaccgccttgctcctgccgctggccttgctgctccacgccgccaggccggacatccagatgacacagagccctagcagcctgtctgccagcgtgggagacagagtgaccatcacatgcaaggccagcgaccacatcaacaactggctggcctggtatcagcagaagcctggacaggcccctaagctgctgatctacggcgctaccacactggaaacaggcgtgcccagcagattttctggcagcggctctggcaccgactacaccctgacaatatccagcctccagcctgaggacttcgccacctactactgtcagcagagctggaacaccccttggacattcggccagggcaccaagctggaaatcaagagaggcggaggcggaagtggaggcggaggatctggcggcggaggctctcaagttcagcttcaacagcctggcgctgagctggtcaaacctggcgcttctgtgaagatgagctgcaaagccagcggctacgccttcagcagctcttggatcaactggatgaagcagaaacccggccagggactcgaatggatcggccaaatctatcccggcgacggcgacaccaactacaacggcaagttcaagggcagagccacactgaccgccgatacctctagcagcacagcctacatgcagctgagcagcctgaccagcgaagatagcgccgtgtacttctgtgcccggtccatcacaacagtcgtgggctgcgctatggactattggggccagggaacaagcgtgaccgtgtctagtacgcgtatccagaaccctgatcctgccgtgtaccagctgcgggatagcaagagcagcgacaagagcgtgtgtctgttcaccgacttcgacagccagaccaacgtgtcccagagcaaggactccgacgtgtacatcaccgataagaccgtgctggacatgcggagcatggacttcaagagcaactccgccgtggcctggtccaacaagtccgatttcgcctgcgccaacgccttcaacaacagcattatccccgaggacacattcttcccaagccccgagagcagcgactccaccgaccacgtgaagcccaaagagacagagaacaccaagcagcccagcaagagctgccacaagcccaaggccatcgtgcacaccgagaaagtgaacatgatgagcctgaccgtgctgggcctgcggatgctgttcgccaaaaccgtggccgtgaacttcctgctgaccgccaagctgttcttcctccgcgccaagagaagcggatctggcgtgaagcagaccctgaatttcgacctgctgaagctggctggcgacgtggaatccaacccaggcccttctagaggccatatgaccgagtacaagcccacggtgcgcctcgccacccgcgacgacgtccccagggccgtacgcaccctcgccgccgcgttcgccgactaccccgccacgcgccacaccgtcgatccggaccgccacatcgagcgggtcaccgagctgcaagaactcttcctcacgcgcgtcgggctcgacatcggcaaggtgtgggtcgcggacgacggcgccgcggtggcggtctggaccacgccggagagcgtcgaagcgggggcggtgttcgccgagatcggcccgcgcatggccgagttgagcggttcccggctggccgcgcagcaacagatggaaggcctcctggcgccgcaccggcccaaggagcccgcgtggttcctggccaccgtcggcgtctcgcccgaccaccagggcaagggtctgggcagcgccgtcgtgctccccggagtggaggcggccgagcgcgccggggtgcccgccttcctggagacctccgcgccccgcaacctccccttctacgagcggctcggcttcaccgtcaccgccgacgtcgaggtgcccgaaggaccgcgcacctggtgcatgacccgcaagcccggtgcctga

SEQ ID NO: 34130 - DNA, 2922 bp, synthetic construct
  source 1..2922: mol_type = other DNA
atggccttaccagtgaccgccttgctcctgccgctggccttgctgctccacgccgccaggccgctcgagatccagaaccctgatcctgccgtgtaccagctgcgggatagcaagagcagcgacaagagcgtgtgtctgttcaccgacttcgacagccagaccaacgtgtcccagagcaaggactccgacgtgtacatcaccgataagaccgtgctggacatgcggagcatggacttcaagagcaactccgccgtggcctggtccaacaagtccgatttcgcctgcgccaacgccttcaacaacagcattatccccgaggacacattcttcccaagccccgagagcagcgactccaccgaccacgtgaagcccaaagagacagagaacaccaagcagcccagcaagagctgccacaagcccaaggccatcgtgcacaccgagaaagtgaacatgatgagcctgaccgtgctgggcctgcggatgctgttcgccaaaaccgtggccgtgaacttcctgctgaccgccaagctgttcttcctcagggccaagcgatctggatctggagcaacaaacttctcactactcaaacaagcaggtgacgtggaggagaatcccgggcctactagcatggccttaccagtgaccgccttgctcctgccgctggccttgctgctccacgccgccaggccggacatccagatgacacagagccctagcagcctgtctgccagcgtgggagacagagtgaccatcacatgcaaggccagcgaccacatcaacaactggctggcctggtatcagcagaagcctggacaggcccctaagctgctgatctacggcgctaccacactggaaacaggcgtgcccagcagattttctggcagcggctctggcaccgactacaccctgacaatatccagcctccagcctgaggacttcgccacctactactgtcagcagagctggaacaccccttggacattcggccagggcaccaagctggaaatcaagagaggcggaggcggaagtggaggcggaggatctggcggcggaggctctcaagttcagcttcaacagcctggcgctgagctggtcaaacctggcgcttctgtgaagatgagctgcaaagccagcggctacgccttcagcagctcttggatcaactggatgaagcagaaacccggccagggactcgaatggatcggccaaatctatcccggcgacggcgacaccaactacaacggcaagttcaagggcagagccacactgaccgccgatacctctagcagcacagcctacatgcagctgagcagcctgaccagcgaagatagcgccgtgtacttctgtgcccggtccatcacaacagtcgtgggctgcgctatggactattggggccagggaacaagcgtgaccgtgtctagtacgcgtgaggacctgaagaacgtgttcccacctgaggtggccgtgttcgagcctagcgaggccgagatcagccacacccagaaagccaccctcgtgtgcctggctaccggcttctaccccgaccatgtggaactgtcttggtgggtcaacggcaaagaggtgcacagcggcgtgtctaccgacccccagccactgaaagaacagcccgccctgaacgacagccggtactgcctgagcagcagactgagagtgtccgccaccttctggcagaacccccggaaccacttcagatgccaggtgcagttctacggcctgagcgagaacgacgagtggacccaggacagagccaagcccgtgacccagatcgtgtctgccgaagcctggggcagagccgatgatgtgattaagatccactggcaggaaaagaagtccaacaccatcctgggcagccaggaaggcaacaccatgaagaccaacgacacctacatgaagttcagctggctgaccgtgcccgagaagtccctggacaaagaacacagatgcatcgtgcggcacgaaaacaacaagaacggcgtggaccaggaaatcatcttcccacccatcaagaccgatgtgattacaatggaccccaaggacaactgctccaaggacgccaacgataccctgctgctccagctgaccaacaccagcgcctactacatgtacttgttgctgctgctgaagtccgtggtgtacttcgccatcatcacatgctgcctgctgcggagaaccgccttctgctgcaacggcgagaagtctcgcgccaagagaagcggatctggcgtgaagcagaccctgaatttcgacctgctgaagctggctggcgacgtggaatccaacccaggcccttctagaggccatatgaccgagtacaagcccacggtgcgcctcgccacccgcgacgacgtccccagggccgtacgcaccctcgccgccgcgttcgccgactaccccgccacgcgccacaccgtcgatccggaccgccacatcgagcgggtcaccgagctgcaagaactcttcctcacgcgcgtcgggctcgacatcggcaaggtgtgggtcgcggacgacggcgccgcggtggcggtctggaccacgccggagagcgtcgaagcgggggcggtgttcgccgagatcggcccgcgcatggccgagttgagcggttcccggctggccgcgcagcaacagatggaaggcctcctggcgccgcaccggcccaaggagcccgcgtggttcctggccaccgtcggcgtctcgcccgaccaccagggcaagggtctgggcagcgccgtcgtgctccccggagtggaggcggccgagcgcgccggggtgcccgccttcctggagacctccgcgccccgcaacctccccttctacgagcggctcggcttcaccgtcaccgccgacgtcgaggtgcccgaaggaccgcgcacctggtgcatgacccgcaagcccggtgcctga

SEQ ID NO: 34131 - DNA, 2616 bp, synthetic construct
  source 1..2616: mol_type = other DNA
atggccttaccagtgaccgccttgctcctgccgctggccttgctgctccacgccgccaggccgctcgaggaggacctgaagaacgtgttcccacctgaggtggccgtgttcgagcctagcaaggccgagatcgcccacacccagaaagccaccctcgtgtgcctggctaccggcttctaccccgaccatgtggaactgtcttggtgggtcaacggcaaagaggtgcacagcggcgtgtgtaccgacccccagccactgaaagaacagcccgccctgaacgacagccggtactgcctgagcagcagactgagagtgtccgccaccttctggcagaacccccggaaccacttcagatgccaggtgcagttctacggcctgagcgagaacgacgagtggacccaggacagagccaagcccgtgacccagatcgtgtctgccgaagcctggggcagagccgattgcggcatcaccagcgccagctaccaccagggcgtgctgagcgccaccatcctgtacgagatcctgctgggcaaggccaccctgtacgccgtgctggtgtctgccctggtgctgatggctatggtcaagcggaaggacagccggggaagggccaagcgatctggatctggagcaacaaacttctcactactcaaacaagcaggtgacgtggaggagaatcccgggcctactagcatggccttaccagtgaccgccttgctcctgccgctggccttgctgctccacgccgccaggccggacatccagatgacacagagccctagcagcctgtctgccagcgtgggagacagagtgaccatcacatgcaaggccagcgaccacatcaacaactggctggcctggtatcagcagaagcctggacaggcccctaagctgctgatctacggcgctaccacactggaaacaggcgtgcccagcagattttctggcagcggctctggcaccgactacaccctgacaatatccagcctccagcctgaggacttcgccacctactactgtcagcagagctggaacaccccttggacattcggccagggcaccaagctggaaatcaagagaggcggaggcggaagtggaggcggaggatctggcggcggaggctctcaagttcagcttcaacagcctggcgctgagctggtcaaacctggcgcttctgtgaagatgagctgcaaagccagcggctacgccttcagcagctcttggatcaactggatgaagcagaaacccggccagggactcgaatggatcggccaaatctatcccggcgacggcgacaccaactacaacggcaagttcaagggcagagccacactgaccgccgatacctctagcagcacagcctacatgcagctgagcagcctgaccagcgaagatagcgccgtgtacttctgtgcccggtccatcacaacagtcgtgggctgcgctatggactattggggccagggaacaagcgtgaccgtgtctagtacgcgtatccagaaccctgatcctgccgtgtaccagctgcgggatagcaagagcagcgacaagagcgtgtgtctgttcaccgacttcgacagccagaccaacgtgtcccagagcaaggactccgacgtgtacatcaccgataagtgcgtgctggacatgcggagcatggacttcaagagcaactccgccgtggcctggtccaacaagtccgatttcgcctgcgccaacgccttcaacaacagcattatccccgaggacacattcttcccaagcagcgacgtgccctgcgacgtgaagctggtggaaaagagcttcgagacagacaccaacctgaacttccagaacctgagcgtgatcggcttcagaatcctgctgctgaaagtggccggctttaacctgctgatgaccctgcggctgtggtccagccgcgccaagagaagcggatctggcgtgaagcagaccctgaatttcgacctgctgaagctggctggcgacgtggaatccaacccaggcccttctagaggccatatgaccgagtacaagcccacggtgcgcctcgccacccgcgacgacgtccccagggccgtacgcaccctcgccgccgcgttcgccgactaccccgccacgcgccacaccgtcgatccggaccgccacatcgagcgggtcaccgagctgcaagaactcttcctcacgcgcgtcgggctcgacatcggcaaggtgtgggtcgcggacgacggcgccgcggtggcggtctggaccacgccggagagcgtcgaagcgggggcggtgttcgccgagatcggcccgcgcatggccgagttgagcggttcccggctggccgcgcagcaacagatggaaggcctcctggcgccgcaccggcccaaggagcccgcgtggttcctggccaccgtcggcgtctcgcccgaccaccagggcaagggtctgggcagcgccgtcgtgctccccggagtggaggcggccgagcgcgccggggtgcccgccttcctggagacctccgcgccccgcaacctccccttctacgagcggctcggcttcaccgtcaccgccgacgtcgaggtgcccgaaggaccgcgcacctggtgcatgacccgcaagcccggtgcctga

SEQ ID NO: 34132 - DNA, 2616 bp, synthetic construct
  source 1..2616: mol_type = other DNA
atggccttaccagtgaccgccttgctcctgccgctggccttgctgctccacgccgccaggccgctcgagatccagaaccctgatcctgccgtgtaccagctgcgggatagcaagagcagcgacaagagcgtgtgtctgttcaccgacttcgacagccagaccaacgtgtcccagagcaaggactccgacgtgtacatcaccgataagtgcgtgctggacatgcggagcatggacttcaagagcaactccgccgtggcctggtccaacaagtccgatttcgcctgcgccaacgccttcaacaacagcattatccccgaggacacattcttcccaagcagcgacgtgccctgcgacgtgaagctggtggaaaagagcttcgagacagacaccaacctgaacttccagaacctgagcgtgatcggcttcagaatcctgctgctgaaagtggccggctttaacctgctgatgaccctgcggctgtggtccagcagggccaagcgatctggatctggagcaacaaacttctcactactcaaacaagcaggtgacgtggaggagaatcccgggcctactagcatggccttaccagtgaccgccttgctcctgccgctggccttgctgctccacgccgccaggccggacatccagatgacacagagccctagcagcctgtctgccagcgtgggagacagagtgaccatcacatgcaaggccagcgaccacatcaacaactggctggcctggtatcagcagaagcctggacaggcccctaagctgctgatctacggcgctaccacactggaaacaggcgtgcccagcagattttctggcagcggctctggcaccgactacaccctgacaatatccagcctccagcctgaggacttcgccacctactactgtcagcagagctggaacaccccttggacattcggccagggcaccaagctggaaatcaagagaggcggaggcggaagtggaggcggaggatctggcggcggaggctctcaagttcagcttcaacagcctggcgctgagctggtcaaacctggcgcttctgtgaagatgagctgcaaagccagcggctacgccttcagcagctcttggatcaactggatgaagcagaaacccggccagggactcgaatggatcggccaaatctatcccggcgacggcgacaccaactacaacggcaagttcaagggcagagccacactgaccgccgatacctctagcagcacagcctacatgcagctgagcagcctgaccagcgaagatagcgccgtgtacttctgtgcccggtccatcacaacagtcgtgggctgcgctatggactattggggccagggaacaagcgtgaccgtgtctagtacgcgtgaggacctgaagaacgtgttcccacctgaggtggccgtgttcgagcctagcaaggccgagatcgcccacacccagaaagccaccctcgtgtgcctggctaccggcttctaccccgaccatgtggaactgtcttggtgggtcaacggcaaagaggtgcacagcggcgtgtgtaccgacccccagccactgaaagaacagcccgccctgaacgacagccggtactgcctgagcagcagactgagagtgtccgccaccttctggcagaacccccggaaccacttcagatgccaggtgcagttctacggcctgagcgagaacgacgagtggacccaggacagagccaagcccgtgacccagatcgtgtctgccgaagcctggggcagagccgattgcggcatcaccagcgccagctaccaccagggcgtgctgagcgccaccatcctgtacgagatcctgctgggcaaggccaccctgtacgccgtgctggtgtctgccctggtgctgatggctatggtcaagcggaaggacagccggggacgcgccaagagaagcggatctggcgtgaagcagaccctgaatttcgacctgctgaagctggctggcgacgtggaatccaacccaggcccttctagaggccatatgaccgagtacaagcccacggtgcgcctcgccacccgcgacgacgtccccagggccgtacgcaccctcgccgccgcgttcgccgactaccccgccacgcgccacaccgtcgatccggaccgccacatcgagcgggtcaccgagctgcaagaactcttcctcacgcgcgtcgggctcgacatcggcaaggtgtgggtcgcggacgacggcgccgcggtggcggtctggaccacgccggagagcgtcgaagcgggggcggtgttcgccgagatcggcccgcgcatggccgagttgagcggttcccggctggccgcgcagcaacagatggaaggcctcctggcgccgcaccggcccaaggagcccgcgtggttcctggccaccgtcggcgtctcgcccgaccaccagggcaagggtctgggcagcgccgtcgtgctccccggagtggaggcggccgagcgcgccggggtgcccgccttcctggagacctccgcgccccgcaacctccccttctacgagcggctcggcttcaccgtcaccgccgacgtcgaggtgcccgaaggaccgcgcacctggtgcatgacccgcaagcccggtgcctga

SEQ ID NO: 34133 - DNA, 2295 bp, synthetic construct
  source 1..2295: mol_type = other DNA
atggccttaccagtgaccgccttgctcctgccgctggccttgctgctccacgccgccaggccgctcgagcagagttttgggttgttggaccctaaattgtgctatctgttggacggaatcctgttcatttacggagtgatcctgaccgcattgttcctgcgggttaagttttccagatccgcagacgcacccgcttaccaacaagggcagaaccaactctacaatgaacttaatttggggcggagggaagagtacgacgttctggacaaaaggaggggacgagatcccgagatgggcggaaagcctcagcgaaggaagaatccgcaagaggggctttataacgaactccagaaagataaaatggcagaagcctatagtgagattgggatgaagggagaaaggaggaggggtaaaggtcacgatgggttgtaccaaggattgagcacagccactaaagatacctatgatgcgctccacatgcaggccctgccgccaagaagggccaagcgatctggatctggagcaacaaacttctcactactcaaacaagcaggtgacgtggaggagaatcccgggcctactagcatggccttaccagtgaccgccttgctcctgccgctggccttgctgctccacgccgccaggccggacatccagatgacacagagccctagcagcctgtctgccagcgtgggagacagagtgaccatcacatgcaaggccagcgaccacatcaacaactggctggcctggtatcagcagaagcctggacaggcccctaagctgctgatctacggcgctaccacactggaaacaggcgtgcccagcagattttctggcagcggctctggcaccgactacaccctgacaatatccagcctccagcctgaggacttcgccacctactactgtcagcagagctggaacaccccttggacattcggccagggcaccaagctggaaatcaagagaggcggaggcggaagtggaggcggaggatctggcggcggaggctctcaagttcagcttcaacagcctggcgctgagctggtcaaacctggcgcttctgtgaagatgagctgcaaagccagcggctacgccttcagcagctcttggatcaactggatgaagcagaaacccggccagggactcgaatggatcggccaaatctatcccggcgacggcgacaccaactacaacggcaagttcaagggcagagccacactgaccgccgatacctctagcagcacagcctacatgcagctgagcagcctgaccagcgaagatagcgccgtgtacttctgtgcccggtccatcacaacagtcgtgggctgcgctatggactattggggccagggaacaagcgtgaccgtgtctagtacgcgtgagctgggagagcctcagctgtgctatatcctggacgccatcctgtttctgtacggcatcgtgctgaccctgctgtactgccggctgaagatccaagtgcggaaggccgccatcaccagctacgagaaatccgacggcgtgtacaccggcctgagcaccagaaatcaagagacatacgagacactgaagcacgaaaagcctccacaacgcgccaagagaagcggatctggcgtgaagcagaccctgaatttcgacctgctgaagctggctggcgacgtggaatccaacccaggcccttctagaggccatatgaccgagtacaagcccacggtgcgcctcgccacccgcgacgacgtccccagggccgtacgcaccctcgccgccgcgttcgccgactaccccgccacgcgccacaccgtcgatccggaccgccacatcgagcgggtcaccgagctgcaagaactcttcctcacgcgcgtcgggctcgacatcggcaaggtgtgggtcgcggacgacggcgccgcggtggcggtctggaccacgccggagagcgtcgaagcgggggcggtgttcgccgagatcggcccgcgcatggccgagttgagcggttcccggctggccgcgcagcaacagatggaaggcctcctggcgccgcaccggcccaaggagcccgcgtggttcctggccaccgtcggcgtctcgcccgaccaccagggcaagggtctgggcagcgccgtcgtgctccccggagtggaggcggccgagcgcgccggggtgcccgccttcctggagacctccgcgccccgcaacctccccttctacgagcggctcggcttcaccgtcaccgccgacgtcgaggtgcccgaaggaccgcgcacctggtgcatgacccgcaagcccggtgcctga

SEQ ID NO: 34134 - DNA, 2928 bp, synthetic construct; identical to SEQ ID NO: 34125
  source 1..2928: mol_type = other DNA

SEQ ID NO: 34135 - DNA, 2928 bp, synthetic construct; identical to SEQ ID NO: 34126
  source 1..2928: mol_type = other DNA

SEQ ID NO: 34136 - DNA, 2925 bp, synthetic construct
  source 1..2925: mol_type = other DNA
atggccttaccagtgaccgccttgctcctgccgctggccttgctgctccacgccgccaggccgctcgaggaggaggacctgaagaacgtgttcccacctgaggtggccgtgttcgagcctagcgaggccgagatcagccacacccagaaagccaccctcgtgtgcctggctaccggcttctaccccgaccatgtggaactgtcttggtgggtcaacggcaaagaggtgcacagcggcgtgtgtaccgacccccagccactgaaagaacagcccgccctgaacgacagccggtactgcctgagcagcagactgagagtgtccgccaccttctggcagaacccccggaaccacttcagatgccaggtgcagttctacggcctgagcgagaacgacgagtggacccaggacagagccaagcccgtgacccagatcgtgtctgccgaagcctggggcagagccgatgatgtgattaagatccactggcaggaaaagaagtccaacaccatcctgggcagccaggaaggcaacaccatgaagaccaacgacacctacatgaagttcagctggctgaccgtgcccgagaagtccctggacaaagaacacagatgcatcgtgcggcacgaaaacaacaagaacggcgtggaccaggaaatcatcttcccacccatcaagaccgatgtgattacaatggaccccaaggacaactgctccaaggacgccaacgataccctgctgctccagctgaccaacaccagcgcctactacatgtacttgttgctgctgctgaagtccgtggtgtacttcgccatcatcacatgctgcctgctgcggagaaccgccttctgctgcaacggcgagaagtctagggccaagcgatctggatctggagcaacaaacttctcactactcaaacaagcaggtgacgtggaggagaatcccgggcctactagcatggccttaccagtgaccgccttgctcctgccgctggccttgctgctccacgccgccaggccggacatccagatgacacagagccctagcagcctgtctgccagcgtgggagacagagtgaccatcacatgcaaggccagcgaccacatcaacaactggctggcctggtatcagcagaagcctggacaggcccctaagctgctgatctacggcgctaccacactggaaacaggcgtgcccagcagattttctggcagcggctctggcaccgactacaccctgacaatatccagcctccagcctgaggacttcgccacctactactgtcagcagagctggaacaccccttggacattcggccagggcaccaagctggaaatcaagagaggcggaggcggaagtggaggcggaggatctggcggcggaggctctcaagttcagcttcaacagcctggcgctgagctggtcaaacctggcgcttctgtgaagatgagctgcaaagccagcggctacgccttcagcagctcttggatcaactggatgaagcagaaacccggccagggactcgaatggatcggccaaatctatcccggcgacggcgacaccaactacaacggcaagttcaagggcagagccacactgaccgccgatacctctagcagcacagcctacatgcagctgagcagcctgaccagcgaagatagcgccgtgtacttctgtgcccggtccatcacaacagtcgtgggctgcgctatggactattggggccagggaacaagcgtgaccgtgtctagtacgcgtatccagaaccctgatcctgccgtgtaccagctgcgggatagcaagagcagcgacaagagcgtgtgtctgttcaccgacttcgacagccagaccaacgtgtcccagagcaaggactccgacgtgtacatcaccgataagtgcgtgctggacatgcggagcatggacttcaagagcaactccgccgtggcctggtccaacaagtccgatttcgcctgcgccaacgccttcaacaacagcattatccccgaggacacattcttcccaagccccgagagcagcgactccaccgaccacgtgaagcccaaagagacagagaacaccaagcagcccagcaagagctgccacaagcccaaggccatcgtgcacaccgagaaagtgaacatgatgagcctgaccgtgctgggcctgcggatgctgttcgccaaaaccgtggccgtgaacttcctgctgaccgccaagctgttcttcctccgcgccaagagaagcggatctggcgtgaagcagaccctgaatttcgacctgctgaagctggctggcgacgtggaatccaacccaggcccttctagaggccatatgaccgagtacaagcccacggtgcgcctcgccacccgcgacgacgtccccagggccgtacgcaccctcgccgccgcgttcgccgactaccccgccacgcgccacaccgtcgatccggaccgccacatcgagcgggtcaccgagctgcaagaactcttcctcacgcgcgtcgggctcgacatcggcaaggtgtgggtcgcggacgacggcgccgcggtggcggtctggaccacgccggagagcgtcgaagcgggggcggtgttcgccgagatcggcccgcgcatggccgagttgagcggttcccggctggccgcgcagcaacagatggaaggcctcctggcgccgcaccggcccaaggagcccgcgtggttcctggccaccgtcggcgtctcgcccgaccaccagggcaagggtctgggcagcgccgtcgtgctccccggagtggaggcggccgagcgcgccggggtgcccgccttcctggagacctccgcgccccgcaacctccccttctacgagcggctcggcttcaccgtcaccgccgacgtcgaggtgcccgaaggaccgcgcacctggtgcatgacccgcaagcccggtgcctga

SEQ ID NO: 34137 - DNA, 2925 bp, synthetic construct
  source 1..2925: mol_type = other DNA
atggccttaccagtgaccgccttgctcctgccgctggccttgctgctccacgccgccaggccgctcgagatccagaaccctgatcctgccgtgtaccagctgcgggatagcaagagcagcgacaagagcgtgtgtctgttcaccgacttcgacagccagaccaacgtgtcccagagcaaggactccgacgtgtacatcaccgataagtgcgtgctggacatgcggagcatggacttcaagagcaactccgccgtggcctggtccaacaagtccgatttcgcctgcgccaacgccttcaacaacagcattatccccgaggacacattcttcccaagccccgagagcagcgactccaccgaccacgtgaagcccaaagagacagagaacaccaagcagcccagcaagagctgccacaagcccaaggccatcgtgcacaccgagaaagtgaacatgatgagcctgaccgtgctgggcctgcggatgctgttcgccaaaaccgtggccgtgaacttcctgctgaccgccaagctgttcttcctcagggccaagcgatctggatctggagcaacaaacttctcactactcaaacaagcaggtgacgtggaggagaatcccgggcctactagcatggccttaccagtgaccgccttgctcctgccgctggccttgctgctccacgccgccaggccggacatccagatgacacagagccctagcagcctgtctgccagcgtgggagacagagtgaccatcacatgcaaggccagcgaccacatcaacaactggctggcctggtatcagcagaagcctggacaggcccctaagctgctgatctacggcgctaccacactggaaacaggcgtgcccagcagattttctggcagcggctctggcaccgactacaccctgacaatatccagcctccagcctgaggacttcgccacctactactgtcagcagagctggaacaccccttggacattcggccagggcaccaagctggaaatcaagagaggcggaggcggaagtggaggcggaggatctggcggcggaggctctcaagttcagcttcaacagcctggcgctgagctggtcaaacctggcgcttctgtgaagatgagctgcaaagccagcggctacgccttcagcagctcttggatcaactggatgaagcagaaacccggccagggactcgaatggatcggccaaatctatcccggcgacggcgacaccaactacaacggcaagttcaagggcagagccacactgaccgccgatacctctagcagcacagcctacatgcagctgagcagcctgaccagcgaagatagcgccgtgtacttctgtgcccggtccatcacaacagtcgtgggctgcgctatggactattggggccagggaacaagcgtgaccgtgtctagtacgcgtgaggaggacctgaagaacgtgttcccacctgaggtggccgtgttcgagcctagcgaggccgagatcagccacacccagaaagccaccctcgtgtgcctggctaccggcttctaccccgaccatgtggaactgtcttggtgggtcaacggcaaagaggtgcacagcggcgtgtgtaccgacccccagccactgaaagaacagcccgccctgaacgacagccggtactgcctgagcagcagactgagagtgtccgccaccttctggcagaacccccggaaccacttcagatgccaggtgcagttctacggcctgagcgagaacgacgagtggacccaggacagagccaagcccgtgacccagatcgtgtctgccgaagcctggggcagagccgatgatgtgattaagatccactggcaggaaaagaagtccaacaccatcctgggcagccaggaaggcaacaccatgaagaccaacgacacctacatgaagttcagctggctgaccgtgcccgagaagtccctggacaaagaacacagatgcatcgtgcggcacgaaaacaacaagaacggcgtggaccaggaaatcatcttcccacccatcaagaccgatgtgattacaatggaccccaaggacaactgctccaaggacgccaacgataccctgctgctccagctgaccaacaccagcgcctactacatgtacttgttgctgctgctgaagtccgtggtgtacttcgccatcatcacatgctgcctgctgcggagaaccgccttctgctgcaacggcgagaagtctcgcgccaagagaagcggatctggcgtgaagcagaccctgaatttcgacctgctgaagctggctggcgacgtggaatccaacccaggcccttctagaggccatatgaccgagtacaagcccacggtgcgcctcgccacccgcgacgacgtccccagggccgtacgcaccctcgccgccgcgttcgccgactaccccgccacgcgccacaccgtcgatccggaccgccacatcgagcgggtcaccgagctgcaagaactcttcctcacgcgcgtcgggctcgacatcggcaaggtgtgggtcgcggacgacggcgccgcggtggcggtctggaccacgccggagagcgtcgaagcgggggcggtgttcgccgagatcggcccgcgcatggccgagttgagcggttcccggctggccgcgcagcaacagatggaaggcctcctggcgccgcaccggcccaaggagcccgcgtggttcctggccaccgtcggcgtctcgcccgaccaccagggcaagggtctgggcagcgccgtcgtgctccccggagtggaggcggccgagcgcgccggggtgcccgccttcctggagacctccgcgccccgcaacctccccttctacgagcggctcggcttcaccgtcaccgccgacgtcgaggtgcccgaaggaccgcgcacctggtgcatgacccgcaagcccggtgcctga

SEQ ID NO: 34138 - DNA, 2616 bp, synthetic construct
  source 1..2616: mol_type = other DNA
atggccttaccagtgaccgccttgctcctgccgctggccttgctgctccacgccgccaggccgctcgaggaggacctgaagaacgtgttcccacctgaggtggccgtgttcgagcctagcgaggccgagatcagccacacccagaaagccaccctcgtgtgcctggctaccggcttctaccccgaccatgtggaactgtcttggtgggtcaacggcaaagaggtgcacagcggcgtgtctaccgacccccagccactgaaagaacagcccgccctgaacgacagccggtactgcctgagcagcagactgagagtgtccgccaccttctggcagaacccccggaaccacttcagatgccaggtgcagttctacggcctgagcgagaacgacgagtggacccaggacagagccaagcccgtgacccagatcgtgtctgccgaagcctggggcagagccgattgcggctttaccagcgagagctaccagcagggcgtgctgagcgccaccaacctgagcgtgatcggcttcagaatcctgctgctgaaagtggccggctttaacctgctgatgaccctgcggctgtggtccagcagggccaagcgatctggatctggagcaacaaacttctcactactcaaacaagcaggtgacgtggaggagaatcccgggcctactagcatggccttaccagtgaccgccttgctcctgccgctggccttgctgctccacgccgccaggccggacatccagatgacacagagccctagcagcctgtctgccagcgtgggagacagagtgaccatcacatgcaaggccagcgaccacatcaacaactggctggcctggtatcagcagaagcctggacaggcccctaagctgctgatctacggcgctaccacactggaaacaggcgtgcccagcagattttctggcagcggctctggcaccgactacaccctgacaatatccagcctccagcctgaggacttcgccacctactactgtcagcagagctggaacaccccttggacattcggccagggcaccaagctggaaatcaagagaggcggaggcggaagtggaggcggaggatctggcggcggaggctctcaagttcagcttcaacagcctggcgctgagctggtcaaacctggcgcttctgtgaagatgagctgcaaagccagcggctacgccttcagcagctcttggatcaactggatgaagcagaaacccggccagggactcgaatggatcggccaaatctatcccggcgacggcgacaccaactacaacggcaagttcaagggcagagccacactgaccgccgatacctctagcagcacagcctacatgcagctgagcagcctgaccagcgaagatagcgccgtgtacttctgtgcccggtccatcacaacagtcgtgggctgcgctatggactattggggccagggaacaagcgtgaccgtgtctagtacgcgtatccagaaccctgatcctgccgtgtaccagctgcgggatagcaagagcagcgacaagagcgtgtgtctgttcaccgacttcgacagccagaccaacgtgtcccagagcaaggactccgacgtgtacatcaccgataagaccgtgctggacatgcggagcatggacttcaagagcaactccgccgtggcctggtccaacaagtccgatttcgcctgcgccaacgccttcaacaacagcattatccccgaggacacattcttcccaagccccgagagcagctgcgacgtgaagctggtggaaaagagcttcgagacagacaccaacctgaacttccagatcctgtacgagatcctgctgggcaaggccaccctgtacgccgtgctggtgtctgccctggtgctgatggctatggtcaagcggaaggacagccggggacgcgccaagagaagcggatctggcgtgaagcagaccctgaatttcgacctgctgaagctggctggcgacgtggaatccaacccaggcccttctagaggccatatgaccgagtacaagcccacggtgcgcctcgccacccgcgacgacgtccccagggccgtacgcaccctcgccgccgcgttcgccgactaccccgccacgcgccacaccgtcgatccggaccgccacatcgagcgggtcaccgagctgcaagaactcttcctcacgcgcgtcgggctcgacatcggcaaggtgtgggtcgcggacgacggcgccgcggtggcggtctggaccacgccggagagcgtcgaagcgggggcggtgttcgccgagatcggcccgcgcatggccgagttgagcggttcccggctggccgcgcagcaacagatggaaggcctcctggcgccgcaccggcccaaggagcccgcgtggttcctggccaccgtcggcgtctcgcccgaccaccagggcaagggtctgggcagcgccgtcgtgctccccggagtggaggcggccgagcgcgccggggtgcccgccttcctggagacctccgcgccccgcaacctccccttctacgagcggctcggcttcaccgtcaccgccgacgtcgaggtgcccgaaggaccgcgcacctggtgcatgacccgcaagcccggtgcctga

SEQ ID NO: 34139 - DNA, 2616 bp, synthetic construct
  source 1..2616: mol_type = other DNA
atggccttaccagtgaccgccttgctcctgccgctggccttgctgctccacgccgccaggccgctcgagatccagaaccctgatcctgccgtgtaccagctgcgggatagcaagagcagcgacaagagcgtgtgtctgttcaccgacttcgacagccagaccaacgtgtcccagagcaaggactccgacgtgtacatcaccgataagaccgtgctggacatgcggagcatggacttcaagagcaactccgccgtggcctggtccaacaagtccgatttcgcctgcgccaacgccttcaacaacagcattatccccgaggacacattcttcccaagccccgagagcagctgcgacgtgaagctggtggaaaagagcttcgagacagacaccaacctgaacttccagatcctgtacgagatcctgctgggcaaggccaccctgtacgccgtgctggtgtctgccctggtgctgatggctatggtcaagcggaaggacagccggggaagggccaagcgatctggatctggagcaacaaacttctcactactcaaacaagcaggtgacgtggaggagaatcccgggcctactagcatggccttaccagtgaccgccttgctcctgccgctggccttgctgctccacgccgccaggccggacatccagatgacacagagccctagcagcctgtctgccagcgtgggagacagagtgaccatcacatgcaaggccagcgaccacatcaacaactggctggcctggtatcagcagaagcctggacaggcccctaagctgctgatctacggcgctaccacactggaaacaggcgtgcccagcagattttctggcagcggctctggcaccgactacaccctgacaatatccagcctccagcctgaggacttcgccacctactactgtcagcagagctggaacaccccttggacattcggccagggcaccaagctggaaatcaagagaggcggaggcggaagtggaggcggaggatctggcggcggaggctctcaagttcagcttcaacagcctggcgctgagctggtcaaacctggcgcttctgtgaagatgagctgcaaagccagcggctacgccttcagcagctcttggatcaactggatgaagcagaaacccggccagggactcgaatggatcggccaaatctatcccggcgacggcgacaccaactacaacggcaagttcaagggcagagccacactgaccgccgatacctctagcagcacagcctacatgcagctgagcagcctgaccagcgaagatagcgccgtgtacttctgtgcccggtccatcacaacagtcgtgggctgcgctatggactattggggccagggaacaagcgtgaccgtgtctagtacgcgtgaggacctgaagaacgtgttcccacctgaggtggccgtgttcgagcctagcgaggccgagatcagccacacccagaaagccaccctcgtgtgcctggctaccggcttctaccccgaccatgtggaactgtcttggtgggtcaacggcaaagaggtgcacagcggcgtgtctaccgacccccagccactgaaagaacagcccgccctgaacgacagccggtactgcctgagcagcagactgagagtgtccgccaccttctggcagaacccccggaaccacttcagatgccaggtgcagttctacggcctgagcgagaacgacgagtggacccaggacagagccaagcccgtgacccagatcgtgtctgccgaagcctggggcagagccgattgcggctttaccagcgagagctaccagcagggcgtgctgagcgccaccaacctgagcgtgatcggcttcagaatcctgctgctgaaagtggccggctttaacctgctgatgaccctgcggctgtggtccagccgcgccaagagaagcggatctggcgtgaagcagaccctgaatttcgacctgctgaagctggctggcgacgtggaatccaacccaggcccttctagaggccatatgaccgagtacaagcccacggtgcgcctcgccacccgcgacgacgtccccagggccgtacgcaccctcgccgccgcgttcgccgactaccccgccacgcgccacaccgtcgatccggaccgccacatcgagcgggtcaccgagctgcaagaactcttcctcacgcgcgtcgggctcgacatcggcaaggtgtgggtcgcggacgacggcgccgcggtggcggtctggaccacgccggagagcgtcgaagcgggggcggtgttcgccgagatcggcccgcgcatggccgagttgagcggttcccggctggccgcgcagcaacagatggaaggcctcctggcgccgcaccggcccaaggagcccgcgtggttcctggccaccgtcggcgtctcgcccgaccaccagggcaagggtctgggcagcgccgtcgtgctccccggagtggaggcggccgagcgcgccggggtgcccgccttcctggagacctccgcgccccgcaacctccccttctacgagcggctcggcttcaccgtcaccgccgacgtcgaggtgcccgaaggaccgcgcacctggtgcatgacccgcaagcccggtgcctga

SEQ ID NO: 34140 - DNA, 2616 bp, synthetic construct
  source 1..2616: mol_type = other DNA
atggccttaccagtgaccgccttgctcctgccgctggccttgctgctccacgccgccaggccgctcgaggaggacctgaagaacgtgttcccacctgaggtggccgtgttcgagcctagcgaggccgagatcagccacacccagaaagccaccctcgtgtgcctggctaccggcttctaccccgaccatgtggaactgtcttggtgggtcaacggcaaagaggtgcacagcggcgtgtgtaccgacccccagccactgaaagaacagcccgccctgaacgacagccggtactgcctgagcagcagactgagagtgtccgccaccttctggcagaacccccggaaccacttcagatgccaggtgcagttctacggcctgagcgagaacgacgagtggacccaggacagagccaagcccgtgacccagatcgtgtctgccgaagcctggggcagagccgattgcgacgtgaagctggtggaaaagagcttcgagacagacaccaacctgaacttccagaacctgagcgtgatcggcttcagaatcctgctgctgaaagtggccggctttaacctgctgatgaccctgcggctgtggtccagcagggccaagcgatctggatctggagcaacaaacttctcactactcaaacaagcaggtgacgtggaggagaatcccgggcctactagcatggccttaccagtgaccgccttgctcctgccgctggccttgctgctccacgccgccaggccggacatccagatgacacagagccctagcagcctgtctgccagcgtgggagacagagtgaccatcacatgcaaggccagcgaccacatcaacaactggctggcctggtatcagcagaagcctggacaggcccctaagctgctgatctacggcgctaccacactggaaacaggcgtgcccagcagattttctggcagcggctctggcaccgactacaccctgacaatatccagcctccagcctgaggacttcgccacctactactgtcagcagagctggaacaccccttggacattcggccagggcaccaagctggaaatcaagagaggcggaggcggaagtggaggcggaggatctggcggcggaggctctcaagttcagcttcaacagcctggcgctgagctggtcaaacctggcgcttctgtgaagatgagctgcaaagccagcggctacgccttcagcagctcttggatcaactggatgaagcagaaacccggccagggactcgaatggatcggccaaatctatcccggcgacggcgacaccaactacaacggcaagttcaagggcagagccacactgaccgccgatacctctagcagcacagcctacatgcagctgagcagcctgaccagcgaagatagcgccgtgtacttctgtgcccggtccatcacaacagtcgtgggctgcgctatggactattggggccagggaacaagcgtgaccgtgtctagtacgcgtatccagaaccctgatcctgccgtgtaccagctgcgggatagcaagagcagcgacaagagcgtgtgtctgttcaccgacttcgacagccagaccaacgtgtcccagagcaaggactccgacgtgtacatcaccgataagtgcgtgctggacatgcggagcatggacttcaagagcaactccgccgtggcctggtccaacaagtccgatttcgcctgcgccaacgccttcaacaacagcattatccccgaggacacattcttcccaagccccgagagcagctgcggctttaccagcgagagctaccagcagggcgtgctgagcgccaccatcctgtacgagatcctgctgggcaaggccaccctgtacgccgtgctggtgtctgccctggtgctgatggctatggtcaagcggaaggacagccggggacgcgccaagagaagcggatctggcgtgaagcagaccctgaatttcgacctgctgaagctggctggcgacgtggaatccaacccaggcccttctagaggccatatgaccgagtacaagcccacggtgcgcctcgccacccgcgacgacgtccccagggccgtacgcaccctcgccgccgcgttcgccgactaccccgccacgcgccacaccgtcgatccggaccgccacatcgagcgggtcaccgagctgcaagaactcttcctcacgcgcgtcgggctcgacatcggcaaggtgtgggtcgcggacgacggcgccgcggtggcggtctggaccacgccggagagcgtcgaagcgggggcggtgttcgccgagatcggcccgcgcatggccgagttgagcggttcccggctggccgcgcagcaacagatggaaggcctcctggcgccgcaccggcccaaggagcccgcgtggttcctggccaccgtcggcgtctcgcccgaccaccagggcaagggtctgggcagcgccgtcgtgctccccggagtggaggcggccgagcgcgccggggtgcccgccttcctggagacctccgcgccccgcaacctccccttctacgagcggctcggcttcaccgtcaccgccgacgtcgaggtgcccgaaggaccgcgcacctggtgcatgacccgcaagcccggtgcctga

SEQ ID NO: 34141 - DNA, 2616 bp, synthetic construct
  source 1..2616: mol_type = other DNA
atggccttaccagtgaccgccttgctcctgccgctggccttgctgctccacgccgccaggccgctcgaggaggacctgaagaacgtgttcccacctgaggtggccgtgttcgagcctagcgaggccgagatcagccacacccagaaagccaccctcgtgtgcctggctaccggcttctaccccgaccatgtggaactgtcttggtgggtcaacggcaaagaggtgcacagcggcgtgtctaccgacccccagccactgaaagaacagcccgccctgaacgacagccggtactgcctgagcagcagactgagagtgtccgccaccttctggcagaacccccggaaccacttcagatgccaggtgcagttctacggcctgagcgagaacgacgagtggacccaggacagagccaagcccgtgacccagatcgtgtctgccgaagcctggggcagagccgattgcgacgtgaagctggtggaaaagagcttcgagacagacaccaacctgaacttccagaacctgagcgtgatcggcttcagaatcctgctgctgaaagtggccggctttaacctgctgatgaccctgcggctgtggtccagcagggccaagcgatctggatctggagcaacaaacttctcactactcaaacaagcaggtgacgtggaggagaatcccgggcctactagcatggccttaccagtgaccgccttgctcctgccgctggccttgctgctccacgccgccaggccggacatccagatgacacagagccctagcagcctgtctgccagcgtgggagacagagtgaccatcacatgcaaggccagcgaccacatcaacaactggctggcctggtatcagcagaagcctggacaggcccctaagctgctgatctacggcgctaccacactggaaacaggcgtgcccagcagattttctggcagcggctctggcaccgactacaccctgacaatatccagcctccagcctgaggacttcgccacctactactgtcagcagagctggaacaccccttggacattcggccagggcaccaagctggaaatcaagagaggcggaggcggaagtggaggcggaggatctggcggcggaggctctcaagttcagcttcaacagcctggcgctgagctggtcaaacctggcgcttctgtgaagatgagctgcaaagccagcggctacgccttcagcagctcttggatcaactggatgaagcagaaacccggccagggactcgaatggatcggccaaatctatcccggcgacggcgacaccaactacaacggcaagttcaagggcagagccacactgaccgccgatacctctagcagcacagcctacatgcagctgagcagcctgaccagcgaagatagcgccgtgtacttctgtgcccggtccatcacaacagtcgtgggctgcgctatggactattggggccagggaacaagcgtgaccgtgtctagtacgcgtatccagaaccctgatcctgccgtgtaccagctgcgggatagcaagagcagcgacaagagcgtgtgtctgttcaccgacttcgacagccagaccaacgtgtcccagagcaaggactccgacgtgtacatcaccgataagaccgtgctggacatgcggagcatggacttcaagagcaactccgccgtggcctggtccaacaagtccgatttcgcctgcgccaacgccttcaacaacagcattatccccgaggacacattcttcccaagccccgagagcagctgcggctttaccagcgagagctaccagcagggcgtgctgagcgccaccatcctgtacgagatcctgctgggcaaggccaccctgtacgccgtgctggtgtctgccctggtgctgatggctatggtcaagcggaaggacagccggggacgcgccaagagaagcggatctggcgtgaagcagaccctgaatttcgacctgctgaagctggctggcgacgtggaatccaacccaggcccttctagaggccatatgaccgagtacaagcccacggtgcgcctcgccacccgcgacgacgtccccagggccgtacgcaccctcgccgccgcgttcgccgactaccccgccacgcgccacaccgtcgatccggaccgccacatcgagcgggtcaccgagctgcaagaactcttcctcacgcgcgtcgggctcgacatcggcaaggtgtgggtcgcggacgacggcgccgcggtggcggtctggaccacgccggagagcgtcgaagcgggggcggtgttcgccgagatcggcccgcgcatggccgagttgagcggttcccggctggccgcgcagcaacagatggaaggcctcctggcgccgcaccggcccaaggagcccgcgtggttcctggccaccgtcggcgtctcgcccgaccaccagggcaagggtctgggcagcgccgtcgtgctccccggagtggaggcggccgagcgcgccggggtgcccgccttcctggagacctccgcgccccgcaacctccccttctacgagcggctcggcttcaccgtcaccgccgacgtcgaggtgcccgaaggaccgcgcacctggtgcatgacccgcaagcccggtgcctga

SEQ ID NO: 34142 - DNA, 2925 bp, synthetic construct
  source 1..2925: mol_type = other DNA
atggccttaccagtgaccgccttgctcctgccgctggccttgctgctccacgccgccaggccgctcgaggaggaggacctgaagaacgtgttcccacctgaggtggccgtgttcgagcctagcgaggccgagatcagccacacccagaaagccaccctcgtgtgcctggctaccggcttctaccccgaccatgtggaactgtcttggtgggtcaacggcaaagaggtgcacagcggcgtgtctaccgacccccagccactgaaagaacagcccgccctgaacgacagccggtactgcctgagcagcagactgagagtgtccgccaccttctggcagaacccccggaaccacttcagatgccaggtgcagttctacggcctgagcgagaacgacgagtggacccaggacagagccaagcccgtgacccagatcgtgtctgccgaagcctggggcagagccgatgatgtgattaagatccactggcaggaaaagaagtccaacaccatcctgggcagccaggaaggcaacaccatgaagaccaacgacacctacatgaagttcagctggctgaccgtgcccgagaagtccctggacaaagaacacagatgcatcgtgcggcacgaaaacaacaagaacggcgtggaccaggaaatcatcttcccacccatcaagaccgatgtgattacaatggaccccaaggacaactgctccaaggacgccaacgataccctgctgctccagctgaccaacaccagcgcctactacatgtacttgttgctgctgctgaagtccgtggtgtacttcgccatcatcacatgctgcctgctgcggagaaccgccttctgctgcaacggcgagaagtctagggccaagcgatctggatctggagcaacaaacttctcactactcaaacaagcaggtgacgtggaggagaatcccgggcctactagcatggccttaccagtgaccgccttgctcctgccgctggccttgctgctccacgccgccaggccggacatccagatgacacagagccctagcagcctgtctgccagcgtgggagacagagtgaccatcacatgcaaggccagcgaccacatcaacaactggctggcctggtatcagcagaagcctggacaggcccctaagctgctgatctacggcgctaccacactggaaacaggcgtgcccagcagattttctggcagcggctctggcaccgactacaccctgacaatatccagcctccagcctgaggacttcgccacctactactgtcagcagagctggaacaccccttggacattcggccagggcaccaagctggaaatcaagagaggcggaggcggaagtggaggcggaggatctggcggcggaggctctcaagttcagcttcaacagcctggcgctgagctggtcaaacctggcgcttctgtgaagatgagctgcaaagccagcggctacgccttcagcagctcttggatcaactggatgaagcagaaacccggccagggactcgaatggatcggccaaatctatcccggcgacggcgacaccaactacaacggcaagttcaagggcagagccacactgaccgccgatacctctagcagcacagcctacatgcagctgagcagcctgaccagcgaagatagcgccgtgtacttctgtgcccggtccatcacaacagtcgtgggctgcgctatggactattggggccagggaacaagcgtgaccgtgtctagtacgcgtatccagaaccctgatcctgccgtgtaccagctgcgggatagcaagagcagcgacaagagcgtgtgtctgttcaccgacttcgacagccagaccaacgtgtcccagagcaaggactccgacgtgtacatcaccgataagaccgtgctggacatgcggagcatggacttcaagagcaactccgccgtggcctggtccaacaagtccgatttcgcctgcgccaacgccttcaacaacagcattatccccgaggacacattcttcccaagccccgagagcagcgactccaccgaccacgtgaagcccaaagagacagagaacaccaagcagcccagcaagagctgccacaagcccaaggccatcgtgcacaccgagaaagtgaacatgatgagcctgaccgtgctgggcctgcggatgctgttcgccaaaaccgtggccgtgaacttcctgctgaccgccaagctgttcttcctccgcgccaagagaagcggatctggcgtgaagcagaccctgaatttcgacctgctgaagctggctggcgacgtggaatccaacccaggcccttctagaggccatatgaccgagtacaagcccacggtgcgcctcgccacccgcgacgacgtccccagggccgtacgcaccctcgccgccgcgttcgccgactaccccgccacgcgccacaccgtcgatccggaccgccacatcgagcgggtcaccgagctgcaagaactcttcctcacgcgcgtcgggctcgacatcggcaaggtgtgggtcgcggacgacggcgccgcggtggcggtctggaccacgccggagagcgtcgaagcgggggcggtgttcgccgagatcggcccgcgcatggccgagttgagcggttcccggctggccgcgcagcaacagatggaaggcctcctggcgccgcaccggcccaaggagcccgcgtggttcctggccaccgtcggcgtctcgcccgaccaccagggcaagggtctgggcagcgccgtcgtgctccccggagtggaggcggccgagcgcgccggggtgcccgccttcctggagacctccgcgccccgcaacctccccttctacgagcggctcggcttcaccgtcaccgccgacgtcgaggtgcccgaaggaccgcgcacctggtgcatgacccgcaagcccggtgcctga

SEQ ID NO: 34143 - DNA, 2616 bp, synthetic construct
  source 1..2616: mol_type = other DNA
atggccttaccagtgaccgccttgctcctgccgctggccttgctgctccacgccgccaggccgctcgaggaggacctgaagaacgtgttcccacctgaggtggccgtgttcgagcctagcgaggccgagatcagccacacccagaaagccaccctcgtgtgcctggctaccggcttctaccccgaccatgtggaactgtcttggtgggtcaacggcaaagaggtgcacagcggcgtgtgtaccgacccccagccactgaaagaacagcccgccctgaacgacagccggtactgcctgagcagcagactgagagtgtccgccaccttctggcagaacccccggaaccacttcagatgccaggtgcagttctacggcctgagcgagaacgacgagtggacccaggacagagccaagcccgtgacccagatcgtgtctgccgaagcctggggcagagccgattgcggctttaccagcgagagctaccagcagggcgtgctgagcgccaccaacctgagcgtgatcggcttcagaatcctgctgctgaaagtggccggctttaacctgctgatgaccctgcggctgtggtccagcagggccaagcgatctggatctggagcaacaaacttctcactactcaaacaagcaggtgacgtggaggagaatcccgggcctactagcatggccttaccagtgaccgccttgctcctgccgctggccttgctgctccacgccgccaggccggacatccagatgacacagagccctagcagcctgtctgccagcgtgggagacagagtgaccatcacatgcaaggccagcgaccacatcaacaactggctggcctggtatcagcagaagcctggacaggcccctaagctgctgatctacggcgctaccacactggaaacaggcgtgcccagcagattttctggcagcggctctggcaccgactacaccctgacaatatccagcctccagcctgaggacttcgccacctactactgtcagcagagctggaacaccccttggacattcggccagggcaccaagctggaaatcaagagaggcggaggcggaagtggaggcggaggatctggcggcggaggctctcaagttcagcttcaacagcctggcgctgagctggtcaaacctggcgcttctgtgaagatgagctgcaaagccagcggctacgccttcagcagctcttggatcaactggatgaagcagaaacccggccagggactcgaatggatcggccaaatctatcccggcgacggcgacaccaactacaacggcaagttcaagggcagagccacactgaccgccgatacctctagcagcacagcctacatgcagctgagcagcctgaccagcgaagatagcgccgtgtacttctgtgcccggtccatcacaacagtcgtgggctgcgctatggactattggggccagggaacaagcgtgaccgtgtctagtacgcgtatccagaaccctgatcctgccgtgtaccagctgcgggatagcaagagcagcgacaagagcgtgtgtctgttcaccgacttcgacagccagaccaacgtgtcccagagcaaggactccgacgtgtacatcaccgataagtgcgtgctggacatgcggagcatggacttcaagagcaactccgccgtggcctggtccaacaagtccgatttcgcctgcgccaacgccttcaacaacagcattatccccgaggacacattcttcccaagccccgagagcagctgcgacgtgaagctggtggaaaagagcttcgagacagacaccaacctgaacttccagatcctgtacgagatcctgctgggcaaggccaccctgtacgccgtgctggtgtctgccctggtgctgatggctatggtcaagcggaaggacagccggggacgcgccaagagaagcggatctggcgtgaagcagaccctgaatttcgacctgctgaagctggctggcgacgtggaatccaacccaggcccttctagaggccatatgaccgagtacaagcccacggtgcgcctcgccacccgcgacgacgtccccagggccgtacgcaccctcgccgccgcgttcgccgactaccccgccacgcgccacaccgtcgatccggaccgccacatcgagcgggtcaccgagctgcaagaactcttcctcacgcgcgtcgggctcgacatcggcaaggtgtgggtcgcggacgacggcgccgcggtggcggtctggaccacgccggagagcgtcgaagcgggggcggtgttcgccgagatcggcccgcgcatggccgagttgagcggttcccggctggccgcgcagcaacagatggaaggcctcctggcgccgcaccggcccaaggagcccgcgtggttcctggccaccgtcggcgtctcgcccgaccaccagggcaagggtctgggcagcgccgtcgtgctccccggagtggaggcggccgagcgcgccggggtgcccgccttcctggagacctccgcgccccgcaacctccccttctacgagcggctcggcttcaccgtcaccgccgacgtcgaggtgcccgaaggaccgcgcacctggtgcatgacccgcaagcccggtgcctga

SEQ ID NO: 34144 - DNA, 2703 bp, synthetic construct
  source 1..2703: mol_type = other DNA
atggccttaccagtgaccgccttgctcctgccgctggccttgctgctccacgccgccaggccgctcgaggaggaggacctgaagaacgtgttcccacctgaggtggccgtgttcgagcctagcgaggccgagatcagccacacccagaaagccaccctcgtgtgcctggctaccggcttctaccccgaccatgtggaactgtcttggtgggtcaacggcaaagaggtgcacagcggcgtgtgtaccgacccccagccactgaaagaacagcccgccctgaacgacagccggtactgcctgagcagcagactgagagtgtccgccaccttctggcagaacccccggaaccacttcagatgccaggtgcagttctacggcctgagcgagaacgacgagtggacccaggacagagccaagcccgtgacccagatcgtgtctgccgaagcctggggcagagccgattgcggctttaccagcgagagctaccagcagggcgtgctgagcgccaccaacctgagcgtgatcggcttcagaatcctgctgctgaaagtggccggctttaacctgctgatgaccctgcggctgtggtccagcagggccaagcgatctggatctggagcaacaaacttctcactactcaaacaagcaggtgacgtggaggagaatcccgggcctactagcatggccttaccagtgaccgccttgctcctgccgctggccttgctgctccacgccgccaggccggacatccagatgacacagagccctagcagcctgtctgccagcgtgggagacagagtgaccatcacatgcaaggccagcgaccacatcaacaactggctggcctggtatcagcagaagcctggacaggcccctaagctgctgatctacggcgctaccacactggaaacaggcgtgcccagcagattttctggcagcggctctggcaccgactacaccctgacaatatccagcctccagcctgaggacttcgccacctactactgtcagcagagctggaacaccccttggacattcggccagggcaccaagctggaaatcaagagaggcggaggcggaagtggaggcggaggatctggcggcggaggctctcaagttcagcttcaacagcctggcgctgagctggtcaaacctggcgcttctgtgaagatgagctgcaaagccagcggctacgccttcagcagctcttggatcaactggatgaagcagaaacccggccagggactcgaatggatcggccaaatctatcccggcgacggcgacaccaactacaacggcaagttcaagggcagagccacactgaccgccgatacctctagcagcacagcctacatgcagctgagcagcctgaccagcgaagatagcgccgtgtacttctgtgcccggtccatcacaacagtcgtgggctgcgctatggactattggggccagggaacaagcgtgaccgtgtctagtacgcgtggacagcctaaggccaatcctaccgtgacactgttccctccaagcagcgaagaactccaggccaacaaggccacacttgtgtgcctgatctccgacttctaccctggggctgtgacagtggcttggaaggccgatggatctcctgtgaaagccggcgtggaaaccaccaagccatccaagcagagcaacaacaaatacgccgccagctcctacctgagcctgacacctgagcagtggaagtcccacagatcctacagctgccaagtgacccacgaaggcagcaccgtggaaaagacagtggcccctacagagtgcagccccatcaagaccgatgtgattacaatggaccccaaggacaactgctccaaggacgccaacgataccctgctgctccagctgaccaacaccagcgcctactacatgtacttgttgctgctgctgaagtccgtggtgtacttcgccatcatcacatgctgcctgctgcggagaaccgccttctgctgcaacggcgagaagtctcgcgccaagagaagcggatctggcgtgaagcagaccctgaatttcgacctgctgaagctggctggcgacgtggaatccaacccaggcccttctagaggccatatgaccgagtacaagcccacggtgcgcctcgccacccgcgacgacgtccccagggccgtacgcaccctcgccgccgcgttcgccgactaccccgccacgcgccacaccgtcgatccggaccgccacatcgagcgggtcaccgagctgcaagaactcttcctcacgcgcgtcgggctcgacatcggcaaggtgtgggtcgcggacgacggcgccgcggtggcggtctggaccacgccggagagcgtcgaagcgggggcggtgttcgccgagatcggcccgcgcatggccgagttgagcggttcccggctggccgcgcagcaacagatggaaggcctcctggcgccgcaccggcccaaggagcccgcgtggttcctggccaccgtcggcgtctcgcccgaccaccagggcaagggtctgggcagcgccgtcgtgctccccggagtggaggcggccgagcgcgccggggtgcccgccttcctggagacctccgcgccccgcaacctccccttctacgagcggctcggcttcaccgtcaccgccgacgtcgaggtgcccgaaggaccgcgcacctggtgcatgacccgcaagcccggtgcctga

SEQ ID NO: 34145 - DNA, 2703 bp, synthetic construct
  source 1..2703: mol_type = other DNA
atggccttaccagtgaccgccttgctcctgccgctggccttgctgctccacgccgccaggccgctcgagggacagcctaaggccaatcctaccgtgacactgttccctccaagcagcgaagaactccaggccaacaaggccacacttgtgtgcctgatctccgacttctaccctggggctgtgacagtggcttggaaggccgatggatctcctgtgaaagccggcgtggaaaccaccaagccatccaagcagagcaacaacaaatacgccgccagctcctacctgagcctgacacctgagcagtggaagtcccacagatcctacagctgccaagtgacccacgaaggcagcaccgtggaaaagacagtggcccctacagagtgcagccccatcaagaccgatgtgattacaatggaccccaaggacaactgctccaaggacgccaacgataccctgctgctccagctgaccaacaccagcgcctactacatgtacttgttgctgctgctgaagtccgtggtgtacttcgccatcatcacatgctgcctgctgcggagaaccgccttctgctgcaacggcgagaagtctagggccaagcgatctggatctggagcaacaaacttctcactactcaaacaagcaggtgacgtggaggagaatcccgggcctactagcatggccttaccagtgaccgccttgctcctgccgctggccttgctgctccacgccgccaggccggacatccagatgacacagagccctagcagcctgtctgccagcgtgggagacagagtgaccatcacatgcaaggccagcgaccacatcaacaactggctggcctggtatcagcagaagcctggacaggcccctaagctgctgatctacggcgctaccacactggaaacaggcgtgcccagcagattttctggcagcggctctggcaccgactacaccctgacaatatccagcctccagcctgaggacttcgccacctactactgtcagcagagctggaacaccccttggacattcggccagggcaccaagctggaaatcaagagaggcggaggcggaagtggaggcggaggatctggcggcggaggctctcaagttcagcttcaacagcctggcgctgagctggtcaaacctggcgcttctgtgaagatgagctgcaaagccagcggctacgccttcagcagctcttggatcaactggatgaagcagaaacccggccagggactcgaatggatcggccaaatctatcccggcgacggcgacaccaactacaacggcaagttcaagggcagagccacactgaccgccgatacctctagcagcacagcctacatgcagctgagcagcctgaccagcgaagatagcgccgtgtacttctgtgcccggtccatcacaacagtcgtgggctgcgctatggactattggggccagggaacaagcgtgaccgtgtctagtacgcgtgaggaggacctgaagaacgtgttcccacctgaggtggccgtgttcgagcctagcgaggccgagatcagccacacccagaaagccaccctcgtgtgcctggctaccggcttctaccccgaccatgtggaactgtcttggtgggtcaacggcaaagaggtgcacagcggcgtgtgtaccgacccccagccactgaaagaacagcccgccctgaacgacagccggtactgcctgagcagcagactgagagtgtccgccaccttctggcagaacccccggaaccacttcagatgccaggtgcagttctacggcctgagcgagaacgacgagtggacccaggacagagccaagcccgtgacccagatcgtgtctgccgaagcctggggcagagccgattgcggctttaccagcgagagctaccagcagggcgtgctgagcgccaccaacctgagcgtgatcggcttcagaatcctgctgctgaaagtggccggctttaacctgctgatgaccctgcggctgtggtccagccgcgccaagagaagcggatctggcgtgaagcagaccctgaatttcgacctgctgaagctggctggcgacgtggaatccaacccaggcccttctagaggccatatgaccgagtacaagcccacggtgcgcctcgccacccgcgacgacgtccccagggccgtacgcaccctcgccgccgcgttcgccgactaccccgccacgcgccacaccgtcgatccggaccgccacatcgagcgggtcaccgagctgcaagaactcttcctcacgcgcgtcgggctcgacatcggcaaggtgtgggtcgcggacgacggcgccgcggtggcggtctggaccacgccggagagcgtcgaagcgggggcggtgttcgccgagatcggcccgcgcatggccgagttgagcggttcccggctggccgcgcagcaacagatggaaggcctcctggcgccgcaccggcccaaggagcccgcgtggttcctggccaccgtcggcgtctcgcccgaccaccagggcaagggtctgggcagcgccgtcgtgctccccggagtggaggcggccgagcgcgccggggtgcccgccttcctggagacctccgcgccccgcaacctccccttctacgagcggctcggcttcaccgtcaccgccgacgtcgaggtgcccgaaggaccgcgcacctggtgcatgacccgcaagcccggtgcctga

SEQ ID NO: 34146 - DNA, 2694 bp, synthetic construct
  source 1..2694: mol_type = other DNA
atggccttaccagtgaccgccttgctcctgccgctggccttgctgctccacgccgccaggccgctcgaggaggcctctacaaagggaccctccgtgtttcctctggctcccagcagcaagtctacaagcggaggaacagccgctctgggctgcctggtcaaggattactttcccgagcctgtgaccgtgtcctggaatagcggagcactgacaagcggcgtgcacacctttccagccgtgctgcaaagcagcggcctgtactctctgagcagcgtggtcacagtgcctagctctagcctgggcacccagacctacatctgcaatgtgaaccacaagcctagcaacaccaaggtggacaagagagtggaacccaagagctgtcccatcaagaccgatgtgattacaatggaccccaaggacaactgctccaaggacgccaacgataccctgctgctccagctgaccaacaccagcgcctactacatgtacttgttgctgctgctgaagtccgtggtgtacttcgccatcatcacatgctgcctgctgcggagaaccgccttctgctgcaacggcgagaagtctagggccaagcgatctggatctggagcaacaaacttctcactactcaaacaagcaggtgacgtggaggagaatcccgggcctactagcatggccttaccagtgaccgccttgctcctgccgctggccttgctgctccacgccgccaggccggacatccagatgacacagagccctagcagcctgtctgccagcgtgggagacagagtgaccatcacatgcaaggccagcgaccacatcaacaactggctggcctggtatcagcagaagcctggacaggcccctaagctgctgatctacggcgctaccacactggaaacaggcgtgcccagcagattttctggcagcggctctggcaccgactacaccctgacaatatccagcctccagcctgaggacttcgccacctactactgtcagcagagctggaacaccccttggacattcggccagggcaccaagctggaaatcaagagaggcggaggcggaagtggaggcggaggatctggcggcggaggctctcaagttcagcttcaacagcctggcgctgagctggtcaaacctggcgcttctgtgaagatgagctgcaaagccagcggctacgccttcagcagctcttggatcaactggatgaagcagaaacccggccagggactcgaatggatcggccaaatctatcccggcgacggcgacaccaactacaacggcaagttcaagggcagagccacactgaccgccgatacctctagcagcacagcctacatgcagctgagcagcctgaccagcgaagatagcgccgtgtacttctgtgcccggtccatcacaacagtcgtgggctgcgctatggactattggggccagggaacaagcgtgaccgtgtctagtacgcgtggacagcctaaggccaatcctaccgtgacactgttccctccaagcagcgaagaactccaggccaacaaggccacacttgtgtgcctgatctccgacttctaccctggggctgtgacagtggcttggaaggccgatggatctcctgtgaaagccggcgtggaaaccaccaagccatccaagcagagcaacaacaaatacgccgccagctcctacctgagcctgacacctgagcagtggaagtcccacagatcctacagctgccaagtgacccacgaaggcagcaccgtggaaaagacagtggcccctacagagtgcagcgaagtgaaaaccgactccaccgaccacgtgaagcccaaagagacagagaacaccaagcagcccagcaagagctgccacaagcccaaggccatcgtgcacaccgagaaagtgaacatgatgagcctgaccgtgctgggcctgcggatgctgttcgccaaaaccgtggccgtgaacttcctgctgaccgccaagctgttcttcctccgcgccaagagaagcggatctggcgtgaagcagaccctgaatttcgacctgctgaagctggctggcgacgtggaatccaacccaggcccttctagaggccatatgaccgagtacaagcccacggtgcgcctcgccacccgcgacgacgtccccagggccgtacgcaccctcgccgccgcgttcgccgactaccccgccacgcgccacaccgtcgatccggaccgccacatcgagcgggtcaccgagctgcaagaactcttcctcacgcgcgtcgggctcgacatcggcaaggtgtgggtcgcggacgacggcgccgcggtggcggtctggaccacgccggagagcgtcgaagcgggggcggtgttcgccgagatcggcccgcgcatggccgagttgagcggttcccggctggccgcgcagcaacagatggaaggcctcctggcgccgcaccggcccaaggagcccgcgtggttcctggccaccgtcggcgtctcgcccgaccaccagggcaagggtctgggcagcgccgtcgtgctccccggagtggaggcggccgagcgcgccggggtgcccgccttcctggagacctccgcgccccgcaacctccccttctacgagcggctcggcttcaccgtcaccgccgacgtcgaggtgcccgaaggaccgcgcacctggtgcatgacccgcaagcccggtgcctga

SEQ ID NO: 34147 - DNA, 2628 bp, synthetic construct
  source 1..2628: mol_type = other DNA
atggccttaccagtgaccgccttgctcctgccgctggccttgctgctccacgccgccaggccgctcgaggaggcctctacaaagggaccctccgtgtttcctctggctcccagcagcaagtctacaagcggaggaacagccgctctgggctgcctggtcaaggattactttcccgagcctgtgaccgtgtcctggaatagcggagcactgacaagcggcgtgcacacctttccagccgtgctgcaaagcagcggcctgtactctctgagcagcgtggtcacagtgcctagctctagcctgggcacccagacctacatctgcaatgtgaaccacaagcctagcaacaccaaggtggacaagagagtggaacccaagagctgtggcagagccgattgcggctttaccagcgagagctaccagcagggcgtgctgagcgccaccatcctgtacgagatcctgctgggcaaggccaccctgtacgccgtgctggtgtctgccctggtgctgatggctatggtcaagcggaaggacagccggggaagggccaagcgatctggatctggagcaacaaacttctcactactcaaacaagcaggtgacgtggaggagaatcccgggcctactagcatggccttaccagtgaccgccttgctcctgccgctggccttgctgctccacgccgccaggccggacatccagatgacacagagccctagcagcctgtctgccagcgtgggagacagagtgaccatcacatgcaaggccagcgaccacatcaacaactggctggcctggtatcagcagaagcctggacaggcccctaagctgctgatctacggcgctaccacactggaaacaggcgtgcccagcagattttctggcagcggctctggcaccgactacaccctgacaatatccagcctccagcctgaggacttcgccacctactactgtcagcagagctggaacaccccttggacattcggccagggcaccaagctggaaatcaagagaggcggaggcggaagtggaggcggaggatctggcggcggaggctctcaagttcagcttcaacagcctggcgctgagctggtcaaacctggcgcttctgtgaagatgagctgcaaagccagcggctacgccttcagcagctcttggatcaactggatgaagcagaaacccggccagggactcgaatggatcggccaaatctatcccggcgacggcgacaccaactacaacggcaagttcaagggcagagccacactgaccgccgatacctctagcagcacagcctacatgcagctgagcagcctgaccagcgaagatagcgccgtgtacttctgtgcccggtccatcacaacagtcgtgggctgcgctatggactattggggccagggaacaagcgtgaccgtgtctagtacgcgtggacagcctaaggccaatcctaccgtgacactgttccctccaagcagcgaagaactccaggccaacaaggccacacttgtgtgcctgatctccgacttctaccctggggctgtgacagtggcttggaaggccgatggatctcctgtgaaagccggcgtggaaaccaccaagccatccaagcagagcaacaacaaatacgccgccagctcctacctgagcctgacacctgagcagtggaagtcccacagatcctacagctgccaagtgacccacgaaggcagcaccgtggaaaagacagtggcccctacagagtgcagcatccccgaggacacattcttcccaagccccgagagcagctgcgacgtgaagctggtggaaaagagcttcgagacagacaccaacctgaacttccagaacctgagcgtgatcggcttcagaatcctgctgctgaaagtggccggctttaacctgctgatgaccctgcggctgtggtccagccgcgccaagagaagcggatctggcgtgaagcagaccctgaatttcgacctgctgaagctggctggcgacgtggaatccaacccaggcccttctagaggccatatgaccgagtacaagcccacggtgcgcctcgccacccgcgacgacgtccccagggccgtacgcaccctcgccgccgcgttcgccgactaccccgccacgcgccacaccgtcgatccggaccgccacatcgagcgggtcaccgagctgcaagaactcttcctcacgcgcgtcgggctcgacatcggcaaggtgtgggtcgcggacgacggcgccgcggtggcggtctggaccacgccggagagcgtcgaagcgggggcggtgttcgccgagatcggcccgcgcatggccgagttgagcggttcccggctggccgcgcagcaacagatggaaggcctcctggcgccgcaccggcccaaggagcccgcgtggttcctggccaccgtcggcgtctcgcccgaccaccagggcaagggtctgggcagcgccgtcgtgctccccggagtggaggcggccgagcgcgccggggtgcccgccttcctggagacctccgcgccccgcaacctccccttctacgagcggctcggcttcaccgtcaccgccgacgtcgaggtgcccgaaggaccgcgcacctggtgcatgacccgcaagcccggtgcctga

SEQ ID NO: 34148 - DNA, 2628 bp, synthetic construct
  source 1..2628: mol_type = other DNA
atggccttaccagtgaccgccttgctcctgccgctggccttgctgctccacgccgccaggccgctcgaggaggcctctacaaagggaccctccgtgtttcctctggctcccagcagcaagtctacaagcggaggaacagccgctctgggctgcctggtcaaggattactttcccgagcctgtgaccgtgtcctggaatagcggagcactgacaagcggcgtgcacacctttccagccgtgctgcaaagcagcggcctgtactctctgagcagcgtggtcacagtgcctagctctagcctgggcacccagacctacatctgcaatgtgaaccacaagcctagcaacaccaaggtggacaagagagtggaacccaagagctgtatccccgaggacacattcttcccaagccccgagagcagctgcgacgtgaagctggtggaaaagagcttcgagacagacaccaacctgaacttccagaacctgagcgtgatcggcttcagaatcctgctgctgaaagtggccggctttaacctgctgatgaccctgcggctgtggtccagcagggccaagcgatctggatctggagcaacaaacttctcactactcaaacaagcaggtgacgtggaggagaatcccgggcctactagcatggccttaccagtgaccgccttgctcctgccgctggccttgctgctccacgccgccaggccggacatccagatgacacagagccctagcagcctgtctgccagcgtgggagacagagtgaccatcacatgcaaggccagcgaccacatcaacaactggctggcctggtatcagcagaagcctggacaggcccctaagctgctgatctacggcgctaccacactggaaacaggcgtgcccagcagattttctggcagcggctctggcaccgactacaccctgacaatatccagcctccagcctgaggacttcgccacctactactgtcagcagagctggaacaccccttggacattcggccagggcaccaagctggaaatcaagagaggcggaggcggaagtggaggcggaggatctggcggcggaggctctcaagttcagcttcaacagcctggcgctgagctggtcaaacctggcgcttctgtgaagatgagctgcaaagccagcggctacgccttcagcagctcttggatcaactggatgaagcagaaacccggccagggactcgaatggatcggccaaatctatcccggcgacggcgacaccaactacaacggcaagttcaagggcagagccacactgaccgccgatacctctagcagcacagcctacatgcagctgagcagcctgaccagcgaagatagcgccgtgtacttctgtgcccggtccatcacaacagtcgtgggctgcgctatggactattggggccagggaacaagcgtgaccgtgtctagtacgcgtggacagcctaaggccaatcctaccgtgacactgttccctccaagcagcgaagaactccaggccaacaaggccacacttgtgtgcctgatctccgacttctaccctggggctgtgacagtggcttggaaggccgatggatctcctgtgaaagccggcgtggaaaccaccaagccatccaagcagagcaacaacaaatacgccgccagctcctacctgagcctgacacctgagcagtggaagtcccacagatcctacagctgccaagtgacccacgaaggcagcaccgtggaaaagacagtggcccctacagagtgcagcggcagagccgattgcggctttaccagcgagagctaccagcagggcgtgctgagcgccaccatcctgtacgagatcctgctgggcaaggccaccctgtacgccgtgctggtgtctgccctggtgctgatggctatggtcaagcggaaggacagccggggacgcgccaagagaagcggatctggcgtgaagcagaccctgaatttcgacctgctgaagctggctggcgacgtggaatccaacccaggcccttctagaggccatatgaccgagtacaagcccacggtgcgcctcgccacccgcgacgacgtccccagggccgtacgcaccctcgccgccgcgttcgccgactaccccgccacgcgccacaccgtcgatccggaccgccacatcgagcgggtcaccgagctgcaagaactcttcctcacgcgcgtcgggctcgacatcggcaaggtgtgggtcgcggacgacggcgccgcggtggcggtctggaccacgccggagagcgtcgaagcgggggcggtgttcgccgagatcggcccgcgcatggccgagttgagcggttcccggctggccgcgcagcaacagatggaaggcctcctggcgccgcaccggcccaaggagcccgcgtggttcctggccaccgtcggcgtctcgcccgaccaccagggcaagggtctgggcagcgccgtcgtgctccccggagtggaggcggccgagcgcgccggggtgcccgccttcctggagacctccgcgccccgcaacctccccttctacgagcggctcggcttcaccgtcaccgccgacgtcgaggtgcccgaaggaccgcgcacctggtgcatgacccgcaagcccggtgcctga

SEQ ID NO: 34149 - DNA, 1866 bp, synthetic construct
  source 1..1866: mol_type = other DNA
atggccttaccagtgaccgccttgctcctgccgctggccttgctgctccacgccgccaggccggacatccagatgacacagagccctagcagcctgtctgccagcgtgggagacagagtgaccatcacatgcaaggccagcgaccacatcaacaactggctggcctggtatcagcagaagcctggacaggcccctaagctgctgatctacggcgctaccacactggaaacaggcgtgcccagcagattttctggcagcggctctggcaccgactacaccctgacaatatccagcctccagcctgaggacttcgccacctactactgtcagcagagctggaacaccccttggacattcggccagggcaccaagctggaaatcaagagactcgaggacctgaagaacgtgttcccacctgaggtggccgtgttcgagcctagcgaggccgagatcagccacacccagaaagccaccctcgtgtgcctggctaccggcttctaccccgaccatgtggaactgtcttggtgggtcaacggcaaagaggtgcacagcggcgtgtgtaccgacccccagccactgaaagaacagcccgccctgaacgacagccggtactgcctgagcagcagactgagagtgtccgccaccttctggcagaacccccggaaccacttcagatgccaggtgcagttctacggcctgagcgagaacgacgagtggacccaggacagagccaagcccgtgacccagatcgtgtctgccgaagcctggggcagagccgatagcggctttaccagcgagagctaccagcagggcgtgctgagcgccaccatcctgtacgagatcctgctgggcaaggccaccctgtacgccgtgctggtgtctgccctggtgctgatggctatggtcaagcggaaggacagccggggaagggccaagcgatctggatctggagcaacaaacttctcactactcaaacaagcaggtgacgtggaggagaatcccgggcctactagtatggactggatttggcgcatccttttccttgtcggcgctgctaccggcgcgcattccttcgaacaagttcagcttcaacagcctggcgctgagctggtcaaacctggcgcttctgtgaagatgagctgcaaagccagcggctacgccttcagcagctcttggatcaactggatgaagcagaaacccggccagggactcgaatggatcggccaaatctatcccggcgacggcgacaccaactacaacggcaagttcaagggcagagccacactgaccgccgatacctctagcagcacagcctacatgcagctgagcagcctgaccagcgaagatagcgccgtgtacttctgtgcccggtccatcacaacagtcgtgggctgcgctatggactattggggccagggaacaagcgtgaccgtgtctagtacgcgtatccagaaccctgatcctgccgtgtaccagctgcgggatagcaagagcagcgacaagagcgtgtgtctgttcaccgacttcgacagccagaccaacgtgtcccagagcaaggactccgacgtgtacatcaccgataagtgcgtgctggacatgcggagcatggacttcaagagcaactccgccgtggcctggtccaacaagtccgatttcgcctgcgccaacgccttcaacaacagcattatccccgaggacacattcttcccaagccccgagagcagcagcgacgtgaagctggtggaaaagagcttcgagacagacaccaacctgaacttccagaacctgagcgtgatcggcttcagaatcctgctgctgaaagtggccggctttaacctgctgatgaccctgcggctgtggtccagc

SEQ ID NO: 34150 - DNA, 2706 bp, synthetic construct
  source 1..2706: mol_type = other DNA
atggccttaccagtgaccgccttgctcctgccgctggccttgctgctccacgccgccaggccggaggttcagctgcttgagtctggcggaggactggttcaacctggcggaagcctgagactgtcttgtgccgcctctggcagaaccttcagcatgggctggtatagacaggcccctggcaagggcctcgaatttgtgtctgccatcacatacagcggcggcagcccttactacgccgattctgtgaagggcagattcaccatcagccgggacaacagcaagaacaccgtgtacctccagatgaacagcctgagagccgaggacaccgccgtgtactactgtgccgccaatccaacctacggcagcgactggaatgccgagaattggggccagggcacactggtcacagtgtctagtggtaccggcggaggcggatctggcggcggaggtagcggtggcggaggatctgaattcgacatccagatgacacagagccctagcagcctgtctgccagcgtgggagacagagtgaccatcacatgcaaggccagcgaccacatcaacaactggctggcctggtatcagcagaagcctggacaggcccctaagctgctgatctacggcgctaccacactggaaacaggcgtgcccagcagattttctggcagcggctctggcaccgactacaccctgacaatatccagcctccagcctgaggacttcgccacctactactgtcagcagagctggaacaccccttggacattcggccagggcaccaagctggaaatcaagagactcgagatccagaaccctgatcctgccgtgtaccagctgcgggatagcaagagcagcgacaagagcgtgtgtctgttcaccgacttcgacagccagaccaacgtgtcccagagcaaggactccgacgtgtacatcaccgataagtgcgtgctggacatgcggagcatggacttcaagagcaactccgccgtggcctggtccaacaagtccgatttcgcctgcgccaacgccttcaacaacagcattatccccgaggacacattcttcccaagcagcgacgtgccctgcgacgtgaagctggtggaaaagagcttcgagacagacaccaacctgaacttccagaacctgagcgtgatcggcttcagaatcctgctgctgaaagtggccggctttaacctgctgatgaccctgcggctgtggtccagccgcgccaagagaagcggatctggcgtgaagcagaccctgaatttcgacctgctgaagctggctggcgacgtggaatccaacccaggccctactagtaccatggactggatttggcgcatccttttccttgtcggcgctgctaccggcacccattccgggcccgaagtgcaactggttgaatccggtggcggcctggtgcaacccggcggatctctcagacttagctgtgccgcctccggcagaaccttcacaatgggatggtacaggcaggctccagggaaagagagagagttcgtcgccgccatctctctgtctcccacactggcctactacgccgactctgtgaaaggccggttcaccatctccagagataatagcaagaacaccgtggtgctgcaaatgaactctctgagagccgaggatacagccctgtactattgtgccgctgaccggaagtccgtgatgagcatcagacccgattactggggacagggcacactggtcacagtgtctagtggatccggcggcggaggatctggcggaggcggatctgggggcggaggctctttcgaacaagttcagcttcaacagcctggcgctgagctggtcaaacctggcgcttctgtgaagatgagctgcaaagccagcggctacgccttcagcagctcttggatcaactggatgaagcagaaacccggccagggactcgaatggatcggccaaatctatcccggcgacggcgacaccaactacaacggcaagttcaagggcagagccacactgaccgccgatacctctagcagcacagcctacatgcagctgagcagcctgaccagcgaagatagcgccgtgtacttctgtgcccggtccatcacaacagtcgtgggctgcgctatggactattggggccagggaacaagcgtgaccgtgtctagtacgcgtgaggacctgaagaacgtgttcccacctgaggtggccgtgttcgagcctagcaaggccgagatcgcccacacccagaaagccaccctcgtgtgcctggctaccggcttctaccccgaccatgtggaactgtcttggtgggtcaacggcaaagaggtgcacagcggcgtgtgtaccgacccccagccactgaaagaacagcccgccctgaacgacagccggtactgcctgagcagcagactgagagtgtccgccaccttctggcagaacccccggaaccacttcagatgccaggtgcagttctacggcctgagcgagaacgacgagtggacccaggacagagccaagcccgtgacccagatcgtgtctgccgaagcctggggcagagccgattgcggcatcaccagcgccagctaccaccagggcgtgctgagcgccaccatcctgtacgagatcctgctgggcaaggccaccctgtacgccgtgctggtgtctgccctggtgctgatggctatggtcaagcggaaggacagccggggataa

SEQ ID NO: 34151 - DNA, 2706 bp, synthetic construct
  source 1..2706: mol_type = other DNA
atggccttaccagtgaccgccttgctcctgccgctggccttgctgctccacgccgccaggccggaagtgcagctggttgaatctggcggaggactggttcaggctggcggatctctgagactgtcttgtgccgccagcggcagaacctttagcatgggctggtttagacaggcccctggcaaagagagagagttcgtcgccgccatcacatactctggcggcagcccttactacgccgactctgtgaagggcagattcaccatcagccgggacaacgccaagaacaccgtgtacctccagatgaacagcctgaagcctgaggacaccgccgtgtactactgcgccgccaatccaacatacggcagcgactggaacgccgagaattggggccagggaacccaagtgacagtgtctagcggtaccggcggaggcggatctggcggcggaggtagcggtggcggaggatctgaattcgacatccagatgacacagagccctagcagcctgtctgccagcgtgggagacagagtgaccatcacatgcaaggccagcgaccacatcaacaactggctggcctggtatcagcagaagcctggacaggcccctaagctgctgatctacggcgctaccacactggaaacaggcgtgcccagcagattttctggcagcggctctggcaccgactacaccctgacaatatccagcctccagcctgaggacttcgccacctactactgtcagcagagctggaacaccccttggacattcggccagggcaccaagctggaaatcaagagactcgagatccagaaccctgatcctgccgtgtaccagctgcgggatagcaagagcagcgacaagagcgtgtgtctgttcaccgacttcgacagccagaccaacgtgtcccagagcaaggactccgacgtgtacatcaccgataagtgcgtgctggacatgcggagcatggacttcaagagcaactccgccgtggcctggtccaacaagtccgatttcgcctgcgccaacgccttcaacaacagcattatccccgaggacacattcttcccaagcagcgacgtgccctgcgacgtgaagctggtggaaaagagcttcgagacagacaccaacctgaacttccagaacctgagcgtgatcggcttcagaatcctgctgctgaaagtggccggctttaacctgctgatgaccctgcggctgtggtccagccgcgccaagagaagcggatctggcgtgaagcagaccctgaatttcgacctgctgaagctggctggcgacgtggaatccaacccaggccctactagtaccatggactggatttggcgcatccttttccttgtcggcgctgctaccggcgcccattccgggcccgaagtgcaactggttgaatccggtggcggcctggtgcaacccggcggatctctcagacttagctgtgccgcctccggcagaaccttcacaatgggatggtacaggcaggctccagggaaagagagagagttcgtcgccgccatctctctgtctcccacactggcctactacgccgactctgtgaaaggccggttcaccatctccagagataatagcaagaacaccgtggtgctgcaaatgaactctctgagagccgaggatacagccctgtactattgtgccgctgaccggaagtccgtgatgagcatcagacccgattactggggacagggcacactggtcacagtgtctagtggatccggcggcggaggatctggcggaggcggatctgggggcggaggctctttcgaacaagttcagcttcaacagcctggcgctgagctggtcaaacctggcgcttctgtgaagatgagctgcaaagccagcggctacgccttcagcagctcttggatcaactggatgaagcagaaacccggccagggactcgaatggatcggccaaatctatcccggcgacggcgacaccaactacaacggcaagttcaagggcagagccacactgaccgccgatacctctagcagcacagcctacatgcagctgagcagcctgaccagcgaagatagcgccgtgtacttctgtgcccggtccatcacaacagtcgtgggctgcgctatggactattggggccagggaacaagcgtgaccgtgtctagtacgcgtgaggacctgaagaacgtgttcccacctgaggtggccgtgttcgagcctagcaaggccgagatcgcccacacccagaaagccaccctcgtgtgcctggctaccggcttctaccccgaccatgtggaactgtcttggtgggtcaacggcaaagaggtgcacagcggcgtgtgtaccgacccccagccactgaaagaacagcccgccctgaacgacagccggtactgcctgagcagcagactgagagtgtccgccaccttctggcagaacccccggaaccacttcagatgccaggtgcagttctacggcctgagcgagaacgacgagtggacccaggacagagccaagcccgtgacccagatcgtgtctgccgaagcctggggcagagccgattgcggcatcaccagcgccagctaccaccagggcgtgctgagcgccaccatcctgtacgagatcctgctgggcaaggccaccctgtacgccgtgctggtgtctgccctggtgctgatggctatggtcaagcggaaggacagccggggataa

SEQ ID NO: 34152 - DNA, 2697 bp, synthetic construct
  source 1..2697: mol_type = other DNA
atggccttaccagtgaccgccttgctcctgccgctggccttgctgctccacgccgccaggccggaagtgcagctggttgaatctggcggaggactggttcaggctggcggatctctgagactgtcttgtgccgccagcggcagaacctttagcatgggctggtttagacaggcccctggcaaagagagagagttcgtcgccgccatcacatactctggcggcagcccttactacgccgactctgtgaagggcagattcaccatcagccgggacaacgccaagaacaccgtgtacctccagatgaacagcctgaagcctgaggacaccgccgtgtactactgcgccgccaatccaacatacggcagcgactggaacgccgagaattggggccagggaacccaagtgacagtgtctagcggtaccggcggaggcggatctggcggcggaggtagcggtggcggaggatctgaattcgacatccagatgacacagagccctagcagcctgtctgccagcgtgggagacagagtgaccatcacatgcaaggccagcgaccacatcaacaactggctggcctggtatcagcagaagcctggacaggcccctaagctgctgatctacggcgctaccacactggaaacaggcgtgcccagcagattttctggcagcggctctggcaccgactacaccctgacaatatccagcctccagcctgaggacttcgccacctactactgtcagcagagctggaacaccccttggacattcggccagggcaccaagctggaaatcaagagactcgaggacctgaagaacgtgttcccacctgaggtggccgtgttcgagcctagcgaggccgagatcagccacacccagaaagccaccctcgtgtgcctggctaccggcttctaccccgaccatgtggaactgtcttggtgggtcaacggcaaagaggtgcacagcggcgtgtgtaccgacccccagccactgaaagaacagcccgccctgaacgacagccggtactgcctgagcagcagactgagagtgtccgccaccttctggcagaacccccggaaccacttcagatgccaggtgcagttctacggcctgagcgagaacgacgagtggacccaggacagagccaagcccgtgacccagatcgtgtctgccgaagcctggggcagagccgattgcggctttaccagcgagagctaccagcagggcgtgctgagcgccaccatcctgtacgagatcctgctgggcaaggccaccctgtacgccgtgctggtgtctgccctggtgctgatggctatggtcaagcggaaggacagccggggaagggccaagcgatctggatctggagcaacaaacttctcactactcaaacaagcaggtgacgtggaggagaatcccgggcctactagtgccaccatggactggatttggcgcatccttttccttgtcggcgctgctaccggcgcccattccgggcccgaagtgcaactggttgaatccggtggcggcctggtgcaagcaggcggatctctcagacttagctgtgccgcctccggcagaaccttcacaatgggatggtttaggcaggctccagggaaagagagagagttcgtcgccgccatctctctgtctcccacactggcctactacgccgactctgtgaaaggccggttcaccatctccagagataatgccaagaacaccgtggtgctgcaaatgaactctctgaaacccgaggatacagccctgtactattgtgccgctgaccggaagtccgtgatgagcatcagacccgattactggggacagggcacacaagtcacagtgtcctctggatccggcggcggaggatctggcggaggcggatctgggggcggaggctctttcgaacaagttcagcttcaacagcctggcgctgagctggtcaaacctggcgcttctgtgaagatgagctgcaaagccagcggctacgccttcagcagctcttggatcaactggatgaagcagaaacccggccagggactcgaatggatcggccaaatctatcccggcgacggcgacaccaactacaacggcaagttcaagggcagagccacactgaccgccgatacctctagcagcacagcctacatgcagctgagcagcctgaccagcgaagatagcgccgtgtacttctgtgcccggtccatcacaacagtcgtgggctgcgctatggactattggggccagggaacaagcgtgaccgtgtctagtacgcgtatccagaaccctgatcctgccgtgtaccagctgcgggatagcaagagcagcgacaagagcgtgtgtctgttcaccgacttcgacagccagaccaacgtgtcccagagcaaggactccgacgtgtacatcaccgataagtgcgtgctggacatgcggagcatggacttcaagagcaactccgccgtggcctggtccaacaagtccgatttcgcctgcgccaacgccttcaacaacagcattatccccgaggacacattcttcccaagccccgagagcagctgcgacgtgaagctggtggaaaagagcttcgagacagacaccaacctgaacttccagaacctgagcgtgatcggcttcagaatcctgctgctgaaagtggccggctttaacctgctgatgaccctgcggctgtggtccagctaa

SEQ ID NO: 34153 - DNA, 2310 bp, synthetic construct
  source 1..2310: mol_type = other DNA
atggccttaccagtgaccgccttgctcctgccgctggccttgctgctccacgccgccaggccggaagtgcagctggttgaatctggcggaggactggttcagcctggcggatctctgagactgagctgtgaagccagcggcttcgccagcgacgattacatcatcggctggttcagacaggcccctggcaaagagagagagggcgtcagctgcatcagctctaagtacgccaacaccgtgtacaccgacagcgtgaagggcagattcagactgagcagaggcaccgccaagaataccgtgtacctccagatgagcgccctgaagcctgaggataccgccgtgtactactgcgctatggacagccgcagagtgacatgccctgagatcagcaccatgcaccggaacttcgattcttggggccagggcacactggtcacagtgtcatctggtaccggcggaggcggatctggcggcggaggtagcggtggcggaggatctgaattcgacatccagatgacacagagccctagcagcctgtctgccagcgtgggagacagagtgaccatcacatgcaaggccagcgaccacatcaacaactggctggcctggtatcagcagaagcctggacaggcccctaagctgctgatctacggcgctaccacactggaaacaggcgtgcccagcagattttctggcagcggctctggcaccgactacaccctgacaatatccagcctccagcctgaggacttcgccacctactactgtcagcagagctggaacaccccttggacattcggccagggcaccaagctggaaatcaagagactcgaggacctgaagaacgtgttcccacctgaggtggccgtgttcgagcctagcaaggccgagatcgcccacacccagaaagccaccctcgtgtgcctggctaccggcttctaccccgaccatgtggaactgtcttggtgggtcaacggcaaagaggtgcacagcggcgtgtgtaccgacccccagccactgaaagaacagcccgccctgaacgacagccggtactgcctgagcagcagactgagagtgtccgccaccttctggcagaacccccggaaccacttcagatgccaggtgcagttctacggcctgagcgagaacgacgagtggacccaggacagagccaagcccgtgacccagatcgtgtctgccgaagcctggggcagagccgattgcggcatcaccagcgccagctaccaccagggcgtgctgagcgccaccatcctgtacgagatcctgctgggcaaggccaccctgtacgccgtgctggtgtctgccctggtgctgatggctatggtcaagcggaaggacagccggggaagggccaagcgatctggatctggagcaacaaacttctcactactcaaacaagcaggtgacgtggaggagaatcccgggcctactagtatggactggatttggcgcatccttttccttgtcggcgctgctaccggcgcgcattccttcgaacaagttcagcttcaacagcctggcgctgagctggtcaaacctggcgcttctgtgaagatgagctgcaaagccagcggctacgccttcagcagctcttggatcaactggatgaagcagaaacccggccagggactcgaatggatcggccaaatctatcccggcgacggcgacaccaactacaacggcaagttcaagggcagagccacactgaccgccgatacctctagcagcacagcctacatgcagctgagcagcctgaccagcgaagatagcgccgtgtacttctgtgcccggtccatcacaacagtcgtgggctgcgctatggactattggggccagggaacaagcgtgaccgtgtctagtacgcgtatccagaaccctgatcctgccgtgtaccagctgcgggatagcaagagcagcgacaagagcgtgtgtctgttcaccgacttcgacagccagaccaacgtgtcccagagcaaggactccgacgtgtacatcaccgataagtgcgtgctggacatgcggagcatggacttcaagagcaactccgccgtggcctggtccaacaagtccgatttcgcctgcgccaacgccttcaacaacagcattatccccgaggacacattcttcccaagcagcgacgtgccctgcgacgtgaagctggtggaaaagagcttcgagacagacaccaacctgaacttccagaacctgagcgtgatcggcttcagaatcctgctgctgaaagtggccggctttaacctgctgatgaccctgcggctgtggtccagctaa

SEQ ID NO: 34154 - DNA, 2283 bp, synthetic construct
  source 1..2283: mol_type = other DNA
atggccttaccagtgaccgccttgctcctgccgctggccttgctgctccacgccgccaggccggacatccagatgacacagagccctagcagcctgtctgccagcgtgggagacagagtgaccatcacatgcaaggccagcgaccacatcaacaactggctggcctggtatcagcagaagcctggacaggcccctaagctgctgatctacggcgctaccacactggaaacaggcgtgcccagcagattttctggcagcggctctggcaccgactacaccctgacaatatccagcctccagcctgaggacttcgccacctactactgtcagcagagctggaacaccccttggacattcggccagggcaccaagctggaaatcaagagactcgaggacctgaagaacgtgttcccacctgaggtggccgtgttcgagcctagcgaggccgagatcagccacacccagaaagccaccctcgtgtgcctggctaccggcttctaccccgaccatgtggaactgtcttggtgggtcaacggcaaagaggtgcacagcggcgtgtgtaccgacccccagccactgaaagaacagcccgccctgaacgacagccggtactgcctgagcagcagactgagagtgtccgccaccttctggcagaacccccggaaccacttcagatgccaggtgcagttctacggcctgagcgagaacgacgagtggacccaggacagagccaagcccgtgacccagatcgtgtctgccgaagcctggggcagagccgattgcggctttaccagcgagagctaccagcagggcgtgctgagcgccaccatcctgtacgagatcctgctgggcaaggccaccctgtacgccgtgctggtgtctgccctggtgctgatggctatggtcaagcggaaggacagccggggaagggccaagcgatctggatctggagcaacaaacttctcactactcaaacaagcaggtgacgtggaggagaatcccgggcctactagtaccatggactggatttggcgcatccttttccttgtcggcgctgctaccggcgcccattccgggcccgaagtgcaactggttgaatccggtggcggcctggtgcaacccggcggatctctcagacttagctgtgccgcctccggcagaaccttcacaatgggatggtacaggcaggctccagggaaagagagagagttcgtcgccgccatctctctgtctcccacactggcctactacgccgactctgtgaaaggccggttcaccatctccagagataatagcaagaacaccgtggtgctgcaaatgaactctctgagagccgaggatacagccctgtactattgtgccgctgaccggaagtccgtgatgagcatcagacccgattactggggacagggcacactggtcacagtgtctagtggatccggcggcggaggatctggcggaggcggatctgggggcggaggctctttcgaacaagttcagcttcaacagcctggcgctgagctggtcaaacctggcgcttctgtgaagatgagctgcaaagccagcggctacgccttcagcagctcttggatcaactggatgaagcagaaacccggccagggactcgaatggatcggccaaatctatcccggcgacggcgacaccaactacaacggcaagttcaagggcagagccacactgaccgccgatacctctagcagcacagcctacatgcagctgagcagcctgaccagcgaagatagcgccgtgtacttctgtgcccggtccatcacaacagtcgtgggctgcgctatggactattggggccagggaacaagcgtgaccgtgtctagtacgcgtatccagaaccctgatcctgccgtgtaccagctgcgggatagcaagagcagcgacaagagcgtgtgtctgttcaccgacttcgacagccagaccaacgtgtcccagagcaaggactccgacgtgtacatcaccgataagtgcgtgctggacatgcggagcatggacttcaagagcaactccgccgtggcctggtccaacaagtccgatttcgcctgcgccaacgccttcaacaacagcattatccccgaggacacattcttcccaagccccgagagcagctgcgacgtgaagctggtggaaaagagcttcgagacagacaccaacctgaacttccagaacctgagcgtgatcggcttcagaatcctgctgctgaaagtggccggctttaacctgctgatgaccctgcggctgtggtccagctaa

SEQ ID NO: 34155 - DNA, 2301 bp, synthetic construct
  source 1..2301: mol_type = other DNA
atggccttaccagtgaccgccttgctcctgccgctggccttgctgctccacgccgccaggccggacatccagatgacacagagccctagcagcctgtctgccagcgtgggagacagagtgaccatcacatgcaaggccagcgaccacatcaacaactggctggcctggtatcagcagaagcctggacaggcccctaagctgctgatctacggcgctaccacactggaaacaggcgtgcccagcagattttctggcagcggctctggcaccgactacaccctgacaatatccagcctccagcctgaggacttcgccacctactactgtcagcagagctggaacaccccttggacattcggccagggcaccaagctggaaatcaagagactcgaggacctgaagaacgtgttcccacctgaggtggccgtgttcgagcctagcgaggccgagatcagccacacccagaaagccaccctcgtgtgcctggctaccggcttctaccccgaccatgtggaactgtcttggtgggtcaacggcaaagaggtgcacagcggcgtgtgtaccgacccccagccactgaaagaacagcccgccctgaacgacagccggtactgcctgagcagcagactgagagtgtccgccaccttctggcagaacccccggaaccacttcagatgccaggtgcagttctacggcctgagcgagaacgacgagtggacccaggacagagccaagcccgtgacccagatcgtgtctgccgaagcctggggcagagccgattgcggctttaccagcgagagctaccagcagggcgtgctgagcgccaccatcctgtacgagatcctgctgggcaaggccaccctgtacgccgtgctggtgtctgccctggtgctgatggctatggtcaagcggaaggacagccggggaagggccaagcgatctggatctggagcaacaaacttctcactactcaaacaagcaggtgacgtggaggagaatcccgggcctactagtaccatggactggatttggcgcatccttttccttgtcggcgctgctaccggcgcccattccgggccccaggtgcagctggttgaatctggcggaggactggttcagcctggcggatctctgagactgtcttgtgccgccagcggcaacatcaacagcagaaactgcatgggctggttcagacaggcccctggcaagggaagagaaggcgtggcagctatcggccaagtgaccggcagaacctactacgtggacagcgtgaagggcagattcaccatcagcctggacaacagcaagaacaccctgtacctccagatgaacagcctgagagccgaggacaccgccgtgtactattgtgctgctgcccctggctgtctgctgtctgcacttagaagcgccgactacagaaactggggccagggcacactggtcaccgtttcttctggatccggcggcggaggatctggcggaggcggatctgggggcggaggctctttcgaacaagttcagcttcaacagcctggcgctgagctggtcaaacctggcgcttctgtgaagatgagctgcaaagccagcggctacgccttcagcagctcttggatcaactggatgaagcagaaacccggccagggactcgaatggatcggccaaatctatcccggcgacggcgacaccaactacaacggcaagttcaagggcagagccacactgaccgccgatacctctagcagcacagcctacatgcagctgagcagcctgaccagcgaagatagcgccgtgtacttctgtgcccggtccatcacaacagtcgtgggctgcgctatggactattggggccagggaacaagcgtgaccgtgtctagtacgcgtatccagaaccctgatcctgccgtgtaccagctgcgggatagcaagagcagcgacaagagcgtgtgtctgttcaccgacttcgacagccagaccaacgtgtcccagagcaaggactccgacgtgtacatcaccgataagtgcgtgctggacatgcggagcatggacttcaagagcaactccgccgtggcctggtccaacaagtccgatttcgcctgcgccaacgccttcaacaacagcattatccccgaggacacattcttcccaagccccgagagcagctgcgacgtgaagctggtggaaaagagcttcgagacagacaccaacctgaacttccagaacctgagcgtgatcggcttcagaatcctgctgctgaaagtggccggctttaacctgctgatgaccctgcggctgtggtccagc

SEQ ID NO: 34156 - DNA, 2304 bp, synthetic construct
  source 1..2304: mol_type = other DNA
atggccttaccagtgaccgccttgctcctgccgctggccttgctgctccacgccgccaggccggacatccagatgacacagagccctagcagcctgtctgccagcgtgggagacagagtgaccatcacatgcaaggccagcgaccacatcaacaactggctggcctggtatcagcagaagcctggacaggcccctaagctgctgatctacggcgctaccacactggaaacaggcgtgcccagcagattttctggcagcggctctggcaccgactacaccctgacaatatccagcctccagcctgaggacttcgccacctactactgtcagcagagctggaacaccccttggacattcggccagggcaccaagctggaaatcaagagactcgaggacctgaagaacgtgttcccacctgaggtggccgtgttcgagcctagcgaggccgagatcagccacacccagaaagccaccctcgtgtgcctggctaccggcttctaccccgaccatgtggaactgtcttggtgggtcaacggcaaagaggtgcacagcggcgtgtgtaccgacccccagccactgaaagaacagcccgccctgaacgacagccggtactgcctgagcagcagactgagagtgtccgccaccttctggcagaacccccggaaccacttcagatgccaggtgcagttctacggcctgagcgagaacgacgagtggacccaggacagagccaagcccgtgacccagatcgtgtctgccgaagcctggggcagagccgattgcggctttaccagcgagagctaccagcagggcgtgctgagcgccaccatcctgtacgagatcctgctgggcaaggccaccctgtacgccgtgctggtgtctgccctggtgctgatggctatggtcaagcggaaggacagccggggaagggccaagcgatctggatctggagcaacaaacttctcactactcaaacaagcaggtgacgtggaggagaatcccgggcctactagtaccatggactggatttggcgcatccttttccttgtcggcgctgctaccggcgcccattccgggccccaggtgcagctggttgaatctggcggaggatctgttcaggctggcggctctctgagactgtcttgtggcgcttccggcaacatcagcagcagaaactgcatgggctggttcagacaggcccctggcaaagagagagaaggcgttgccgccatcggacaagtgaccggcagatcctactacgtggacagcgtgaagggcagattcaccatcagcctggacaacgccaagaacaccctgtacctccagatgaacacactgaagcccgaggacaccgccatgtactactgtgctgctgcccctggctgtctgctgtctgcacttagaagcgccgactacagaaactggggccagggaacccaagtgacagtgtctagtggatccggcggcggaggatctggcggaggcggatctgggggcggaggctctttcgaacaagttcagcttcaacagcctggcgctgagctggtcaaacctggcgcttctgtgaagatgagctgcaaagccagcggctacgccttcagcagctcttggatcaactggatgaagcagaaacccggccagggactcgaatggatcggccaaatctatcccggcgacggcgacaccaactacaacggcaagttcaagggcagagccacactgaccgccgatacctctagcagcacagcctacatgcagctgagcagcctgaccagcgaagatagcgccgtgtacttctgtgcccggtccatcacaacagtcgtgggctgcgctatggactattggggccagggaacaagcgtgaccgtgtctagtacgcgtatccagaaccctgatcctgccgtgtaccagctgcgggatagcaagagcagcgacaagagcgtgtgtctgttcaccgacttcgacagccagaccaacgtgtcccagagcaaggactccgacgtgtacatcaccgataagtgcgtgctggacatgcggagcatggacttcaagagcaactccgccgtggcctggtccaacaagtccgatttcgcctgcgccaacgccttcaacaacagcattatccccgaggacacattcttcccaagccccgagagcagctgcgacgtgaagctggtggaaaagagcttcgagacagacaccaacctgaacttccagaacctgagcgtgatcggcttcagaatcctgctgctgaaagtggccggctttaacctgctgatgaccctgcggctgtggtccagctaa

SEQ ID NO: 34157 - DNA, 2727 bp, synthetic construct
  source 1..2727: mol_type = other DNA
atggccttaccagtgaccgccttgctcctgccgctggccttgctgctccacgccgccaggccggaagtgcagctggttgaatctggcggaggactggttcaggctggcggatctctgagactgtcttgtgccgccagcggcagaacctttagcatgggctggtttagacaggcccctggcaaagagagagagttcgtcgccgccatcacatactctggcggcagcccttactacgccgactctgtgaagggcagattcaccatcagccgggacaacgccaagaacaccgtgtacctccagatgaacagcctgaagcctgaggacaccgccgtgtactactgcgccgccaatccaacatacggcagcgactggaacgccgagaattggggccagggaacccaagtgacagtgtctagcggtaccggcggaggcggatctggcggcggaggtagcggtggcggaggatctgaattcgacatccagatgacacagagccctagcagcctgtctgccagcgtgggagacagagtgaccatcacatgcaaggccagcgaccacatcaacaactggctggcctggtatcagcagaagcctggacaggcccctaagctgctgatctacggcgctaccacactggaaacaggcgtgcccagcagattttctggcagcggctctggcaccgactacaccctgacaatatccagcctccagcctgaggacttcgccacctactactgtcagcagagctggaacaccccttggacattcggccagggcaccaagctggaaatcaagagactcgagatccagaaccctgatcctgccgtgtaccagctgcgggatagcaagagcagcgacaagagcgtgtgtctgttcaccgacttcgacagccagaccaacgtgtcccagagcaaggactccgacgtgtacatcaccgataagtgcgtgctggacatgcggagcatggacttcaagagcaactccgccgtggcctggtccaacaagtccgatttcgcctgcgccaacgccttcaacaacagcattatccccgaggacacattcttcccaagcagcgacgtgccctgcgacgtgaagctggtggaaaagagcttcgagacagacaccaacctgaacttccagaacctgagcgtgatcggcttcagaatcctgctgctgaaagtggccggctttaacctgctgatgaccctgcggctgtggtccagccgcgccaagagaagcggatctggcgtgaagcagaccctgaatttcgacctgctgaagctggctggcgacgtggaatccaacccaggccctactagtaccatggactggatttggcgcatccttttccttgtcggcgctgctaccggcgcccattccgggccccaggtgcagctggttgaatctggcggaggatctgttcaggctggcggctctctgagactgtcttgtggcgcttccggcaacatcagcagcagaaactgcatgggctggttcagacaggcccctggcaaagagagagaaggcgttgccgccatcggacaagtgaccggcagatcctactacgtggacagcgtgaagggcagattcaccatcagcctggacaacgccaagaacaccctgtacctccagatgaacacactgaagcccgaggacaccgccatgtactactgtgctgctgcccctggctgtctgctgtctgcacttagaagcgccgactacagaaactggggccagggaacccaagtgacagtgtctagtggatccggcggcggaggatctggcggaggcggatctgggggcggaggctctttcgaacaagttcagcttcaacagcctggcgctgagctggtcaaacctggcgcttctgtgaagatgagctgcaaagccagcggctacgccttcagcagctcttggatcaactggatgaagcagaaacccggccagggactcgaatggatcggccaaatctatcccggcgacggcgacaccaactacaacggcaagttcaagggcagagccacactgaccgccgatacctctagcagcacagcctacatgcagctgagcagcctgaccagcgaagatagcgccgtgtacttctgtgcccggtccatcacaacagtcgtgggctgcgctatggactattggggccagggaacaagcgtgaccgtgtctagtacgcgtgaggacctgaagaacgtgttcccacctgaggtggccgtgttcgagcctagcaaggccgagatcgcccacacccagaaagccaccctcgtgtgcctggctaccggcttctaccccgaccatgtggaactgtcttggtgggtcaacggcaaagaggtgcacagcggcgtgtgtaccgacccccagccactgaaagaacagcccgccctgaacgacagccggtactgcctgagcagcagactgagagtgtccgccaccttctggcagaacccccggaaccacttcagatgccaggtgcagttctacggcctgagcgagaacgacgagtggacccaggacagagccaagcccgtgacccagatcgtgtctgccgaagcctggggcagagccgattgcggcatcaccagcgccagctaccaccagggcgtgctgagcgccaccatcctgtacgagatcctgctgggcaaggccaccctgtacgccgtgctggtgtctgccctggtgctgatggctatggtcaagcggaaggacagccggggataa

SEQ ID NO: 34158 - DNA, 2718 bp, synthetic construct
  source 1..2718: mol_type = other DNA
atggccttaccagtgaccgccttgctcctgccgctggccttgctgctccacgccgccaggccgcaggtgcagctggttgaatctggcggaggatctgttcaggctggcggctctctgagactgtcttgtggcgcttccggcaacatcagcagcagaaactgcatgggctggttcagacaggcccctggcaaagagagagaaggcgttgccgccatcggacaagtgaccggcagatcctactacgtggacagcgtgaagggcagattcaccatcagcctggacaacgccaagaacaccctgtacctccagatgaacacactgaagcccgaggacaccgccatgtactactgtgctgctgcccctggctgtctgctgtctgcacttagaagcgccgactacagaaactggggccagggaacccaagtgacagtgtctagtggtaccggcggaggcggatctggcggcggaggtagcggtggcggaggatctgaattcgacatccagatgacacagagccctagcagcctgtctgccagcgtgggagacagagtgaccatcacatgcaaggccagcgaccacatcaacaactggctggcctggtatcagcagaagcctggacaggcccctaagctgctgatctacggcgctaccacactggaaacaggcgtgcccagcagattttctggcagcggctctggcaccgactacaccctgacaatatccagcctccagcctgaggacttcgccacctactactgtcagcagagctggaacaccccttggacattcggccagggcaccaagctggaaatcaagagactcgaggacctgaagaacgtgttcccacctgaggtggccgtgttcgagcctagcgaggccgagatcagccacacccagaaagccaccctcgtgtgcctggctaccggcttctaccccgaccatgtggaactgtcttggtgggtcaacggcaaagaggtgcacagcggcgtgtgtaccgacccccagccactgaaagaacagcccgccctgaacgacagccggtactgcctgagcagcagactgagagtgtccgccaccttctggcagaacccccggaaccacttcagatgccaggtgcagttctacggcctgagcgagaacgacgagtggacccaggacagagccaagcccgtgacccagatcgtgtctgccgaagcctggggcagagccgattgcggctttaccagcgagagctaccagcagggcgtgctgagcgccaccatcctgtacgagatcctgctgggcaaggccaccctgtacgccgtgctggtgtctgccctggtgctgatggctatggtcaagcggaaggacagccggggaagggccaagcgatctggatctggagcaacaaacttctcactactcaaacaagcaggtgacgtggaggagaatcccgggcctactagtgccaccatggactggatttggcgcatccttttccttgtcggcgctgctaccggcgcccattccgggcccgaagtgcaactggttgaatccggtggcggcctggtgcaagcaggcggatctctcagacttagctgtgccgcctccggcagaaccttcacaatgggatggtttaggcaggctccagggaaagagagagagttcgtcgccgccatctctctgtctcccacactggcctactacgccgactctgtgaaaggccggttcaccatctccagagataatgccaagaacaccgtggtgctgcaaatgaactctctgaaacccgaggatacagccctgtactattgtgccgctgaccggaagtccgtgatgagcatcagacccgattactggggacagggcacacaagtcacagtgtcctctggatccggcggcggaggatctggcggaggcggatctgggggcggaggctctttcgaacaagttcagcttcaacagcctggcgctgagctggtcaaacctggcgcttctgtgaagatgagctgcaaagccagcggctacgccttcagcagctcttggatcaactggatgaagcagaaacccggccagggactcgaatggatcggccaaatctatcccggcgacggcgacaccaactacaacggcaagttcaagggcagagccacactgaccgccgatacctctagcagcacagcctacatgcagctgagcagcctgaccagcgaagatagcgccgtgtacttctgtgcccggtccatcacaacagtcgtgggctgcgctatggactattggggccagggaacaagcgtgaccgtgtctagtacgcgtatccagaaccctgatcctgccgtgtaccagctgcgggatagcaagagcagcgacaagagcgtgtgtctgttcaccgacttcgacagccagaccaacgtgtcccagagcaaggactccgacgtgtacatcaccgataagtgcgtgctggacatgcggagcatggacttcaagagcaactccgccgtggcctggtccaacaagtccgatttcgcctgcgccaacgccttcaacaacagcattatccccgaggacacattcttcccaagccccgagagcagctgcgacgtgaagctggtggaaaagagcttcgagacagacaccaacctgaacttccagaacctgagcgtgatcggcttcagaatcctgctgctgaaagtggccggctttaacctgctgatgaccctgcggctgtggtccagctaa

SEQ ID NO: 34159 - DNA, 2307 bp, synthetic construct
  source 1..2307: mol_type = other DNA
atggccttaccagtgaccgccttgctcctgccgctggccttgctgctccacgccgccaggccgcaggtgcagctggttgaatctggcggaggatctgttcaggctggcggctctctgagactgtcttgtggcgcttccggcaacatcagcagcagaaactgcatgggctggttcagacaggcccctggcaaagagagagaaggcgttgccgccatcggacaagtgaccggcagatcctactacgtggacagcgtgaagggcagattcaccatcagcctggacaacgccaagaacaccctgtacctccagatgaacacactgaagcccgaggacaccgccatgtactactgtgctgctgcccctggctgtctgctgtctgcacttagaagcgccgactacagaaactggggccagggaacccaagtgacagtgtctagtggtaccggcggaggcggatctggcggcggaggtagcggtggcggaggatctgaattcgacatccagatgacacagagccctagcagcctgtctgccagcgtgggagacagagtgaccatcacatgcaaggccagcgaccacatcaacaactggctggcctggtatcagcagaagcctggacaggcccctaagctgctgatctacggcgctaccacactggaaacaggcgtgcccagcagattttctggcagcggctctggcaccgactacaccctgacaatatccagcctccagcctgaggacttcgccacctactactgtcagcagagctggaacaccccttggacattcggccagggcaccaagctggaaatcaagagactcgaggacctgaagaacgtgttcccacctgaggtggccgtgttcgagcctagcgaggccgagatcagccacacccagaaagccaccctcgtgtgcctggctaccggcttctaccccgaccatgtggaactgtcttggtgggtcaacggcaaagaggtgcacagcggcgtgtgtaccgacccccagccactgaaagaacagcccgccctgaacgacagccggtactgcctgagcagcagactgagagtgtccgccaccttctggcagaacccccggaaccacttcagatgccaggtgcagttctacggcctgagcgagaacgacgagtggacccaggacagagccaagcccgtgacccagatcgtgtctgccgaagcctggggcagagccgattgcggctttaccagcgagagctaccagcagggcgtgctgagcgccaccatcctgtacgagatcctgctgggcaaggccaccctgtacgccgtgctggtgtctgccctggtgctgatggctatggtcaagcggaaggacagccggggaagggccaagcgatctggatctggagcaacaaacttctcactactcaaacaagcaggtgacgtggaggagaatcccgggcctactagtgccaccatggactggatttggcgcatccttttccttgtcggcgctgctaccggcgcccattccttcgaacaagttcagcttcaacagcctggcgctgagctggtcaaacctggcgcttctgtgaagatgagctgcaaagccagcggctacgccttcagcagctcttggatcaactggatgaagcagaaacccggccagggactcgaatggatcggccaaatctatcccggcgacggcgacaccaactacaacggcaagttcaagggcagagccacactgaccgccgatacctctagcagcacagcctacatgcagctgagcagcctgaccagcgaagatagcgccgtgtacttctgtgcccggtccatcacaacagtcgtgggctgcgctatggactattggggccagggaacaagcgtgaccgtgtctagtacgcgtatccagaaccctgatcctgccgtgtaccagctgcgggatagcaagagcagcgacaagagcgtgtgtctgttcaccgacttcgacagccagaccaacgtgtcccagagcaaggactccgacgtgtacatcaccgataagtgcgtgctggacatgcggagcatggacttcaagagcaactccgccgtggcctggtccaacaagtccgatttcgcctgcgccaacgccttcaacaacagcattatccccgaggacacattcttcccaagccccgagagcagctgcgacgtgaagctggtggaaaagagcttcgagacagacaccaacctgaacttccagaacctgagcgtgatcggcttcagaatcctgctgctgaaagtggccggctttaacctgctgatgaccctgcggctgtggtccagctaa

SEQ ID NO: 34160 - DNA, 2307 bp, synthetic construct
  source 1..2307: mol_type = other DNA
atggccttaccagtgaccgccttgctcctgccgctggccttgctgctccacgccgccaggccgcaagttcagctggtggaaagcggtggtggcgttgtgcaacctggtggaagtctgaggctgagctgtgccgcttctggcctgagctttagcacctacactgtggcctggttcaggcaggctcccggaaagggtcttgaaggcgtggccgccattccttacaccagccagcacatggtgtacacagacagcgtcagaggccggttcaccatcagcagagacaactccaagaatacgctctatctccagatgaactctctgcgcgccgaagatacagccgtgtattactgcgccaccgacagacggcctggcacctctatgctggctatcaacggctacaacagatggggacagggaaccaccgtgaccgtgtcatctggtaccggcggaggcggatctggcggcggaggtagcggtggcggaggatctgaattcgacatccagatgacacagagccctagcagcctgtctgccagcgtgggagacagagtgaccatcacatgcaaggccagcgaccacatcaacaactggctggcctggtatcagcagaagcctggacaggcccctaagctgctgatctacggcgctaccacactggaaacaggcgtgcccagcagattttctggcagcggctctggcaccgactacaccctgacaatatccagcctccagcctgaggacttcgccacctactactgtcagcagagctggaacaccccttggacattcggccagggcaccaagctggaaatcaagagactcgaggacctgaagaacgtgttcccacctgaggtggccgtgttcgagcctagcgaggccgagatcagccacacccagaaagccaccctcgtgtgcctggctaccggcttctaccccgaccatgtggaactgtcttggtgggtcaacggcaaagaggtgcacagcggcgtgtgtaccgacccccagccactgaaagaacagcccgccctgaacgacagccggtactgcctgagcagcagactgagagtgtccgccaccttctggcagaacccccggaaccacttcagatgccaggtgcagttctacggcctgagcgagaacgacgagtggacccaggacagagccaagcccgtgacccagatcgtgtctgccgaagcctggggcagagccgattgcggctttaccagcgagagctaccagcagggcgtgctgagcgccaccatcctgtacgagatcctgctgggcaaggccaccctgtacgccgtgctggtgtctgccctggtgctgatggctatggtcaagcggaaggacagccggggaagggccaagcgatctggatctggagcaacaaacttctcactactcaaacaagcaggtgacgtggaggagaatcccgggcctactagtgccaccatggactggatttggcgcatccttttccttgtcggcgctgctaccggcgcccattccttcgaacaagttcagcttcaacagcctggcgctgagctggtcaaacctggcgcttctgtgaagatgagctgcaaagccagcggctacgccttcagcagctcttggatcaactggatgaagcagaaacccggccagggactcgaatggatcggccaaatctatcccggcgacggcgacaccaactacaacggcaagttcaagggcagagccacactgaccgccgatacctctagcagcacagcctacatgcagctgagcagcctgaccagcgaagatagcgccgtgtacttctgtgcccggtccatcacaacagtcgtgggctgcgctatggactattggggccagggaacaagcgtgaccgtgtctagtacgcgtatccagaaccctgatcctgccgtgtaccagctgcgggatagcaagagcagcgacaagagcgtgtgtctgttcaccgacttcgacagccagaccaacgtgtcccagagcaaggactccgacgtgtacatcaccgataagtgcgtgctggacatgcggagcatggacttcaagagcaactccgccgtggcctggtccaacaagtccgatttcgcctgcgccaacgccttcaacaacagcattatccccgaggacacattcttcccaagccccgagagcagctgcgacgtgaagctggtggaaaagagcttcgagacagacaccaacctgaacttccagaacctgagcgtgatcggcttcagaatcctgctgctgaaagtggccggctttaacctgctgatgaccctgcggctgtggtccagctaa

SEQ ID NO: 34161 - DNA, 2304 bp, synthetic construct
  source 1..2304: mol_type = other DNA
atggccttaccagtgaccgccttgctcctgccgctggccttgctgctccacgccgccaggccggacatccagatgacacagagccctagcagcctgtctgccagcgtgggagacagagtgaccatcacatgcaaggccagcgaccacatcaacaactggctggcctggtatcagcagaagcctggacaggcccctaagctgctgatctacggcgctaccacactggaaacaggcgtgcccagcagattttctggcagcggctctggcaccgactacaccctgacaatatccagcctccagcctgaggacttcgccacctactactgtcagcagagctggaacaccccttggacattcggccagggcaccaagctggaaatcaagagactcgaggacctgaagaacgtgttcccacctgaggtggccgtgttcgagcctagcgaggccgagatcagccacacccagaaagccaccctcgtgtgcctggctaccggcttctaccccgaccatgtggaactgtcttggtgggtcaacggcaaagaggtgcacagcggcgtgtgtaccgacccccagccactgaaagaacagcccgccctgaacgacagccggtactgcctgagcagcagactgagagtgtccgccaccttctggcagaacccccggaaccacttcagatgccaggtgcagttctacggcctgagcgagaacgacgagtggacccaggacagagccaagcccgtgacccagatcgtgtctgccgaagcctggggcagagccgattgcggctttaccagcgagagctaccagcagggcgtgctgagcgccaccatcctgtacgagatcctgctgggcaaggccaccctgtacgccgtgctggtgtctgccctggtgctgatggctatggtcaagcggaaggacagccggggaagggccaagcgatctggatctggagcaacaaacttctcactactcaaacaagcaggtgacgtggaggagaatcccgggcctactagtaccatggactggatttggcgcatccttttccttgtcggcgctgctaccggcgcccattccgggccccaagttcagctggtggaaagcggtggtggcgttgtgcaacctggtggaagtctgaggctgagctgtgccgcttctggcctgagctttagcacctacactgtggcctggttcaggcaggctcccggaaagggtcttgaaggcgtggccgccattccttacaccagccagcacatggtgtacacagacagcgtcagaggccggttcaccatcagcagagacaactccaagaatacgctctatctccagatgaactctctgcgcgccgaagatacagccgtgtattactgcgccaccgacagacggcctggcacctctatgctggctatcaacggctacaacagatggggacagggaaccaccgtgaccgtgtcatctggatccggcggcggaggatctggcggaggcggatctgggggcggaggctctttcgaacaagttcagcttcaacagcctggcgctgagctggtcaaacctggcgcttctgtgaagatgagctgcaaagccagcggctacgccttcagcagctcttggatcaactggatgaagcagaaacccggccagggactcgaatggatcggccaaatctatcccggcgacggcgacaccaactacaacggcaagttcaagggcagagccacactgaccgccgatacctctagcagcacagcctacatgcagctgagcagcctgaccagcgaagatagcgccgtgtacttctgtgcccggtccatcacaacagtcgtgggctgcgctatggactattggggccagggaacaagcgtgaccgtgtctagtacgcgtatccagaaccctgatcctgccgtgtaccagctgcgggatagcaagagcagcgacaagagcgtgtgtctgttcaccgacttcgacagccagaccaacgtgtcccagagcaaggactccgacgtgtacatcaccgataagtgcgtgctggacatgcggagcatggacttcaagagcaactccgccgtggcctggtccaacaagtccgatttcgcctgcgccaacgccttcaacaacagcattatccccgaggacacattcttcccaagccccgagagcagctgcgacgtgaagctggtggaaaagagcttcgagacagacaccaacctgaacttccagaacctgagcgtgatcggcttcagaatcctgctgctgaaagtggccggctttaacctgctgatgaccctgcggctgtggtccagctaa

SEQ ID NO: 34162 - DNA, 2310 bp, synthetic construct
  source 1..2310: mol_type = other DNA
atggccttaccagtgaccgccttgctcctgccgctggccttgctgctccacgccgccaggccggacatccagatgacacagagccctagcagcctgtctgccagcgtgggagacagagtgaccatcacatgcaaggccagcgaccacatcaacaactggctggcctggtatcagcagaagcctggacaggcccctaagctgctgatctacggcgctaccacactggaaacaggcgtgcccagcagattttctggcagcggctctggcaccgactacaccctgacaatatccagcctccagcctgaggacttcgccacctactactgtcagcagagctggaacaccccttggacattcggccagggcaccaagctggaaatcaagagactcgaggacctgaagaacgtgttcccacctgaggtggccgtgttcgagcctagcgaggccgagatcagccacacccagaaagccaccctcgtgtgcctggctaccggcttctaccccgaccatgtggaactgtcttggtgggtcaacggcaaagaggtgcacagcggcgtgtgtaccgacccccagccactgaaagaacagcccgccctgaacgacagccggtactgcctgagcagcagactgagagtgtccgccaccttctggcagaacccccggaaccacttcagatgccaggtgcagttctacggcctgagcgagaacgacgagtggacccaggacagagccaagcccgtgacccagatcgtgtctgccgaagcctggggcagagccgattgcggctttaccagcgagagctaccagcagggcgtgctgagcgccaccatcctgtacgagatcctgctgggcaaggccaccctgtacgccgtgctggtgtctgccctggtgctgatggctatggtcaagcggaaggacagccggggaagggccaagcgatctggatctggagcaacaaacttctcactactcaaacaagcaggtgacgtggaggagaatcccgggcctactagtaccatggactggatttggcgcatccttttccttgtcggcgctgctaccggcgcccattccgggcccgaggtgcagctggttgaatctggcggaggatctgttcaggctggcggctctctgagactgtcttgtgccgccagcggctacacctacagcatcaactgcatgggctggttcagacaggcccctggcaaagagagagaaggcgttgccgccatctctaccggcggaggcagaaccgattaccgggattctgtgaagggcagattcaccatcagccaggacaacgccaagaacaccgtgtacctccagatgaacagcctgaagcctgaggacaccgccatgtactactgtgccggcaagaccacctatcctggctacggatgtggcctgggcagaagcgcctacaattattggggccagggcacccaagtgaccgtgtcatctggatccggcggcggaggatctggcggaggcggatctgggggcggaggctctttcgaacaagttcagcttcaacagcctggcgctgagctggtcaaacctggcgcttctgtgaagatgagctgcaaagccagcggctacgccttcagcagctcttggatcaactggatgaagcagaaacccggccagggactcgaatggatcggccaaatctatcccggcgacggcgacaccaactacaacggcaagttcaagggcagagccacactgaccgccgatacctctagcagcacagcctacatgcagctgagcagcctgaccagcgaagatagcgccgtgtacttctgtgcccggtccatcacaacagtcgtgggctgcgctatggactattggggccagggaacaagcgtgaccgtgtctagtacgcgtatccagaaccctgatcctgccgtgtaccagctgcgggatagcaagagcagcgacaagagcgtgtgtctgttcaccgacttcgacagccagaccaacgtgtcccagagcaaggactccgacgtgtacatcaccgataagtgcgtgctggacatgcggagcatggacttcaagagcaactccgccgtggcctggtccaacaagtccgatttcgcctgcgccaacgccttcaacaacagcattatccccgaggacacattcttcccaagccccgagagcagctgcgacgtgaagctggtggaaaagagcttcgagacagacaccaacctgaacttccagaacctgagcgtgatcggcttcagaatcctgctgctgaaagtggccggctttaacctgctgatgaccctgcggctgtggtccagctaa

SEQ ID NO: 34163 - DNA, 1866 bp, synthetic construct
  source 1..1866: mol_type = other DNA
atggccttaccagtgaccgccttgctcctgccgctggccttgctgctccacgccgccaggccggacatccagatgacacagagccctagcagcctgtctgccagcgtgggagacagagtgaccatcacatgcaaggccagcgaccacatcaacaactggctggcctggtatcagcagaagcctggacaggcccctaagctgctgatctacggcgctaccacactggaaacaggcgtgcccagcagattttctggcagcggctctggcaccgactacaccctgacaatatccagcctccagcctgaggacttcgccacctactactgtcagcagagctggaacaccccttggacattcggccagggcaccaagctggaaatcaagagactcgaggacctgaagcacgtgttcccacctgaggtggccgtgttcgagcctagcgacgccgagatctggcacacccagaaagccaccctcgtgtgcctggctaccggcttctaccccgaccatgtggaactgtcttggtgggtcaacggcaaagaggtgcacagcggcgtgtctaccgacccccagccactgaaagaacagcccgccctgaacgacagccggtactgcctgagcagcagactgagagtgtccgccaccttctggcagaacccccggaaccacttcagatgccaggtgcagttctacggcctgagcgagaacgacgagtggacccaggacagagccaagcccgtgacccagatcgtgtctgccgaagcctggggcagagccgattgcggctttaccagcgagagctaccagcagggcgtgctgagcgccaccatcctgtacgagatcctgctgggcaaggccaccctgtacgccgtgctggtgtctgccctggtgctgatggctatggtcaagcggaaggacagccggggaagggccaagcgatctggatctggagcaacaaacttctcactactcaaacaagcaggtgacgtggaggagaatcccgggcctactagtatggactggatttggcgcatccttttccttgtcggcgctgctaccggcgcgcattccttcgaacaagttcagcttcaacagcctggcgctgagctggtcaaacctggcgcttctgtgaagatgagctgcaaagccagcggctacgccttcagcagctcttggatcaactggatgaagcagaaacccggccagggactcgaatggatcggccaaatctatcccggcgacggcgacaccaactacaacggcaagttcaagggcagagccacactgaccgccgatacctctagcagcacagcctacatgcagctgagcagcctgaccagcgaagatagcgccgtgtacttctgtgcccggtccatcacaacagtcgtgggctgcgctatggactattggggccagggaacaagcgtgaccgtgtctagtacgcgtatccagaaccctgatcctgccgtgtaccagctgcgggatagcaagagcagcgacaagagcgtgtgtctgttcaccgacttcgacagccagaccaacgtgtcccagagcaaggactccgacgtgtacatcaccgataagaccgtgctggacatgcggagcatggacttcaagagcaactccgccgtggcctggtccagcaagtccgatttcgcctgcgccaacgccttcaacaacagcattatccccgaggacacattcttcccaagccccgagatggcctgcgacgtgaagctggtggaaaagagcttcgagacagacaccaacctgaacttccagaacctgctcgtgatctggctgagaatcctgctgctgaaagtggccggctttaacctgctgatgaccctgcggctgtggtccagc

SEQ ID NO: 34164 - DNA, 1866 bp, synthetic construct
  source 1..1866: mol_type = other DNA
atggccttaccagtgaccgccttgctcctgccgctggccttgctgctccacgccgccaggccggacatccagatgacacagagccctagcagcctgtctgccagcgtgggagacagagtgaccatcacatgcaaggccagcgaccacatcaacaactggctggcctggtatcagcagaagcctggacaggcccctaagctgctgatctacggcgctaccacactggaaacaggcgtgcccagcagattttctggcagcggctctggcaccgactacaccctgacaatatccagcctccagcctgaggacttcgccacctactactgtcagcagagctggaacaccccttggacattcggccagggcaccaagctggaaatcaagagactcgaggacctgaagcacgtgttcccacctgaggtggccgtgttcgagcctagcgacgccgagatctggcacacccagaaagccaccctcgtgtgcctggctaccggcttctaccccgaccatgtggaactgtcttggtgggtcaacggcaaagaggtgcacagcggcgtgtctaccgacccccagccactgaaagaacagcccgccctgaacgacagccggtactgcctgagcagcagactgagagtgtccgccaccttctggcagaacccccggaaccacttcagatgccaggtgcagttctacggcctgagcgagaacgacgagtggacccaggacagagccaagcccgtgacccagatcgtgtctgccgaagcctggggcagagccgattgcggctttaccagcgagagctaccagcagggcgtgctgagcgccaccatcctgtacgagatcctgctgggcaaggccaccctgtacgccgtgctggtgtctgccctggtgctgatggctatggtcaagcggaaggacagccggggaagggccaagcgatctggatctggagcaacaaacttctcactactcaaacaagcaggtgacgtggaggagaatcccgggcctactagtatggactggatttggcgcatccttttccttgtcggcgctgctaccggcgcgcattccttcgaacaagttcagcttcaacagcctggcgctgagctggtcaaacctggcgcttctgtgaagatgagctgcaaagccagcggctacgccttcagcagctcttggatcaactggatgaagcagaaacccggccagggactcgaatggatcggccaaatctatcccggcgacggcgacaccaactacaacggcaagttcaagggcagagccacactgaccgccgatacctctagcagcacagcctacatgcagctgagcagcctgaccagcgaagatagcgccgtgtacttctgtgcccggtccatcacaacagtcgtgggctgcgctatggactattggggccagggaacaagcgtgaccgtgtctagtacgcgtatccagaaccctgatcctgccgtgtaccagctgcgggatagcaagagcagcgacaagagcgtgtgtctgttcaccgacttcgacagccagaccaacgtgtcccagagcaaggactccgacgtgtacatcaccgataagaccgtgctggacatgcggagcatggacttcaagagcaactccgccgtggcctggtccaccaagtccgatttcgcctgcgccaacgccttcaacaacagcattatccccgaggacacattcttcccaagccccgaggtggtgtgcgacgtgaagctggtggaaaagagcttcgagacagacaccaacctgaacttccagaacctggtggtgatcggcgccagaatcctgctgctgaaagtggccggctttaacctgctgatgaccctgcggctgtggtccagc

SEQ ID NO: 34165 - DNA, 1866 bp, synthetic construct
  source 1..1866: mol_type = other DNA
atggccttaccagtgaccgccttgctcctgccgctggccttgctgctccacgccgccaggccggacatccagatgacacagagccctagcagcctgtctgccagcgtgggagacagagtgaccatcacatgcaaggccagcgaccacatcaacaactggctggcctggtatcagcagaagcctggacaggcccctaagctgctgatctacggcgctaccacactggaaacaggcgtgcccagcagattttctggcagcggctctggcaccgactacaccctgacaatatccagcctccagcctgaggacttcgccacctactactgtcagcagagctggaacaccccttggacattcggccagggcaccaagctggaaatcaagagactcgaggacctgaagaacgtgttcccacctgaggtggccgtgttcgagcctagcaaggccgagatcagcagaacccagaaagccaccctcgtgtgcctggctaccggcttctaccctcctcatgtggaactgtcttggtgggtcaacggcaaagaggtgcacgacggcgtgtgtaccgacccccagccactgaaagaacagcccgccctgaacgacagccggtactgcctgagcagcagactgagagtgtccgccaccttctggcagaacccccggaaccacttcagatgccaggtgcagttctacggcctgagcgagaacgacgagtggacccaggacagagccaagcccgtgacccagatcgtgtctgccgaagcctggggcagagccgattgcggctttaccagcgagagctaccagcagggcgtgctgagcgccaccatcctgtacgagatcctgctgggcaaggccaccctgtacgccgtgctggtgtctgccctggtgctgatggctatggtcaagcggaaggacagccggggaagggccaagcgatctggatctggagcaacaaacttctcactactcaaacaagcaggtgacgtggaggagaatcccgggcctactagtatggactggatttggcgcatccttttccttgtcggcgctgctaccggcgcgcattccttcgaacaagttcagcttcaacagcctggcgctgagctggtcaaacctggcgcttctgtgaagatgagctgcaaagccagcggctacgccttcagcagctcttggatcaactggatgaagcagaaacccggccagggactcgaatggatcggccaaatctatcccggcgacggcgacaccaactacaacggcaagttcaagggcagagccacactgaccgccgatacctctagcagcacagcctacatgcagctgagcagcctgaccagcgaagatagcgccgtgtacttctgtgcccggtccatcacaacagtcgtgggctgcgctatggactattggggccagggaacaagcgtgaccgtgtctagtacgcgtatccagaaccctgatcctgccgtgtaccagctgcgggatagcaagagcagcgacaagttcgtgtgtctgttcaccgacttcgacagccagatcaacgtgtcccagagcaaggactccgacgtgtacatcaccgataagtgcgtgctggacatgcggagcatggacttcaagagcaactccgccgtggcctggtccaacaagtccgatttcacctgcgccaacgccttcaacaacagcattatccccgaggacacattcttcccaagccccgagagcagctgcgacgtgaagctggtggaaaagagcttcgagacagacaccaacctgaacttccagaacctgagcgtgatcggcttcagaatcctgctgctgaaagtggccggctttaacctgctgatgaccctgcggctgtggtccagc

SEQ ID NO: 34166 - DNA, 2292 bp, synthetic construct
  source 1..2292: mol_type = other DNA
atggccttaccagtgaccgccttgctcctgccgctggccttgctgctccacgccgccaggccggacatccagatgacacagagccctagcagcctgtctgccagcgtgggagacagagtgaccatcacatgcaaggccagcgaccacatcaacaactggctggcctggtatcagcagaagcctggacaggcccctaagctgctgatctacggcgctaccacactggaaacaggcgtgcccagcagattttctggcagcggctctggcaccgactacaccctgacaatatccagcctccagcctgaggacttcgccacctactactgtcagcagagctggaacaccccttggacattcggccagggcaccaagctggaaatcaagagactcgaggacctgaagaacgtgttcccacctgaggtggccgtgttcgagcctagcgaggccgagatcagccacacccagaaagccaccctcgtgtgcctggctaccggcttctaccccgaccatgtggaactgtcttggtgggtcaacggcaaagaggtgcacagcggcgtgtgtaccgacccccagccactgaaagaacagcccgccctgaacgacagccggtactgcctgagcagcagactgagagtgtccgccaccttctggcagaacccccggaaccacttcagatgccaggtgcagttctacggcctgagcgagaacgacgagtggacccaggacagagccaagcccgtgacccagatcgtgtctgccgaagcctggggcagagccgattgcggctttaccagcgagagctaccagcagggcgtgctgagcgccaccatcctgtacgagatcctgctgggcaaggccaccctgtacgccgtgctggtgtctgccctggtgctgatggctatggtcaagcggaaggacagccggggaagggccaagcgatctggatctggagcaacaaacttctcactactcaaacaagcaggtgacgtggaggagaatcccgggcctactagtaccatggactggatttggcgcatccttttccttgtcggcgctgctaccggcgcccattccgggccccaggtgcagctccaagaaagcggacccggactggttaagccctctcagaccctgtctctgacctgcacagttagcggagccagcattaccacaggcgagtattattggaattggtttcggcagccaccaggcaaggggcttgagtggatgggtgctattgctgcctctggcagcaccacctactctcccagctttgagagcagaacctccatcagccgggacacctccaaaaaccagttctctctgaagctgtcctccgtgaccgctgctgacaccgccgtctattattgtggccggtctttcggcgtggcagctgtgaccacaggacagaacagaggccagggaacacttgtgaccgtgtcctctggatccggcggcggaggatctggcggaggcggatctgggggcggaggctctttcgaacaagttcagcttcaacagcctggcgctgagctggtcaaacctggcgcttctgtgaagatgagctgcaaagccagcggctacgccttcagcagctcttggatcaactggatgaagcagaaacccggccagggactcgaatggatcggccaaatctatcccggcgacggcgacaccaactacaacggcaagttcaagggcagagccacactgaccgccgatacctctagcagcacagcctacatgcagctgagcagcctgaccagcgaagatagcgccgtgtacttctgtgcccggtccatcacaacagtcgtgggctgcgctatggactattggggccagggaacaagcgtgaccgtgtctagtacgcgtatccagaaccctgatcctgccgtgtaccagctgcgggatagcaagagcagcgacaagagcgtgtgtctgttcaccgacttcgacagccagaccaacgtgtcccagagcaaggactccgacgtgtacatcaccgataagtgcgtgctggacatgcggagcatggacttcaagagcaactccgccgtggcctggtccaacaagtccgatttcgcctgcgccaacgccttcaacaacagcattatccccgaggacacattcttcccaagccccgagagcagctgcgacgtgaagctggtggaaaagagcttcgagacagacaccaacctgaacttccagaacctgagcgtgatcggcttcagaatcctgctgctgaaagtggccggctttaacctgctgatgaccctgcggctgtggtccagc

SEQ ID NO: 34167 - DNA, 2715 bp, synthetic construct
  source 1..2715: mol_type = other DNA
atggccttaccagtgaccgccttgctcctgccgctggccttgctgctccacgccgccaggccgcaggttcagctgcaagagtctggccctggcctggtcaagcctagccaaacactgagcctgacctgtaccgtgtctggcggctctatcaccaccggcgagttctactggaactggttcagacagcctcctggcaaaggactggaatggatgggagccattgccgccagcggcagcacaacatacagccctagcttcgagagccggaccagcatcagcagagacaccagcaagaatcagttcagcctgaagctgagcagcgtgacagccgccgatacagccgtgtattactgcggcagatcctttggagtggccgccgtgacaaccggccagaatagaggacagggcaccctggtcacagtgtctagcggtaccggcggaggcggatctggcggcggaggtagcggtggcggaggatctgaattcgacatccagatgacacagagccctagcagcctgtctgccagcgtgggagacagagtgaccatcacatgcaaggccagcgaccacatcaacaactggctggcctggtatcagcagaagcctggacaggcccctaagctgctgatctacggcgctaccacactggaaacaggcgtgcccagcagattttctggcagcggctctggcaccgactacaccctgacaatatccagcctccagcctgaggacttcgccacctactactgtcagcagagctggaacaccccttggacattcggccagggcaccaagctggaaatcaagagactcgagatccagaaccctgatcctgccgtgtaccagctgcgggatagcaagagcagcgacaagagcgtgtgtctgttcaccgacttcgacagccagaccaacgtgtcccagagcaaggactccgacgtgtacatcaccgataagtgcgtgctggacatgcggagcatggacttcaagagcaactccgccgtggcctggtccaacaagtccgatttcgcctgcgccaacgccttcaacaacagcattatccccgaggacacattcttcccaagcagcgacgtgccctgcgacgtgaagctggtggaaaagagcttcgagacagacaccaacctgaacttccagaacctgagcgtgatcggcttcagaatcctgctgctgaaagtggccggctttaacctgctgatgaccctgcggctgtggtccagccgcgccaagagaagcggatctggcgtgaagcagaccctgaatttcgacctgctgaagctggctggcgacgtggaatccaacccaggccctactagtaccatggactggatttggcgcatccttttccttgtcggcgctgctaccggcgcccattccgggcccgaagtgcaactggttgaatccggtggcggcctggtgcaacccggcggatctctcagacttagctgtgccgcctccggcagaaccttcacaatgggatggtacaggcaggctccagggaaagagagagagttcgtcgccgccatctctctgtctcccacactggcctactacgccgactctgtgaaaggccggttcaccatctccagagataatagcaagaacaccgtggtgctgcaaatgaactctctgagagccgaggatacagccctgtactattgtgccgctgaccggaagtccgtgatgagcatcagacccgattactggggacagggcacactggtcacagtgtctagtggatccggcggcggaggatctggcggaggcggatctgggggcggaggctctttcgaacaagttcagcttcaacagcctggcgctgagctggtcaaacctggcgcttctgtgaagatgagctgcaaagccagcggctacgccttcagcagctcttggatcaactggatgaagcagaaacccggccagggactcgaatggatcggccaaatctatcccggcgacggcgacaccaactacaacggcaagttcaagggcagagccacactgaccgccgatacctctagcagcacagcctacatgcagctgagcagcctgaccagcgaagatagcgccgtgtacttctgtgcccggtccatcacaacagtcgtgggctgcgctatggactattggggccagggaacaagcgtgaccgtgtctagtacgcgtgaggacctgaagaacgtgttcccacctgaggtggccgtgttcgagcctagcaaggccgagatcgcccacacccagaaagccaccctcgtgtgcctggctaccggcttctaccccgaccatgtggaactgtcttggtgggtcaacggcaaagaggtgcacagcggcgtgtgtaccgacccccagccactgaaagaacagcccgccctgaacgacagccggtactgcctgagcagcagactgagagtgtccgccaccttctggcagaacccccggaaccacttcagatgccaggtgcagttctacggcctgagcgagaacgacgagtggacccaggacagagccaagcccgtgacccagatcgtgtctgccgaagcctggggcagagccgattgcggcatcaccagcgccagctaccaccagggcgtgctgagcgccaccatcctgtacgagatcctgctgggcaaggccaccctgtacgccgtgctggtgtctgccctggtgctgatggctatggtcaagcggaaggacagccgggga

SEQ ID NO: 34168 - DNA, 2304 bp, synthetic construct
  source 1..2304: mol_type = other DNA
atggccttaccagtgaccgccttgctcctgccgctggccttgctgctccacgccgccaggccgcaggttcagctgcaagagtctggccctggcctggtcaagcctagccaaacactgagcctgacctgtaccgtgtctggcggctctatcaccaccggcgagttctactggaactggttcagacagcctcctggcaaaggactggaatggatgggagccattgccgccagcggcagcacaacatacagccctagcttcgagagccggaccagcatcagcagagacaccagcaagaatcagttcagcctgaagctgagcagcgtgacagccgccgatacagccgtgtattactgcggcagatcctttggagtggccgccgtgacaaccggccagaatagaggacagggcaccctggtcacagtgtctagcggtaccggcggaggcggatctggcggcggaggtagcggtggcggaggatctgaattcgacatccagatgacacagagccctagcagcctgtctgccagcgtgggagacagagtgaccatcacatgcaaggccagcgaccacatcaacaactggctggcctggtatcagcagaagcctggacaggcccctaagctgctgatctacggcgctaccacactggaaacaggcgtgcccagcagattttctggcagcggctctggcaccgactacaccctgacaatatccagcctccagcctgaggacttcgccacctactactgtcagcagagctggaacaccccttggacattcggccagggcaccaagctggaaatcaagagactcgagatccagaaccctgatcctgccgtgtaccagctgcgggatagcaagagcagcgacaagagcgtgtgtctgttcaccgacttcgacagccagaccaacgtgtcccagagcaaggactccgacgtgtacatcaccgataagtgcgtgctggacatgcggagcatggacttcaagagcaactccgccgtggcctggtccaacaagtccgatttcgcctgcgccaacgccttcaacaacagcattatccccgaggacacattcttcccaagcagcgacgtgccctgcgacgtgaagctggtggaaaagagcttcgagacagacaccaacctgaacttccagaacctgagcgtgatcggcttcagaatcctgctgctgaaagtggccggctttaacctgctgatgaccctgcggctgtggtccagccgcgccaagagaagcggatctggcgtgaagcagaccctgaatttcgacctgctgaagctggctggcgacgtggaatccaacccaggccctactagtaccatggactggatttggcgcatccttttccttgtcggcgctgctaccggcgcccattccttcgaacaagttcagcttcaacagcctggcgctgagctggtcaaacctggcgcttctgtgaagatgagctgcaaagccagcggctacgccttcagcagctcttggatcaactggatgaagcagaaacccggccagggactcgaatggatcggccaaatctatcccggcgacggcgacaccaactacaacggcaagttcaagggcagagccacactgaccgccgatacctctagcagcacagcctacatgcagctgagcagcctgaccagcgaagatagcgccgtgtacttctgtgcccggtccatcacaacagtcgtgggctgcgctatggactattggggccagggaacaagcgtgaccgtgtctagtacgcgtgaggacctgaagaacgtgttcccacctgaggtggccgtgttcgagcctagcaaggccgagatcgcccacacccagaaagccaccctcgtgtgcctggctaccggcttctaccccgaccatgtggaactgtcttggtgggtcaacggcaaagaggtgcacagcggcgtgtgtaccgacccccagccactgaaagaacagcccgccctgaacgacagccggtactgcctgagcagcagactgagagtgtccgccaccttctggcagaacccccggaaccacttcagatgccaggtgcagttctacggcctgagcgagaacgacgagtggacccaggacagagccaagcccgtgacccagatcgtgtctgccgaagcctggggcagagccgattgcggcatcaccagcgccagctaccaccagggcgtgctgagcgccaccatcctgtacgagatcctgctgggcaaggccaccctgtacgccgtgctggtgtctgccctggtgctgatggctatggtcaagcggaaggacagccgggga

SEQ ID NO: 34169 - DNA, 2703 bp, synthetic construct
  source 1..2703: mol_type = other DNA
atggccttaccagtgaccgccttgctcctgccgctggccttgctgctccacgccgccaggccggaagtgcagctggttgaatctggcggaggactggttcaggctggcggatctctgagactgtcttgtgccgccagcggcagaacctttagcatgggctggtttagacaggcccctggcaaagagagagagttcgtcgccgccatcacatactctggcggcagcccttactacgccgactctgtgaagggcagattcaccatcagccgggacaacgccaagaacaccgtgtacctccagatgaacagcctgaagcctgaggacaccgccgtgtactactgcgccgccaatccaacatacggcagcgactggaacgccgagaattggggccagggaacccaagtgacagtgtctagcggtaccggcggaggcggatctggcggcggaggtagcggtggcggaggatctgaattcgacatccagatgacacagagccctagcagcctgtctgccagcgtgggagacagagtgaccatcacatgcaaggccagcgaccacatcaacaactggctggcctggtatcagcagaagcctggacaggcccctaagctgctgatctacggcgctaccacactggaaacaggcgtgcccagcagattttctggcagcggctctggcaccgactacaccctgacaatatccagcctccagcctgaggacttcgccacctactactgtcagcagagctggaacaccccttggacattcggccagggcaccaagctggaaatcaagagactcgaggacctgaagaacgtgttcccacctgaggtggccgtgttcgagcctagcgaggccgagatcagccacacccagaaagccaccctcgtgtgcctggctaccggcttctaccccgaccatgtggaactgtcttggtgggtcaacggcaaagaggtgcacagcggcgtgtgtaccgacccccagccactgaaagaacagcccgccctgaacgacagccggtactgcctgagcagcagactgagagtgtccgccaccttctggcagaacccccggaaccacttcagatgccaggtgcagttctacggcctgagcgagaacgacgagtggacccaggacagagccaagcccgtgacccagatcgtgtctgccgaagcctggggcagagccgattgcggctttaccagcgagagctaccagcagggcgtgctgagcgccaccatcctgtacgagatcctgctgggcaaggccaccctgtacgccgtgctggtgtctgccctggtgctgatggctatggtcaagcggaaggacagccggggaagggccaagcgatctggatctggagcaacaaacttctcactactcaaacaagcaggtgacgtggaggagaatcccgggcctactagtaccatggactggatttggcgcatccttttccttgtcggcgctgctaccggcgcccattccgggccccaggtgcagctccaagaaagcggacccggactggttaagccctctcagaccctgtctctgacctgcacagttagcggagccagcattaccacaggcgagtattattggaattggtttcggcagccaccaggcaaggggcttgagtggatgggtgctattgctgcctctggcagcaccacctactctcccagctttgagagcagaacctccatcagccgggacacctccaaaaaccagttctctctgaagctgtcctccgtgaccgctgctgacaccgccgtctattattgtggccggtctttcggcgtggcagctgtgaccacaggacagaacagaggccagggaacacttgtgaccgtgtcctctggatccggcggcggaggatctggcggaggcggatctgggggcggaggctctttcgaacaagttcagcttcaacagcctggcgctgagctggtcaaacctggcgcttctgtgaagatgagctgcaaagccagcggctacgccttcagcagctcttggatcaactggatgaagcagaaacccggccagggactcgaatggatcggccaaatctatcccggcgacggcgacaccaactacaacggcaagttcaagggcagagccacactgaccgccgatacctctagcagcacagcctacatgcagctgagcagcctgaccagcgaagatagcgccgtgtacttctgtgcccggtccatcacaacagtcgtgggctgcgctatggactattggggccagggaacaagcgtgaccgtgtctagtacgcgtatccagaaccctgatcctgccgtgtaccagctgcgggatagcaagagcagcgacaagagcgtgtgtctgttcaccgacttcgacagccagaccaacgtgtcccagagcaaggactccgacgtgtacatcaccgataagtgcgtgctggacatgcggagcatggacttcaagagcaactccgccgtggcctggtccaacaagtccgatttcgcctgcgccaacgccttcaacaacagcattatccccgaggacacattcttcccaagccccgagagcagctgcgacgtgaagctggtggaaaagagcttcgagacagacaccaacctgaacttccagaacctgagcgtgatcggcttcagaatcctgctgctgaaagtggccggctttaacctgctgatgaccctgcggctgtggtccagc

SEQ ID NO: 34170 - DNA, 2724 bp, synthetic construct
  source 1..2724: mol_type = other DNA
atggccttaccagtgaccgccttgctcctgccgctggccttgctgctccacgccgccaggccggaagtgcagctggttgaatctggcggaggactggttcaggctggcggatctctgagactgtcttgtgccgccagcggcagaacctttagcatgggctggtttagacaggcccctggcaaagagagagagttcgtcgccgccatcacatactctggcggcagcccttactacgccgactctgtgaagggcagattcaccatcagccgggacaacgccaagaacaccgtgtacctccagatgaacagcctgaagcctgaggacaccgccgtgtactactgcgccgccaatccaacatacggcagcgactggaacgccgagaattggggccagggaacccaagtgacagtgtctagcggtaccggcggaggcggatctggcggcggaggtagcggtggcggaggatctgaattcgacatccagatgacacagagccctagcagcctgtctgccagcgtgggagacagagtgaccatcacatgcaaggccagcgaccacatcaacaactggctggcctggtatcagcagaagcctggacaggcccctaagctgctgatctacggcgctaccacactggaaacaggcgtgcccagcagattttctggcagcggctctggcaccgactacaccctgacaatatccagcctccagcctgaggacttcgccacctactactgtcagcagagctggaacaccccttggacattcggccagggcaccaagctggaaatcaagagactcgagatccagaaccctgatcctgccgtgtaccagctgcgggatagcaagagcagcgacaagagcgtgtgtctgttcaccgacttcgacagccagaccaacgtgtcccagagcaaggactccgacgtgtacatcaccgataagtgcgtgctggacatgcggagcatggacttcaagagcaactccgccgtggcctggtccaacaagtccgatttcgcctgcgccaacgccttcaacaacagcattatccccgaggacacattcttcccaagcagcgacgtgccctgcgacgtgaagctggtggaaaagagcttcgagacagacaccaacctgaacttccagaacctgagcgtgatcggcttcagaatcctgctgctgaaagtggccggctttaacctgctgatgaccctgcggctgtggtccagccgcgccaagagaagcggatctggcgtgaagcagaccctgaatttcgacctgctgaagctggctggcgacgtggaatccaacccaggccctactagtaccatggactggatttggcgcatccttttccttgtcggcgctgctaccggcgcccattccgggccccaggtgcagctggttgaatctggcggaggactggttcagcctggcggatctctgagactgtcttgtgccgccagcggcaacatcaacagcagaaactgcatgggctggttcagacaggcccctggcaagggaagagaaggcgtggcagctatcggccaagtgaccggcagaacctactacgtggacagcgtgaagggcagattcaccatcagcctggacaacagcaagaacaccctgtacctccagatgaacagcctgagagccgaggacaccgccgtgtactattgtgctgctgcccctggctgtctgctgtctgcacttagaagcgccgactacagaaactggggccagggcacactggtcaccgtttcttctggatccggcggcggaggatctggcggaggcggatctgggggcggaggctctttcgaacaagttcagcttcaacagcctggcgctgagctggtcaaacctggcgcttctgtgaagatgagctgcaaagccagcggctacgccttcagcagctcttggatcaactggatgaagcagaaacccggccagggactcgaatggatcggccaaatctatcccggcgacggcgacaccaactacaacggcaagttcaagggcagagccacactgaccgccgatacctctagcagcacagcctacatgcagctgagcagcctgaccagcgaagatagcgccgtgtacttctgtgcccggtccatcacaacagtcgtgggctgcgctatggactattggggccagggaacaagcgtgaccgtgtctagtacgcgtgaggacctgaagaacgtgttcccacctgaggtggccgtgttcgagcctagcaaggccgagatcgcccacacccagaaagccaccctcgtgtgcctggctaccggcttctaccccgaccatgtggaactgtcttggtgggtcaacggcaaagaggtgcacagcggcgtgtgtaccgacccccagccactgaaagaacagcccgccctgaacgacagccggtactgcctgagcagcagactgagagtgtccgccaccttctggcagaacccccggaaccacttcagatgccaggtgcagttctacggcctgagcgagaacgacgagtggacccaggacagagccaagcccgtgacccagatcgtgtctgccgaagcctggggcagagccgattgcggcatcaccagcgccagctaccaccagggcgtgctgagcgccaccatcctgtacgagatcctgctgggcaaggccaccctgtacgccgtgctggtgtctgccctggtgctgatggctatggtcaagcggaaggacagccgggga

SEQ ID NO: 34171 - DNA, 2712 bp, synthetic construct
  source 1..2712: mol_type = other DNA
atggccttaccagtgaccgccttgctcctgccgctggccttgctgctccacgccgccaggccggaagtgcagctggttgaatctggcggaggactggttcaggctggcggatctctgagactgtcttgtgccgccagcggcagaacctttagcatgggctggtttagacaggcccctggcaaagagagagagttcgtcgccgccatcacatactctggcggcagcccttactacgccgactctgtgaagggcagattcaccatcagccgggacaacgccaagaacaccgtgtacctccagatgaacagcctgaagcctgaggacaccgccgtgtactactgcgccgccaatccaacatacggcagcgactggaacgccgagaattggggccagggaacccaagtgacagtgtctagcggtaccggcggaggcggatctggcggcggaggtagcggtggcggaggatctgaattcgacatccagatgacacagagccctagcagcctgtctgccagcgtgggagacagagtgaccatcacatgcaaggccagcgaccacatcaacaactggctggcctggtatcagcagaagcctggacaggcccctaagctgctgatctacggcgctaccacactggaaacaggcgtgcccagcagattttctggcagcggctctggcaccgactacaccctgacaatatccagcctccagcctgaggacttcgccacctactactgtcagcagagctggaacaccccttggacattcggccagggcaccaagctggaaatcaagagactcgaggacctgaagaacgtgttcccacctgaggtggccgtgttcgagcctagcgaggccgagatcagccacacccagaaagccaccctcgtgtgcctggctaccggcttctaccccgaccatgtggaactgtcttggtgggtcaacggcaaagaggtgcacagcggcgtgtgtaccgacccccagccactgaaagaacagcccgccctgaacgacagccggtactgcctgagcagcagactgagagtgtccgccaccttctggcagaacccccggaaccacttcagatgccaggtgcagttctacggcctgagcgagaacgacgagtggacccaggacagagccaagcccgtgacccagatcgtgtctgccgaagcctggggcagagccgattgcggctttaccagcgagagctaccagcagggcgtgctgagcgccaccatcctgtacgagatcctgctgggcaaggccaccctgtacgccgtgctggtgtctgccctggtgctgatggctatggtcaagcggaaggacagccggggaagggccaagcgatctggatctggagcaacaaacttctcactactcaaacaagcaggtgacgtggaggagaatcccgggcctactagtaccatggactggatttggcgcatccttttccttgtcggcgctgctaccggcgcccattccgggccccaggtgcagctggttgaatctggcggaggactggttcagcctggcggatctctgagactgtcttgtgccgccagcggcaacatcaacagcagaaactgcatgggctggttcagacaggcccctggcaagggaagagaaggcgtggcagctatcggccaagtgaccggcagaacctactacgtggacagcgtgaagggcagattcaccatcagcctggacaacagcaagaacaccctgtacctccagatgaacagcctgagagccgaggacaccgccgtgtactattgtgctgctgcccctggctgtctgctgtctgcacttagaagcgccgactacagaaactggggccagggcacactggtcaccgtttcttctggatccggcggcggaggatctggcggaggcggatctgggggcggaggctctttcgaacaagttcagcttcaacagcctggcgctgagctggtcaaacctggcgcttctgtgaagatgagctgcaaagccagcggctacgccttcagcagctcttggatcaactggatgaagcagaaacccggccagggactcgaatggatcggccaaatctatcccggcgacggcgacaccaactacaacggcaagttcaagggcagagccacactgaccgccgatacctctagcagcacagcctacatgcagctgagcagcctgaccagcgaagatagcgccgtgtacttctgtgcccggtccatcacaacagtcgtgggctgcgctatggactattggggccagggaacaagcgtgaccgtgtctagtacgcgtatccagaaccctgatcctgccgtgtaccagctgcgggatagcaagagcagcgacaagagcgtgtgtctgttcaccgacttcgacagccagaccaacgtgtcccagagcaaggactccgacgtgtacatcaccgataagtgcgtgctggacatgcggagcatggacttcaagagcaactccgccgtggcctggtccaacaagtccgatttcgcctgcgccaacgccttcaacaacagcattatccccgaggacacattcttcccaagccccgagagcagctgcgacgtgaagctggtggaaaagagcttcgagacagacaccaacctgaacttccagaacctgagcgtgatcggcttcagaatcctgctgctgaaagtggccggctttaacctgctgatgaccctgcggctgtggtccagc

SEQ ID NO: 34172 - DNA, 2712 bp, synthetic construct
  source 1..2712: mol_type = other DNA
atggccttaccagtgaccgccttgctcctgccgctggccttgctgctccacgccgccaggccggaagtgcaactggttgaatccggtggcggcctggtgcaagcaggcggatctctcagacttagctgtgccgcctccggcagaaccttcacaatgggatggtttaggcaggctccagggaaagagagagagttcgtcgccgccatctctctgtctcccacactggcctactacgccgactctgtgaaaggccggttcaccatctccagagataatgccaagaacaccgtggtgctgcaaatgaactctctgaaacccgaggatacagccctgtactattgtgccgctgaccggaagtccgtgatgagcatcagacccgattactggggacagggcacacaagtcacagtgtcctctggtaccggcggaggcggatctggcggcggaggtagcggtggcggaggatctgaattcgacatccagatgacacagagccctagcagcctgtctgccagcgtgggagacagagtgaccatcacatgcaaggccagcgaccacatcaacaactggctggcctggtatcagcagaagcctggacaggcccctaagctgctgatctacggcgctaccacactggaaacaggcgtgcccagcagattttctggcagcggctctggcaccgactacaccctgacaatatccagcctccagcctgaggacttcgccacctactactgtcagcagagctggaacaccccttggacattcggccagggcaccaagctggaaatcaagagactcgaggacctgaagaacgtgttcccacctgaggtggccgtgttcgagcctagcgaggccgagatcagccacacccagaaagccaccctcgtgtgcctggctaccggcttctaccccgaccatgtggaactgtcttggtgggtcaacggcaaagaggtgcacagcggcgtgtgtaccgacccccagccactgaaagaacagcccgccctgaacgacagccggtactgcctgagcagcagactgagagtgtccgccaccttctggcagaacccccggaaccacttcagatgccaggtgcagttctacggcctgagcgagaacgacgagtggacccaggacagagccaagcccgtgacccagatcgtgtctgccgaagcctggggcagagccgattgcggctttaccagcgagagctaccagcagggcgtgctgagcgccaccatcctgtacgagatcctgctgggcaaggccaccctgtacgccgtgctggtgtctgccctggtgctgatggctatggtcaagcggaaggacagccggggaagggccaagcgatctggatctggagcaacaaacttctcactactcaaacaagcaggtgacgtggaggagaatcccgggcctactagtaccatggactggatttggcgcatccttttccttgtcggcgctgctaccggcgcccattccgggccccaggtgcagctggttgaatctggcggaggactggttcagcctggcggatctctgagactgtcttgtgccgccagcggcaacatcaacagcagaaactgcatgggctggttcagacaggcccctggcaagggaagagaaggcgtggcagctatcggccaagtgaccggcagaacctactacgtggacagcgtgaagggcagattcaccatcagcctggacaacagcaagaacaccctgtacctccagatgaacagcctgagagccgaggacaccgccgtgtactattgtgctgctgcccctggctgtctgctgtctgcacttagaagcgccgactacagaaactggggccagggcacactggtcaccgtttcttctggatccggcggcggaggatctggcggaggcggatctgggggcggaggctctttcgaacaagttcagcttcaacagcctggcgctgagctggtcaaacctggcgcttctgtgaagatgagctgcaaagccagcggctacgccttcagcagctcttggatcaactggatgaagcagaaacccggccagggactcgaatggatcggccaaatctatcccggcgacggcgacaccaactacaacggcaagttcaagggcagagccacactgaccgccgatacctctagcagcacagcctacatgcagctgagcagcctgaccagcgaagatagcgccgtgtacttctgtgcccggtccatcacaacagtcgtgggctgcgctatggactattggggccagggaacaagcgtgaccgtgtctagtacgcgtatccagaaccctgatcctgccgtgtaccagctgcgggatagcaagagcagcgacaagagcgtgtgtctgttcaccgacttcgacagccagaccaacgtgtcccagagcaaggactccgacgtgtacatcaccgataagtgcgtgctggacatgcggagcatggacttcaagagcaactccgccgtggcctggtccaacaagtccgatttcgcctgcgccaacgccttcaacaacagcattatccccgaggacacattcttcccaagccccgagagcagctgcgacgtgaagctggtggaaaagagcttcgagacagacaccaacctgaacttccagaacctgagcgtgatcggcttcagaatcctgctgctgaaagtggccggctttaacctgctgatgaccctgcggctgtggtccagc

SEQ ID NO: 34173 - DNA, 2724 bp, synthetic construct
  source 1..2724: mol_type = other DNA
atggccttaccagtgaccgccttgctcctgccgctggccttgctgctccacgccgccaggccgcaggttcagctgcaagagtctggccctggcctggtcaagcctagccaaacactgagcctgacctgtaccgtgtctggcggctctatcaccaccggcgagttctactggaactggttcagacagcctcctggcaaaggactggaatggatgggagccattgccgccagcggcagcacaacatacagccctagcttcgagagccggaccagcatcagcagagacaccagcaagaatcagttcagcctgaagctgagcagcgtgacagccgccgatacagccgtgtattactgcggcagatcctttggagtggccgccgtgacaaccggccagaatagaggacagggcaccctggtcacagtgtctagcggtaccggcggaggcggatctggcggcggaggtagcggtggcggaggatctgaattcgacatccagatgacacagagccctagcagcctgtctgccagcgtgggagacagagtgaccatcacatgcaaggccagcgaccacatcaacaactggctggcctggtatcagcagaagcctggacaggcccctaagctgctgatctacggcgctaccacactggaaacaggcgtgcccagcagattttctggcagcggctctggcaccgactacaccctgacaatatccagcctccagcctgaggacttcgccacctactactgtcagcagagctggaacaccccttggacattcggccagggcaccaagctggaaatcaagagactcgaggacctgaagaacgtgttcccacctgaggtggccgtgttcgagcctagcgaggccgagatcagccacacccagaaagccaccctcgtgtgcctggctaccggcttctaccccgaccatgtggaactgtcttggtgggtcaacggcaaagaggtgcacagcggcgtgtgtaccgacccccagccactgaaagaacagcccgccctgaacgacagccggtactgcctgagcagcagactgagagtgtccgccaccttctggcagaacccccggaaccacttcagatgccaggtgcagttctacggcctgagcgagaacgacgagtggacccaggacagagccaagcccgtgacccagatcgtgtctgccgaagcctggggcagagccgattgcggctttaccagcgagagctaccagcagggcgtgctgagcgccaccatcctgtacgagatcctgctgggcaaggccaccctgtacgccgtgctggtgtctgccctggtgctgatggctatggtcaagcggaaggacagccggggaagggccaagcgatctggatctggagcaacaaacttctcactactcaaacaagcaggtgacgtggaggagaatcccgggcctactagtaccatggactggatttggcgcatccttttccttgtcggcgctgctaccggcgcccattccgggccccaggtgcagctggttgaatctggcggaggactggttcagcctggcggatctctgagactgtcttgtgccgccagcggcaacatcaacagcagaaactgcatgggctggttcagacaggcccctggcaagggaagagaaggcgtggcagctatcggccaagtgaccggcagaacctactacgtggacagcgtgaagggcagattcaccatcagcctggacaacagcaagaacaccctgtacctccagatgaacagcctgagagccgaggacaccgccgtgtactattgtgctgctgcccctggctgtctgctgtctgcacttagaagcgccgactacagaaactggggccagggcacactggtcaccgtttcttctggatccggcggcggaggatctggcggaggcggatctgggggcggaggctctttcgaacaagttcagcttcaacagcctggcgctgagctggtcaaacctggcgcttctgtgaagatgagctgcaaagccagcggctacgccttcagcagctcttggatcaactggatgaagcagaaacccggccagggactcgaatggatcggccaaatctatcccggcgacggcgacaccaactacaacggcaagttcaagggcagagccacactgaccgccgatacctctagcagcacagcctacatgcagctgagcagcctgaccagcgaagatagcgccgtgtacttctgtgcccggtccatcacaacagtcgtgggctgcgctatggactattggggccagggaacaagcgtgaccgtgtctagtacgcgtatccagaaccctgatcctgccgtgtaccagctgcgggatagcaagagcagcgacaagagcgtgtgtctgttcaccgacttcgacagccagaccaacgtgtcccagagcaaggactccgacgtgtacatcaccgataagtgcgtgctggacatgcggagcatggacttcaagagcaactccgccgtggcctggtccaacaagtccgatttcgcctgcgccaacgccttcaacaacagcattatccccgaggacacattcttcccaagccccgagagcagctgcgacgtgaagctggtggaaaagagcttcgagacagacaccaacctgaacttccagaacctgagcgtgatcggcttcagaatcctgctgctgaaagtggccggctttaacctgctgatgaccctgcggctgtggtccagc

SEQ ID NO: 34174 - DNA, 1461 bp, synthetic construct
  source 1..1461: mol_type = other DNA
atggccttaccagtgaccgccttgctcctgccgctggccttgctgctccacgccgccaggccggagatcgtgctgacacagagccctgccaccctgtctctgagccctggcgaaagagccaccctgagctgtagagccagccagagcgtgtccagctacctggcctggtatcagcagaagcccggccaggctccccggctgctgatctacgatgccagcaatagagccaccggcatccccgccagattttccggctctggcagcggcaccgacttcaccctgaccatcagctccctggaacccgaggacttcgccgtgtactactgccagcagcggagcaactggcccatcacattcggccagggcacccggctggaaatcaaaggcggaggcggaagtggaggcggaggatctggcggcggaggctctgaagtgcagctggtggaatcaggcggcggactggtgcagcctggcagaagcctgagactgagctgtgccgccagcggcttcaccttcaacgactacgccatgcactgggtgcgccaggcccctggaaaaggactggaatgggtgtccacaatcagctggaacagcggcagcatcggctacgccgatagcgtgaagggccggttcaccatcagccgggacaacgccaagaagtccctgtacctccagatgaacagcctgcgggccgaggacacagccctgtactattgcgccaaggacatccagtacggcaactactactacggcatggacgtgtggggccagggaaccaccgtgaccgtgtcatctacgcgtaaaattgaagttatgtatcctcctccttacctagacaatgagaagagcaatggaaccattatccatgtgaaagggaaacacctttgtccaagtcccctatttcccggaccttctaagcccttttgggtgctggtggtggttgggggagtcctggcttgctatagcttgctagtaacagtggcctttattattttctgggtgaggagtaagaggagcaggctcctgcacagtgactacatgaacatgactccacgccgccccggacccacccgcaagcattaccagccctatgccccaccacgcgacttcgcagcctatcgctccagagtgaagttcagcaggagcgcagacgcccccgcgtaccagcagggccagaaccagctctataacgagctcaatctaggacgaagagaggagtacgatgttttggacaagagacgtggccgggaccctgagatggggggaaagccgagaaggaagaaccctcaggaaggcctgtacaatgaactgcagaaagataagatggcggaggcctacagtgagattgggatgaaaggcgagcgccggaggggcaaggggcacgatggcctttaccagggtctcagtacagccaccaaggacacctacgacgcccttcacatgcaggccctgccccctcgc

SEQ ID NO: 34175 - DNA, 1479 bp, synthetic construct
  source 1..1479: mol_type = other DNA
atggccttaccagtgaccgccttgctcctgccgctggccttgctgctccacgccgccaggccggagatcgtgctgacacagagccctgccaccctgtctctgagccctggcgaaagagccaccctgagctgtagagccagccagagcgtgtccagctacctggcctggtatcagcagaagcccggccaggctccccggctgctgatctacgatgccagcaatagagccaccggcatccccgccagattttccggctctggcagcggcaccgacttcaccctgaccatcagctccctggaacccgaggacttcgccgtgtactactgccagcagcggagcaactggcccatcacattcggccagggcacccggctggaaatcaaaggcggaggcggaagtggaggcggaggatctggcggcggaggctctgaagtgcagctggtggaatcaggcggcggactggtgcagcctggcagaagcctgagactgagctgtgccgccagcggcttcaccttcaacgactacgccatgcactgggtgcgccaggcccctggaaaaggactggaatgggtgtccacaatcagctggaacagcggcagcatcggctacgccgatagcgtgaagggccggttcaccatcagccgggacaacgccaagaagtccctgtacctccagatgaacagcctgcgggccgaggacacagccctgtactattgcgccaaggacatccagtacggcaactactactacggcatggacgtgtggggccagggaaccaccgtgaccgtgtcatctacgcgtgcgaagcccaccacgacgccagcgccgcgaccaccaacaccggcgcccaccatcgcgtcgcagcccctgtccctgcgcccagaggcgtgccggccagcggcggggggcgcagtgcacacgagggggctggacttcgcctgtgacatctacatctgggcgcccttggccgggacttgtggggtccttctcctgtcactggttatcaccctttactgcaaacggggcagaaagaaactcctgtatatattcaaacaaccatttatgagaccagtacaaactactcaagaggaagatggctgtagctgccgatttccagaagaagaagaaggaggatgtgaactgagagtgaagttcagcaggagcgcagacgcccccgcgtaccagcagggccagaaccagctctataacgagctgaatctaggacgaagagaggagtacgatgttttggacaagagacgtggccgggaccctgagatggggggaaagccgagaaggaagaaccctcaggaaggcctgtacaatgaactgcagaaagataagatggcggaggcctacagtgagattgggatgaaaggcgagcgccggaggggcaaggggcacgatggcctttaccagggtctcagtacagccaccaaggacacctacgacgcccttcacatgcaggccctgccccctcgc

SEQ ID NO: 34176 - DNA, 1479 bp, synthetic construct
  source 1..1479: mol_type = other DNA
atggccttaccagtgaccgccttgctcctgccgctggccttgctgctccacgccgccaggccggaagtgcagctggtggaatcaggcggcggactggtgcagcctggcagaagcctgagactgagctgtgccgccagcggcttcaccttcaacgactacgccatgcactgggtgcgccaggcccctggaaaaggactggaatgggtgtccacaatcagctggaacagcggcagcatcggctacgccgatagcgtgaagggccggttcaccatcagccgggacaacgccaagaagtccctgtacctccagatgaacagcctgcgggccgaggacacagccctgtactattgcgccaaggacatccagtacggcaactactactacggcatggacgtgtggggccagggaaccaccgtgaccgtgtcatctggcggaggcggaagtggaggcggaggatctggcggcggaggctctgagatcgtgctgacacagagccctgccaccctgtctctgagccctggcgaaagagccaccctgagctgtagagccagccagagcgtgtccagctacctggcctggtatcagcagaagcccggccaggctccccggctgctgatctacgatgccagcaatagagccaccggcatccccgccagattttccggctctggcagcggcaccgacttcaccctgaccatcagctccctggaacccgaggacttcgccgtgtactactgccagcagcggagcaactggcccatcacattcggccagggcacccggctggaaatcaaaacgcgtgcgaagcccaccacgacgccagcgccgcgaccaccaacaccggcgcccaccatcgcgtcgcagcccctgtccctgcgcccagaggcgtgccggccagcggcggggggcgcagtgcacacgagggggctggacttcgcctgtgacatctacatctgggcgcccttggccgggacttgtggggtccttctcctgtcactggttatcaccctttactgcaaacggggcagaaagaaactcctgtatatattcaaacaaccatttatgagaccagtacaaactactcaagaggaagatggctgtagctgccgatttccagaagaagaagaaggaggatgtgaactgagagtgaagttcagcaggagcgcagacgcccccgcgtaccagcagggccagaaccagctctataacgagctgaatctaggacgaagagaggagtacgatgttttggacaagagacgtggccgggaccctgagatggggggaaagccgagaaggaagaaccctcaggaaggcctgtacaatgaactgcagaaagataagatggcggaggcctacagtgagattgggatgaaaggcgagcgccggaggggcaaggggcacgatggcctttaccagggtctcagtacagccaccaaggacacctacgacgcccttcacatgcaggccctgccccctcgc

SEQ ID NO: 34177 - DNA, 1878 bp, synthetic construct
  source 1..1878: mol_type = other DNA
atggccttaccagtgaccgccttgctcctgccgctggccttgctgctccacgccgccaggccggagatcgtgctgacacagagccctgccaccctgtctctgagccctggcgaaagagccaccctgagctgtagagccagccagagcgtgtccagctacctggcctggtatcagcagaagcccggccaggctccccggctgctgatctacgatgccagcaatagagccaccggcatccccgccagattttccggctctggcagcggcaccgacttcaccctgaccatcagctccctggaacccgaggacttcgccgtgtactactgccagcagcggagcaactggcccatcacattcggccagggcacccggctggaaatcaaactcgagatccagaaccctgatcctgccgtgtaccagctgcgggatagcaagagcagcgacaagagcgtgtgtctgttcaccgacttcgacagccagaccaacgtgtcccagagcaaggactccgacgtgtacatcaccgataagtgcgtgctggacatgcggagcatggacttcaagagcaactccgccgtggcctggtccaacaagtccgatttcgcctgcgccaacgccttcaacaacagcattatccccgaggacacattcttcccaagcagcgacgtgccctgcgacgtgaagctggtggaaaagagcttcgagacagacaccaacctgaacttccagaacctgagcgtgatcggcttcagaatcctgctgctgaaagtggccggctttaacctgctgatgaccctgcggctgtggtccagccgcgccaagagaagcggatctggcgtgaagcagaccctgaatttcgacctgctgaagctggctggcgacgtggaatccaacccaggccctactagtatggactggatttggcgcatccttttccttgtcggcgctgctaccggcgcgcattccttcgaagaagtgcagctggtggaatcaggcggcggactggtgcagcctggcagaagcctgagactgagctgtgccgccagcggcttcaccttcaacgactacgccatgcactgggtgcgccaggcccctggaaaaggactggaatgggtgtccacaatcagctggaacagcggcagcatcggctacgccgatagcgtgaagggccggttcaccatcagccgggacaacgccaagaagtccctgtacctccagatgaacagcctgcgggccgaggacacagccctgtactattgcgccaaggacatccagtacggcaactactactacggcatggacgtgtggggccagggaaccaccgtgaccgtgtcatctacgcgtgaggacctgaagaacgtgttcccacctgaggtggccgtgttcgagcctagcaaggccgagatcgcccacacccagaaagccaccctcgtgtgcctggctaccggcttctaccccgaccatgtggaactgtcttggtgggtcaacggcaaagaggtgcacagcggcgtgtgtaccgacccccagccactgaaagaacagcccgccctgaacgacagccggtactgcctgagcagcagactgagagtgtccgccaccttctggcagaacccccggaaccacttcagatgccaggtgcagttctacggcctgagcgagaacgacgagtggacccaggacagagccaagcccgtgacccagatcgtgtctgccgaagcctggggcagagccgattgcggcatcaccagcgccagctaccaccagggcgtgctgagcgccaccatcctgtacgagatcctgctgggcaaggccaccctgtacgccgtgctggtgtctgccctggtgctgatggctatggtcaagcggaaggacagccgggga

SEQ ID NO: 34178 - DNA, 1866 bp, synthetic construct
  source 1..1866: mol_type = other DNA
atggccttaccagtgaccgccttgctcctgccgctggccttgctgctccacgccgccaggccggagatcgtgctgacacagagccctgccaccctgtctctgagccctggcgaaagagccaccctgagctgtagagccagccagagcgtgtccagctacctggcctggtatcagcagaagcccggccaggctccccggctgctgatctacgatgccagcaatagagccaccggcatccccgccagattttccggctctggcagcggcaccgacttcaccctgaccatcagctccctggaacccgaggacttcgccgtgtactactgccagcagcggagcaactggcccatcacattcggccagggcacccggctggaaatcaaactcgaggacctgaagaacgtgttcccacctgaggtggccgtgttcgagcctagcaaggccgagatcgcccacacccagaaagccaccctcgtgtgcctggctaccggcttctaccccgaccatgtggaactgtcttggtgggtcaacggcaaagaggtgcacagcggcgtgtgtaccgacccccagccactgaaagaacagcccgccctgaacgacagccggtactgcctgagcagcagactgagagtgtccgccaccttctggcagaacccccggaaccacttcagatgccaggtgcagttctacggcctgagcgagaacgacgagtggacccaggacagagccaagcccgtgacccagatcgtgtctgccgaagcctggggcagagccgattgcggcatcaccagcgccagctaccaccagggcgtgctgagcgccaccatcctgtacgagatcctgctgggcaaggccaccctgtacgccgtgctggtgtctgccctggtgctgatggctatggtcaagcggaaggacagccggggaagggccaagcgatctggatctggagcaacaaacttctcactactcaaacaagcaggtgacgtggaggagaatcccgggcctactagtatggactggatttggcgcatccttttccttgtcggcgctgctaccggcgcgcattccttcgaagaagtgcagctggtggaatcaggcggcggactggtgcagcctggcagaagcctgagactgagctgtgccgccagcggcttcaccttcaacgactacgccatgcactgggtgcgccaggcccctggaaaaggactggaatgggtgtccacaatcagctggaacagcggcagcatcggctacgccgatagcgtgaagggccggttcaccatcagccgggacaacgccaagaagtccctgtacctccagatgaacagcctgcgggccgaggacacagccctgtactattgcgccaaggacatccagtacggcaactactactacggcatggacgtgtggggccagggaaccaccgtgaccgtgtcatctacgcgtatccagaaccctgatcctgccgtgtaccagctgcgggatagcaagagcagcgacaagagcgtgtgtctgttcaccgacttcgacagccagaccaacgtgtcccagagcaaggactccgacgtgtacatcaccgataagtgcgtgctggacatgcggagcatggacttcaagagcaactccgccgtggcctggtccaacaagtccgatttcgcctgcgccaacgccttcaacaacagcattatccccgaggacacattcttcccaagcagcgacgtgccctgcgacgtgaagctggtggaaaagagcttcgagacagacaccaacctgaacttccagaacctgagcgtgatcggcttcagaatcctgctgctgaaagtggccggctttaacctgctgatgaccctgcggctgtggtccagc

SEQ ID NO: 34179 - DNA, 1866 bp, synthetic construct
  source 1..1866: mol_type = other DNA
atggccttaccagtgaccgccttgctcctgccgctggccttgctgctccacgccgccaggccggagatcgtgctgacacagagccctgccaccctgtctctgagccctggcgaaagagccaccctgagctgtagagccagccagagcgtgtccagctacctggcctggtatcagcagaagcccggccaggctccccggctgctgatctacgatgccagcaatagagccaccggcatccccgccagattttccggctctggcagcggcaccgacttcaccctgaccatcagctccctggaacccgaggacttcgccgtgtactactgccagcagcggagcaactggcccatcacattcggccagggcacccggctggaaatcaaactcgaggacctgaagaacgtgttcccacctgaggtggccgtgttcgagcctagcgaggccgagatcagccacacccagaaagccaccctcgtgtgcctggctaccggcttctaccccgaccatgtggaactgtcttggtgggtcaacggcaaagaggtgcacagcggcgtgtgtaccgacccccagccactgaaagaacagcccgccctgaacgacagccggtactgcctgagcagcagactgagagtgtccgccaccttctggcagaacccccggaaccacttcagatgccaggtgcagttctacggcctgagcgagaacgacgagtggacccaggacagagccaagcccgtgacccagatcgtgtctgccgaagcctggggcagagccgattgcggctttaccagcgagagctaccagcagggcgtgctgagcgccaccatcctgtacgagatcctgctgggcaaggccaccctgtacgccgtgctggtgtctgccctggtgctgatggctatggtcaagcggaaggacagccggggaagggccaagcgatctggatctggagcaacaaacttctcactactcaaacaagcaggtgacgtggaggagaatcccgggcctactagtatggactggatttggcgcatccttttccttgtcggcgctgctaccggcgcgcattccttcgaagaagtgcagctggtggaatcaggcggcggactggtgcagcctggcagaagcctgagactgagctgtgccgccagcggcttcaccttcaacgactacgccatgcactgggtgcgccaggcccctggaaaaggactggaatgggtgtccacaatcagctggaacagcggcagcatcggctacgccgatagcgtgaagggccggttcaccatcagccgggacaacgccaagaagtccctgtacctccagatgaacagcctgcgggccgaggacacagccctgtactattgcgccaaggacatccagtacggcaactactactacggcatggacgtgtggggccagggaaccaccgtgaccgtgtcatctacgcgtatccagaaccctgatcctgccgtgtaccagctgcgggatagcaagagcagcgacaagagcgtgtgtctgttcaccgacttcgacagccagaccaacgtgtcccagagcaaggactccgacgtgtacatcaccgataagtgcgtgctggacatgcggagcatggacttcaagagcaactccgccgtggcctggtccaacaagtccgatttcgcctgcgccaacgccttcaacaacagcattatccccgaggacacattcttcccaagccccgagagcagctgcgacgtgaagctggtggaaaagagcttcgagacagacaccaacctgaacttccagaacctgagcgtgatcggcttcagaatcctgctgctgaaagtggccggctttaacctgctgatgaccctgcggctgtggtccagc

SEQ ID NO: 34180 - DNA, 1878 bp, synthetic construct
  source 1..1878: mol_type = other DNA
atggccttaccagtgaccgccttgctcctgccgctggccttgctgctccacgccgccaggccggagatcgtgctgacacagagccctgccaccctgtctctgagccctggcgaaagagccaccctgagctgtagagccagccagagcgtgtccagctacctggcctggtatcagcagaagcccggccaggctccccggctgctgatctacgatgccagcaatagagccaccggcatccccgccagattttccggctctggcagcggcaccgacttcaccctgaccatcagctccctggaacccgaggacttcgccgtgtactactgccagcagcggagcaactggcccatcacattcggccagggcacccggctggaaatcaaactcgagatccagaaccctgatcctgccgtgtaccagctgcgggatagcaagagcagcgacaagagcgtgtgtctgttcaccgacttcgacagccagaccaacgtgtcccagagcaaggactccgacgtgtacatcaccgataagtgcgtgctggacatgcggagcatggacttcaagagcaactccgccgtggcctggtccaacaagtccgatttcgcctgcgccaacgccttcaacaacagcattatccccgaggacacattcttcccaagccccgagagcagctgcgacgtgaagctggtggaaaagagcttcgagacagacaccaacctgaacttccagaacctgagcgtgatcggcttcagaatcctgctgctgaaagtggccggctttaacctgctgatgaccctgcggctgtggtccagccgcgccaagagaagcggatctggcgtgaagcagaccctgaatttcgacctgctgaagctggctggcgacgtggaatccaacccaggccctactagtatggactggatttggcgcatccttttccttgtcggcgctgctaccggcgcgcattccttcgaagaagtgcagctggtggaatcaggcggcggactggtgcagcctggcagaagcctgagactgagctgtgccgccagcggcttcaccttcaacgactacgccatgcactgggtgcgccaggcccctggaaaaggactggaatgggtgtccacaatcagctggaacagcggcagcatcggctacgccgatagcgtgaagggccggttcaccatcagccgggacaacgccaagaagtccctgtacctccagatgaacagcctgcgggccgaggacacagccctgtactattgcgccaaggacatccagtacggcaactactactacggcatggacgtgtggggccagggaaccaccgtgaccgtgtcatctacgcgtgaggacctgaagaacgtgttcccacctgaggtggccgtgttcgagcctagcgaggccgagatcagccacacccagaaagccaccctcgtgtgcctggctaccggcttctaccccgaccatgtggaactgtcttggtgggtcaacggcaaagaggtgcacagcggcgtgtgtaccgacccccagccactgaaagaacagcccgccctgaacgacagccggtactgcctgagcagcagactgagagtgtccgccaccttctggcagaacccccggaaccacttcagatgccaggtgcagttctacggcctgagcgagaacgacgagtggacccaggacagagccaagcccgtgacccagatcgtgtctgccgaagcctggggcagagccgattgcggctttaccagcgagagctaccagcagggcgtgctgagcgccaccatcctgtacgagatcctgctgggcaaggccaccctgtacgccgtgctggtgtctgccctggtgctgatggctatggtcaagcggaaggacagccgggga

SEQ ID NO: 34181 - DNA, 1914 bp, synthetic construct
  source 1..1914: mol_type = other DNA
atggccttaccagtgaccgccttgctcctgccgctggccttgctgctccacgccgccaggccgctcgaggaggacctgaagaacgtgttcccacctgaggtggccgtgttcgagcctagcaaggccgagatcgcccacacccagaaagccaccctcgtgtgcctggctaccggcttctaccccgaccatgtggaactgtcttggtgggtcaacggcaaagaggtgcacagcggcgtgtgtaccgacccccagccactgaaagaacagcccgccctgaacgacagccggtactgcctgagcagcagactgagagtgtccgccaccttctggcagaacccccggaaccacttcagatgccaggtgcagttctacggcctgagcgagaacgacgagtggacccaggacagagccaagcccgtgacccagatcgtgtctgccgaagcctggggcagagccgattgcggcatcaccagcgccagctaccaccagggcgtgctgagcgccaccatcctgtacgagatcctgctgggcaaggccaccctgtacgccgtgctggtgtctgccctggtgctgatggctatggtcaagcggaaggacagccggggaagggccaagcgatctggatctggagcaacaaacttctcactactcaaacaagcaggtgacgtggaggagaatcccgggcctactagcatggccttaccagtgaccgccttgctcctgccgctggccttgctgctccacgccgccaggccggagatcgtgctgacacagagccctgccaccctgtctctgagccctggcgaaagagccaccctgagctgtagagccagccagagcgtgtccagctacctggcctggtatcagcagaagcccggccaggctccccggctgctgatctacgatgccagcaatagagccaccggcatccccgccagattttccggctctggcagcggcaccgacttcaccctgaccatcagctccctggaacccgaggacttcgccgtgtactactgccagcagcggagcaactggcccatcacattcggccagggcacccggctggaaatcaaaggcggaggcggaagtggaggcggaggatctggcggcggaggctctgaagtgcagctggtggaatcaggcggcggactggtgcagcctggcagaagcctgagactgagctgtgccgccagcggcttcaccttcaacgactacgccatgcactgggtgcgccaggcccctggaaaaggactggaatgggtgtccacaatcagctggaacagcggcagcatcggctacgccgatagcgtgaagggccggttcaccatcagccgggacaacgccaagaagtccctgtacctccagatgaacagcctgcgggccgaggacacagccctgtactattgcgccaaggacatccagtacggcaactactactacggcatggacgtgtggggccagggaaccaccgtgaccgtgtcatctacgcgtatccagaaccctgatcctgccgtgtaccagctgcgggatagcaagagcagcgacaagagcgtgtgtctgttcaccgacttcgacagccagaccaacgtgtcccagagcaaggactccgacgtgtacatcaccgataagtgcgtgctggacatgcggagcatggacttcaagagcaactccgccgtggcctggtccaacaagtccgatttcgcctgcgccaacgccttcaacaacagcattatccccgaggacacattcttcccaagcagcgacgtgccctgcgacgtgaagctggtggaaaagagcttcgagacagacaccaacctgaacttccagaacctgagcgtgatcggcttcagaatcctgctgctgaaagtggccggctttaacctgctgatgaccctgcggctgtggtccagc

SEQ ID NO: 34182 - DNA, 1935 bp, synthetic construct
  source 1..1935: mol_type = other DNA
atggccttaccagtgaccgccttgctcctgccgctggccttgctgctccacgccgccaggccgctcgagggctccggcgatcgccctgatcctgccgtgtaccagctgcgggatagcaagagcagcgacaagagcgtgtgtctgttcaccgacttcgacagccagaccaacgtgtcccagagcaaggactccgacgtgtacatcaccgataagtgcgtgctggacatgcggagcatggacttcaagagcaactccgccgtggcctggtccaacaagtccgatttcgcctgcgccaacgccttcaacaacagcattatccccgaggacacattcttcccaagccccgagagcagctgcgacgtgaagctggtggaaaagagcttcgagacagacaccaacctgaacttccagaacctgagcgtgatcggcttcagaatcctgctgctgaaagtggccggctttaacctgctgatgaccctgcggctgtggtccagctctagtcgcgccaagagaagcggatctggcgtgaagcagaccctgaatttcgacctgctgaagctggctggcgacgtggaatccaacccaggccccactagcatggccttaccagtgaccgccttgctcctgccgctggccttgctgctccacgccgccaggccggagatcgtgctgacacagagccctgccaccctgtctctgagccctggcgaaagagccaccctgagctgtagagccagccagagcgtgtccagctacctggcctggtatcagcagaagcccggccaggctccccggctgctgatctacgatgccagcaatagagccaccggcatccccgccagattttccggctctggcagcggcaccgacttcaccctgaccatcagctccctggaacccgaggacttcgccgtgtactactgccagcagcggagcaactggcccatcacattcggccagggcacccggctggaaatcaaaggcggaggcggaagtggaggcggaggatctggcggcggaggctctgaagtgcagctggtggaatcaggcggcggactggtgcagcctggcagaagcctgagactgagctgtgccgccagcggcttcaccttcaacgactacgccatgcactgggtgcgccaggcccctggaaaaggactggaatgggtgtccacaatcagctggaacagcggcagcatcggctacgccgatagcgtgaagggccggttcaccatcagccgggacaacgccaagaagtccctgtacctccagatgaacagcctgcgggccgaggacacagccctgtactattgcgccaaggacatccagtacggcaactactactacggcatggacgtgtggggccagggaaccaccgtgaccgtgtcatctacgcgtgaggacctgaagaacgtgttcccacctgaggtggccgtgttcgagcctagcgaggccgagatcagccacacccagaaagccaccctcgtgtgcctggctaccggcttctaccccgaccatgtggaactgtcttggtgggtcaacggcaaagaggtgcacagcggcgtgtgtaccgacccccagccactgaaagaacagcccgccctgaacgacagccggtactgcctgagcagcagactgagagtgtccgccaccttctggcagaacccccggaaccacttcagatgccaggtgcagttctacggcctgagcgagaacgacgagtggacccaggacagagccaagcccgtgacccagatcgtgtctgccgaagcctggggcagagccgattgcggctttaccagcgagagctaccagcagggcgtgctgagcgccaccatcctgtacgagatcctgctgggcaaggccaccctgtacgccgtgctggtgtctgccctggtgctgatggctatggtcaagcggaaggacagccgggga

SEQ ID NO: 34183 - DNA, 1866 bp, synthetic construct
  source 1..1866: mol_type = other DNA
atggccttaccagtgaccgccttgctcctgccgctggccttgctgctccacgccgccaggccggagatcgtgctgacacagagccctgccaccctgtctctgagccctggcgaaagagccaccctgagctgtagagccagccagagcgtgtccagctacctggcctggtatcagcagaagcccggccaggctccccggctgctgatctacgatgccagcaatagagccaccggcatccccgccagattttccggctctggcagcggcaccgacttcaccctgaccatcagctccctggaacccgaggacttcgccgtgtactactgccagcagcggagcaactggcccatcacattcggccagggcacccggctggaaatcaaactcgaggacctgaagaacgtgttcccacctgaggtggccgtgttcgagcctagcgaggccgagatcagccacacccagaaagccaccctcgtgtgcctggctaccggcttctaccccgaccatgtggaactgtcttggtgggtcaacggcaaagaggtgcacagcggcgtgtctaccgacccccagccactgaaagaacagcccgccctgaacgacagccggtactgcctgagcagcagactgagagtgtccgccaccttctggcagaacccccggaaccacttcagatgccaggtgcagttctacggcctgagcgagaacgacgagtggacccaggacagagccaagcccgtgacccagatcgtgtctgccgaagcctggggcagagccgattgcggctttaccagcgagagctaccagcagggcgtgctgagcgccaccatcctgtacgagatcctgctgggcaaggccaccctgtacgccgtgctggtgtctgccctggtgctgatggctatggtcaagcggaaggacagccggggaagggccaagcgatctggatctggagcaacaaacttctcactactcaaacaagcaggtgacgtggaggagaatcccgggcctactagtatggactggatttggcgcatccttttccttgtcggcgctgctaccggcgcgcattccttcgaagaagtgcagctggtggaatcaggcggcggactggtgcagcctggcagaagcctgagactgagctgtgccgccagcggcttcaccttcaacgactacgccatgcactgggtgcgccaggcccctggaaaaggactggaatgggtgtccacaatcagctggaacagcggcagcatcggctacgccgatagcgtgaagggccggttcaccatcagccgggacaacgccaagaagtccctgtacctccagatgaacagcctgcgggccgaggacacagccctgtactattgcgccaaggacatccagtacggcaactactactacggcatggacgtgtggggccagggaaccaccgtgaccgtgtcatctacgcgtatccagaaccctgatcctgccgtgtaccagctgcgggatagcaagagcagcgacaagagcgtgtgtctgttcaccgacttcgacagccagaccaacgtgtcccagagcaaggactccgacgtgtacatcaccgataagaccgtgctggacatgcggagcatggacttcaagagcaactccgccgtggcctggtccaacaagtccgatttcgcctgcgccaacgccttcaacaacagcattatccccgaggacacattcttcccaagccccgagagcagctgcgacgtgaagctggtggaaaagagcttcgagacagacaccaacctgaacttccagaacctgagcgtgatcggcttcagaatcctgctgctgaaagtggccggctttaacctgctgatgaccctgcggctgtggtccagc

SEQ ID NO: 34184 - DNA, 1890 bp, synthetic construct
  source 1..1890: mol_type = other DNA
atggccttaccagtgaccgccttgctcctgccgctggccttgctgctccacgccgccaggccggagatcgtgctgacacagagccctgccaccctgtctctgagccctggcgaaagagccaccctgagctgtagagccagccagagcgtgtccagctacctggcctggtatcagcagaagcccggccaggctccccggctgctgatctacgatgccagcaatagagccaccggcatccccgccagattttccggctctggcagcggcaccgacttcaccctgaccatcagctccctggaacccgaggacttcgccgtgtactactgccagcagcggagcaactggcccatcacattcggccagggcacccggctggaaatcaaactcgaggacaagcagctggacgccgacgtgtcccccaagcctaccatcttcctgccctctatcgccgagacaaagctccagaaggccggcacctacctgtgcctgctggaaaagttcttcccagatgtgattaagatccactggcaggaaaagaagtccaacaccatcctgggcagccaggaaggcaacaccatgaagaccaacgacacctacatgaagttcagctggctgaccgtgcccgagaagtccctggacaaagaacacagatgcatcgtgcggcacgaaaacaacaagaacggcgtggaccaggaaatcatcttcccacccatcaagaccgatgtgattacaatggaccccaaggacaactgctccaaggacgccaacgataccctgctgctccagctgaccaacaccagcgcctactacatgtacttgttgctgctgctgaagtccgtggtgtacttcgccatcatcacatgctgcctgctgcggagaaccgccttctgctgcaacggcgagaagtctagggccaagcgatctggatctggagcaacaaacttctcactactcaaacaagcaggtgacgtggaggagaatcccgggcctactagtatggactggatttggcgcatccttttccttgtcggcgctgctaccggcgcgcattccttcgaagaagtgcagctggtggaatcaggcggcggactggtgcagcctggcagaagcctgagactgagctgtgccgccagcggcttcaccttcaacgactacgccatgcactgggtgcgccaggcccctggaaaaggactggaatgggtgtccacaatcagctggaacagcggcagcatcggctacgccgatagcgtgaagggccggttcaccatcagccgggacaacgccaagaagtccctgtacctccagatgaacagcctgcgggccgaggacacagccctgtactattgcgccaaggacatccagtacggcaactactactacggcatggacgtgtggggccagggaaccaccgtgaccgtgtcatctacgcgtagccagcctcacaccaagcccagcgtgttcgtgatgaagaacggcaccaacgtggcctgcctcgtgaaagagttctaccccaaggacatcaggatcaacctggtgtccagcaagaagatcaccgagttcgaccccgccatcgtgatctcccccagcggcaagtacaacgccgtgaagctggggaagtacgaggacagcaacagcgtgacctgctccgtgcagcacgacaacaagaccgtgcacagcaccgactttgaagtgaaaaccgactccaccgaccacgtgaagcccaaagagacagagaacaccaagcagcccagcaagagctgccacaagcccaaggccatcgtgcacaccgagaaagtgaacatgatgagcctgaccgtgctgggcctgcggatgctgttcgccaaaaccgtggccgtgaacttcctgctgaccgccaagctgttcttcctc

SEQ ID NO: 34185 - DNA, 1890 bp, synthetic construct
  source 1..1890: mol_type = other DNA
atggccttaccagtgaccgccttgctcctgccgctggccttgctgctccacgccgccaggccggagatcgtgctgacacagagccctgccaccctgtctctgagccctggcgaaagagccaccctgagctgtagagccagccagagcgtgtccagctacctggcctggtatcagcagaagcccggccaggctccccggctgctgatctacgatgccagcaatagagccaccggcatccccgccagattttccggctctggcagcggcaccgacttcaccctgaccatcagctccctggaacccgaggacttcgccgtgtactactgccagcagcggagcaactggcccatcacattcggccagggcacccggctggaaatcaaactcgagagccagcctcacaccaagcccagcgtgttcgtgatgaagaacggcaccaacgtggcctgcctcgtgaaagagttctaccccaaggacatcaggatcaacctggtgtccagcaagaagatcaccgagttcgaccccgccatcgtgatctcccccagcggcaagtacaacgccgtgaagctggggaagtacgaggacagcaacagcgtgacctgctccgtgcagcacgacaacaagaccgtgcacagcaccgactttgaagtgaaaaccgactccaccgaccacgtgaagcccaaagagacagagaacaccaagcagcccagcaagagctgccacaagcccaaggccatcgtgcacaccgagaaagtgaacatgatgagcctgaccgtgctgggcctgcggatgctgttcgccaaaaccgtggccgtgaacttcctgctgaccgccaagctgttcttcctcagggccaagcgatctggatctggagcaacaaacttctcactactcaaacaagcaggtgacgtggaggagaatcccgggcctactagtatggactggatttggcgcatccttttccttgtcggcgctgctaccggcgcgcattccttcgaagaagtgcagctggtggaatcaggcggcggactggtgcagcctggcagaagcctgagactgagctgtgccgccagcggcttcaccttcaacgactacgccatgcactgggtgcgccaggcccctggaaaaggactggaatgggtgtccacaatcagctggaacagcggcagcatcggctacgccgatagcgtgaagggccggttcaccatcagccgggacaacgccaagaagtccctgtacctccagatgaacagcctgcgggccgaggacacagccctgtactattgcgccaaggacatccagtacggcaactactactacggcatggacgtgtggggccagggaaccaccgtgaccgtgtcatctacgcgtgacaagcagctggacgccgacgtgtcccccaagcctaccatcttcctgccctctatcgccgagacaaagctccagaaggccggcacctacctgtgcctgctggaaaagttcttcccagatgtgattaagatccactggcaggaaaagaagtccaacaccatcctgggcagccaggaaggcaacaccatgaagaccaacgacacctacatgaagttcagctggctgaccgtgcccgagaagtccctggacaaagaacacagatgcatcgtgcggcacgaaaacaacaagaacggcgtggaccaggaaatcatcttcccacccatcaagaccgatgtgattacaatggaccccaaggacaactgctccaaggacgccaacgataccctgctgctccagctgaccaacaccagcgcctactacatgtacttgttgctgctgctgaagtccgtggtgtacttcgccatcatcacatgctgcctgctgcggagaaccgccttctgctgcaacggcgagaagtct

SEQ ID NO: 34186 - DNA, 1935 bp, synthetic construct
  source 1..1935: mol_type = other DNA
atggccttaccagtgaccgccttgctcctgccgctggccttgctgctccacgccgccaggccgctcgaggacaagcagctggacgccgacgtgtcccccaagcctaccatcttcctgccctctatcgccgagacaaagctccagaaggccggcacctacctgtgcctgctggaaaagttcttcccagatgtgattaagatccactggcaggaaaagaagtccaacaccatcctgggcagccaggaaggcaacaccatgaagaccaacgacacctacatgaagttcagctggctgaccgtgcccgagaagtccctggacaaagaacacagatgcatcgtgcggcacgaaaacaacaagaacggcgtggaccaggaaatcatcttcccacccatcaagaccgatgtgattacaatggaccccaaggacaactgctccaaggacgccaacgataccctgctgctccagctgaccaacaccagcgcctactacatgtacttgttgctgctgctgaagtccgtggtgtacttcgccatcatcacatgctgcctgctgcggagaaccgccttctgctgcaacggcgagaagtctagggccaagcgatctggatctggagcaacaaacttctcactactcaaacaagcaggtgacgtggaggagaatcccgggcctactagcatggccttaccagtgaccgccttgctcctgccgctggccttgctgctccacgccgccaggccggagatcgtgctgacacagagccctgccaccctgtctctgagccctggcgaaagagccaccctgagctgtagagccagccagagcgtgtccagctacctggcctggtatcagcagaagcccggccaggctccccggctgctgatctacgatgccagcaatagagccaccggcatccccgccagattttccggctctggcagcggcaccgacttcaccctgaccatcagctccctggaacccgaggacttcgccgtgtactactgccagcagcggagcaactggcccatcacattcggccagggcacccggctggaaatcaaaggcggaggcggaagtggaggcggaggatctggcggcggaggctctgaagtgcagctggtggaatcaggcggcggactggtgcagcctggcagaagcctgagactgagctgtgccgccagcggcttcaccttcaacgactacgccatgcactgggtgcgccaggcccctggaaaaggactggaatgggtgtccacaatcagctggaacagcggcagcatcggctacgccgatagcgtgaagggccggttcaccatcagccgggacaacgccaagaagtccctgtacctccagatgaacagcctgcgggccgaggacacagccctgtactattgcgccaaggacatccagtacggcaactactactacggcatggacgtgtggggccagggaaccaccgtgaccgtgtcatctacgcgtagccagcctcacaccaagcccagcgtgttcgtgatgaagaacggcaccaacgtggcctgcctcgtgaaagagttctaccccaaggacatcaggatcaacctggtgtccagcaagaagatcaccgagttcgaccccgccatcgtgatctcccccagcggcaagtacaacgccgtgaagctggggaagtacgaggacagcaacagcgtgacctgctccgtgcagcacgacaacaagaccgtgcacagcaccgactttgaagtgaaaaccgactccaccgaccacgtgaagcccaaagagacagagaacaccaagcagcccagcaagagctgccacaagcccaaggccatcgtgcacaccgagaaagtgaacatgatgagcctgaccgtgctgggcctgcggatgctgttcgccaaaaccgtggccgtgaacttcctgctgaccgccaagctgttcttcctc

SEQ ID NO: 34187 - DNA, 2397 bp, synthetic construct
  source 1..2397: mol_type = other DNA
atggccttaccagtgaccgccttgctcctgccgctggccttgctgctccacgccgccaggccggagatcgtgctgacacagagccctgccaccctgtctctgagccctggcgaaagagccaccctgagctgtagagccagccagagcgtgtccagctacctggcctggtatcagcagaagcccggccaggctccccggctgctgatctacgatgccagcaatagagccaccggcatccccgccagattttccggctctggcagcggcaccgacttcaccctgaccatcagctccctggaacccgaggacttcgccgtgtactactgccagcagcggagcaactggcccatcacattcggccagggcacccggctggaaatcaaaggacagcctaaggccaatcctaccgtgacactgttccctccaagcagcgaagaactccaggccaacaaggccacacttgtgtgcctgatctccgacttctaccctggggctgtgacagtggcttggaaggccgatggatctcctgtgaaagccggcgtggaaaccaccaagccatccaagcagagcaacaacaaatacgccgccagctcctacctgagcctgacacctgagcagtggaagtcccacagatcctacagctgccaagtgacccacgaaggcagcaccgtggaaaagacagtggcccctacagagtgcagcggatcccagagcttcggcctgctggaccccaagctgtgctacctgctggatggcatcctgttcatctacggcgtgatcctgaccgccctgttcctgagagtgaagttcagcagaagcgccgacgcccctgcctaccagcagggacagaaccaactgtacaacgagctgaacctgggcagacgggaagagtacgacgtgctggacaagcggagaggcagggaccctgagatgggcggaaagccccagcggagaaagaacccccaggaaggactgtataacgaactccagaaagacaagatggccgaagcctacagcgagatcggcatgaagggcgagcggagaagaggcaagggccacgatggcctgtaccagggcctgagcaccgccaccaaggacacctatgacgccctgcacatgcaggccctgcctccaagaagggccaagcgatctggatctggagcaacaaacttctcactactcaaacaagcaggtgacgtggaggagaatcccgggcctactagtatggactggatttggcgcatccttttccttgtcggcgctgctaccggcgcgcattccttcgaagaagtgcagctggtggaatcaggcggcggactggtgcagcctggcagaagcctgagactgagctgtgccgccagcggcttcaccttcaacgactacgccatgcactgggtgcgccaggcccctggaaaaggactggaatgggtgtccacaatcagctggaacagcggcagcatcggctacgccgatagcgtgaagggccggttcaccatcagccgggacaacgccaagaagtccctgtacctccagatgaacagcctgcgggccgaggacacagccctgtactattgcgccaaggacatccagtacggcaactactactacggcatggacgtgtggggccagggaaccaccgtgaccgtgtcatctgcctctacaaagggaccctccgtgtttcctctggctcccagcagcaagtctacaagcggaggaacagccgctctgggctgcctggtcaaggattactttcccgagcctgtgaccgtgtcctggaatagcggagcactgacaagcggcgtgcacacctttccagccgtgctgcaaagcagcggcctgtactctctgagcagcgtggtcacagtgcctagctctagcctgggcacccagacctacatctgcaatgtgaaccacaagcctagcaacaccaaggtggacaagagagtggaacccaagagctgtggtacccagagttttgggttgttggaccctaaattgtgctatctgttggacggaatcctgttcatttacggagtgatcctgaccgcattgttcctgcgggttaagttttccagatccgcagacgcacccgcttaccaacaagggcagaaccaactctacaatgaacttaatttggggcggagggaagagtacgacgttctggacaaaaggaggggacgagatcccgagatgggcggaaagcctcagcgaaggaagaatccgcaagaggggctttataacgaactccagaaagataaaatggcagaagcctatagtgagattgggatgaagggagaaaggaggaggggtaaaggtcacgatgggttgtaccaaggattgagcacagccactaaagatacctatgatgcgctccacatgcaggccctgccgccaaga

SEQ ID NO: 34188 - DNA, 2454 bp, synthetic construct
  source 1..2454: mol_type = other DNA
atggccttaccagtgaccgccttgctcctgccgctggccttgctgctccacgccgccaggccggagatcgtgctgacacagagccctgccaccctgtctctgagccctggcgaaagagccaccctgagctgtagagccagccagagcgtgtccagctacctggcctggtatcagcagaagcccggccaggctccccggctgctgatctacgatgccagcaatagagccaccggcatccccgccagattttccggctctggcagcggcaccgacttcaccctgaccatcagctccctggaacccgaggacttcgccgtgtactactgccagcagcggagcaactggcccatcacattcggccagggcacccggctggaaatcaaactcgaggacctgaagaacgtgttcccacctgaggtggccgtgttcgagcctagcgaggccgagatcagccacacccagaaagccaccctcgtgtgcctggctaccggcttctaccccgaccatgtggaactgtcttggtgggtcaacggcaaagaggtgcacagcggcgtgtctaccgacccccagccactgaaagaacagcccgccctgaacgacagccggtactgcctgagcagcagactgagagtgtccgccaccttctggcagaacccccggaaccacttcagatgccaggtgcagttctacggcctgagcgagaacgacgagtggacccaggacagagccaagcccgtgacccagatcgtgtctgccgaagcctggggcagagccgattgcggatcccagagcttcggcctgctggaccccaagctgtgctacctgctggatggcatcctgttcatctacggcgtgatcctgaccgccctgttcctgagagtgaagttcagcagaagcgccgacgcccctgcctaccagcagggacagaaccaactgtacaacgagctgaacctgggcagacgggaagagtacgacgtgctggacaagcggagaggcagggaccctgagatgggcggaaagccccagcggagaaagaacccccaggaaggactgtataacgaactccagaaagacaagatggccgaagcctacagcgagatcggcatgaagggcgagcggagaagaggcaagggccacgatggcctgtaccagggcctgagcaccgccaccaaggacacctatgacgccctgcacatgcaggccctgcctccaagaagggccaagcgatctggatctggagcaacaaacttctcactactcaaacaagcaggtgacgtggaggagaatcccgggcctactagtatggactggatttggcgcatccttttccttgtcggcgctgctaccggcgcgcattccttcgaagaagtgcagctggtggaatcaggcggcggactggtgcagcctggcagaagcctgagactgagctgtgccgccagcggcttcaccttcaacgactacgccatgcactgggtgcgccaggcccctggaaaaggactggaatgggtgtccacaatcagctggaacagcggcagcatcggctacgccgatagcgtgaagggccggttcaccatcagccgggacaacgccaagaagtccctgtacctccagatgaacagcctgcgggccgaggacacagccctgtactattgcgccaaggacatccagtacggcaactactactacggcatggacgtgtggggccagggaaccaccgtgaccgtgtcatctacgcgtatccagaaccctgatcctgccgtgtaccagctgcgggatagcaagagcagcgacaagagcgtgtgtctgttcaccgacttcgacagccagaccaacgtgtcccagagcaaggactccgacgtgtacatcaccgataagaccgtgctggacatgcggagcatggacttcaagagcaactccgccgtggcctggtccaacaagtccgatttcgcctgcgccaacgccttcaacaacagcattatccccgaggacacattcttcccaagccccgagagcagctgcggtacccagagttttgggttgttggaccctaaattgtgctatctgttggacggaatcctgttcatttacggagtgatcctgaccgcattgttcctgcgggttaagttttccagatccgcagacgcacccgcttaccaacaagggcagaaccaactctacaatgaacttaatttggggcggagggaagagtacgacgttctggacaaaaggaggggacgagatcccgagatgggcggaaagcctcagcgaaggaagaatccgcaagaggggctttataacgaactccagaaagataaaatggcagaagcctatagtgagattgggatgaagggagaaaggaggaggggtaaaggtcacgatgggttgtaccaaggattgagcacagccactaaagatacctatgatgcgctccacatgcaggccctgccgccaaga

SEQ ID NO: 34189 - DNA, 2580 bp, synthetic construct
  source 1..2580: mol_type = other DNA
atggccttaccagtgaccgccttgctcctgccgctggccttgctgctccacgccgccaggccggagatcgtgctgacacagagccctgccaccctgtctctgagccctggcgaaagagccaccctgagctgtagagccagccagagcgtgtccagctacctggcctggtatcagcagaagcccggccaggctccccggctgctgatctacgatgccagcaatagagccaccggcatccccgccagattttccggctctggcagcggcaccgacttcaccctgaccatcagctccctggaacccgaggacttcgccgtgtactactgccagcagcggagcaactggcccatcacattcggccagggcacccggctggaaatcaaactcgaggaggacctgaagaacgtgttcccacctgaggtggccgtgttcgagcctagcgaggccgagatcagccacacccagaaagccaccctcgtgtgcctggctaccggcttctaccccgaccatgtggaactgtcttggtgggtcaacggcaaagaggtgcacagcggcgtgtctaccgacccccagccactgaaagaacagcccgccctgaacgacagccggtactgcctgagcagcagactgagagtgtccgccaccttctggcagaacccccggaaccacttcagatgccaggtgcagttctacggcctgagcgagaacgacgagtggacccaggacagagccaagcccgtgacccagatcgtgtctgccgaagcctggggcagagccgattgcggatcccagagcttcggcctgctggaccccaagctgtgctacctgctggatggcatcctgttcatctacggcgtgatcctgaccgccctgttcctgagagtgaagttcagcagaagcgccgacgcccctgcctaccagcagggacagaaccaactgtacaacgagctgaacctgggcagacgggaagagtacgacgtgctggacaagcggagaggcagggaccctgagatgggcggaaagccccagcggagaaagaacccccaggaaggactgtataacgaactccagaaagacaagatggccgaagcctacagcgagatcggcatgaagggcgagcggagaagaggcaagggccacgatggcctgtaccagggcctgagcaccgccaccaaggacacctatgacgccctgcacatgcaggccctgcctccaagaagggccaagcgatctggatctggagcaacaaacttctcactactcaaacaagcaggtgacgtggaggagaatcccgggcctactagtatggactggatttggcgcatccttttccttgtcggcgctgctaccggcgcgcattccttcgaagaagtgcagctggtggaatcaggcggcggactggtgcagcctggcagaagcctgagactgagctgtgccgccagcggcttcaccttcaacgactacgccatgcactgggtgcgccaggcccctggaaaaggactggaatgggtgtccacaatcagctggaacagcggcagcatcggctacgccgatagcgtgaagggccggttcaccatcagccgggacaacgccaagaagtccctgtacctccagatgaacagcctgcgggccgaggacacagccctgtactattgcgccaaggacatccagtacggcaactactactacggcatggacgtgtggggccagggaaccaccgtgaccgtgtcatctacgcgtatccagaaccctgatcctgccgtgtaccagctgcgggatagcaagagcagcgacaagagcgtgtgtctgttcaccgacttcgacagccagaccaacgtgtcccagagcaaggactccgacgtgtacatcaccgataagaccgtgctggacatgcggagcatggacttcaagagcaactccgccgtggcctggtccaacaagtccgatttcgcctgcgccaacgccttcaacaacagcattatccccgaggacacattcttcccaagccccgagagcagctgcggtacccagagttttgggttgttggaccctaaattgtgctatctgttggacggaatcctgttcatttacggagtgatcctgaccgcattgttcctgaggagcaagcggtcacggctgctccacagcgattacatgaatatgacaccacgaagaccgggtcctactcgcaaacactaccaaccctacgcacctccccgcgactttgcagcgtaccgatctcgggttaagttttccagatccgcagacgcacccgcttaccaacaagggcagaaccaactctacaatgaacttaatttggggcggagggaagagtacgacgttctggacaaaaggaggggacgagatcccgagatgggcggaaagcctcagcgaaggaagaatccgcaagaggggctttataacgaactccagaaagataaaatggcagaagcctatagtgagattgggatgaagggagaaaggaggaggggtaaaggtcacgatgggttgtaccaaggattgagcacagccactaaagatacctatgatgcgctccacatgcaggccctgccgccaaga

SEQ ID NO: 34190 - DNA, 2709 bp, synthetic construct
  source 1..2709: mol_type = other DNA
atggccttaccagtgaccgccttgctcctgccgctggccttgctgctccacgccgccaggccggagatcgtgctgacacagagccctgccaccctgtctctgagccctggcgaaagagccaccctgagctgtagagccagccagagcgtgtccagctacctggcctggtatcagcagaagcccggccaggctccccggctgctgatctacgatgccagcaatagagccaccggcatccccgccagattttccggctctggcagcggcaccgacttcaccctgaccatcagctccctggaacccgaggacttcgccgtgtactactgccagcagcggagcaactggcccatcacattcggccagggcacccggctggaaatcaaactcgaggaggacctgaagaacgtgttcccacctgaggtggccgtgttcgagcctagcgaggccgagatcagccacacccagaaagccaccctcgtgtgcctggctaccggcttctaccccgaccatgtggaactgtcttggtgggtcaacggcaaagaggtgcacagcggcgtgtctaccgacccccagccactgaaagaacagcccgccctgaacgacagccggtactgcctgagcagcagactgagagtgtccgccaccttctggcagaacccccggaaccacttcagatgccaggtgcagttctacggcctgagcgagaacgacgagtggacccaggacagagccaagcccgtgacccagatcgtgtctgccgaagcctggggcagagccgattgcggatcccagagcttcggcctgctggaccccaagctgtgctacctgctggatggcatcctgttcatctacggcgtgatcctgaccgccctgttcctgaaacggggcagaaagaaactcctgtatatattcaaacaaccatttatgagaccagtacaaactactcaagaggaagatggctgtagctgccgatttccagaagaagaagaaggaggatgtgaactgagagtgaagttcagcagaagcgccgacgcccctgcctaccagcagggacagaaccaactgtacaacgagctgaacctgggcagacgggaagagtacgacgtgctggacaagcggagaggcagggaccctgagatgggcggaaagccccagcggagaaagaacccccaggaaggactgtataacgaactccagaaagacaagatggccgaagcctacagcgagatcggcatgaagggcgagcggagaagaggcaagggccacgatggcctgtaccagggcctgagcaccgccaccaaggacacctatgacgccctgcacatgcaggccctgcctccaagaagggccaagcgatctggatctggagcaacaaacttctcactactcaaacaagcaggtgacgtggaggagaatcccgggcctactagtatggactggatttggcgcatccttttccttgtcggcgctgctaccggcgcgcattccttcgaagaagtgcagctggtggaatcaggcggcggactggtgcagcctggcagaagcctgagactgagctgtgccgccagcggcttcaccttcaacgactacgccatgcactgggtgcgccaggcccctggaaaaggactggaatgggtgtccacaatcagctggaacagcggcagcatcggctacgccgatagcgtgaagggccggttcaccatcagccgggacaacgccaagaagtccctgtacctccagatgaacagcctgcgggccgaggacacagccctgtactattgcgccaaggacatccagtacggcaactactactacggcatggacgtgtggggccagggaaccaccgtgaccgtgtcatctacgcgtatccagaaccctgatcctgccgtgtaccagctgcgggatagcaagagcagcgacaagagcgtgtgtctgttcaccgacttcgacagccagaccaacgtgtcccagagcaaggactccgacgtgtacatcaccgataagaccgtgctggacatgcggagcatggacttcaagagcaactccgccgtggcctggtccaacaagtccgatttcgcctgcgccaacgccttcaacaacagcattatccccgaggacacattcttcccaagccccgagagcagctgcggtacccagagttttgggttgttggaccctaaattgtgctatctgttggacggaatcctgttcatttacggagtgatcctgaccgcattgttcctgaagagaggccggaagaagctgctgtacatcttcaagcagcctttcatgcggcccgtgcagaccacccaggaagaggacggctgctcctgccggttccccgaggaagaagaaggcggctgcgagctgcgggttaagttttccagatccgcagacgcacccgcttaccaacaagggcagaaccaactctacaatgaacttaatttggggcggagggaagagtacgacgttctggacaaaaggaggggacgagatcccgagatgggcggaaagcctcagcgaaggaagaatccgcaagaggggctttataacgaactccagaaagataaaatggcagaagcctatagtgagattgggatgaagggagaaaggaggaggggtaaaggtcacgatgggttgtaccaaggattgagcacagccactaaagatacctatgatgcgctccacatgcaggccctgccgccaaga

SEQ ID NO: 34191 - DNA, 1770 bp, synthetic construct
  source 1..1770: mol_type = other DNA
atggccttaccagtgaccgccttgctcctgccgctggccttgctgctccacgccgccaggccggagatcgtgctgacacagagccctgccaccctgtctctgagccctggcgaaagagccaccctgagctgtagagccagccagagcgtgtccagctacctggcctggtatcagcagaagcccggccaggctccccggctgctgatctacgatgccagcaatagagccaccggcatccccgccagattttccggctctggcagcggcaccgacttcaccctgaccatcagctccctggaacccgaggacttcgccgtgtactactgccagcagcggagcaactggcccatcacattcggccagggcacccggctggaaatcaaactcgagcagagcttcggcctgctggaccccaagctgtgctacctgctggatggcatcctgttcatctacggcgtgatcctgaccgccctgttcctgagagtgaagttcagcagaagcgccgacgcccctgcctaccagcagggacagaaccaactgtacaacgagctgaacctgggcagacgggaagagtacgacgtgctggacaagcggagaggcagggaccctgagatgggcggaaagccccagcggagaaagaacccccaggaaggactgtataacgaactccagaaagacaagatggccgaagcctacagcgagatcggcatgaagggcgagcggagaagaggcaagggccacgatggcctgtaccagggcctgagcaccgccaccaaggacacctatgacgccctgcacatgcaggccctgcctccaagaagggccaagcgatctggatctggagcaacaaacttctcactactcaaacaagcaggtgacgtggaggagaatcccgggcctactagtatggactggatttggcgcatccttttccttgtcggcgctgctaccggcgcgcattccttcgaagaagtgcagctggtggaatcaggcggcggactggtgcagcctggcagaagcctgagactgagctgtgccgccagcggcttcaccttcaacgactacgccatgcactgggtgcgccaggcccctggaaaaggactggaatgggtgtccacaatcagctggaacagcggcagcatcggctacgccgatagcgtgaagggccggttcaccatcagccgggacaacgccaagaagtccctgtacctccagatgaacagcctgcgggccgaggacacagccctgtactattgcgccaaggacatccagtacggcaactactactacggcatggacgtgtggggccagggaaccaccgtgaccgtgtcatctacgcgtcagagttttgggttgttggaccctaaattgtgctatctgttggacggaatcctgttcatttacggagtgatcctgaccgcattgttcctgcgggttaagttttccagatccgcagacgcacccgcttaccaacaagggcagaaccaactctacaatgaacttaatttggggcggagggaagagtacgacgttctggacaaaaggaggggacgagatcccgagatgggcggaaagcctcagcgaaggaagaatccgcaagaggggctttataacgaactccagaaagataaaatggcagaagcctatagtgagattgggatgaagggagaaaggaggaggggtaaaggtcacgatgggttgtaccaaggattgagcacagccactaaagatacctatgatgcgctccacatgcaggccctgccgccaaga

SEQ ID NO: 34192 - DNA, 1944 bp, synthetic construct
  source 1..1944: mol_type = other DNA
atggccttaccagtgaccgccttgctcctgccgctggccttgctgctccacgccgccaggccggagatcgtgctgacacagagccctgccaccctgtctctgagccctggcgaaagagccaccctgagctgtagagccagccagagcgtgtccagctacctggcctggtatcagcagaagcccggccaggctccccggctgctgatctacgatgccagcaatagagccaccggcatccccgccagattttccggctctggcagcggcaccgacttcaccctgaccatcagctccctggaacccgaggacttcgccgtgtactactgccagcagcggagcaactggcccatcacattcggccagggcacccggctggaaatcaaactcgagggacagcctaaggccaatcctaccgtgacactgttccctccaagcagcgaagaactccaggccaacaaggccacacttgtgtgcctgatctccgacttctaccctggggctgtgacagtggcttggaaggccgatggatctcctgtgaaagccggcgtggaaaccaccaagccatccaagcagagcaacaacaaatacgccgccagctcctacctgagcctgacacctgagcagtggaagtcccacagatcctacagctgccaagtgacccacgaaggcagcaccgtggaaaagacagtggcccctacagagtgcagccccatcaagaccgatgtgattacaatggaccccaaggacaactgctccaaggacgccaacgataccctgctgctccagctgaccaacaccagcgcctactacatgtacttgttgctgctgctgaagtccgtggtgtacttcgccatcatcacatgctgcctgctgcggagaaccgccttctgctgcaacggcgagaagtctagggccaagcgatctggatctggagcaacaaacttctcactactcaaacaagcaggtgacgtggaggagaatcccgggcctactagtatggactggatttggcgcatccttttccttgtcggcgctgctaccggcgcgcattccttcgaagaagtgcagctggtggaatcaggcggcggactggtgcagcctggcagaagcctgagactgagctgtgccgccagcggcttcaccttcaacgactacgccatgcactgggtgcgccaggcccctggaaaaggactggaatgggtgtccacaatcagctggaacagcggcagcatcggctacgccgatagcgtgaagggccggttcaccatcagccgggacaacgccaagaagtccctgtacctccagatgaacagcctgcgggccgaggacacagccctgtactattgcgccaaggacatccagtacggcaactactactacggcatggacgtgtggggccagggaaccaccgtgaccgtgtcatctacgcgtgcctctacaaagggaccctccgtgtttcctctggctcccagcagcaagtctacaagcggaggaacagccgctctgggctgcctggtcaaggattactttcccgagcctgtgaccgtgtcctggaatagcggagcactgacaagcggcgtgcacacctttccagccgtgctgcaaagcagcggcctgtactctctgagcagcgtggtcacagtgcctagctctagcctgggcacccagacctacatctgcaatgtgaaccacaagcctagcaacaccaaggtggacaagagagtggaacccaagagctgtgaagtgaaaaccgactccaccgaccacgtgaagcccaaagagacagagaacaccaagcagcccagcaagagctgccacaagcccaaggccatcgtgcacaccgagaaagtgaacatgatgagcctgaccgtgctgggcctgcggatgctgttcgccaaaaccgtggccgtgaacttcctgctgaccgccaagctgttcttcctc

SEQ ID NO: 34193 - DNA, 1878 bp, synthetic construct
  source 1..1878: mol_type = other DNA
atggccttaccagtgaccgccttgctcctgccgctggccttgctgctccacgccgccaggccggagatcgtgctgacacagagccctgccaccctgtctctgagccctggcgaaagagccaccctgagctgtagagccagccagagcgtgtccagctacctggcctggtatcagcagaagcccggccaggctccccggctgctgatctacgatgccagcaatagagccaccggcatccccgccagattttccggctctggcagcggcaccgacttcaccctgaccatcagctccctggaacccgaggacttcgccgtgtactactgccagcagcggagcaactggcccatcacattcggccagggcacccggctggaaatcaaactcgagggacagcctaaggccaatcctaccgtgacactgttccctccaagcagcgaagaactccaggccaacaaggccacacttgtgtgcctgatctccgacttctaccctggggctgtgacagtggcttggaaggccgatggatctcctgtgaaagccggcgtggaaaccaccaagccatccaagcagagcaacaacaaatacgccgccagctcctacctgagcctgacacctgagcagtggaagtcccacagatcctacagctgccaagtgacccacgaaggcagcaccgtggaaaagacagtggcccctacagagtgcagcggcagagccgattgcggcatcaccagcgccagctaccaccagggcgtgctgagcgccaccatcctgtacgagatcctgctgggcaaggccaccctgtacgccgtgctggtgtctgccctggtgctgatggctatggtcaagcggaaggacagccggggaagggccaagcgatctggatctggagcaacaaacttctcactactcaaacaagcaggtgacgtggaggagaatcccgggcctactagtatggactggatttggcgcatccttttccttgtcggcgctgctaccggcgcgcattccttcgaagaagtgcagctggtggaatcaggcggcggactggtgcagcctggcagaagcctgagactgagctgtgccgccagcggcttcaccttcaacgactacgccatgcactgggtgcgccaggcccctggaaaaggactggaatgggtgtccacaatcagctggaacagcggcagcatcggctacgccgatagcgtgaagggccggttcaccatcagccgggacaacgccaagaagtccctgtacctccagatgaacagcctgcgggccgaggacacagccctgtactattgcgccaaggacatccagtacggcaactactactacggcatggacgtgtggggccagggaaccaccgtgaccgtgtcatctacgcgtgcctctacaaagggaccctccgtgtttcctctggctcccagcagcaagtctacaagcggaggaacagccgctctgggctgcctggtcaaggattactttcccgagcctgtgaccgtgtcctggaatagcggagcactgacaagcggcgtgcacacctttccagccgtgctgcaaagcagcggcctgtactctctgagcagcgtggtcacagtgcctagctctagcctgggcacccagacctacatctgcaatgtgaaccacaagcctagcaacaccaaggtggacaagagagtggaacccaagagctgtatccccgaggacacattcttcccaagcagcgacgtgccctgcgacgtgaagctggtggaaaagagcttcgagacagacaccaacctgaacttccagaacctgagcgtgatcggcttcagaatcctgctgctgaaagtggccggctttaacctgctgatgaccctgcggctgtggtccagc

SEQ ID NO: 34194 - DNA, 1878 bp, synthetic construct
  source 1..1878: mol_type = other DNA
atggccttaccagtgaccgccttgctcctgccgctggccttgctgctccacgccgccaggccggagatcgtgctgacacagagccctgccaccctgtctctgagccctggcgaaagagccaccctgagctgtagagccagccagagcgtgtccagctacctggcctggtatcagcagaagcccggccaggctccccggctgctgatctacgatgccagcaatagagccaccggcatccccgccagattttccggctctggcagcggcaccgacttcaccctgaccatcagctccctggaacccgaggacttcgccgtgtactactgccagcagcggagcaactggcccatcacattcggccagggcacccggctggaaatcaaactcgagggacagcctaaggccaatcctaccgtgacactgttccctccaagcagcgaagaactccaggccaacaaggccacacttgtgtgcctgatctccgacttctaccctggggctgtgacagtggcttggaaggccgatggatctcctgtgaaagccggcgtggaaaccaccaagccatccaagcagagcaacaacaaatacgccgccagctcctacctgagcctgacacctgagcagtggaagtcccacagatcctacagctgccaagtgacccacgaaggcagcaccgtggaaaagacagtggcccctacagagtgcagcggcagagccgattgcggctttaccagcgagagctaccagcagggcgtgctgagcgccaccatcctgtacgagatcctgctgggcaaggccaccctgtacgccgtgctggtgtctgccctggtgctgatggctatggtcaagcggaaggacagccggggaagggccaagcgatctggatctggagcaacaaacttctcactactcaaacaagcaggtgacgtggaggagaatcccgggcctactagtatggactggatttggcgcatccttttccttgtcggcgctgctaccggcgcgcattccttcgaagaagtgcagctggtggaatcaggcggcggactggtgcagcctggcagaagcctgagactgagctgtgccgccagcggcttcaccttcaacgactacgccatgcactgggtgcgccaggcccctggaaaaggactggaatgggtgtccacaatcagctggaacagcggcagcatcggctacgccgatagcgtgaagggccggttcaccatcagccgggacaacgccaagaagtccctgtacctccagatgaacagcctgcgggccgaggacacagccctgtactattgcgccaaggacatccagtacggcaactactactacggcatggacgtgtggggccagggaaccaccgtgaccgtgtcatctacgcgtgcctctacaaagggaccctccgtgtttcctctggctcccagcagcaagtctacaagcggaggaacagccgctctgggctgcctggtcaaggattactttcccgagcctgtgaccgtgtcctggaatagcggagcactgacaagcggcgtgcacacctttccagccgtgctgcaaagcagcggcctgtactctctgagcagcgtggtcacagtgcctagctctagcctgggcacccagacctacatctgcaatgtgaaccacaagcctagcaacaccaaggtggacaagagagtggaacccaagagctgtatccccgaggacacattcttcccaagccccgagagcagctgcgacgtgaagctggtggaaaagagcttcgagacagacaccaacctgaacttccagaacctgagcgtgatcggcttcagaatcctgctgctgaaagtggccggctttaacctgctgatgaccctgcggctgtggtccagc

SEQ ID NO: 34195 - DNA, 1356 bp, synthetic construct
  source 1..1356: mol_type = other DNA
atggccttaccagtgaccgccttgctcctgccgctggccttgctgctccacgccgccaggccggagatcgtgctgacacagagccctgccaccctgtctctgagccctggcgaaagagccaccctgagctgtagagccagccagagcgtgtccagctacctggcctggtatcagcagaagcccggccaggctccccggctgctgatctacgatgccagcaatagagccaccggcatccccgccagattttccggctctggcagcggcaccgacttcaccctgaccatcagctccctggaacccgaggacttcgccgtgtactactgccagcagcggagcaactggcccatcacattcggccagggcacccggctggaaatcaaaggcggaggcggaagtggaggcggaggatctggcggcggaggctctgaagtgcagctggtggaatcaggcggcggactggtgcagcctggcagaagcctgagactgagctgtgccgccagcggcttcaccttcaacgactacgccatgcactgggtgcgccaggcccctggaaaaggactggaatgggtgtccacaatcagctggaacagcggcagcatcggctacgccgatagcgtgaagggccggttcaccatcagccgggacaacgccaagaagtccctgtacctccagatgaacagcctgcgggccgaggacacagccctgtactattgcgccaaggacatccagtacggcaactactactacggcatggacgtgtggggccagggaaccaccgtgaccgtgtcatctacgcgtgacggtaacgaggagatgggaggaatcactcaaaccccttacaaagtctcaatttcaggaacaactgttatccttacatgtccccagtatcctggcagcgagatcctttggcagcataacgacaagaatatagggggagatgaagacgataagaatatcggatctgacgaggatcacttgagcctgaaagagttctccgagcttgaacaaagcggatattatgtgtgctatccgcgcgggtcaaagccggaagacgctaacttttacctttatctccgagccagagtgtgcgaaaattgcatggaaatggacgttatgtccgttgctacaatagttatcgtagatatatgcatcacgggtggactgcttctgctggtttattattggtccaagaatagaaaggccaaagctaaacccgtgaccagaggcgctggcgcaggcggaaggcaaaggggacaaaacaaagaacggccaccaccagtgccaaatccagattatgagcctattcggaaaggacagagggacctgtactctggcctgaatcagagaagaatc

SEQ ID NO: 34196 - DNA, 1251 bp, synthetic construct
  source 1..1251: mol_type = other DNA
atggccttaccagtgaccgccttgctcctgccgctggccttgctgctccacgccgccaggccggagatcgtgctgacacagagccctgccaccctgtctctgagccctggcgaaagagccaccctgagctgtagagccagccagagcgtgtccagctacctggcctggtatcagcagaagcccggccaggctccccggctgctgatctacgatgccagcaatagagccaccggcatccccgccagattttccggctctggcagcggcaccgacttcaccctgaccatcagctccctggaacccgaggacttcgccgtgtactactgccagcagcggagcaactggcccatcacattcggccagggcacccggctggaaatcaaaggcggaggcggaagtggaggcggaggatctggcggcggaggctctgaagtgcagctggtggaatcaggcggcggactggtgcagcctggcagaagcctgagactgagctgtgccgccagcggcttcaccttcaacgactacgccatgcactgggtgcgccaggcccctggaaaaggactggaatgggtgtccacaatcagctggaacagcggcagcatcggctacgccgatagcgtgaagggccggttcaccatcagccgggacaacgccaagaagtccctgtacctccagatgaacagcctgcgggccgaggacacagccctgtactattgcgccaaggacatccagtacggcaactactactacggcatggacgtgtggggccagggaaccaccgtgaccgtgtcatctacgcgtttcaagatccccatcgaggaactggaagatcgggtgttcgtgaactgcaacacctctatcacctgggtggaaggcaccgtgggaacactgctgagcgacatcaccagactggacctcggcaagcggattctggaccctcggggcatctacagatgcaacggcaccgacatctacaaggacaaagaaagcaccgtgcaggtccactacagaatgtgccagtcctgcgtggaactggaccctgctacagtggccggcatcatcgtgaccgatgtgatcgctactctgctgctggctctgggagtgttctgcttcgccggacacgaaacaggcagactgtctggcgctgccgatacacaggccctgctgagaaacgaccaagtgtatcagcccctgcgcgacagagatgatgcccagtattctcacctcggcggcaactgggctagaaacaag

SEQ ID NO: 34197 - DNA, 1281 bp, synthetic construct
  source 1..1281: mol_type = other DNA
atggccttaccagtgaccgccttgctcctgccgctggccttgctgctccacgccgccaggccggagatcgtgctgacacagagccctgccaccctgtctctgagccctggcgaaagagccaccctgagctgtagagccagccagagcgtgtccagctacctggcctggtatcagcagaagcccggccaggctccccggctgctgatctacgatgccagcaatagagccaccggcatccccgccagattttccggctctggcagcggcaccgacttcaccctgaccatcagctccctggaacccgaggacttcgccgtgtactactgccagcagcggagcaactggcccatcacattcggccagggcacccggctggaaatcaaaggcggaggcggaagtggaggcggaggatctggcggcggaggctctgaagtgcagctggtggaatcaggcggcggactggtgcagcctggcagaagcctgagactgagctgtgccgccagcggcttcaccttcaacgactacgccatgcactgggtgcgccaggcccctggaaaaggactggaatgggtgtccacaatcagctggaacagcggcagcatcggctacgccgatagcgtgaagggccggttcaccatcagccgggacaacgccaagaagtccctgtacctccagatgaacagcctgcgggccgaggacacagccctgtactattgcgccaaggacatccagtacggcaactactactacggcatggacgtgtggggccagggaaccaccgtgaccgtgtcatctacgcgtcagagcatcaagggcaaccacctggtcaaggtgtacgactaccaagaggacggcagcgtgctgctgacatgtgatgccgaggccaagaacatcacctggtttaaggacggcaagatgatcggcttcctgaccgaggacaagaagaagtggaacctgggcagcaacgctaaggaccccagaggcatgtatcagtgcaagggcagccagaacaagagcaagcccctccaggtgtactaccggatgtgccagaactgcatcgagctgaacgccgctaccatcagcggctttctgttcgccgagatcgtgtccatcttcgtgctggccgtgggcgtgtactttatcgctggacaggatggcgtgcggcagagcagagcttccgataagcaaaccctgctgcctaacgaccagctgtaccagcctctgaaggacagagaggacgaccagtacagccacctccagggcaatcagctgagaagaaac

SEQ ID NO: 34198 - DNA, 1230 bp, synthetic construct
  source 1..1230: mol_type = other DNA
atggccttaccagtgaccgccttgctcctgccgctggccttgctgctccacgccgccaggccggagatcgtgctgacacagagccctgccaccctgtctctgagccctggcgaaagagccaccctgagctgtagagccagccagagcgtgtccagctacctggcctggtatcagcagaagcccggccaggctccccggctgctgatctacgatgccagcaatagagccaccggcatccccgccagattttccggctctggcagcggcaccgacttcaccctgaccatcagctccctggaacccgaggacttcgccgtgtactactgccagcagcggagcaactggcccatcacattcggccagggcacccggctggaaatcaaaggcggaggcggaagtggaggcggaggatctggcggcggaggctctgaagtgcagctggtggaatcaggcggcggactggtgcagcctggcagaagcctgagactgagctgtgccgccagcggcttcaccttcaacgactacgccatgcactgggtgcgccaggcccctggaaaaggactggaatgggtgtccacaatcagctggaacagcggcagcatcggctacgccgatagcgtgaagggccggttcaccatcagccgggacaacgccaagaagtccctgtacctccagatgaacagcctgcgggccgaggacacagccctgtactattgcgccaaggacatccagtacggcaactactactacggcatggacgtgtggggccagggaaccaccgtgaccgtgtcatctacgcgtcagagttttgggttgttggaccctaaattgtgctatctgttggacggaatcctgttcatttacggagtgatcctgaccgcattgttcctgcgggttaagttttccagatccgcagacgcacccgcttaccaacaagggcagaaccaactctacaatgaacttaatttggggcggagggaagagtacgacgttctggacaaaaggaggggacgagatcccgagatgggcggaaagcctcagcgaaggaagaatccgcaagaggggctttataacgaactccagaaagataaaatggcagaagcctatagtgagattgggatgaagggagaaaggaggaggggtaaaggtcacgatgggttgtaccaaggattgagcacagccactaaagatacctatgatgcgctccacatgcaggccctgccgccaaga

SEQ ID NO: 34199 - DNA, 1515 bp, synthetic construct
  source 1..1515: mol_type = other DNA
atggccttaccagtgaccgccttgctcctgccgctggccttgctgctccacgccgccaggccggagatcgtgctgacacagagccctgccaccctgtctctgagccctggcgaaagagccaccctgagctgtagagccagccagagcgtgtccagctacctggcctggtatcagcagaagcccggccaggctccccggctgctgatctacgatgccagcaatagagccaccggcatccccgccagattttccggctctggcagcggcaccgacttcaccctgaccatcagctccctggaacccgaggacttcgccgtgtactactgccagcagcggagcaactggcccatcacattcggccagggcacccggctggaaatcaaaggcggaggcggaagtggaggcggaggatctggcggcggaggctctgaagtgcagctggtggaatcaggcggcggactggtgcagcctggcagaagcctgagactgagctgtgccgccagcggcttcaccttcaacgactacgccatgcactgggtgcgccaggcccctggaaaaggactggaatgggtgtccacaatcagctggaacagcggcagcatcggctacgccgatagcgtgaagggccggttcaccatcagccgggacaacgccaagaagtccctgtacctccagatgaacagcctgcgggccgaggacacagccctgtactattgcgccaaggacatccagtacggcaactactactacggcatggacgtgtggggccagggaaccaccgtgaccgtgtcatctacgcgtggaatgaggactgaggatcttcccaaagctgtcgtctttctcgaaccccaatggtatcgggtgctcgaaaaagactctgtgacactgaaatgccaaggggcctactctcccgaggacaactccacacagtggtttcataatgagtccctcatcagctctcaggccagctcttatttcattgatgccgctacagtggacgactccggcgagtatcggtgtcagaccaatctgtctacactgtctgaccccgtgcagcttgaggtccacattggatggttgctcttgcaagccccacgctgggttttcaaagaggaagatccaatccatctgcggtgccacagctggaaaaacaccgctctccacaaagtcacatacctgcaaaatggcaaaggacgcaaatacttccatcacaattccgatttttacattccgaaggctaccctgaaagacagcggcagctatttctgccggggactcgtcggctccaagaatgtgtcctccgaaaccgtgaatatcacgattacccaaggactggctgtgcctacaatctctagcttctttccgcctggataccaagtctccttctgtcttgtgatggtcctcctgtttgctgtggacacaggactgtacttttccgtgaaaacgaacatccgcagctccacacgcgattggaaagatcacaagtttaaatggcgcaaagatccccaggacaag

SEQ ID NO: 34200 - DNA, 1440 bp, synthetic construct; identical to SEQ ID NO: 1402
  source 1..1440: mol_type = other DNA

SEQ ID NO: 34201 - DNA, 1443 bp, synthetic construct; identical to SEQ ID NO: 1121
  source 1..1443: mol_type = other DNA

SEQ ID NO: 34202 - DNA, 2175 bp, synthetic construct
  source 1..2175: mol_type = other DNA
atggccttaccagtgaccgccttgctcctgccgctggccttgctgctccacgccgccaggccggagatcgtgctgacacagagccctgccaccctgtctctgagccctggcgaaagagccaccctgagctgtagagccagccagagcgtgtccagctacctggcctggtatcagcagaagcccggccaggctccccggctgctgatctacgatgccagcaatagagccaccggcatccccgccagattttccggctctggcagcggcaccgacttcaccctgaccatcagctccctggaacccgaggacttcgccgtgtactactgccagcagcggagcaactggcccatcacattcggccagggcacccggctggaaatcaaactcgagggacagcctaaggccaatcctaccgtgacactgttccctccaagcagcgaagaactccaggccaacaaggccacacttgtgtgcctgatctccgacttctaccctggggctgtgacagtggcttggaaggccgatggatctcctgtgaaagccggcgtggaaaccaccaagccatccaagcagagcaacaacaaatacgccgccagctcctacctgagcctgacacctgagcagtggaagtcccacagatcctacagctgccaagtgacccacgaaggcagcaccgtggaaaagacagtggcccctacagagtgcagcggatcccagagcttcggcctgctggaccccaagctgtgctacctgctggatggcatcctgttcatctacggcgtgatcctgaccgccctgttcctgagagtgaagttcagcagaagcgccgacgcccctgcctaccagcagggacagaaccaactgtacaacgagctgaacctgggcagacgggaagagtacgacgtgctggacaagcggagaggcagggaccctgagatgggcggaaagccccagcggagaaagaacccccaggaaggactgtataacgaactccagaaagacaagatggccgaagcctacagcgagatcggcatgaagggcgagcggagaagaggcaagggccacgatggcctgtaccagggcctgagcaccgccaccaaggacacctatgacgccctgcacatgcaggccctgcctccaagaagggccaagcgatctggatctggagcaacaaacttctcactactcaaacaagcaggtgacgtggaggagaatcccgggcctactagtatggactggatttggcgcatccttttccttgtcggcgctgctaccggcgcgcattccttcgaagaagtgcagctggtggaatcaggcggcggactggtgcagcctggcagaagcctgagactgagctgtgccgccagcggcttcaccttcaacgactacgccatgcactgggtgcgccaggcccctggaaaaggactggaatgggtgtccacaatcagctggaacagcggcagcatcggctacgccgatagcgtgaagggccggttcaccatcagccgggacaacgccaagaagtccctgtacctccagatgaacagcctgcgggccgaggacacagccctgtactattgcgccaaggacatccagtacggcaactactactacggcatggacgtgtggggccagggaaccaccgtgaccgtgtcatctacgcgtgcctctacaaagggaccctccgtgtttcctctggctcccagcagcaagtctacaagcggaggaacagccgctctgggctgcctggtcaaggattactttcccgagcctgtgaccgtgtcctggaatagcggagcactgacaagcggcgtgcacacctttccagccgtgctgcaaagcagcggcctgtactctctgagcagcgtggtcacagtgcctagctctagcctgggcacccagacctacatctgcaatgtgaaccacaagcctagcaacaccaaggtggacaagagagtggaacccaagagctgtggtaccatcactcaaggtttggcagtgtcaaccatctcatcattctttccacctggctaccaagtgtccttctgcctggtcatggtgctgctgttcgccgtggataccggcctgtacttcagcgtcaagaccaacatccggtccagcaccagagactggaaggaccacaagttcaagtggcggaaggaccctcaggacaag

SEQ ID NO: 34203 - DNA, 2220 bp, synthetic construct
  source 1..2220: mol_type = other DNA
atggccttaccagtgaccgccttgctcctgccgctggccttgctgctccacgccgccaggccggagatcgtgctgacacagagccctgccaccctgtctctgagccctggcgaaagagccaccctgagctgtagagccagccagagcgtgtccagctacctggcctggtatcagcagaagcccggccaggctccccggctgctgatctacgatgccagcaatagagccaccggcatccccgccagattttccggctctggcagcggcaccgacttcaccctgaccatcagctccctggaacccgaggacttcgccgtgtactactgccagcagcggagcaactggcccatcacattcggccagggcacccggctggaaatcaaactcgaggacctgaagaacgtgttcccacctgaggtggccgtgttcgagcctagcgaggccgagatcagccacacccagaaagccaccctcgtgtgcctggctaccggcttctaccccgaccatgtggaactgtcttggtgggtcaacggcaaagaggtgcacagcggcgtgtctaccgacccccagccactgaaagaacagcccgccctgaacgacagccggtactgcctgagcagcagactgagagtgtccgccaccttctggcagaacccccggaaccacttcagatgccaggtgcagttctacggcctgagcgagaacgacgagtggacccaggacagagccaagcccgtgacccagatcgtgtctgccgaagcctggggcagagccgattgcggatcccagagcttcggcctgctggaccccaagctgtgctacctgctggatggcatcctgttcatctacggcgtgatcctgaccgccctgttcctgagagtgaagttcagcagaagcgccgacgcccctgcctaccagcagggacagaaccaactgtacaacgagctgaacctgggcagacgggaagagtacgacgtgctggacaagcggagaggcagggaccctgagatgggcggaaagccccagcggagaaagaacccccaggaaggactgtataacgaactccagaaagacaagatggccgaagcctacagcgagatcggcatgaagggcgagcggagaagaggcaagggccacgatggcctgtaccagggcctgagcaccgccaccaaggacacctatgacgccctgcacatgcaggccctgcctccaagaagggccaagcgatctggatctggagcaacaaacttctcactactcaaacaagcaggtgacgtggaggagaatcccgggcctactagtatggactggatttggcgcatccttttccttgtcggcgctgctaccggcgcgcattccttcgaagaagtgcagctggtggaatcaggcggcggactggtgcagcctggcagaagcctgagactgagctgtgccgccagcggcttcaccttcaacgactacgccatgcactgggtgcgccaggcccctggaaaaggactggaatgggtgtccacaatcagctggaacagcggcagcatcggctacgccgatagcgtgaagggccggttcaccatcagccgggacaacgccaagaagtccctgtacctccagatgaacagcctgcgggccgaggacacagccctgtactattgcgccaaggacatccagtacggcaactactactacggcatggacgtgtggggccagggaaccaccgtgaccgtgtcatctacgcgtatccagaaccctgatcctgccgtgtaccagctgcgggatagcaagagcagcgacaagagcgtgtgtctgttcaccgacttcgacagccagaccaacgtgtcccagagcaaggactccgacgtgtacatcaccgataagaccgtgctggacatgcggagcatggacttcaagagcaactccgccgtggcctggtccaacaagtccgatttcgcctgcgccaacgccttcaacaacagcattatccccgaggacacattcttcccaagccccgagagcagctgcggtaccatcactcaaggtttggcagtgtcaaccatctcatcattctttccacctggctaccaagtgtccttctgcctggtcatggtgctgctgttcgccgtggataccggcctgtacttcagcgtcaagaccaacatccggtccagcaccagagactggaaggaccacaagttcaagtggcggaaggaccctcaggacaag

SEQ ID NO: 34204 - DNA, 2145 bp, synthetic construct
  source 1..2145: mol_type = other DNA
atggccttaccagtgaccgccttgctcctgccgctggccttgctgctccacgccgccaggccggagatcgtgctgacacagagccctgccaccctgtctctgagccctggcgaaagagccaccctgagctgtagagccagccagagcgtgtccagctacctggcctggtatcagcagaagcccggccaggctccccggctgctgatctacgatgccagcaatagagccaccggcatccccgccagattttccggctctggcagcggcaccgacttcaccctgaccatcagctccctggaacccgaggacttcgccgtgtactactgccagcagcggagcaactggcccatcacattcggccagggcacccggctggaaatcaaactcgaggacctgaagaacgtgttcccacctgaggtggccgtgttcgagcctagcgaggccgagatcagccacacccagaaagccaccctcgtgtgcctggctaccggcttctaccccgaccatgtggaactgtcttggtgggtcaacggcaaagaggtgcacagcggcgtgtctaccgacccccagccactgaaagaacagcccgccctgaacgacagccggtactgcctgagcagcagactgagagtgtccgccaccttctggcagaacccccggaaccacttcagatgccaggtgcagttctacggcctgagcgagaacgacgagtggacccaggacagagccaagcccgtgacccagatcgtgtctgccgaagcctggggcagagccgattgcggatcccagagcttcggcctgctggaccccaagctgtgctacctgctggatggcatcctgttcatctacggcgtgatcctgaccgccctgttcctgagagtgaagttcagcagaagcgccgacgcccctgcctaccagcagggacagaaccaactgtacaacgagctgaacctgggcagacgggaagagtacgacgtgctggacaagcggagaggcagggaccctgagatgggcggaaagccccagcggagaaagaacccccaggaaggactgtataacgaactccagaaagacaagatggccgaagcctacagcgagatcggcatgaagggcgagcggagaagaggcaagggccacgatggcctgtaccagggcctgagcaccgccaccaaggacacctatgacgccctgcacatgcaggccctgcctccaagaagggccaagcgatctggatctggagcaacaaacttctcactactcaaacaagcaggtgacgtggaggagaatcccgggcctactagtatggactggatttggcgcatccttttccttgtcggcgctgctaccggcgcgcattccttcgaagaagtgcagctggtggaatcaggcggcggactggtgcagcctggcagaagcctgagactgagctgtgccgccagcggcttcaccttcaacgactacgccatgcactgggtgcgccaggcccctggaaaaggactggaatgggtgtccacaatcagctggaacagcggcagcatcggctacgccgatagcgtgaagggccggttcaccatcagccgggacaacgccaagaagtccctgtacctccagatgaacagcctgcgggccgaggacacagccctgtactattgcgccaaggacatccagtacggcaactactactacggcatggacgtgtggggccagggaaccaccgtgaccgtgtcatctacgcgtatccagaaccctgatcctgccgtgtaccagctgcgggatagcaagagcagcgacaagagcgtgtgtctgttcaccgacttcgacagccagaccaacgtgtcccagagcaaggactccgacgtgtacatcaccgataagaccgtgctggacatgcggagcatggacttcaagagcaactccgccgtggcctggtccaacaagtccgatttcgcctgcgccaacgccttcaacaacagcattatccccgaggacacattcttcccaagccccgagagcagctgcggtaccatcactcaaggtttggcagtgtcaaccatctcatcattctttccacctggctaccaagtgtccttctgcctggtcatggtgctgctgttcgccgtggataccggcctgtacttcagcgtc

SEQ ID NO: 34205 - DNA, 2148 bp, synthetic construct
  source 1..2148: mol_type = other DNA
atggccttaccagtgaccgccttgctcctgccgctggccttgctgctccacgccgccaggccggagatcgtgctgacacagagccctgccaccctgtctctgagccctggcgaaagagccaccctgagctgtagagccagccagagcgtgtccagctacctggcctggtatcagcagaagcccggccaggctccccggctgctgatctacgatgccagcaatagagccaccggcatccccgccagattttccggctctggcagcggcaccgacttcaccctgaccatcagctccctggaacccgaggacttcgccgtgtactactgccagcagcggagcaactggcccatcacattcggccagggcacccggctggaaatcaaactcgaggacctgaagaacgtgttcccacctgaggtggccgtgttcgagcctagcgaggccgagatcagccacacccagaaagccaccctcgtgtgcctggctaccggcttctaccccgaccatgtggaactgtcttggtgggtcaacggcaaagaggtgcacagcggcgtgtctaccgacccccagccactgaaagaacagcccgccctgaacgacagccggtactgcctgagcagcagactgagagtgtccgccaccttctggcagaacccccggaaccacttcagatgccaggtgcagttctacggcctgagcgagaacgacgagtggacccaggacagagccaagcccgtgacccagatcgtgtctgccgaagcctggggcagagccgattgcggatcccagagcttcggcctgctggaccccaagctgtgctacctgctggatggcatcctgttcatctacggcgtgatcctgaccgccctgttcctgagagtgaagttcagcagaagcgccgacgcccctgcctaccagcagggacagaaccaactgtacaacgagctgaacctgggcagacgggaagagtacgacgtgctggacaagcggagaggcagggaccctgagatgggcggaaagccccagcggagaaagaacccccaggaaggactgtataacgaactccagaaagacaagatggccgaagcctacagcgagatcggcatgaagggcgagcggagaagaggcaagggccacgatggcctgtaccagggcctgagcaccgccaccaaggacacctatgacgccctgcacatgcaggccctgcctccaagaagggccaagcgatctggatctggagcaacaaacttctcactactcaaacaagcaggtgacgtggaggagaatcccgggcctactagtatggactggatttggcgcatccttttccttgtcggcgctgctaccggcgcgcattccttcgaagaagtgcagctggtggaatcaggcggcggactggtgcagcctggcagaagcctgagactgagctgtgccgccagcggcttcaccttcaacgactacgccatgcactgggtgcgccaggcccctggaaaaggactggaatgggtgtccacaatcagctggaacagcggcagcatcggctacgccgatagcgtgaagggccggttcaccatcagccgggacaacgccaagaagtccctgtacctccagatgaacagcctgcgggccgaggacacagccctgtactattgcgccaaggacatccagtacggcaactactactacggcatggacgtgtggggccagggaaccaccgtgaccgtgtcatctacgcgtatccagaaccctgatcctgccgtgtaccagctgcgggatagcaagagcagcgacaagagcgtgtgtctgttcaccgacttcgacagccagaccaacgtgtcccagagcaaggactccgacgtgtacatcaccgataagaccgtgctggacatgcggagcatggacttcaagagcaactccgccgtggcctggtccaacaagtccgatttcgcctgcgccaacgccttcaacaacagcattatccccgaggacacattcttcccaagccccgagagcagctgcggtaccatcactcaaggtttggcagtgtcaaccatctcatcattctttccacctggctaccaagtgtccttctgcctggtcatggtgctgctgttcgccgtggataccggcctgtacttcagcgtcaag

SEQ ID NO: 34206 - DNA, 2151 bp, synthetic construct
  source 1..2151: mol_type = other DNA
atggccttaccagtgaccgccttgctcctgccgctggccttgctgctccacgccgccaggccggagatcgtgctgacacagagccctgccaccctgtctctgagccctggcgaaagagccaccctgagctgtagagccagccagagcgtgtccagctacctggcctggtatcagcagaagcccggccaggctccccggctgctgatctacgatgccagcaatagagccaccggcatccccgccagattttccggctctggcagcggcaccgacttcaccctgaccatcagctccctggaacccgaggacttcgccgtgtactactgccagcagcggagcaactggcccatcacattcggccagggcacccggctggaaatcaaactcgaggacctgaagaacgtgttcccacctgaggtggccgtgttcgagcctagcgaggccgagatcagccacacccagaaagccaccctcgtgtgcctggctaccggcttctaccccgaccatgtggaactgtcttggtgggtcaacggcaaagaggtgcacagcggcgtgtctaccgacccccagccactgaaagaacagcccgccctgaacgacagccggtactgcctgagcagcagactgagagtgtccgccaccttctggcagaacccccggaaccacttcagatgccaggtgcagttctacggcctgagcgagaacgacgagtggacccaggacagagccaagcccgtgacccagatcgtgtctgccgaagcctggggcagagccgattgcggatcccagagcttcggcctgctggaccccaagctgtgctacctgctggatggcatcctgttcatctacggcgtgatcctgaccgccctgttcctgagagtgaagttcagcagaagcgccgacgcccctgcctaccagcagggacagaaccaactgtacaacgagctgaacctgggcagacgggaagagtacgacgtgctggacaagcggagaggcagggaccctgagatgggcggaaagccccagcggagaaagaacccccaggaaggactgtataacgaactccagaaagacaagatggccgaagcctacagcgagatcggcatgaagggcgagcggagaagaggcaagggccacgatggcctgtaccagggcctgagcaccgccaccaaggacacctatgacgccctgcacatgcaggccctgcctccaagaagggccaagcgatctggatctggagcaacaaacttctcactactcaaacaagcaggtgacgtggaggagaatcccgggcctactagtatggactggatttggcgcatccttttccttgtcggcgctgctaccggcgcgcattccttcgaagaagtgcagctggtggaatcaggcggcggactggtgcagcctggcagaagcctgagactgagctgtgccgccagcggcttcaccttcaacgactacgccatgcactgggtgcgccaggcccctggaaaaggactggaatgggtgtccacaatcagctggaacagcggcagcatcggctacgccgatagcgtgaagggccggttcaccatcagccgggacaacgccaagaagtccctgtacctccagatgaacagcctgcgggccgaggacacagccctgtactattgcgccaaggacatccagtacggcaactactactacggcatggacgtgtggggccagggaaccaccgtgaccgtgtcatctacgcgtatccagaaccctgatcctgccgtgtaccagctgcgggatagcaagagcagcgacaagagcgtgtgtctgttcaccgacttcgacagccagaccaacgtgtcccagagcaaggactccgacgtgtacatcaccgataagaccgtgctggacatgcggagcatggacttcaagagcaactccgccgtggcctggtccaacaagtccgatttcgcctgcgccaacgccttcaacaacagcattatccccgaggacacattcttcccaagccccgagagcagctgcggtaccatcactcaaggtttggcagtgtcaaccatctcatcattctttccacctggctaccaagtgtccttctgcctggtcatggtgctgctgttcgccgtggataccggcctgtacttcagcgtcaagacc

SEQ ID NO: 34207 - DNA, 1962 bp, synthetic construct
  source 1..1962: mol_type = other DNA
atggccttaccagtgaccgccttgctcctgccgctggccttgctgctccacgccgccaggccggagatcgtgctgacacagagccctgccaccctgtctctgagccctggcgaaagagccaccctgagctgtagagccagccagagcgtgtccagctacctggcctggtatcagcagaagcccggccaggctccccggctgctgatctacgatgccagcaatagagccaccggcatccccgccagattttccggctctggcagcggcaccgacttcaccctgaccatcagctccctggaacccgaggacttcgccgtgtactactgccagcagcggagcaactggcccatcacattcggccagggcacccggctggaaatcaaactcgagggacagcctaaggccaatcctaccgtgacactgttccctccaagcagcgaagaactccaggccaacaaggccacacttgtgtgcctgatctccgacttctaccctggggctgtgacagtggcttggaaggccgatggatctcctgtgaaagccggcgtggaaaccaccaagccatccaagcagagcaacaacaaatacgccgccagctcctacctgagcctgacacctgagcagtggaagtcccacagatcctacagctgccaagtgacccacgaaggcagcaccgtggaaaagacagtggcccctacagagtgcagcggatccctgggagagcctcagctgtgctatatcctggacgccatcctgtttctgtacggcatcgtgctgaccctgctgtactgccggctgaagatccaagtgcggaaggccgccatcaccagctacgagaaatccgacggcgtgtacaccggcctgagcaccagaaatcaagagacatacgagacactgaagcacgaaaagcctccacaaagggccaagcgatctggatctggagcaacaaacttctcactactcaaacaagcaggtgacgtggaggagaatcccgggcctactagtatggactggatttggcgcatccttttccttgtcggcgctgctaccggcgcgcattccttcgaagaagtgcagctggtggaatcaggcggcggactggtgcagcctggcagaagcctgagactgagctgtgccgccagcggcttcaccttcaacgactacgccatgcactgggtgcgccaggcccctggaaaaggactggaatgggtgtccacaatcagctggaacagcggcagcatcggctacgccgatagcgtgaagggccggttcaccatcagccgggacaacgccaagaagtccctgtacctccagatgaacagcctgcgggccgaggacacagccctgtactattgcgccaaggacatccagtacggcaactactactacggcatggacgtgtggggccagggaaccaccgtgaccgtgtcatctacgcgtgcctctacaaagggaccctccgtgtttcctctggctcccagcagcaagtctacaagcggaggaacagccgctctgggctgcctggtcaaggattactttcccgagcctgtgaccgtgtcctggaatagcggagcactgacaagcggcgtgcacacctttccagccgtgctgcaaagcagcggcctgtactctctgagcagcgtggtcacagtgcctagctctagcctgggcacccagacctacatctgcaatgtgaaccacaagcctagcaacaccaaggtggacaagagagtggaacccaagagctgtggtaccctcggagaaccacagctctgttacattctggatgctatcctgttcctctatgggatcgtcctgacactcctgtattgcagactcaaaattcaagttcgcaaagccgccattacctcttacgagaagagtgatggggtgtacacaggactgtctacccggaatcaagaaacctacgaaaccctcaaacatgagaagccacctcagtaa

SEQ ID NO: 34208 - DNA, 1869 bp, synthetic construct
  source 1..1869: mol_type = other DNA
atggccttaccagtgaccgccttgctcctgccgctggccttgctgctccacgccgccaggccggagatcgtgctgacacagagccctgccaccctgtctctgagccctggcgaaagagccaccctgagctgtagagccagccagagcgtgtccagctacctggcctggtatcagcagaagcccggccaggctccccggctgctgatctacgatgccagcaatagagccaccggcatccccgccagattttccggctctggcagcggcaccgacttcaccctgaccatcagctccctggaacccgaggacttcgccgtgtactactgccagcagcggagcaactggcccatcacattcggccagggcacccggctggaaatcaaactcgaggacctgaagaacgtgttcccacctgaggtggccgtgttcgagcctagcgaggccgagatcagccacacccagaaagccaccctcgtgtgcctggctaccggcttctaccccgaccatgtggaactgtcttggtgggtcaacggcaaagaggtgcacagcggcgtgtgtaccgacccccagccactgaaagaacagcccgccctgaacgacagccggtactgcctgagcagcagactgagagtgtccgccaccttctggcagaacccccggaaccacttcagatgccaggtgcagttctacggcctgagcgagaacgacgagtggacccaggacagagccaagcccgtgacccagatcgtgtctgccgaagcctggggcagagccgattgcggctttaccagcgagagctaccagcagggcgtgctgagcgcctactacatgtacttgttgctgctgctgaagtccgtggtgtacttcgccatcatcacatgctgcctgctgcggagaaccgccttctgctgcaacggcgagaagtctagggccaagcgatctggatctggagcaacaaacttctcactactcaaacaagcaggtgacgtggaggagaatcccgggcctactagtatggactggatttggcgcatccttttccttgtcggcgctgctaccggcgcgcattccttcgaagaagtgcagctggtggaatcaggcggcggactggtgcagcctggcagaagcctgagactgagctgtgccgccagcggcttcaccttcaacgactacgccatgcactgggtgcgccaggcccctggaaaaggactggaatgggtgtccacaatcagctggaacagcggcagcatcggctacgccgatagcgtgaagggccggttcaccatcagccgggacaacgccaagaagtccctgtacctccagatgaacagcctgcgggccgaggacacagccctgtactattgcgccaaggacatccagtacggcaactactactacggcatggacgtgtggggccagggaaccaccgtgaccgtgtcatctacgcgtatccagaaccctgatcctgccgtgtaccagctgcgggatagcaagagcagcgacaagagcgtgtgtctgttcaccgacttcgacagccagaccaacgtgtcccagagcaaggactccgacgtgtacatcaccgataagtgcgtgctggacatgcggagcatggacttcaagagcaactccgccgtggcctggtccaacaagtccgatttcgcctgcgccaacgccttcaacaacagcattatccccgaggacacattcttcccaagccccgagagcagctgcgacgtgaagctggtggaaaagagcttcgagacagacaccaacctgaacttccagaacctgagcgtgatcggcttcagaatcctgctgctgaaagtggccggctttaacctgctgatgaccctgcggctgtggtccagc

SEQ ID NO: 34209 - DNA, 1890 bp, synthetic construct
  source 1..1890: mol_type = other DNA
atggccttaccagtgaccgccttgctcctgccgctggccttgctgctccacgccgccaggccggagatcgtgctgacacagagccctgccaccctgtctctgagccctggcgaaagagccaccctgagctgtagagccagccagagcgtgtccagctacctggcctggtatcagcagaagcccggccaggctccccggctgctgatctacgatgccagcaatagagccaccggcatccccgccagattttccggctctggcagcggcaccgacttcaccctgaccatcagctccctggaacccgaggacttcgccgtgtactactgccagcagcggagcaactggcccatcacattcggccagggcacccggctggaaatcaaactcgaggacaagcagctggacgccgacgtgtcccccaagcctaccatcttcctgccctctatcgccgagacaaagctccagaaggccggcacctacctgtgcctgctggaaaagttcttcccagatgtgattaagatccactggcaggaaaagaagtccaacaccatcctgggcagccaggaaggcaacaccatgaagaccaacgacacctacatgaagttcagctggctgaccgtgcccgagaagtccctggacaaagaacacagatgcatcgtgcggcacgaaaacaacaagaacggcgtggaccaggaaatcatcttcccacccatcaagaccgatgtgattacaatggaccccaaggacaactgctccaaggacgccaacgataccctgctgctccagctgaccaacaccagcgcctactacatgtacgagatcctgctgggcaaggccaccctgtacgccgtgctggtgtctgccctggtgctgatggctatggtcaagcggaaggacagccggggaagggccaagcgatctggatctggagcaacaaacttctcactactcaaacaagcaggtgacgtggaggagaatcccgggcctactagtatggactggatttggcgcatccttttccttgtcggcgctgctaccggcgcgcattccttcgaagaagtgcagctggtggaatcaggcggcggactggtgcagcctggcagaagcctgagactgagctgtgccgccagcggcttcaccttcaacgactacgccatgcactgggtgcgccaggcccctggaaaaggactggaatgggtgtccacaatcagctggaacagcggcagcatcggctacgccgatagcgtgaagggccggttcaccatcagccgggacaacgccaagaagtccctgtacctccagatgaacagcctgcgggccgaggacacagccctgtactattgcgccaaggacatccagtacggcaactactactacggcatggacgtgtggggccagggaaccaccgtgaccgtgtcatctacgcgtagccagcctcacaccaagcccagcgtgttcgtgatgaagaacggcaccaacgtggcctgcctcgtgaaagagttctaccccaaggacatcaggatcaacctggtgtccagcaagaagatcaccgagttcgaccccgccatcgtgatctcccccagcggcaagtacaacgccgtgaagctggggaagtatgaggacagcaacagcgtgacctgctccgtgcagcacgacaacaagaccgtgcacagcaccgactttgaagtgaaaaccgactccaccgaccacgtgaagcccaaagagacagagaacaccaagcagcccagcaagagctgccacaagcccaaggccatcgtgcacaccgagaaagtgaacatgatgagcctgaccgtgatcggcttcagaatcctgctgctgaaagtggccggctttaacctgctgatgaccctgcggctgtggtccagctaa

SEQ ID NO: 34210 - DNA, 1890 bp, synthetic construct
  source 1..1890: mol_type = other DNA
atggccttaccagtgaccgccttgctcctgccgctggccttgctgctccacgccgccaggccggagatcgtgctgacacagagccctgccaccctgtctctgagccctggcgaaagagccaccctgagctgtagagccagccagagcgtgtccagctacctggcctggtatcagcagaagcccggccaggctccccggctgctgatctacgatgccagcaatagagccaccggcatccccgccagattttccggctctggcagcggcaccgacttcaccctgaccatcagctccctggaacccgaggacttcgccgtgtactactgccagcagcggagcaactggcccatcacattcggccagggcacccggctggaaatcaaactcgaggacaagcagctggacgccgacgtgtcccccaagcctaccatcttcctgccctctatcgccgagacaaagctccagaaggccggcacctacctgtgcctgctggaaaagttcttcccagatgtgattaagatccactggcaggaaaagaagtccaacaccatcctgggcagccaggaaggcaacaccatgaagaccaacgacacctacatgaagttcagctggctgaccgtgcccgagaagtccctggacaaagaacacagatgcatcgtgcggcacgaaaacaacaagaacggcgtggaccaggaaatcatcttcccacccatcaagaccgatgtgattacaatggaccccaaggacaactgctccaaggacgccaacgataccctgctgctccagctgaccaacaccagcgccaccatcctgtacgagatcctgctgggcaaggccaccctgtacgccgtgctggtgtctgccctggtgctgatggctatggtcaagcggaaggacagccggggaagggccaagcgatctggatctggagcaacaaacttctcactactcaaacaagcaggtgacgtggaggagaatcccgggcctactagtatggactggatttggcgcatccttttccttgtcggcgctgctaccggcgcgcattccttcgaagaagtgcagctggtggaatcaggcggcggactggtgcagcctggcagaagcctgagactgagctgtgccgccagcggcttcaccttcaacgactacgccatgcactgggtgcgccaggcccctggaaaaggactggaatgggtgtccacaatcagctggaacagcggcagcatcggctacgccgatagcgtgaagggccggttcaccatcagccgggacaacgccaagaagtccctgtacctccagatgaacagcctgcgggccgaggacacagccctgtactattgcgccaaggacatccagtacggcaactactactacggcatggacgtgtggggccagggaaccaccgtgaccgtgtcatctacgcgtagccagcctcacaccaagcccagcgtgttcgtgatgaagaacggcaccaacgtggcctgcctcgtgaaagagttctaccccaaggacatcaggatcaacctggtgtccagcaagaagatcaccgagttcgaccccgccatcgtgatctcccccagcggcaagtacaacgccgtgaagctggggaagtatgaggacagcaacagcgtgacctgctccgtgcagcacgacaacaagaccgtgcacagcaccgactttgaagtgaaaaccgactccaccgaccacgtgaagcccaaagagacagagaacaccaagcagcccagcaagagctgccacaagcccaaggccatcgtgcacaccgagaaagtgaacatgatgagcctgaccgtgatcggcttcagaatcctgctgctgaaagtggccggctttaacctgctgatgaccctgcggctgtggtccagctaa

SEQ ID NO: 34211 - DNA, 1890 bp, synthetic construct
  source 1..1890: mol_type = other DNA
atggccttaccagtgaccgccttgctcctgccgctggccttgctgctccacgccgccaggccggagatcgtgctgacacagagccctgccaccctgtctctgagccctggcgaaagagccaccctgagctgtagagccagccagagcgtgtccagctacctggcctggtatcagcagaagcccggccaggctccccggctgctgatctacgatgccagcaatagagccaccggcatccccgccagattttccggctctggcagcggcaccgacttcaccctgaccatcagctccctggaacccgaggacttcgccgtgtactactgccagcagcggagcaactggcccatcacattcggccagggcacccggctggaaatcaaactcgaggacaagcagctggacgccgacgtgtcccccaagcctaccatcttcctgccctctatcgccgagacaaagctccagaaggccggcacctacctgtgcctgctggaaaagttcttcccagatgtgattaagatccactggcaggaaaagaagtccaacaccatcctgggcagccaggaaggcaacaccatgaagaccaacgacacctacatgaagttcagctggctgaccgtgcccgagaagtccctggacaaagaacacagatgcatcgtgcggcacgaaaacaacaagaacggcgtggaccaggaaatcatcttcccacccatcaagaccgatgtgattacaatggaccccaaggacaactgctccaaggacgccaacgataccctgctgctccagctgaccaacaccagcgcctactacatgtacgagatcctgctgggcaaggccaccctgtacgccgtgctggtgtctgccctggtgctgatggctatggtcaagcggaaggacagccggggaagggccaagcgatctggatctggagcaacaaacttctcactactcaaacaagcaggtgacgtggaggagaatcccgggcctactagtatggactggatttggcgcatccttttccttgtcggcgctgctaccggcgcgcattccttcgaagaagtgcagctggtggaatcaggcggcggactggtgcagcctggcagaagcctgagactgagctgtgccgccagcggcttcaccttcaacgactacgccatgcactgggtgcgccaggcccctggaaaaggactggaatgggtgtccacaatcagctggaacagcggcagcatcggctacgccgatagcgtgaagggccggttcaccatcagccgggacaacgccaagaagtccctgtacctccagatgaacagcctgcgggccgaggacacagccctgtactattgcgccaaggacatccagtacggcaactactactacggcatggacgtgtggggccagggaaccaccgtgaccgtgtcatctacgcgtagccagcctcacaccaagcccagcgtgttcgtgatgaagaacggcaccaacgtggcctgcctcgtgaaagagttctaccccaaggacatcaggatcaacctggtgtccagcaagaagatcaccgagttcgaccccgccatcgtgatctcccccagcggcaagtacaacgccgtgaagctggggaagtacgaggacagcaacagcgtgacctgctccgtgcagcacgacaacaagaccgtgcacagcaccgactttgaagtgaaaaccgactccaccgaccacgtgaagcccaaagagacagagaacaccaagcagcccagcaagagctgccacaagcccaaggccatcgtgcacaccgagaaagtgaacatgatgagcctgaccgtgctgggcttcagaatcctgctgctgaaagtggccggctttaacctgctgatgaccctgcggctgtggtccagctaa

SEQ ID NO: 34212 - DNA, 1890 bp, synthetic construct
  source 1..1890: mol_type = other DNA
atggccttaccagtgaccgccttgctcctgccgctggccttgctgctccacgccgccaggccggagatcgtgctgacacagagccctgccaccctgtctctgagccctggcgaaagagccaccctgagctgtagagccagccagagcgtgtccagctacctggcctggtatcagcagaagcccggccaggctccccggctgctgatctacgatgccagcaatagagccaccggcatccccgccagattttccggctctggcagcggcaccgacttcaccctgaccatcagctccctggaacccgaggacttcgccgtgtactactgccagcagcggagcaactggcccatcacattcggccagggcacccggctggaaatcaaactcgaggacaagcagctggacgccgacgtgtcccccaagcctaccatcttcctgccctctatcgccgagacaaagctccagaaggccggcacctacctgtgcctgctggaaaagttcttcccagatgtgattaagatccactggcaggaaaagaagtccaacaccatcctgggcagccaggaaggcaacaccatgaagaccaacgacacctacatgaagttcagctggctgaccgtgcccgagaagtccctggacaaagaacacagatgcatcgtgcggcacgaaaacaacaagaacggcgtggaccaggaaatcatcttcccacccatcaagaccgatgtgattacaatggaccccaaggacaactgctccaaggacgccaacgataccctgctgctccagctgaccaacaccagcgccaccatcctgtacgagatcctgctgggcaaggccaccctgtacgccgtgctggtgtctgccctggtgctgatggctatggtcaagcggaaggacagccggggaagggccaagcgatctggatctggagcaacaaacttctcactactcaaacaagcaggtgacgtggaggagaatcccgggcctactagtatggactggatttggcgcatccttttccttgtcggcgctgctaccggcgcgcattccttcgaagaagtgcagctggtggaatcaggcggcggactggtgcagcctggcagaagcctgagactgagctgtgccgccagcggcttcaccttcaacgactacgccatgcactgggtgcgccaggcccctggaaaaggactggaatgggtgtccacaatcagctggaacagcggcagcatcggctacgccgatagcgtgaagggccggttcaccatcagccgggacaacgccaagaagtccctgtacctccagatgaacagcctgcgggccgaggacacagccctgtactattgcgccaaggacatccagtacggcaactactactacggcatggacgtgtggggccagggaaccaccgtgaccgtgtcatctacgcgtagccagcctcacaccaagcccagcgtgttcgtgatgaagaacggcaccaacgtggcctgcctcgtgaaagagttctaccccaaggacatcaggatcaacctggtgtccagcaagaagatcaccgagttcgaccccgccatcgtgatctcccccagcggcaagtacaacgccgtgaagctggggaagtacgaggacagcaacagcgtgacctgctccgtgcagcacgacaacaagaccgtgcacagcaccgactttgaagtgaaaaccgactccaccgaccacgtgaagcccaaagagacagagaacaccaagcagcccagcaagagctgccacaagcccaaggccatcgtgcacaccgagaaagtgaacatgatgagcctgaccgtgctgggcttcagaatcctgctgctgaaagtggccggctttaacctgctgatgaccctgcggctgtggtccagctaa

SEQ ID NO: 34213 - DNA, 1872 bp, synthetic construct
  source 1..1872: mol_type = other DNA
atggccttaccagtgaccgccttgctcctgccgctggccttgctgctccacgccgccaggccggagatcgtgctgacacagagccctgccaccctgtctctgagccctggcgaaagagccaccctgagctgtagagccagccagagcgtgtccagctacctggcctggtatcagcagaagcccggccaggctccccggctgctgatctacgatgccagcaatagagccaccggcatccccgccagattttccggctctggcagcggcaccgacttcaccctgaccatcagctccctggaacccgaggacttcgccgtgtactactgccagcagcggagcaactggcccatcacattcggccagggcacccggctggaaatcaaactcgaggacctgaagaacgtgttcccacctgaggtggccgtgttcgagcctagcgaggccgagatcagccacacccagaaagccaccctcgtgtgcctggctaccggcttctaccccgaccatgtggaactgtcttggtgggtcaacggcaaagaggtgcacagcggcgtgtgtaccgacccccagccactgaaagaacagcccgccctgaacgacagccggtactgcctgagcagcagactgagagtgtccgccaccttctggcagaacccccggaaccacttcagatgccaggtgcagttctacggcctgagcgagaacgacgagtggacccaggacagagccaagcccgtgacccagatcgtgtctgccgaagcctggggcagagccgattgcggctttaccagcgagagctaccagcagggcgtgctgagcgccaccatcctgtacttgttgctgctgctgaagtccgtggtgtacttcgccatcatcacatgctgcctgctgcggagaaccgccttctgctgcaacggcgagaagtctagggccaagcgatctggatctggagcaacaaacttctcactactcaaacaagcaggtgacgtggaggagaatcccgggcctactagtatggactggatttggcgcatccttttccttgtcggcgctgctaccggcgcgcattccttcgaagaagtgcagctggtggaatcaggcggcggactggtgcagcctggcagaagcctgagactgagctgtgccgccagcggcttcaccttcaacgactacgccatgcactgggtgcgccaggcccctggaaaaggactggaatgggtgtccacaatcagctggaacagcggcagcatcggctacgccgatagcgtgaagggccggttcaccatcagccgggacaacgccaagaagtccctgtacctccagatgaacagcctgcgggccgaggacacagccctgtactattgcgccaaggacatccagtacggcaactactactacggcatggacgtgtggggccagggaaccaccgtgaccgtgtcatctacgcgtatccagaaccctgatcctgccgtgtaccagctgcgggatagcaagagcagcgacaagagcgtgtgtctgttcaccgacttcgacagccagaccaacgtgtcccagagcaaggactccgacgtgtacatcaccgataagtgcgtgctggacatgcggagcatggacttcaagagcaactccgccgtggcctggtccaacaagtccgatttcgcctgcgccaacgccttcaacaacagcattatccccgaggacacattcttcccaagccccgagagcagctgcgacgtgaagctggtggaaaagagcttcgagacagacaccaacctgaacttccagaacctgagcgtgatcggcctgcggatgctgttcgccaaaaccgtggccgtgaacttcctgctgaccgccaagctgttcttcctctaa

SEQ ID NO: 34214 - DNA, 1959 bp, synthetic construct
  source 1..1959: mol_type = other DNA
atggccttaccagtgaccgccttgctcctgccgctggccttgctgctccacgccgccaggccggagatcgtgctgacacagagccctgccaccctgtctctgagccctggcgaaagagccaccctgagctgtagagccagccagagcgtgtccagctacctggcctggtatcagcagaagcccggccaggctccccggctgctgatctacgatgccagcaatagagccaccggcatccccgccagattttccggctctggcagcggcaccgacttcaccctgaccatcagctccctggaacccgaggacttcgccgtgtactactgccagcagcggagcaactggcccatcacattcggccagggcacccggctggaaatcaaactcgaggacctgaagaacgtgttcccacctgaggtggccgtgttcgagcctagcgaggccgagatcagccacacccagaaagccaccctcgtgtgcctggctaccggcttctaccccgaccatgtggaactgtcttggtgggtcaacggcaaagaggtgcacagcggcgtgtctaccgacccccagccactgaaagaacagcccgccctgaacgacagccggtactgcctgagcagcagactgagagtgtccgccaccttctggcagaacccccggaaccacttcagatgccaggtgcagttctacggcctgagcgagaacgacgagtggacccaggacagagccaagcccgtgacccagatcgtgtctgccgaagcctggggcagagccgattgcggatcctccaaggacgccaacgataccctgctgctccagctgaccaacaccagcgcctactacatgtacttgttgctgctgctgaagtccgtggtgtacttcgccatcatcacatgctgcctgctgcggagaaccgccttctgctgcaacggcgagaagtctagggccaagcgatctggatctggagcaacaaacttctcactactcaaacaagcaggtgacgtggaggagaatcccgggcctactagtatggactggatttggcgcatccttttccttgtcggcgctgctaccggcgcgcattccttcgaagaagtgcagctggtggaatcaggcggcggactggtgcagcctggcagaagcctgagactgagctgtgccgccagcggcttcaccttcaacgactacgccatgcactgggtgcgccaggcccctggaaaaggactggaatgggtgtccacaatcagctggaacagcggcagcatcggctacgccgatagcgtgaagggccggttcaccatcagccgggacaacgccaagaagtccctgtacctccagatgaacagcctgcgggccgaggacacagccctgtactattgcgccaaggacatccagtacggcaactactactacggcatggacgtgtggggccagggaaccaccgtgaccgtgtcatctacgcgtatccagaaccctgatcctgccgtgtaccagctgcgggatagcaagagcagcgacaagagcgtgtgtctgttcaccgacttcgacagccagaccaacgtgtcccagagcaaggactccgacgtgtacatcaccgataagaccgtgctggacatgcggagcatggacttcaagagcaactccgccgtggcctggtccaacaagtccgatttcgcctgcgccaacgccttcaacaacagcattatccccgaggacacattcttcccaagccccgagagcagctgcggtaccgaagtgaaaaccgactccaccgaccacgtgaagcccaaagagacagagaacaccaagcagcccagcaagagctgccacaagcccaaggccatcgtgcacaccgagaaagtgaacatgatgagcctgaccgtgctgggcctgcggatgctgttcgccaaaaccgtggccgtgaacttcctgctgaccgccaagctgttcttcctctaa

SEQ ID NO: 34215 - DNA, 1869 bp, synthetic construct
  source 1..1869: mol_type = other DNA
atggccttaccagtgaccgccttgctcctgccgctggccttgctgctccacgccgccaggccggagatcgtgctgacacagagccctgccaccctgtctctgagccctggcgaaagagccaccctgagctgtagagccagccagagcgtgtccagctacctggcctggtatcagcagaagcccggccaggctccccggctgctgatctacgatgccagcaatagagccaccggcatccccgccagattttccggctctggcagcggcaccgacttcaccctgaccatcagctccctggaacccgaggacttcgccgtgtactactgccagcagcggagcaactggcccatcacattcggccagggcacccggctggaaatcaaactcgaggacctgaagaacgtgttcccacctgaggtggccgtgttcgagcctagcgaggccgagatcagccacacccagaaagccaccctcgtgtgcctggctaccggcttctaccccgaccatgtggaactgtcttggtgggtcaacggcaaagaggtgcacagcggcgtgtgtaccgacccccagccactgaaagaacagcccgccctgaacgacagccggtactgcctgagcagcagactgagagtgtccgccaccttctggcagaacccccggaaccacttcagatgccaggtgcagttctacggcctgagcgagaacgacgagtggacccaggacagagccaagcccgtgacccagatcgtgtctgccgaagcctggggcagagccgattgcgacgtgaagctggtggaaaagagcttcgagacagacaccaacctgaacttccagaacctgagcgtgatcggcttcagaatcctgctgctgaaagtggccggctttaacctgctgatgaccctgcggctgtggtccagcagggccaagcgatctggatctggagcaacaaacttctcactactcaaacaagcaggtgacgtggaggagaatcccgggcctactagtatggactggatttggcgcatccttttccttgtcggcgctgctaccggcgcgcattccttcgaagaagtgcagctggtggaatcaggcggcggactggtgcagcctggcagaagcctgagactgagctgtgccgccagcggcttcaccttcaacgactacgccatgcactgggtgcgccaggcccctggaaaaggactggaatgggtgtccacaatcagctggaacagcggcagcatcggctacgccgatagcgtgaagggccggttcaccatcagccgggacaacgccaagaagtccctgtacctccagatgaacagcctgcgggccgaggacacagccctgtactattgcgccaaggacatccagtacggcaactactactacggcatggacgtgtggggccagggaaccaccgtgaccgtgtcatctacgcgtatccagaaccctgatcctgccgtgtaccagctgcgggatagcaagagcagcgacaagagcgtgtgtctgttcaccgacttcgacagccagaccaacgtgtcccagagcaaggactccgacgtgtacatcaccgataagtgcgtgctggacatgcggagcatggacttcaagagcaactccgccgtggcctggtccaacaagtccgatttcgcctgcgccaacgccttcaacaacagcattatccccgaggacacattcttcccaagccccgagagcagctgcggctttaccagcgagagctaccagcagggcgtgctgagcgccaccatcctgtacgagatcctgctgggcaaggccaccctgtacgccgtgctggtgtctgccctggtgctgatggctatggtcaagcggaaggacagccggggataa

SEQ ID NO: 34216 - DNA, 1869 bp, synthetic construct
  source 1..1869: mol_type = other DNA
atggccttaccagtgaccgccttgctcctgccgctggccttgctgctccacgccgccaggccggagatcgtgctgacacagagccctgccaccctgtctctgagccctggcgaaagagccaccctgagctgtagagccagccagagcgtgtccagctacctggcctggtatcagcagaagcccggccaggctccccggctgctgatctacgatgccagcaatagagccaccggcatccccgccagattttccggctctggcagcggcaccgacttcaccctgaccatcagctccctggaacccgaggacttcgccgtgtactactgccagcagcggagcaactggcccatcacattcggccagggcacccggctggaaatcaaactcgaggacctgaagaacgtgttcccacctgaggtggccgtgttcgagcctagcgaggccgagatcagccacacccagaaagccaccctcgtgtgcctggctaccggcttctaccccgaccatgtggaactgtcttggtgggtcaacggcaaagaggtgcacagcggcgtgtgtaccgacccccagccactgaaagaacagcccgccctgaacgacagccggtactgcctgagcagcagactgagagtgtccgccaccttctggcagaacccccggaaccacttcagatgccaggtgcagttctacggcctgagcgagaacgacgagtggacccaggacagagccaagcccgtgacccagatcgtgtctgccgaagcctggggcagagccgattgcggctttaccagcgagagctaccagcagggcgtgctgagcgccaccaacctgagcgtgatcggcttcagaatcctgctgctgaaagtggccggctttaacctgctgatgaccctgcggctgtggtccagcagggccaagcgatctggatctggagcaacaaacttctcactactcaaacaagcaggtgacgtggaggagaatcccgggcctactagtatggactggatttggcgcatccttttccttgtcggcgctgctaccggcgcgcattccttcgaagaagtgcagctggtggaatcaggcggcggactggtgcagcctggcagaagcctgagactgagctgtgccgccagcggcttcaccttcaacgactacgccatgcactgggtgcgccaggcccctggaaaaggactggaatgggtgtccacaatcagctggaacagcggcagcatcggctacgccgatagcgtgaagggccggttcaccatcagccgggacaacgccaagaagtccctgtacctccagatgaacagcctgcgggccgaggacacagccctgtactattgcgccaaggacatccagtacggcaactactactacggcatggacgtgtggggccagggaaccaccgtgaccgtgtcatctacgcgtatccagaaccctgatcctgccgtgtaccagctgcgggatagcaagagcagcgacaagagcgtgtgtctgttcaccgacttcgacagccagaccaacgtgtcccagagcaaggactccgacgtgtacatcaccgataagtgcgtgctggacatgcggagcatggacttcaagagcaactccgccgtggcctggtccaacaagtccgatttcgcctgcgccaacgccttcaacaacagcattatccccgaggacacattcttcccaagccccgagagcagctgcgacgtgaagctggtggaaaagagcttcgagacagacaccaacctgaacttccagatcctgtacgagatcctgctgggcaaggccaccctgtacgccgtgctggtgtctgccctggtgctgatggctatggtcaagcggaaggacagccggggataa

SEQ ID NO: 34217 - DNA, 1869 bp, synthetic construct; identical to SEQ ID NO: 34215
  source 1..1869: mol_type = other DNA

SEQ ID NO: 34218 - DNA, 1869 bp, synthetic construct; identical to SEQ ID NO: 34216
  source 1..1869: mol_type = other DNA

SEQ ID NO: 34219 - DNA, 1866 bp, synthetic construct
  source 1..1866: mol_type = other DNA
atggccttaccagtgaccgccttgctcctgccgctggccttgctgctccacgccgccaggccggagatcgtgctgacacagagccctgccaccctgtctctgagccctggcgaaagagccaccctgagctgtagagccagccagagcgtgtccagctacctggcctggtatcagcagaagcccggccaggctccccggctgctgatctacgatgccagcaatagagccaccggcatccccgccagattttccggctctggcagcggcaccgacttcaccctgaccatcagctccctggaacccgaggacttcgccgtgtactactgccagcagcggagcaactggcccatcacattcggccagggcacccggctggaaatcaaactcgaggacctgaagaacgtgttcccacctgaggtggccgtgttcgagcctagcgaggccgagatcagccacacccagaaagccaccctcgtgtgcctggctaccggcttctaccccgaccatgtggaactgtcttggtgggtcaacggcaaagaggtgcacagcggcgtgtgtaccgacccccagccactgaaagaacagcccgccctgaacgacagccggtactgcctgagcagcagactgagagtgtccgccaccttctggcagaacccccggaaccacttcagatgccaggtgcagttctacggcctgagcgagaacgacgagtggacccaggacagagccaagcccgtgacccagatcgtgtctgccgaagcctggggcagagccgattgcgacgtgaagctggtggaaaagagcttcgagacagacaccaacctgaacttccagaacctgagcgtgatcggcttcagaatcctgctgctgaaagtggccggctttaacctgctgatgaccctgcggctgtggtccagcagggccaagcgatctggatctggagcaacaaacttctcactactcaaacaagcaggtgacgtggaggagaatcccgggcctactagtatggactggatttggcgcatccttttccttgtcggcgctgctaccggcgcgcattccttcgaagaagtgcagctggtggaatcaggcggcggactggtgcagcctggcagaagcctgagactgagctgtgccgccagcggcttcaccttcaacgactacgccatgcactgggtgcgccaggcccctggaaaaggactggaatgggtgtccacaatcagctggaacagcggcagcatcggctacgccgatagcgtgaagggccggttcaccatcagccgggacaacgccaagaagtccctgtacctccagatgaacagcctgcgggccgaggacacagccctgtactattgcgccaaggacatccagtacggcaactactactacggcatggacgtgtggggccagggaaccaccgtgaccgtgtcatctacgcgtatccagaaccctgatcctgccgtgtaccagctgcgggatagcaagagcagcgacaagagcgtgtgtctgttcaccgacttcgacagccagaccaacgtgtcccagagcaaggactccgacgtgtacatcaccgataagtgcgtgctggacatgcggagcatggacttcaagagcaactccgccgtggcctggtccaacaagtccgatttcgcctgcgccaacgccttcaacaacagcattatccccgaggacacattcttcccaagccccgagagcagctgcggctttaccagcgagagctaccagcagggcgtgctgagcgccaccatcctgtacgagatcctgctgggcaaggccaccctgtacgccgtgctggtgtctgccctggtgctgatggctatggtcaagcggaaggacagccgggga

SEQ ID NO: 34220 - DNA, 1878 bp, synthetic construct
  source 1..1878: mol_type = other DNA
atggccttaccagtgaccgccttgctcctgccgctggccttgctgctccacgccgccaggccggagatcgtgctgacacagagccctgccaccctgtctctgagccctggcgaaagagccaccctgagctgtagagccagccagagcgtgtccagctacctggcctggtatcagcagaagcccggccaggctccccggctgctgatctacgatgccagcaatagagccaccggcatccccgccagattttccggctctggcagcggcaccgacttcaccctgaccatcagctccctggaacccgaggacttcgccgtgtactactgccagcagcggagcaactggcccatcacattcggccagggcacccggctggaaatcaaactcgaggccgacgtgtcccccaagcctaccatcttcctgccctctatcgccgagacaaagctccagaaggccggcacctacctgtgcctgctggaaaagttcttcccagatgtgattaagatccactggcaggaaaagaagtccaacaccatcctgggcagccaggaaggcaacaccatgaagaccaacgacacctacatgaagttcagctggctgaccgtgcccgagaagtccctggacaaagaacacagatgcatcgtgcggcacgaaaacaacaagaacggcgtggaccaggaaatcatcttcccacccatcaagaccgatgtgattacaatggaccccaaggacaactgctccaaggacgccaacgataccctgctgctccagctgaccaacaccagcgcctactacatgtacttgttgctgctgctgaagtccgtggtgtacttcgccatcatcacatgctgcctgctgcggagaaccgccttctgctgcaacggcgagaagtctagggccaagcgatctggatctggagcaacaaacttctcactactcaaacaagcaggtgacgtggaggagaatcccgggcctactagtatggactggatttggcgcatccttttccttgtcggcgctgctaccggcgcgcattccttcgaagaagtgcagctggtggaatcaggcggcggactggtgcagcctggcagaagcctgagactgagctgtgccgccagcggcttcaccttcaacgactacgccatgcactgggtgcgccaggcccctggaaaaggactggaatgggtgtccacaatcagctggaacagcggcagcatcggctacgccgatagcgtgaagggccggttcaccatcagccgggacaacgccaagaagtccctgtacctccagatgaacagcctgcgggccgaggacacagccctgtactattgcgccaaggacatccagtacggcaactactactacggcatggacgtgtggggccagggaaccaccgtgaccgtgtcatctacgcgtagccagcctcacaccaagcccagcgtgttcgtgatgaagaacggcaccaacgtggcctgcctcgtgaaagagttctaccccaaggacatcaggatcaacctggtgtccagcaagaagatcaccgagttcgaccccgccatcgtgatctcccccagcggcaagtacaacgccgtgaagctggggaagtatgaggacagcaacagcgtgacctgctccgtgcagcacgacaacaagaccgtgcacagcaccgactttgaagtgaaaaccgactccaccgaccacgtgaagcccaaagagacagagaacaccaagcagcccagcaagagctgccacaagcccaaggccatcgtgcacaccgagaaagtgaacatgatgagcctgaccgtgatcggcttcagaatcctgctgctgaaagtggccggctttaacctgctgatgaccctgcggctgtggtccagctaa

SEQ ID NO: 34221 - DNA, 1878 bp, synthetic construct
  source 1..1878: mol_type = other DNA
atggccttaccagtgaccgccttgctcctgccgctggccttgctgctccacgccgccaggccggagatcgtgctgacacagagccctgccaccctgtctctgagccctggcgaaagagccaccctgagctgtagagccagccagagcgtgtccagctacctggcctggtatcagcagaagcccggccaggctccccggctgctgatctacgatgccagcaatagagccaccggcatccccgccagattttccggctctggcagcggcaccgacttcaccctgaccatcagctccctggaacccgaggacttcgccgtgtactactgccagcagcggagcaactggcccatcacattcggccagggcacccggctggaaatcaaactcgaggccgacgtgtcccccaagcctaccatcttcctgccctctatcgccgagacaaagctccagaaggccggcacctacctgtgcctgctggaaaagttcttcccagatgtgattaagatccactggcaggaaaagaagtccaacaccatcctgggcagccaggaaggcaacaccatgaagaccaacgacacctacatgaagttcagctggctgaccgtgcccgagaagtccctggacaaagaacacagatgcatcgtgcggcacgaaaacaacaagaacggcgtggaccaggaaatcatcttcccacccatcaagaccgatgtgattacaatggaccccaaggacaactgctccaaggacgccaacgataccctgctgctccagctgaccaacaccagcgcctactacatgtacttgttgctgctgctgaagtccgtggtgtacttcgccatcatcacatgctgcctgctgcggagaaccgccttctgctgcaacggcgagaagtctagggccaagcgatctggatctggagcaacaaacttctcactactcaaacaagcaggtgacgtggaggagaatcccgggcctactagtatggactggatttggcgcatccttttccttgtcggcgctgctaccggcgcgcattccttcgaagaagtgcagctggtggaatcaggcggcggactggtgcagcctggcagaagcctgagactgagctgtgccgccagcggcttcaccttcaacgactacgccatgcactgggtgcgccaggcccctggaaaaggactggaatgggtgtccacaatcagctggaacagcggcagcatcggctacgccgatagcgtgaagggccggttcaccatcagccgggacaacgccaagaagtccctgtacctccagatgaacagcctgcgggccgaggacacagccctgtactattgcgccaaggacatccagtacggcaactactactacggcatggacgtgtggggccagggaaccaccgtgaccgtgtcatctacgcgtagccagcctcacaccaagcccagcgtgttcgtgatgaagaacggcaccaacgtggcctgcctcgtgaaagagttctaccccaaggacatcaggatcaacctggtgtccagcaagaagatcaccgagttcgaccccgccatcgtgatctcccccagcggcaagtacaacgccgtgaagctggggaagtacgaggacagcaacagcgtgacctgctccgtgcagcacgacaacaagaccgtgcacagcaccgactttgaagtgaaaaccgactccaccgaccacgtgaagcccaaagagacagagaacaccaagcagcccagcaagagctgccacaagcccaaggccatcgtgcacaccgagaaagtgaacatgatgagcctgaccgtgctgggcttcagaatcctgctgctgaaagtggccggctttaacctgctgatgaccctgcggctgtggtccagctaa

SEQ ID NO: 34222 - DNA, 1866 bp, synthetic construct; identical to SEQ ID NO: 34219
  source 1..1866: mol_type = other DNA

SEQ ID NO: 34223 - DNA, 1878 bp, synthetic construct
  source 1..1878: mol_type = other DNA
atggccttaccagtgaccgccttgctcctgccgctggccttgctgctccacgccgccaggccggagatcgtgctgacacagagccctgccaccctgtctctgagccctggcgaaagagccaccctgagctgtagagccagccagagcgtgtccagctacctggcctggtatcagcagaagcccggccaggctccccggctgctgatctacgatgccagcaatagagccaccggcatccccgccagattttccggctctggcagcggcaccgacttcaccctgaccatcagctccctggaacccgaggacttcgccgtgtactactgccagcagcggagcaactggcccatcacattcggccagggcacccggctggaaatcaaactcgagatccagaaccctgatcctgccgtgtaccagctgcgggatagcaagagcagcgacaagagcgtgtgtctgttcaccgacttcgacagccagaccaacgtgtcccagagcaaggactccgacgtgtacatcaccgataagtgcgtgctggacatgcggagcatggacttcaagagcaactccgccgtggcctggtccaacaagtccgatttcgcctgcgccaacgccttcaacaacagcattatccccgaggacacattcttcccaagccccgagagcagctgcggctttaccagcgagagctaccagcagggcgtgctgagcgccaccatcctgtacgagatcctgctgggcaaggccaccctgtacgccgtgctggtgtctgccctggtgctgatggctatggtcaagcggaaggacagccggggacgcgccaagagaagcggatctggcgtgaagcagaccctgaatttcgacctgctgaagctggctggcgacgtggaatccaacccaggccctactagtatggactggatttggcgcatccttttccttgtcggcgctgctaccggcgcgcattccttcgaagaagtgcagctggtggaatcaggcggcggactggtgcagcctggcagaagcctgagactgagctgtgccgccagcggcttcaccttcaacgactacgccatgcactgggtgcgccaggcccctggaaaaggactggaatgggtgtccacaatcagctggaacagcggcagcatcggctacgccgatagcgtgaagggccggttcaccatcagccgggacaacgccaagaagtccctgtacctccagatgaacagcctgcgggccgaggacacagccctgtactattgcgccaaggacatccagtacggcaactactactacggcatggacgtgtggggccagggaaccaccgtgaccgtgtcatctacgcgtgaggacctgaagaacgtgttcccacctgaggtggccgtgttcgagcctagcgaggccgagatcagccacacccagaaagccaccctcgtgtgcctggctaccggcttctaccccgaccatgtggaactgtcttggtgggtcaacggcaaagaggtgcacagcggcgtgtgtaccgacccccagccactgaaagaacagcccgccctgaacgacagccggtactgcctgagcagcagactgagagtgtccgccaccttctggcagaacccccggaaccacttcagatgccaggtgcagttctacggcctgagcgagaacgacgagtggacccaggacagagccaagcccgtgacccagatcgtgtctgccgaagcctggggcagagccgattgcgacgtgaagctggtggaaaagagcttcgagacagacaccaacctgaacttccagaacctgagcgtgatcggcttcagaatcctgctgctgaaagtggccggctttaacctgctgatgaccctgcggctgtggtccagc

SEQ ID NO: 34224 - DNA, 2271 bp, synthetic construct
  source 1..2271: mol_type = other DNA
atggccttaccagtgaccgccttgctcctgccgctggccttgctgctccacgccgccaggccggaagtgcagctggttgaatctggcggaggactggttcagcctggcggatctctgagactgtcttgtgccgccagcggcttcagcttcagcgacttttggatgagctgggtccgacaggcccctggcaaaggacttgaatgggtcgccacaatcagccaggccggcagcgagaaggactacgtggactctgtgaagggcagattcaccatcagccgggacaacgccaagaagtccctgtacctccagatgaacagcctgagagccgaggacaccgccgtgtactattgtgcctctggcgtgtacagcttcgactacagaggccagggcaccctggtcacagtctcttctggtaccggcggaggcggatctggcggcggaggtagcggtggcggaggatctgaattcgagatcgtgctgacacagagccctgccaccctgtctctgagccctggcgaaagagccaccctgagctgtagagccagccagagcgtgtccagctacctggcctggtatcagcagaagcccggccaggctccccggctgctgatctacgatgccagcaatagagccaccggcatccccgccagattttccggctctggcagcggcaccgacttcaccctgaccatcagctccctggaacccgaggacttcgccgtgtactactgccagcagcggagcaactggcccatcacattcggccagggcacccggctggaaatcaaactcgaggacctgaagaacgtgttcccacctgaggtggccgtgttcgagcctagcgaggccgagatcagccacacccagaaagccaccctcgtgtgcctggctaccggcttctaccccgaccatgtggaactgtcttggtgggtcaacggcaaagaggtgcacagcggcgtgtgtaccgacccccagccactgaaagaacagcccgccctgaacgacagccggtactgcctgagcagcagactgagagtgtccgccaccttctggcagaacccccggaaccacttcagatgccaggtgcagttctacggcctgagcgagaacgacgagtggacccaggacagagccaagcccgtgacccagatcgtgtctgccgaagcctggggcagagccgattgcgacgtgaagctggtggaaaagagcttcgagacagacaccaacctgaacttccagaacctgagcgtgatcggcttcagaatcctgctgctgaaagtggccggctttaacctgctgatgaccctgcggctgtggtccagcagggccaagcgatctggatctggagcaacaaacttctcactactcaaacaagcaggtgacgtggaggagaatcccgggcctactagtatggactggatttggcgcatccttttccttgtcggcgctgctaccggcgcgcattccttcgaagaagtgcagctggtggaatcaggcggcggactggtgcagcctggcagaagcctgagactgagctgtgccgccagcggcttcaccttcaacgactacgccatgcactgggtgcgccaggcccctggaaaaggactggaatgggtgtccacaatcagctggaacagcggcagcatcggctacgccgatagcgtgaagggccggttcaccatcagccgggacaacgccaagaagtccctgtacctccagatgaacagcctgcgggccgaggacacagccctgtactattgcgccaaggacatccagtacggcaactactactacggcatggacgtgtggggccagggaaccaccgtgaccgtgtcatctacgcgtatccagaaccctgatcctgccgtgtaccagctgcgggatagcaagagcagcgacaagagcgtgtgtctgttcaccgacttcgacagccagaccaacgtgtcccagagcaaggactccgacgtgtacatcaccgataagtgcgtgctggacatgcggagcatggacttcaagagcaactccgccgtggcctggtccaacaagtccgatttcgcctgcgccaacgccttcaacaacagcattatccccgaggacacattcttcccaagccccgagagcagctgcggctttaccagcgagagctaccagcagggcgtgctgagcgccaccatcctgtacgagatcctgctgggcaaggccaccctgtacgccgtgctggtgtctgccctggtgctgatggctatggtcaagcggaaggacagccgggga

SEQ ID NO: 34225 - DNA, 2283 bp, synthetic construct
  source 1..2283: mol_type = other DNA
atggccttaccagtgaccgccttgctcctgccgctggccttgctgctccacgccgccaggccggaagtgcagctggttgaatctggcggaggactggttcagcctggcggatctctgagactgtcttgtgccgccagcggcttcagcttcagcgacttttggatgagctgggtccgacaggcccctggcaaaggacttgaatgggtcgccacaatcagccaggccggcagcgagaaggactacgtggactctgtgaagggcagattcaccatcagccgggacaacgccaagaagtccctgtacctccagatgaacagcctgagagccgaggacaccgccgtgtactattgtgcctctggcgtgtacagcttcgactacagaggccagggcaccctggtcacagtctcttctggtaccggcggaggcggatctggcggcggaggtagcggtggcggaggatctgaattcgagatcgtgctgacacagagccctgccaccctgtctctgagccctggcgaaagagccaccctgagctgtagagccagccagagcgtgtccagctacctggcctggtatcagcagaagcccggccaggctccccggctgctgatctacgatgccagcaatagagccaccggcatccccgccagattttccggctctggcagcggcaccgacttcaccctgaccatcagctccctggaacccgaggacttcgccgtgtactactgccagcagcggagcaactggcccatcacattcggccagggcacccggctggaaatcaaactcgagatccagaaccctgatcctgccgtgtaccagctgcgggatagcaagagcagcgacaagagcgtgtgtctgttcaccgacttcgacagccagaccaacgtgtcccagagcaaggactccgacgtgtacatcaccgataagtgcgtgctggacatgcggagcatggacttcaagagcaactccgccgtggcctggtccaacaagtccgatttcgcctgcgccaacgccttcaacaacagcattatccccgaggacacattcttcccaagccccgagagcagctgcggctttaccagcgagagctaccagcagggcgtgctgagcgccaccatcctgtacgagatcctgctgggcaaggccaccctgtacgccgtgctggtgtctgccctggtgctgatggctatggtcaagcggaaggacagccggggacgcgccaagagaagcggatctggcgtgaagcagaccctgaatttcgacctgctgaagctggctggcgacgtggaatccaacccaggccctactagtatggactggatttggcgcatccttttccttgtcggcgctgctaccggcgcgcattccttcgaagaagtgcagctggtggaatcaggcggcggactggtgcagcctggcagaagcctgagactgagctgtgccgccagcggcttcaccttcaacgactacgccatgcactgggtgcgccaggcccctggaaaaggactggaatgggtgtccacaatcagctggaacagcggcagcatcggctacgccgatagcgtgaagggccggttcaccatcagccgggacaacgccaagaagtccctgtacctccagatgaacagcctgcgggccgaggacacagccctgtactattgcgccaaggacatccagtacggcaactactactacggcatggacgtgtggggccagggaaccaccgtgaccgtgtcatctacgcgtgaggacctgaagaacgtgttcccacctgaggtggccgtgttcgagcctagcgaggccgagatcagccacacccagaaagccaccctcgtgtgcctggctaccggcttctaccccgaccatgtggaactgtcttggtgggtcaacggcaaagaggtgcacagcggcgtgtgtaccgacccccagccactgaaagaacagcccgccctgaacgacagccggtactgcctgagcagcagactgagagtgtccgccaccttctggcagaacccccggaaccacttcagatgccaggtgcagttctacggcctgagcgagaacgacgagtggacccaggacagagccaagcccgtgacccagatcgtgtctgccgaagcctggggcagagccgattgcgacgtgaagctggtggaaaagagcttcgagacagacaccaacctgaacttccagaacctgagcgtgatcggcttcagaatcctgctgctgaaagtggccggctttaacctgctgatgaccctgcggctgtggtccagc

SEQ ID NO: 34226 - DNA, 2682 bp, synthetic construct
  source 1..2682: mol_type = other DNA
atggccttaccagtgaccgccttgctcctgccgctggccttgctgctccacgccgccaggccggaagtgcagctggttgaatctggcggaggactggttcagcctggcggatctctgagactgtcttgtgccgccagcggcttcagcttcagcgacttttggatgagctgggtccgacaggcccctggcaaaggacttgaatgggtcgccacaatcagccaggccggcagcgagaaggactacgtggactctgtgaagggcagattcaccatcagccgggacaacgccaagaagtccctgtacctccagatgaacagcctgagagccgaggacaccgccgtgtactattgtgcctctggcgtgtacagcttcgactacagaggccagggcaccctggtcacagtctcttctggtaccggcggaggcggatctggcggcggaggtagcggtggcggaggatctgaattcgagatcgtgctgacacagagccctgccaccctgtctctgagccctggcgaaagagccaccctgagctgtagagccagccagagcgtgtccagctacctggcctggtatcagcagaagcccggccaggctccccggctgctgatctacgatgccagcaatagagccaccggcatccccgccagattttccggctctggcagcggcaccgacttcaccctgaccatcagctccctggaacccgaggacttcgccgtgtactactgccagcagcggagcaactggcccatcacattcggccagggcacccggctggaaatcaaactcgaggacctgaagaacgtgttcccacctgaggtggccgtgttcgagcctagcgaggccgagatcagccacacccagaaagccaccctcgtgtgcctggctaccggcttctaccccgaccatgtggaactgtcttggtgggtcaacggcaaagaggtgcacagcggcgtgtgtaccgacccccagccactgaaagaacagcccgccctgaacgacagccggtactgcctgagcagcagactgagagtgtccgccaccttctggcagaacccccggaaccacttcagatgccaggtgcagttctacggcctgagcgagaacgacgagtggacccaggacagagccaagcccgtgacccagatcgtgtctgccgaagcctggggcagagccgattgcgacgtgaagctggtggaaaagagcttcgagacagacaccaacctgaacttccagaacctgagcgtgatcggcttcagaatcctgctgctgaaagtggccggctttaacctgctgatgaccctgcggctgtggtccagcagggccaagcgatctggatctggagcaacaaacttctcactactcaaacaagcaggtgacgtggaggagaatcccgggcctactagtatggactggatttggcgcatccttttccttgtcggcgctgctaccggcgcgcattccgggccccagctccagctgcaagagtctggacctggcctggtcaagcctagcgagacactgagcctgacctgtaccgtgtccggcgatagcatcagcagcggcgattactactggggctggatcagacagcctcctggcaaaggactggaatggatcggccacatctactacagcggcgtgacctactacaaccccagcctgaagtccagagtgaccatcagcgtggacaccagccggaaccagttctccctgaagctgtctagcgtgacagccgccgataccgccgtgtactactgcaccagagaggacagcagcaactggcggagtagaggccagggaacactggtcacagttagctctggatccggcggaggcggaagtggaggcggaggatctggcggcggaggctctttcgaagaagtgcagctggtggaatcaggcggcggactggtgcagcctggcagaagcctgagactgagctgtgccgccagcggcttcaccttcaacgactacgccatgcactgggtgcgccaggcccctggaaaaggactggaatgggtgtccacaatcagctggaacagcggcagcatcggctacgccgatagcgtgaagggccggttcaccatcagccgggacaacgccaagaagtccctgtacctccagatgaacagcctgcgggccgaggacacagccctgtactattgcgccaaggacatccagtacggcaactactactacggcatggacgtgtggggccagggaaccaccgtgaccgtgtcatctacgcgtatccagaaccctgatcctgccgtgtaccagctgcgggatagcaagagcagcgacaagagcgtgtgtctgttcaccgacttcgacagccagaccaacgtgtcccagagcaaggactccgacgtgtacatcaccgataagtgcgtgctggacatgcggagcatggacttcaagagcaactccgccgtggcctggtccaacaagtccgatttcgcctgcgccaacgccttcaacaacagcattatccccgaggacacattcttcccaagccccgagagcagctgcggctttaccagcgagagctaccagcagggcgtgctgagcgccaccatcctgtacgagatcctgctgggcaaggccaccctgtacgccgtgctggtgtctgccctggtgctgatggctatggtcaagcggaaggacagccgggga

SEQ ID NO: 34227 - DNA, 2694 bp, synthetic construct
  source 1..2694: mol_type = other DNA
atggccttaccagtgaccgccttgctcctgccgctggccttgctgctccacgccgccaggccggaagtgcagctggttgaatctggcggaggactggttcagcctggcggatctctgagactgtcttgtgccgccagcggcttcagcttcagcgacttttggatgagctgggtccgacaggcccctggcaaaggacttgaatgggtcgccacaatcagccaggccggcagcgagaaggactacgtggactctgtgaagggcagattcaccatcagccgggacaacgccaagaagtccctgtacctccagatgaacagcctgagagccgaggacaccgccgtgtactattgtgcctctggcgtgtacagcttcgactacagaggccagggcaccctggtcacagtctcttctggtaccggcggaggcggatctggcggcggaggtagcggtggcggaggatctgaattcgagatcgtgctgacacagagccctgccaccctgtctctgagccctggcgaaagagccaccctgagctgtagagccagccagagcgtgtccagctacctggcctggtatcagcagaagcccggccaggctccccggctgctgatctacgatgccagcaatagagccaccggcatccccgccagattttccggctctggcagcggcaccgacttcaccctgaccatcagctccctggaacccgaggacttcgccgtgtactactgccagcagcggagcaactggcccatcacattcggccagggcacccggctggaaatcaaactcgagatccagaaccctgatcctgccgtgtaccagctgcgggatagcaagagcagcgacaagagcgtgtgtctgttcaccgacttcgacagccagaccaacgtgtcccagagcaaggactccgacgtgtacatcaccgataagtgcgtgctggacatgcggagcatggacttcaagagcaactccgccgtggcctggtccaacaagtccgatttcgcctgcgccaacgccttcaacaacagcattatccccgaggacacattcttcccaagccccgagagcagctgcggctttaccagcgagagctaccagcagggcgtgctgagcgccaccatcctgtacgagatcctgctgggcaaggccaccctgtacgccgtgctggtgtctgccctggtgctgatggctatggtcaagcggaaggacagccggggacgcgccaagagaagcggatctggcgtgaagcagaccctgaatttcgacctgctgaagctggctggcgacgtggaatccaacccaggccctactagtatggactggatttggcgcatccttttccttgtcggcgctgctaccggcgcgcattccgggccccagctccagctgcaagagtctggacctggcctggtcaagcctagcgagacactgagcctgacctgtaccgtgtccggcgatagcatcagcagcggcgattactactggggctggatcagacagcctcctggcaaaggactggaatggatcggccacatctactacagcggcgtgacctactacaaccccagcctgaagtccagagtgaccatcagcgtggacaccagccggaaccagttctccctgaagctgtctagcgtgacagccgccgataccgccgtgtactactgcaccagagaggacagcagcaactggcggagtagaggccagggaacactggtcacagttagctctggatccggcggaggcggaagtggaggcggaggatctggcggcggaggctctttcgaagaagtgcagctggtggaatcaggcggcggactggtgcagcctggcagaagcctgagactgagctgtgccgccagcggcttcaccttcaacgactacgccatgcactgggtgcgccaggcccctggaaaaggactggaatgggtgtccacaatcagctggaacagcggcagcatcggctacgccgatagcgtgaagggccggttcaccatcagccgggacaacgccaagaagtccctgtacctccagatgaacagcctgcgggccgaggacacagccctgtactattgcgccaaggacatccagtacggcaactactactacggcatggacgtgtggggccagggaaccaccgtgaccgtgtcatctacgcgtgaggacctgaagaacgtgttcccacctgaggtggccgtgttcgagcctagcgaggccgagatcagccacacccagaaagccaccctcgtgtgcctggctaccggcttctaccccgaccatgtggaactgtcttggtgggtcaacggcaaagaggtgcacagcggcgtgtgtaccgacccccagccactgaaagaacagcccgccctgaacgacagccggtactgcctgagcagcagactgagagtgtccgccaccttctggcagaacccccggaaccacttcagatgccaggtgcagttctacggcctgagcgagaacgacgagtggacccaggacagagccaagcccgtgacccagatcgtgtctgccgaagcctggggcagagccgattgcgacgtgaagctggtggaaaagagcttcgagacagacaccaacctgaacttccagaacctgagcgtgatcggcttcagaatcctgctgctgaaagtggccggctttaacctgctgatgaccctgcggctgtggtccagc

SEQ ID NO: 34228 - DNA, 2076 bp, synthetic construct
  source 1..2076: mol_type = other DNA
atggccttaccagtgaccgccttgctcctgccgctggccttgctgctccacgccgccaggccggagatcgtgctgacacagagccctgccaccctgtctctgagccctggcgaaagagccaccctgagctgtagagccagccagagcgtgtccagctacctggcctggtatcagcagaagcccggccaggctccccggctgctgatctacgatgccagcaatagagccaccggcatccccgccagattttccggctctggcagcggcaccgacttcaccctgaccatcagctccctggaacccgaggacttcgccgtgtactactgccagcagcggagcaactggcccatcacattcggccagggcacccggctggaaatcaaactcgaggacctgaagaacgtgttcccacctgaggtggccgtgttcgagcctagcgaggccgagatcagccacacccagaaagccaccctcgtgtgcctggctaccggcttctaccccgaccatgtggaactgtcttggtgggtcaacggcaaagaggtgcacagcggcgtgtgtaccgacccccagccactgaaagaacagcccgccctgaacgacagccggtactgcctgagcagcagactgagagtgtccgccaccttctggcagaacccccggaaccacttcagatgccaggtgcagttctacggcctgagcgagaacgacgagtggacccaggacagagccaagcccgtgacccagatcgtgtctgccgaagcctggggcagagccgattgcgacgtgaagctggtggaaaagagcttcgagacagacaccaacctgaacttccagaacctgagcgtgatcggcttcagaatcctgctgctgaaagtggccggctttaacctgctgatgaccctgcggctgtggtccagcagggccaagcgatctggatctggagcaacaaacttctcactactcaaacaagcaggtgacgtggaggagaatcccgggcctactagtatggactggatttggcgcatccttttccttgtcggcgctgctaccggcgcccattccgggcccatggaccccgacctggaaatcagagccgccttcctgcggcagagaaacacagccctgagaacagaggtggccgagctggaacaagaggtgcagcggctggaaaacgaggtgtcccagtacgagacaagatacggccctctcggaggcggaaaaggatccggcggcggaggatctggcggaggcggatctgggggcggaggctctttcgaagaagtgcagctggtggaatcaggcggcggactggtgcagcctggcagaagcctgagactgagctgtgccgccagcggcttcaccttcaacgactacgccatgcactgggtgcgccaggcccctggaaaaggactggaatgggtgtccacaatcagctggaacagcggcagcatcggctacgccgatagcgtgaagggccggttcaccatcagccgggacaacgccaagaagtccctgtacctccagatgaacagcctgcgggccgaggacacagccctgtactattgcgccaaggacatccagtacggcaactactactacggcatggacgtgtggggccagggaaccaccgtgaccgtgtcatctacgcgtatccagaaccctgatcctgccgtgtaccagctgcgggatagcaagagcagcgacaagagcgtgtgtctgttcaccgacttcgacagccagaccaacgtgtcccagagcaaggactccgacgtgtacatcaccgataagtgcgtgctggacatgcggagcatggacttcaagagcaactccgccgtggcctggtccaacaagtccgatttcgcctgcgccaacgccttcaacaacagcattatccccgaggacacattcttcccaagccccgagagcagctgcggctttaccagcgagagctaccagcagggcgtgctgagcgccaccatcctgtacgagatcctgctgggcaaggccaccctgtacgccgtgctggtgtctgccctggtgctgatggctatggtcaagcggaaggacagccgggga

SEQ ID NO: 34229 - DNA, 2088 bp, synthetic construct
  source 1..2088: mol_type = other DNA
atggccttaccagtgaccgccttgctcctgccgctggccttgctgctccacgccgccaggccggagatcgtgctgacacagagccctgccaccctgtctctgagccctggcgaaagagccaccctgagctgtagagccagccagagcgtgtccagctacctggcctggtatcagcagaagcccggccaggctccccggctgctgatctacgatgccagcaatagagccaccggcatccccgccagattttccggctctggcagcggcaccgacttcaccctgaccatcagctccctggaacccgaggacttcgccgtgtactactgccagcagcggagcaactggcccatcacattcggccagggcacccggctggaaatcaaactcgagatccagaaccctgatcctgccgtgtaccagctgcgggatagcaagagcagcgacaagagcgtgtgtctgttcaccgacttcgacagccagaccaacgtgtcccagagcaaggactccgacgtgtacatcaccgataagtgcgtgctggacatgcggagcatggacttcaagagcaactccgccgtggcctggtccaacaagtccgatttcgcctgcgccaacgccttcaacaacagcattatccccgaggacacattcttcccaagccccgagagcagctgcggctttaccagcgagagctaccagcagggcgtgctgagcgccaccatcctgtacgagatcctgctgggcaaggccaccctgtacgccgtgctggtgtctgccctggtgctgatggctatggtcaagcggaaggacagccggggacgcgccaagagaagcggatctggcgtgaagcagaccctgaatttcgacctgctgaagctggctggcgacgtggaatccaacccaggccctactagtatggactggatttggcgcatccttttccttgtcggcgctgctaccggcgcccattccgggcccatggaccccgacctggaaatcagagccgccttcctgcggcagagaaacacagccctgagaacagaggtggccgagctggaacaagaggtgcagcggctggaaaacgaggtgtcccagtacgagacaagatacggccctctcggaggcggaaaaggatccggcggcggaggatctggcggaggcggatctgggggcggaggctctttcgaagaagtgcagctggtggaatcaggcggcggactggtgcagcctggcagaagcctgagactgagctgtgccgccagcggcttcaccttcaacgactacgccatgcactgggtgcgccaggcccctggaaaaggactggaatgggtgtccacaatcagctggaacagcggcagcatcggctacgccgatagcgtgaagggccggttcaccatcagccgggacaacgccaagaagtccctgtacctccagatgaacagcctgcgggccgaggacacagccctgtactattgcgccaaggacatccagtacggcaactactactacggcatggacgtgtggggccagggaaccaccgtgaccgtgtcatctacgcgtgaggacctgaagaacgtgttcccacctgaggtggccgtgttcgagcctagcgaggccgagatcagccacacccagaaagccaccctcgtgtgcctggctaccggcttctaccccgaccatgtggaactgtcttggtgggtcaacggcaaagaggtgcacagcggcgtgtgtaccgacccccagccactgaaagaacagcccgccctgaacgacagccggtactgcctgagcagcagactgagagtgtccgccaccttctggcagaacccccggaaccacttcagatgccaggtgcagttctacggcctgagcgagaacgacgagtggacccaggacagagccaagcccgtgacccagatcgtgtctgccgaagcctggggcagagccgattgcgacgtgaagctggtggaaaagagcttcgagacagacaccaacctgaacttccagaacctgagcgtgatcggcttcagaatcctgctgctgaaagtggccggctttaacctgctgatgaccctgcggctgtggtccagc

SEQ ID NO: 34230 - DNA, 2007 bp, synthetic construct
  source 1..2007: mol_type = other DNA
atggccttaccagtgaccgccttgctcctgccgctggccttgctgctccacgccgccaggccggagatcgtgctgacacagagccctgccaccctgtctctgagccctggcgaaagagccaccctgagctgtagagccagccagagcgtgtccagctacctggcctggtatcagcagaagcccggccaggctccccggctgctgatctacgatgccagcaatagagccaccggcatccccgccagattttccggctctggcagcggcaccgacttcaccctgaccatcagctccctggaacccgaggacttcgccgtgtactactgccagcagcggagcaactggcccatcacattcggccagggcacccggctggaaatcaaactcgaggacctgaagaacgtgttcccacctgaggtggccgtgttcgagcctagcgaggccgagatcagccacacccagaaagccaccctcgtgtgcctggctaccggcttctaccccgaccatgtggaactgtcttggtgggtcaacggcaaagaggtgcacagcggcgtgtgtaccgacccccagccactgaaagaacagcccgccctgaacgacagccggtactgcctgagcagcagactgagagtgtccgccaccttctggcagaacccccggaaccacttcagatgccaggtgcagttctacggcctgagcgagaacgacgagtggacccaggacagagccaagcccgtgacccagatcgtgtctgccgaagcctggggcagagccgattgcgacgtgaagctggtggaaaagagcttcgagacagacaccaacctgaacttccagaacctgagcgtgatcggcttcagaatcctgctgctgaaagtggccggctttaacctgctgatgaccctgcggctgtggtccagcagggccaagcgatctggatctggagcaacaaacttctcactactcaaacaagcaggtgacgtggaggagaatcccgggcctactagtatggactggatttggcgcatccttttccttgtcggcgctgctaccggcgcccattccgggcccgaagttgctgccctcgagaaggaggtagcagctttggaaaaagaagtcgcagcccttgagaaagaagttgcggctctggagaagggatccggcggcggaggatctggcggaggcggatctgggggcggaggctctttcgaagaagtgcagctggtggaatcaggcggcggactggtgcagcctggcagaagcctgagactgagctgtgccgccagcggcttcaccttcaacgactacgccatgcactgggtgcgccaggcccctggaaaaggactggaatgggtgtccacaatcagctggaacagcggcagcatcggctacgccgatagcgtgaagggccggttcaccatcagccgggacaacgccaagaagtccctgtacctccagatgaacagcctgcgggccgaggacacagccctgtactattgcgccaaggacatccagtacggcaactactactacggcatggacgtgtggggccagggaaccaccgtgaccgtgtcatctacgcgtatccagaaccctgatcctgccgtgtaccagctgcgggatagcaagagcagcgacaagagcgtgtgtctgttcaccgacttcgacagccagaccaacgtgtcccagagcaaggactccgacgtgtacatcaccgataagtgcgtgctggacatgcggagcatggacttcaagagcaactccgccgtggcctggtccaacaagtccgatttcgcctgcgccaacgccttcaacaacagcattatccccgaggacacattcttcccaagccccgagagcagctgcggctttaccagcgagagctaccagcagggcgtgctgagcgccaccatcctgtacgagatcctgctgggcaaggccaccctgtacgccgtgctggtgtctgccctggtgctgatggctatggtcaagcggaaggacagccgggga

SEQ ID NO: 34231 - DNA, 2019 bp, synthetic construct
  source 1..2019: mol_type = other DNA
atggccttaccagtgaccgccttgctcctgccgctggccttgctgctccacgccgccaggccggagatcgtgctgacacagagccctgccaccctgtctctgagccctggcgaaagagccaccctgagctgtagagccagccagagcgtgtccagctacctggcctggtatcagcagaagcccggccaggctccccggctgctgatctacgatgccagcaatagagccaccggcatccccgccagattttccggctctggcagcggcaccgacttcaccctgaccatcagctccctggaacccgaggacttcgccgtgtactactgccagcagcggagcaactggcccatcacattcggccagggcacccggctggaaatcaaactcgagatccagaaccctgatcctgccgtgtaccagctgcgggatagcaagagcagcgacaagagcgtgtgtctgttcaccgacttcgacagccagaccaacgtgtcccagagcaaggactccgacgtgtacatcaccgataagtgcgtgctggacatgcggagcatggacttcaagagcaactccgccgtggcctggtccaacaagtccgatttcgcctgcgccaacgccttcaacaacagcattatccccgaggacacattcttcccaagccccgagagcagctgcggctttaccagcgagagctaccagcagggcgtgctgagcgccaccatcctgtacgagatcctgctgggcaaggccaccctgtacgccgtgctggtgtctgccctggtgctgatggctatggtcaagcggaaggacagccggggacgcgccaagagaagcggatctggcgtgaagcagaccctgaatttcgacctgctgaagctggctggcgacgtggaatccaacccaggccctactagtatggactggatttggcgcatccttttccttgtcggcgctgctaccggcgcccattccgggcccgaagttgctgccctcgagaaggaggtagcagctttggaaaaagaagtcgcagcccttgagaaagaagttgcggctctggagaagggatccggcggcggaggatctggcggaggcggatctgggggcggaggctctttcgaagaagtgcagctggtggaatcaggcggcggactggtgcagcctggcagaagcctgagactgagctgtgccgccagcggcttcaccttcaacgactacgccatgcactgggtgcgccaggcccctggaaaaggactggaatgggtgtccacaatcagctggaacagcggcagcatcggctacgccgatagcgtgaagggccggttcaccatcagccgggacaacgccaagaagtccctgtacctccagatgaacagcctgcgggccgaggacacagccctgtactattgcgccaaggacatccagtacggcaactactactacggcatggacgtgtggggccagggaaccaccgtgaccgtgtcatctacgcgtgaggacctgaagaacgtgttcccacctgaggtggccgtgttcgagcctagcgaggccgagatcagccacacccagaaagccaccctcgtgtgcctggctaccggcttctaccccgaccatgtggaactgtcttggtgggtcaacggcaaagaggtgcacagcggcgtgtgtaccgacccccagccactgaaagaacagcccgccctgaacgacagccggtactgcctgagcagcagactgagagtgtccgccaccttctggcagaacccccggaaccacttcagatgccaggtgcagttctacggcctgagcgagaacgacgagtggacccaggacagagccaagcccgtgacccagatcgtgtctgccgaagcctggggcagagccgattgcgacgtgaagctggtggaaaagagcttcgagacagacaccaacctgaacttccagaacctgagcgtgatcggcttcagaatcctgctgctgaaagtggccggctttaacctgctgatgaccctgcggctgtggtccagc

SEQ ID NO: 34232 - DNA, 2277 bp, synthetic construct
  source 1..2277: mol_type = other DNA
atggccttaccagtgaccgccttgctcctgccgctggccttgctgctccacgccgccaggccggagatcgtgctgacacagagccctgccaccctgtctctgagccctggcgaaagagccaccctgagctgtagagccagccagagcgtgtccagctacctggcctggtatcagcagaagcccggccaggctccccggctgctgatctacgatgccagcaatagagccaccggcatccccgccagattttccggctctggcagcggcaccgacttcaccctgaccatcagctccctggaacccgaggacttcgccgtgtactactgccagcagcggagcaactggcccatcacattcggccagggcacccggctggaaatcaaactcgaggacctgaagaacgtgttcccacctgaggtggccgtgttcgagcctagcgaggccgagatcagccacacccagaaagccaccctcgtgtgcctggctaccggcttctaccccgaccatgtggaactgtcttggtgggtcaacggcaaagaggtgcacagcggcgtgtgtaccgacccccagccactgaaagaacagcccgccctgaacgacagccggtactgcctgagcagcagactgagagtgtccgccaccttctggcagaacccccggaaccacttcagatgccaggtgcagttctacggcctgagcgagaacgacgagtggacccaggacagagccaagcccgtgacccagatcgtgtctgccgaagcctggggcagagccgattgcgacgtgaagctggtggaaaagagcttcgagacagacaccaacctgaacttccagaacctgagcgtgatcggcttcagaatcctgctgctgaaagtggccggctttaacctgctgatgaccctgcggctgtggtccagcagggccaagcgatctggatctggagcaacaaacttctcactactcaaacaagcaggtgacgtggaggagaatcccgggcctactagtatggactggatttggcgcatccttttccttgtcggcgctgctaccggcgcccattccgggccccaggttcagctgcaagagtctggcggaggacttgctcaagctggcggaagcctgagactgtcttgtgccgcctctggcagaaccttcagcatgggctggtttagacaggcccctggcaaagagagagagttcgtcgccgccatcacatacagcggcggcagcccttactacgcctcttctgtcagaggccggttcaccatcagccgggacaacgccaagaacaccgtgtacctccagatgaacagcctgaagccagaggacaccgccgtgtactactgtgccgccaatccaacctacggcagcgactggaatgccgagaattggggccagggcacccaagtgacagtgtctagtggatccggcggcggaggatctggcggaggcggatctgggggcggaggctctttcgaagaagtgcagctggtggaatcaggcggcggactggtgcagcctggcagaagcctgagactgagctgtgccgccagcggcttcaccttcaacgactacgccatgcactgggtgcgccaggcccctggaaaaggactggaatgggtgtccacaatcagctggaacagcggcagcatcggctacgccgatagcgtgaagggccggttcaccatcagccgggacaacgccaagaagtccctgtacctccagatgaacagcctgcgggccgaggacacagccctgtactattgcgccaaggacatccagtacggcaactactactacggcatggacgtgtggggccagggaaccaccgtgaccgtgtcatctacgcgtatccagaaccctgatcctgccgtgtaccagctgcgggatagcaagagcagcgacaagagcgtgtgtctgttcaccgacttcgacagccagaccaacgtgtcccagagcaaggactccgacgtgtacatcaccgataagtgcgtgctggacatgcggagcatggacttcaagagcaactccgccgtggcctggtccaacaagtccgatttcgcctgcgccaacgccttcaacaacagcattatccccgaggacacattcttcccaagccccgagagcagctgcggctttaccagcgagagctaccagcagggcgtgctgagcgccaccatcctgtacgagatcctgctgggcaaggccaccctgtacgccgtgctggtgtctgccctggtgctgatggctatggtcaagcggaaggacagccgggga

SEQ ID NO: 34233 - DNA, 2289 bp, synthetic construct
  source 1..2289: mol_type = other DNA
atggccttaccagtgaccgccttgctcctgccgctggccttgctgctccacgccgccaggccggagatcgtgctgacacagagccctgccaccctgtctctgagccctggcgaaagagccaccctgagctgtagagccagccagagcgtgtccagctacctggcctggtatcagcagaagcccggccaggctccccggctgctgatctacgatgccagcaatagagccaccggcatccccgccagattttccggctctggcagcggcaccgacttcaccctgaccatcagctccctggaacccgaggacttcgccgtgtactactgccagcagcggagcaactggcccatcacattcggccagggcacccggctggaaatcaaactcgagatccagaaccctgatcctgccgtgtaccagctgcgggatagcaagagcagcgacaagagcgtgtgtctgttcaccgacttcgacagccagaccaacgtgtcccagagcaaggactccgacgtgtacatcaccgataagtgcgtgctggacatgcggagcatggacttcaagagcaactccgccgtggcctggtccaacaagtccgatttcgcctgcgccaacgccttcaacaacagcattatccccgaggacacattcttcccaagccccgagagcagctgcggctttaccagcgagagctaccagcagggcgtgctgagcgccaccatcctgtacgagatcctgctgggcaaggccaccctgtacgccgtgctggtgtctgccctggtgctgatggctatggtcaagcggaaggacagccggggacgcgccaagagaagcggatctggcgtgaagcagaccctgaatttcgacctgctgaagctggctggcgacgtggaatccaacccaggccctactagtatggactggatttggcgcatccttttccttgtcggcgctgctaccggcgcccattccgggccccaggttcagctgcaagagtctggcggaggacttgctcaagctggcggaagcctgagactgtcttgtgccgcctctggcagaaccttcagcatgggctggtttagacaggcccctggcaaagagagagagttcgtcgccgccatcacatacagcggcggcagcccttactacgcctcttctgtcagaggccggttcaccatcagccgggacaacgccaagaacaccgtgtacctccagatgaacagcctgaagccagaggacaccgccgtgtactactgtgccgccaatccaacctacggcagcgactggaatgccgagaattggggccagggcacccaagtgacagtgtctagtggatccggcggcggaggatctggcggaggcggatctgggggcggaggctctttcgaagaagtgcagctggtggaatcaggcggcggactggtgcagcctggcagaagcctgagactgagctgtgccgccagcggcttcaccttcaacgactacgccatgcactgggtgcgccaggcccctggaaaaggactggaatgggtgtccacaatcagctggaacagcggcagcatcggctacgccgatagcgtgaagggccggttcaccatcagccgggacaacgccaagaagtccctgtacctccagatgaacagcctgcgggccgaggacacagccctgtactattgcgccaaggacatccagtacggcaactactactacggcatggacgtgtggggccagggaaccaccgtgaccgtgtcatctacgcgtgaggacctgaagaacgtgttcccacctgaggtggccgtgttcgagcctagcgaggccgagatcagccacacccagaaagccaccctcgtgtgcctggctaccggcttctaccccgaccatgtggaactgtcttggtgggtcaacggcaaagaggtgcacagcggcgtgtgtaccgacccccagccactgaaagaacagcccgccctgaacgacagccggtactgcctgagcagcagactgagagtgtccgccaccttctggcagaacccccggaaccacttcagatgccaggtgcagttctacggcctgagcgagaacgacgagtggacccaggacagagccaagcccgtgacccagatcgtgtctgccgaagcctggggcagagccgattgcgacgtgaagctggtggaaaagagcttcgagacagacaccaacctgaacttccagaacctgagcgtgatcggcttcagaatcctgctgctgaaagtggccggctttaacctgctgatgaccctgcggctgtggtccagc

SEQ ID NO: 34234 - DNA, 2295 bp, synthetic construct
  source 1..2295: mol_type = other DNA
atggccttaccagtgaccgccttgctcctgccgctggccttgctgctccacgccgccaggccggaagtgcaactggtggaatctggaggctctctggtgcagccagggggaagcctgagactgtcttgtgccgcttccggcttcaccttcgacgactacgccatgagctgggtgcgccaggtgccaggcaaaggcctggaatgggtgtccagcatcaactggagcggcacccacaccgattacgccgactccgtgaaaggcagattcacaatcagcagaaacaacgccaacaataccctgtacctgcagatgaactccctgaagtctgaggatacagcagtgtattattgcgccaagaactggcgggacgccggcaccacttggtttgagaaaagcggctctgccggacagggaacccaagtgacagtgtcctccggtaccggcggaggcggatctggcggcggaggtagcggtggcggaggatctgaattcgagatcgtgctgacacagagccctgccaccctgtctctgagccctggcgaaagagccaccctgagctgtagagccagccagagcgtgtccagctacctggcctggtatcagcagaagcccggccaggctccccggctgctgatctacgatgccagcaatagagccaccggcatccccgccagattttccggctctggcagcggcaccgacttcaccctgaccatcagctccctggaacccgaggacttcgccgtgtactactgccagcagcggagcaactggcccatcacattcggccagggcacccggctggaaatcaaactcgaggacctgaagaacgtgttcccacctgaggtggccgtgttcgagcctagcgaggccgagatcagccacacccagaaagccaccctcgtgtgcctggctaccggcttctaccccgaccatgtggaactgtcttggtgggtcaacggcaaagaggtgcacagcggcgtgtgtaccgacccccagccactgaaagaacagcccgccctgaacgacagccggtactgcctgagcagcagactgagagtgtccgccaccttctggcagaacccccggaaccacttcagatgccaggtgcagttctacggcctgagcgagaacgacgagtggacccaggacagagccaagcccgtgacccagatcgtgtctgccgaagcctggggcagagccgattgcgacgtgaagctggtggaaaagagcttcgagacagacaccaacctgaacttccagaacctgagcgtgatcggcttcagaatcctgctgctgaaagtggccggctttaacctgctgatgaccctgcggctgtggtccagcagggccaagcgatctggatctggagcaacaaacttctcactactcaaacaagcaggtgacgtggaggagaatcccgggcctactagtatggactggatttggcgcatccttttccttgtcggcgctgctaccggcgcgcattccttcgaagaagtgcagctggtggaatcaggcggcggactggtgcagcctggcagaagcctgagactgagctgtgccgccagcggcttcaccttcaacgactacgccatgcactgggtgcgccaggcccctggaaaaggactggaatgggtgtccacaatcagctggaacagcggcagcatcggctacgccgatagcgtgaagggccggttcaccatcagccgggacaacgccaagaagtccctgtacctccagatgaacagcctgcgggccgaggacacagccctgtactattgcgccaaggacatccagtacggcaactactactacggcatggacgtgtggggccagggaaccaccgtgaccgtgtcatctacgcgtatccagaaccctgatcctgccgtgtaccagctgcgggatagcaagagcagcgacaagagcgtgtgtctgttcaccgacttcgacagccagaccaacgtgtcccagagcaaggactccgacgtgtacatcaccgataagtgcgtgctggacatgcggagcatggacttcaagagcaactccgccgtggcctggtccaacaagtccgatttcgcctgcgccaacgccttcaacaacagcattatccccgaggacacattcttcccaagccccgagagcagctgcggctttaccagcgagagctaccagcagggcgtgctgagcgccaccatcctgtacgagatcctgctgggcaaggccaccctgtacgccgtgctggtgtctgccctggtgctgatggctatggtcaagcggaaggacagccgggga

SEQ ID NO: 34235 - DNA, 2307 bp, synthetic construct
  source 1..2307: mol_type = other DNA
atggccttaccagtgaccgccttgctcctgccgctggccttgctgctccacgccgccaggccggaagtgcaactggtggaatctggaggctctctggtgcagccagggggaagcctgagactgtcttgtgccgcttccggcttcaccttcgacgactacgccatgagctgggtgcgccaggtgccaggcaaaggcctggaatgggtgtccagcatcaactggagcggcacccacaccgattacgccgactccgtgaaaggcagattcacaatcagcagaaacaacgccaacaataccctgtacctgcagatgaactccctgaagtctgaggatacagcagtgtattattgcgccaagaactggcgggacgccggcaccacttggtttgagaaaagcggctctgccggacagggaacccaagtgacagtgtcctccggtaccggcggaggcggatctggcggcggaggtagcggtggcggaggatctgaattcgagatcgtgctgacacagagccctgccaccctgtctctgagccctggcgaaagagccaccctgagctgtagagccagccagagcgtgtccagctacctggcctggtatcagcagaagcccggccaggctccccggctgctgatctacgatgccagcaatagagccaccggcatccccgccagattttccggctctggcagcggcaccgacttcaccctgaccatcagctccctggaacccgaggacttcgccgtgtactactgccagcagcggagcaactggcccatcacattcggccagggcacccggctggaaatcaaactcgagatccagaaccctgatcctgccgtgtaccagctgcgggatagcaagagcagcgacaagagcgtgtgtctgttcaccgacttcgacagccagaccaacgtgtcccagagcaaggactccgacgtgtacatcaccgataagtgcgtgctggacatgcggagcatggacttcaagagcaactccgccgtggcctggtccaacaagtccgatttcgcctgcgccaacgccttcaacaacagcattatccccgaggacacattcttcccaagccccgagagcagctgcggctttaccagcgagagctaccagcagggcgtgctgagcgccaccatcctgtacgagatcctgctgggcaaggccaccctgtacgccgtgctggtgtctgccctggtgctgatggctatggtcaagcggaaggacagccggggacgcgccaagagaagcggatctggcgtgaagcagaccctgaatttcgacctgctgaagctggctggcgacgtggaatccaacccaggccctactagtatggactggatttggcgcatccttttccttgtcggcgctgctaccggcgcgcattccttcgaagaagtgcagctggtggaatcaggcggcggactggtgcagcctggcagaagcctgagactgagctgtgccgccagcggcttcaccttcaacgactacgccatgcactgggtgcgccaggcccctggaaaaggactggaatgggtgtccacaatcagctggaacagcggcagcatcggctacgccgatagcgtgaagggccggttcaccatcagccgggacaacgccaagaagtccctgtacctccagatgaacagcctgcgggccgaggacacagccctgtactattgcgccaaggacatccagtacggcaactactactacggcatggacgtgtggggccagggaaccaccgtgaccgtgtcatctacgcgtgaggacctgaagaacgtgttcccacctgaggtggccgtgttcgagcctagcgaggccgagatcagccacacccagaaagccaccctcgtgtgcctggctaccggcttctaccccgaccatgtggaactgtcttggtgggtcaacggcaaagaggtgcacagcggcgtgtgtaccgacccccagccactgaaagaacagcccgccctgaacgacagccggtactgcctgagcagcagactgagagtgtccgccaccttctggcagaacccccggaaccacttcagatgccaggtgcagttctacggcctgagcgagaacgacgagtggacccaggacagagccaagcccgtgacccagatcgtgtctgccgaagcctggggcagagccgattgcgacgtgaagctggtggaaaagagcttcgagacagacaccaacctgaacttccagaacctgagcgtgatcggcttcagaatcctgctgctgaaagtggccggctttaacctgctgatgaccctgcggctgtggtccagc

SEQ ID NO: 34236 - DNA, 2289 bp, synthetic construct
  source 1..2289: mol_type = other DNA
atggccttaccagtgaccgccttgctcctgccgctggccttgctgctccacgccgccaggccggaagttcagctgcttgagtctggcggaggactggttcaacctggcggaagcctgagactgtcttgtgccgccagcggcttcatcttcagcagctacgccatgagctgggtccgacaggctcctggaaagggccaagaatgggtttccggcgttagcggcacaggcgtgaacacctactacgccgatagcgtgaagggcagattcaccatcagccgggacaacagcaagaacaccctgtacctccagatgaacagcctgagagccgaggacaccgccgtgtactattgtgcctctggcaaaggctgggacagcggctcttggtacgaggactatagaggccagggcaccctggtcacagtttcttcaggtaccggcggaggcggatctggcggcggaggtagcggtggcggaggatctgaattcgagatcgtgctgacacagagccctgccaccctgtctctgagccctggcgaaagagccaccctgagctgtagagccagccagagcgtgtccagctacctggcctggtatcagcagaagcccggccaggctccccggctgctgatctacgatgccagcaatagagccaccggcatccccgccagattttccggctctggcagcggcaccgacttcaccctgaccatcagctccctggaacccgaggacttcgccgtgtactactgccagcagcggagcaactggcccatcacattcggccagggcacccggctggaaatcaaactcgaggacctgaagaacgtgttcccacctgaggtggccgtgttcgagcctagcgaggccgagatcagccacacccagaaagccaccctcgtgtgcctggctaccggcttctaccccgaccatgtggaactgtcttggtgggtcaacggcaaagaggtgcacagcggcgtgtgtaccgacccccagccactgaaagaacagcccgccctgaacgacagccggtactgcctgagcagcagactgagagtgtccgccaccttctggcagaacccccggaaccacttcagatgccaggtgcagttctacggcctgagcgagaacgacgagtggacccaggacagagccaagcccgtgacccagatcgtgtctgccgaagcctggggcagagccgattgcgacgtgaagctggtggaaaagagcttcgagacagacaccaacctgaacttccagaacctgagcgtgatcggcttcagaatcctgctgctgaaagtggccggctttaacctgctgatgaccctgcggctgtggtccagcagggccaagcgatctggatctggagcaacaaacttctcactactcaaacaagcaggtgacgtggaggagaatcccgggcctactagtatggactggatttggcgcatccttttccttgtcggcgctgctaccggcgcgcattccttcgaagaagtgcagctggtggaatcaggcggcggactggtgcagcctggcagaagcctgagactgagctgtgccgccagcggcttcaccttcaacgactacgccatgcactgggtgcgccaggcccctggaaaaggactggaatgggtgtccacaatcagctggaacagcggcagcatcggctacgccgatagcgtgaagggccggttcaccatcagccgggacaacgccaagaagtccctgtacctccagatgaacagcctgcgggccgaggacacagccctgtactattgcgccaaggacatccagtacggcaactactactacggcatggacgtgtggggccagggaaccaccgtgaccgtgtcatctacgcgtatccagaaccctgatcctgccgtgtaccagctgcgggatagcaagagcagcgacaagagcgtgtgtctgttcaccgacttcgacagccagaccaacgtgtcccagagcaaggactccgacgtgtacatcaccgataagtgcgtgctggacatgcggagcatggacttcaagagcaactccgccgtggcctggtccaacaagtccgatttcgcctgcgccaacgccttcaacaacagcattatccccgaggacacattcttcccaagccccgagagcagctgcggctttaccagcgagagctaccagcagggcgtgctgagcgccaccatcctgtacgagatcctgctgggcaaggccaccctgtacgccgtgctggtgtctgccctggtgctgatggctatggtcaagcggaaggacagccgggga

SEQ ID NO: 34237 - DNA, 2301 bp, synthetic construct
  source 1..2301: mol_type = other DNA
atggccttaccagtgaccgccttgctcctgccgctggccttgctgctccacgccgccaggccggaagttcagctgcttgagtctggcggaggactggttcaacctggcggaagcctgagactgtcttgtgccgccagcggcttcatcttcagcagctacgccatgagctgggtccgacaggctcctggaaagggccaagaatgggtttccggcgttagcggcacaggcgtgaacacctactacgccgatagcgtgaagggcagattcaccatcagccgggacaacagcaagaacaccctgtacctccagatgaacagcctgagagccgaggacaccgccgtgtactattgtgcctctggcaaaggctgggacagcggctcttggtacgaggactatagaggccagggcaccctggtcacagtttcttcaggtaccggcggaggcggatctggcggcggaggtagcggtggcggaggatctgaattcgagatcgtgctgacacagagccctgccaccctgtctctgagccctggcgaaagagccaccctgagctgtagagccagccagagcgtgtccagctacctggcctggtatcagcagaagcccggccaggctccccggctgctgatctacgatgccagcaatagagccaccggcatccccgccagattttccggctctggcagcggcaccgacttcaccctgaccatcagctccctggaacccgaggacttcgccgtgtactactgccagcagcggagcaactggcccatcacattcggccagggcacccggctggaaatcaaactcgagatccagaaccctgatcctgccgtgtaccagctgcgggatagcaagagcagcgacaagagcgtgtgtctgttcaccgacttcgacagccagaccaacgtgtcccagagcaaggactccgacgtgtacatcaccgataagtgcgtgctggacatgcggagcatggacttcaagagcaactccgccgtggcctggtccaacaagtccgatttcgcctgcgccaacgccttcaacaacagcattatccccgaggacacattcttcccaagccccgagagcagctgcggctttaccagcgagagctaccagcagggcgtgctgagcgccaccatcctgtacgagatcctgctgggcaaggccaccctgtacgccgtgctggtgtctgccctggtgctgatggctatggtcaagcggaaggacagccggggacgcgccaagagaagcggatctggcgtgaagcagaccctgaatttcgacctgctgaagctggctggcgacgtggaatccaacccaggccctactagtatggactggatttggcgcatccttttccttgtcggcgctgctaccggcgcgcattccttcgaagaagtgcagctggtggaatcaggcggcggactggtgcagcctggcagaagcctgagactgagctgtgccgccagcggcttcaccttcaacgactacgccatgcactgggtgcgccaggcccctggaaaaggactggaatgggtgtccacaatcagctggaacagcggcagcatcggctacgccgatagcgtgaagggccggttcaccatcagccgggacaacgccaagaagtccctgtacctccagatgaacagcctgcgggccgaggacacagccctgtactattgcgccaaggacatccagtacggcaactactactacggcatggacgtgtggggccagggaaccaccgtgaccgtgtcatctacgcgtgaggacctgaagaacgtgttcccacctgaggtggccgtgttcgagcctagcgaggccgagatcagccacacccagaaagccaccctcgtgtgcctggctaccggcttctaccccgaccatgtggaactgtcttggtgggtcaacggcaaagaggtgcacagcggcgtgtgtaccgacccccagccactgaaagaacagcccgccctgaacgacagccggtactgcctgagcagcagactgagagtgtccgccaccttctggcagaacccccggaaccacttcagatgccaggtgcagttctacggcctgagcgagaacgacgagtggacccaggacagagccaagcccgtgacccagatcgtgtctgccgaagcctggggcagagccgattgcgacgtgaagctggtggaaaagagcttcgagacagacaccaacctgaacttccagaacctgagcgtgatcggcttcagaatcctgctgctgaaagtggccggctttaacctgctgatgaccctgcggctgtggtccagc

SEQ ID NO: 34238 - DNA, 2193 bp, synthetic construct
  source 1..2193: mol_type = other DNA
atggccttaccagtgaccgccttgctcctgccgctggccttgctgctccacgccgccaggccgatgctgcccgctcctaagaatctggtggtgtccagaatcaccgaggacagcgccagactgtcttggacagctcctgatgccgccttcgacagcttccccatccggtacatcgagacactgatctggggcgaagccatctggctggatgtgcctggaagcgagagaagctacgacctgaccggactgaagcctggcacagagtatgccgtggtcatcaccggcgtgaaaggcggcagattctctagccctctggtggcctctttcaccaccggtaccggcggaggcggatctggcggcggaggtagcggtggcggaggatctgaattcgagatcgtgctgacacagagccctgccaccctgtctctgagccctggcgaaagagccaccctgagctgtagagccagccagagcgtgtccagctacctggcctggtatcagcagaagcccggccaggctccccggctgctgatctacgatgccagcaatagagccaccggcatccccgccagattttccggctctggcagcggcaccgacttcaccctgaccatcagctccctggaacccgaggacttcgccgtgtactactgccagcagcggagcaactggcccatcacattcggccagggcacccggctggaaatcaaactcgaggacctgaagaacgtgttcccacctgaggtggccgtgttcgagcctagcgaggccgagatcagccacacccagaaagccaccctcgtgtgcctggctaccggcttctaccccgaccatgtggaactgtcttggtgggtcaacggcaaagaggtgcacagcggcgtgtgtaccgacccccagccactgaaagaacagcccgccctgaacgacagccggtactgcctgagcagcagactgagagtgtccgccaccttctggcagaacccccggaaccacttcagatgccaggtgcagttctacggcctgagcgagaacgacgagtggacccaggacagagccaagcccgtgacccagatcgtgtctgccgaagcctggggcagagccgattgcgacgtgaagctggtggaaaagagcttcgagacagacaccaacctgaacttccagaacctgagcgtgatcggcttcagaatcctgctgctgaaagtggccggctttaacctgctgatgaccctgcggctgtggtccagcagggccaagcgatctggatctggagcaacaaacttctcactactcaaacaagcaggtgacgtggaggagaatcccgggcctactagtatggactggatttggcgcatccttttccttgtcggcgctgctaccggcgcgcattccttcgaagaagtgcagctggtggaatcaggcggcggactggtgcagcctggcagaagcctgagactgagctgtgccgccagcggcttcaccttcaacgactacgccatgcactgggtgcgccaggcccctggaaaaggactggaatgggtgtccacaatcagctggaacagcggcagcatcggctacgccgatagcgtgaagggccggttcaccatcagccgggacaacgccaagaagtccctgtacctccagatgaacagcctgcgggccgaggacacagccctgtactattgcgccaaggacatccagtacggcaactactactacggcatggacgtgtggggccagggaaccaccgtgaccgtgtcatctacgcgtatccagaaccctgatcctgccgtgtaccagctgcgggatagcaagagcagcgacaagagcgtgtgtctgttcaccgacttcgacagccagaccaacgtgtcccagagcaaggactccgacgtgtacatcaccgataagtgcgtgctggacatgcggagcatggacttcaagagcaactccgccgtggcctggtccaacaagtccgatttcgcctgcgccaacgccttcaacaacagcattatccccgaggacacattcttcccaagccccgagagcagctgcggctttaccagcgagagctaccagcagggcgtgctgagcgccaccatcctgtacgagatcctgctgggcaaggccaccctgtacgccgtgctggtgtctgccctggtgctgatggctatggtcaagcggaaggacagccgggga

SEQ ID NO: 34239 - DNA, 2205 bp, synthetic construct
  source 1..2205: mol_type = other DNA
atggccttaccagtgaccgccttgctcctgccgctggccttgctgctccacgccgccaggccgatgctgcccgctcctaagaatctggtggtgtccagaatcaccgaggacagcgccagactgtcttggacagctcctgatgccgccttcgacagcttccccatccggtacatcgagacactgatctggggcgaagccatctggctggatgtgcctggaagcgagagaagctacgacctgaccggactgaagcctggcacagagtatgccgtggtcatcaccggcgtgaaaggcggcagattctctagccctctggtggcctctttcaccaccggtaccggcggaggcggatctggcggcggaggtagcggtggcggaggatctgaattcgagatcgtgctgacacagagccctgccaccctgtctctgagccctggcgaaagagccaccctgagctgtagagccagccagagcgtgtccagctacctggcctggtatcagcagaagcccggccaggctccccggctgctgatctacgatgccagcaatagagccaccggcatccccgccagattttccggctctggcagcggcaccgacttcaccctgaccatcagctccctggaacccgaggacttcgccgtgtactactgccagcagcggagcaactggcccatcacattcggccagggcacccggctggaaatcaaactcgagatccagaaccctgatcctgccgtgtaccagctgcgggatagcaagagcagcgacaagagcgtgtgtctgttcaccgacttcgacagccagaccaacgtgtcccagagcaaggactccgacgtgtacatcaccgataagtgcgtgctggacatgcggagcatggacttcaagagcaactccgccgtggcctggtccaacaagtccgatttcgcctgcgccaacgccttcaacaacagcattatccccgaggacacattcttcccaagccccgagagcagctgcggctttaccagcgagagctaccagcagggcgtgctgagcgccaccatcctgtacgagatcctgctgggcaaggccaccctgtacgccgtgctggtgtctgccctggtgctgatggctatggtcaagcggaaggacagccggggacgcgccaagagaagcggatctggcgtgaagcagaccctgaatttcgacctgctgaagctggctggcgacgtggaatccaacccaggccctactagtatggactggatttggcgcatccttttccttgtcggcgctgctaccggcgcgcattccttcgaagaagtgcagctggtggaatcaggcggcggactggtgcagcctggcagaagcctgagactgagctgtgccgccagcggcttcaccttcaacgactacgccatgcactgggtgcgccaggcccctggaaaaggactggaatgggtgtccacaatcagctggaacagcggcagcatcggctacgccgatagcgtgaagggccggttcaccatcagccgggacaacgccaagaagtccctgtacctccagatgaacagcctgcgggccgaggacacagccctgtactattgcgccaaggacatccagtacggcaactactactacggcatggacgtgtggggccagggaaccaccgtgaccgtgtcatctacgcgtgaggacctgaagaacgtgttcccacctgaggtggccgtgttcgagcctagcgaggccgagatcagccacacccagaaagccaccctcgtgtgcctggctaccggcttctaccccgaccatgtggaactgtcttggtgggtcaacggcaaagaggtgcacagcggcgtgtgtaccgacccccagccactgaaagaacagcccgccctgaacgacagccggtactgcctgagcagcagactgagagtgtccgccaccttctggcagaacccccggaaccacttcagatgccaggtgcagttctacggcctgagcgagaacgacgagtggacccaggacagagccaagcccgtgacccagatcgtgtctgccgaagcctggggcagagccgattgcgacgtgaagctggtggaaaagagcttcgagacagacaccaacctgaacttccagaacctgagcgtgatcggcttcagaatcctgctgctgaaagtggccggctttaacctgctgatgaccctgcggctgtggtccagc

SEQ ID NO: 34240 - DNA, 2280 bp, synthetic construct
  source 1..2280: mol_type = other DNA
atggccttaccagtgaccgccttgctcctgccgctggccttgctgctccacgccgccaggccggaggtgcagctggttgaatctggcggaggactggttcagcctggcggatctctgagactgtcttgtgccgccagcggcttcaacatcaaggatacctgtatcggctgggttcgcagagcccctggcaaagaggaagaactggtcgccaaaatctgcaagtacagcggccacaccagatacgccgacagcgtgaagggcagattcaccatcagcgccgacaccagcaagaacaccgcctacctccagatgaacagcctgagagccgaggacaccgccgtgtactattgtgccgctgtgtccgtcagagatgggcactacaattactggggccagggcaccaccgtgaccgtttcttcaggtaccggcggaggcggatctggcggcggaggtagcggtggcggaggatctgaattcgagatcgtgctgacacagagccctgccaccctgtctctgagccctggcgaaagagccaccctgagctgtagagccagccagagcgtgtccagctacctggcctggtatcagcagaagcccggccaggctccccggctgctgatctacgatgccagcaatagagccaccggcatccccgccagattttccggctctggcagcggcaccgacttcaccctgaccatcagctccctggaacccgaggacttcgccgtgtactactgccagcagcggagcaactggcccatcacattcggccagggcacccggctggaaatcaaactcgaggacctgaagaacgtgttcccacctgaggtggccgtgttcgagcctagcgaggccgagatcagccacacccagaaagccaccctcgtgtgcctggctaccggcttctaccccgaccatgtggaactgtcttggtgggtcaacggcaaagaggtgcacagcggcgtgtgtaccgacccccagccactgaaagaacagcccgccctgaacgacagccggtactgcctgagcagcagactgagagtgtccgccaccttctggcagaacccccggaaccacttcagatgccaggtgcagttctacggcctgagcgagaacgacgagtggacccaggacagagccaagcccgtgacccagatcgtgtctgccgaagcctggggcagagccgattgcgacgtgaagctggtggaaaagagcttcgagacagacaccaacctgaacttccagaacctgagcgtgatcggcttcagaatcctgctgctgaaagtggccggctttaacctgctgatgaccctgcggctgtggtccagcagggccaagcgatctggatctggagcaacaaacttctcactactcaaacaagcaggtgacgtggaggagaatcccgggcctactagtatggactggatttggcgcatccttttccttgtcggcgctgctaccggcgcgcattccttcgaagaagtgcagctggtggaatcaggcggcggactggtgcagcctggcagaagcctgagactgagctgtgccgccagcggcttcaccttcaacgactacgccatgcactgggtgcgccaggcccctggaaaaggactggaatgggtgtccacaatcagctggaacagcggcagcatcggctacgccgatagcgtgaagggccggttcaccatcagccgggacaacgccaagaagtccctgtacctccagatgaacagcctgcgggccgaggacacagccctgtactattgcgccaaggacatccagtacggcaactactactacggcatggacgtgtggggccagggaaccaccgtgaccgtgtcatctacgcgtatccagaaccctgatcctgccgtgtaccagctgcgggatagcaagagcagcgacaagagcgtgtgtctgttcaccgacttcgacagccagaccaacgtgtcccagagcaaggactccgacgtgtacatcaccgataagtgcgtgctggacatgcggagcatggacttcaagagcaactccgccgtggcctggtccaacaagtccgatttcgcctgcgccaacgccttcaacaacagcattatccccgaggacacattcttcccaagccccgagagcagctgcggctttaccagcgagagctaccagcagggcgtgctgagcgccaccatcctgtacgagatcctgctgggcaaggccaccctgtacgccgtgctggtgtctgccctggtgctgatggctatggtcaagcggaaggacagccgggga

SEQ ID NO: 34241 - DNA, 2292 bp, synthetic construct
  source 1..2292: mol_type = other DNA
atggccttaccagtgaccgccttgctcctgccgctggccttgctgctccacgccgccaggccggaggtgcagctggttgaatctggcggaggactggttcagcctggcggatctctgagactgtcttgtgccgccagcggcttcaacatcaaggatacctgtatcggctgggttcgcagagcccctggcaaagaggaagaactggtcgccaaaatctgcaagtacagcggccacaccagatacgccgacagcgtgaagggcagattcaccatcagcgccgacaccagcaagaacaccgcctacctccagatgaacagcctgagagccgaggacaccgccgtgtactattgtgccgctgtgtccgtcagagatgggcactacaattactggggccagggcaccaccgtgaccgtttcttcaggtaccggcggaggcggatctggcggcggaggtagcggtggcggaggatctgaattcgagatcgtgctgacacagagccctgccaccctgtctctgagccctggcgaaagagccaccctgagctgtagagccagccagagcgtgtccagctacctggcctggtatcagcagaagcccggccaggctccccggctgctgatctacgatgccagcaatagagccaccggcatccccgccagattttccggctctggcagcggcaccgacttcaccctgaccatcagctccctggaacccgaggacttcgccgtgtactactgccagcagcggagcaactggcccatcacattcggccagggcacccggctggaaatcaaactcgagatccagaaccctgatcctgccgtgtaccagctgcgggatagcaagagcagcgacaagagcgtgtgtctgttcaccgacttcgacagccagaccaacgtgtcccagagcaaggactccgacgtgtacatcaccgataagtgcgtgctggacatgcggagcatggacttcaagagcaactccgccgtggcctggtccaacaagtccgatttcgcctgcgccaacgccttcaacaacagcattatccccgaggacacattcttcccaagccccgagagcagctgcggctttaccagcgagagctaccagcagggcgtgctgagcgccaccatcctgtacgagatcctgctgggcaaggccaccctgtacgccgtgctggtgtctgccctggtgctgatggctatggtcaagcggaaggacagccggggacgcgccaagagaagcggatctggcgtgaagcagaccctgaatttcgacctgctgaagctggctggcgacgtggaatccaacccaggccctactagtatggactggatttggcgcatccttttccttgtcggcgctgctaccggcgcgcattccttcgaagaagtgcagctggtggaatcaggcggcggactggtgcagcctggcagaagcctgagactgagctgtgccgccagcggcttcaccttcaacgactacgccatgcactgggtgcgccaggcccctggaaaaggactggaatgggtgtccacaatcagctggaacagcggcagcatcggctacgccgatagcgtgaagggccggttcaccatcagccgggacaacgccaagaagtccctgtacctccagatgaacagcctgcgggccgaggacacagccctgtactattgcgccaaggacatccagtacggcaactactactacggcatggacgtgtggggccagggaaccaccgtgaccgtgtcatctacgcgtgaggacctgaagaacgtgttcccacctgaggtggccgtgttcgagcctagcgaggccgagatcagccacacccagaaagccaccctcgtgtgcctggctaccggcttctaccccgaccatgtggaactgtcttggtgggtcaacggcaaagaggtgcacagcggcgtgtgtaccgacccccagccactgaaagaacagcccgccctgaacgacagccggtactgcctgagcagcagactgagagtgtccgccaccttctggcagaacccccggaaccacttcagatgccaggtgcagttctacggcctgagcgagaacgacgagtggacccaggacagagccaagcccgtgacccagatcgtgtctgccgaagcctggggcagagccgattgcgacgtgaagctggtggaaaagagcttcgagacagacaccaacctgaacttccagaacctgagcgtgatcggcttcagaatcctgctgctgaaagtggccggctttaacctgctgatgaccctgcggctgtggtccagc

SEQ ID NO: 34242 - DNA, 3396 bp, synthetic construct
  source 1..3396: mol_type = other DNA
atggccttaccagtgaccgccttgctcctgccgctggccttgctgctccacgccgccaggccggaagtgcagctggttgaatctggcggaggactggttcaggctggcggatctctgagactgtcttgtgccgccagcggcagaacctttagcatgggctggtttagacaggcccctggcaaagagagagagttcgtcgccgccatcacatactctggcggcagcccttactacgccgactctgtgaagggcagattcaccatcagccgggacaacgccaagaacaccgtgtacctccagatgaacagcctgaagcctgaggacaccgccgtgtactactgcgccgccaatccaacatacggcagcgactggaacgccgagaattggggccagggaacccaagtgacagtgtctagcggtaccggcggaggcggatctggcggcggaggtagcggtggcggaggatctgaattcgagatcgtgctgacacagagccctgccaccctgtctctgagccctggcgaaagagccaccctgagctgtagagccagccagagcgtgtccagctacctggcctggtatcagcagaagcccggccaggctccccggctgctgatctacgatgccagcaatagagccaccggcatccccgccagattttccggctctggcagcggcaccgacttcaccctgaccatcagctccctggaacccgaggacttcgccgtgtactactgccagcagcggagcaactggcccatcacattcggccagggcacccggctggaaatcaaactcgaggacctgaagaacgtgttcccacctgaggtggccgtgttcgagcctagcgaggccgagatcagccacacccagaaagccaccctcgtgtgcctggctaccggcttctaccccgaccatgtggaactgtcttggtgggtcaacggcaaagaggtgcacagcggcgtgtgtaccgacccccagccactgaaagaacagcccgccctgaacgacagccggtactgcctgagcagcagactgagagtgtccgccaccttctggcagaacccccggaaccacttcagatgccaggtgcagttctacggcctgagcgagaacgacgagtggacccaggacagagccaagcccgtgacccagatcgtgtctgccgaagcctggggcagagccgattgcgacgtgaagctggtggaaaagagcttcgagacagacaccaacctgaacttccagaacctgagcgtgatcggcttcagaatcctgctgctgaaagtggccggctttaacctgctgatgaccctgcggctgtggtccagcagggccaagcgatctggatctggagcaacaaacttctcactactcaaacaagcaggtgacgtggaggagaatcccgggcctactagtgccaccatggactggatttggcgcatccttttccttgtcggcgctgctaccggcgcccattccgggcccgaagtgcaactggttgaatccggtggcggcctggtgcaagcaggcggatctctcagacttagctgtgccgcctccggcagaaccttcacaatgggatggtttaggcaggctccagggaaagagagagagttcgtcgccgccatctctctgtctcccacactggcctactacgccgactctgtgaaaggccggttcaccatctccagagataatgccaagaacaccgtggtgctgcaaatgaactctctgaaacccgaggatacagccctgtactattgtgccgctgaccggaagtccgtgatgagcatcagacccgattactggggacagggcacacaagtcacagtgtcctctggatccggcggcggaggatctggcggaggcggatctgggggcggaggctctttcgaagaagtgcagctggtggaatcaggcggcggactggtgcagcctggcagaagcctgagactgagctgtgccgccagcggcttcaccttcaacgactacgccatgcactgggtgcgccaggcccctggaaaaggactggaatgggtgtccacaatcagctggaacagcggcagcatcggctacgccgatagcgtgaagggccggttcaccatcagccgggacaacgccaagaagtccctgtacctccagatgaacagcctgcgggccgaggacacagccctgtactattgcgccaaggacatccagtacggcaactactactacggcatggacgtgtggggccagggaaccaccgtgaccgtgtcatctacgcgtatccagaaccctgatcctgccgtgtaccagctgcgggatagcaagagcagcgacaagagcgtgtgtctgttcaccgacttcgacagccagaccaacgtgtcccagagcaaggactccgacgtgtacatcaccgataagtgcgtgctggacatgcggagcatggacttcaagagcaactccgccgtggcctggtccaacaagtccgatttcgcctgcgccaacgccttcaacaacagcattatccccgaggacacattcttcccaagccccgagagcagctgcggctttaccagcgagagctaccagcagggcgtgctgagcgccaccatcctgtacgagatcctgctgggcaaggccaccctgtacgccgtgctggtgtctgccctggtgctgatggctatggtcaagcggaaggacagccggggacgcgccaagagaagcggatctggcgtgaagcagaccctgaatttcgacctgctgaagctggctggcgacgtggaatccaacccaggcccttctagaggccatatgaccgagtacaagcccacggtgcgcctcgccacccgcgacgacgtccccagggccgtacgcaccctcgccgccgcgttcgccgactaccccgccacgcgccacaccgtcgatccggaccgccacatcgagcgggtcaccgagctgcaagaactcttcctcacgcgcgtcgggctcgacatcggcaaggtgtgggtcgcggacgacggcgccgcggtggcggtctggaccacgccggagagcgtcgaagcgggggcggtgttcgccgagatcggcccgcgcatggccgagttgagcggttcccggctggccgcgcagcaacagatggaaggcctcctggcgccgcaccggcccaaggagcccgcgtggttcctggccaccgtcggcgtctcgcccgaccaccagggcaagggtctgggcagcgccgtcgtgctccccggagtggaggcggccgagcgcgccggggtgcccgccttcctggagacctccgcgccccgcaacctccccttctacgagcggctcggcttcaccgtcaccgccgacgtcgaggtgcccgaaggaccgcgcacctggtgcatgacccgcaagcccggtgcctga

SEQ ID NO: 34243 - DNA, 2310 bp, synthetic construct
  source 1..2310: mol_type = other DNA
atggccttaccagtgaccgccttgctcctgccgctggccttgctgctccacgccgccaggccggaagtgcagctggttgaatctggcggaggactggttcagcctggcggatctctgagactgtcttgtgccgcctctggcttcgccagcgactactatatcatcggctggttcagacaggcccctggcaaagagagagagggcgtcagctgtatcagcagcagatacgccaacaccaactacgccgacagcgtgaagggcagattcaccatcagccgggacaacgccaagaacaccgtgtacctccagatgaacagcctgaagcctgaggacaccgccgtgtactactgtgccgccgacaccagaagatacacctgtcctgacattgccaccatgcaccggaacttcgattcttggggccagggcacactggtcaccgtttcttctggtaccggcggaggcggatctggcggcggaggtagcggtggcggaggatctgaattcgagatcgtgctgacacagagccctgccaccctgtctctgagccctggcgaaagagccaccctgagctgtagagccagccagagcgtgtccagctacctggcctggtatcagcagaagcccggccaggctccccggctgctgatctacgatgccagcaatagagccaccggcatccccgccagattttccggctctggcagcggcaccgacttcaccctgaccatcagctccctggaacccgaggacttcgccgtgtactactgccagcagcggagcaactggcccatcacattcggccagggcacccggctggaaatcaaactcgaggacctgaagaacgtgttcccacctgaggtggccgtgttcgagcctagcgaggccgagatcagccacacccagaaagccaccctcgtgtgcctggctaccggcttctaccccgaccatgtggaactgtcttggtgggtcaacggcaaagaggtgcacagcggcgtgtgtaccgacccccagccactgaaagaacagcccgccctgaacgacagccggtactgcctgagcagcagactgagagtgtccgccaccttctggcagaacccccggaaccacttcagatgccaggtgcagttctacggcctgagcgagaacgacgagtggacccaggacagagccaagcccgtgacccagatcgtgtctgccgaagcctggggcagagccgattgcgacgtgaagctggtggaaaagagcttcgagacagacaccaacctgaacttccagaacctgagcgtgatcggcttcagaatcctgctgctgaaagtggccggctttaacctgctgatgaccctgcggctgtggtccagcagggccaagcgatctggatctggagcaacaaacttctcactactcaaacaagcaggtgacgtggaggagaatcccgggcctactagtatggactggatttggcgcatccttttccttgtcggcgctgctaccggcgcgcattccttcgaagaagtgcagctggtggaatcaggcggcggactggtgcagcctggcagaagcctgagactgagctgtgccgccagcggcttcaccttcaacgactacgccatgcactgggtgcgccaggcccctggaaaaggactggaatgggtgtccacaatcagctggaacagcggcagcatcggctacgccgatagcgtgaagggccggttcaccatcagccgggacaacgccaagaagtccctgtacctccagatgaacagcctgcgggccgaggacacagccctgtactattgcgccaaggacatccagtacggcaactactactacggcatggacgtgtggggccagggaaccaccgtgaccgtgtcatctacgcgtatccagaaccctgatcctgccgtgtaccagctgcgggatagcaagagcagcgacaagagcgtgtgtctgttcaccgacttcgacagccagaccaacgtgtcccagagcaaggactccgacgtgtacatcaccgataagtgcgtgctggacatgcggagcatggacttcaagagcaactccgccgtggcctggtccaacaagtccgatttcgcctgcgccaacgccttcaacaacagcattatccccgaggacacattcttcccaagccccgagagcagctgcggctttaccagcgagagctaccagcagggcgtgctgagcgccaccatcctgtacgagatcctgctgggcaaggccaccctgtacgccgtgctggtgtctgccctggtgctgatggctatggtcaagcggaaggacagccggggataa

SEQ ID NO: 34244 - DNA, 2310 bp, synthetic construct
  source 1..2310: mol_type = other DNA
atggccttaccagtgaccgccttgctcctgccgctggccttgctgctccacgccgccaggccggaagtgcagctggttgaatctggcggaggactggttcagcctggcggatctctgagactgagctgtgaagccagcggcttcgccagcgacgattacatcatcggctggttcagacaggcccctggcaaagagagagagggcgtcagctgcatcagctctaagtacgccaacaccgtgtacaccgacagcgtgaagggcagattcagactgagcagaggcaccgccaagaataccgtgtacctccagatgagcgccctgaagcctgaggataccgccgtgtactactgcgctatggacagccgcagagtgacatgccctgagatcagcaccatgcaccggaacttcgattcttggggccagggcacactggtcacagtgtcatctggtaccggcggaggcggatctggcggcggaggtagcggtggcggaggatctgaattcgagatcgtgctgacacagagccctgccaccctgtctctgagccctggcgaaagagccaccctgagctgtagagccagccagagcgtgtccagctacctggcctggtatcagcagaagcccggccaggctccccggctgctgatctacgatgccagcaatagagccaccggcatccccgccagattttccggctctggcagcggcaccgacttcaccctgaccatcagctccctggaacccgaggacttcgccgtgtactactgccagcagcggagcaactggcccatcacattcggccagggcacccggctggaaatcaaactcgaggacctgaagaacgtgttcccacctgaggtggccgtgttcgagcctagcgaggccgagatcagccacacccagaaagccaccctcgtgtgcctggctaccggcttctaccccgaccatgtggaactgtcttggtgggtcaacggcaaagaggtgcacagcggcgtgtgtaccgacccccagccactgaaagaacagcccgccctgaacgacagccggtactgcctgagcagcagactgagagtgtccgccaccttctggcagaacccccggaaccacttcagatgccaggtgcagttctacggcctgagcgagaacgacgagtggacccaggacagagccaagcccgtgacccagatcgtgtctgccgaagcctggggcagagccgattgcgacgtgaagctggtggaaaagagcttcgagacagacaccaacctgaacttccagaacctgagcgtgatcggcttcagaatcctgctgctgaaagtggccggctttaacctgctgatgaccctgcggctgtggtccagcagggccaagcgatctggatctggagcaacaaacttctcactactcaaacaagcaggtgacgtggaggagaatcccgggcctactagtatggactggatttggcgcatccttttccttgtcggcgctgctaccggcgcgcattccttcgaagaagtgcagctggtggaatcaggcggcggactggtgcagcctggcagaagcctgagactgagctgtgccgccagcggcttcaccttcaacgactacgccatgcactgggtgcgccaggcccctggaaaaggactggaatgggtgtccacaatcagctggaacagcggcagcatcggctacgccgatagcgtgaagggccggttcaccatcagccgggacaacgccaagaagtccctgtacctccagatgaacagcctgcgggccgaggacacagccctgtactattgcgccaaggacatccagtacggcaactactactacggcatggacgtgtggggccagggaaccaccgtgaccgtgtcatctacgcgtatccagaaccctgatcctgccgtgtaccagctgcgggatagcaagagcagcgacaagagcgtgtgtctgttcaccgacttcgacagccagaccaacgtgtcccagagcaaggactccgacgtgtacatcaccgataagtgcgtgctggacatgcggagcatggacttcaagagcaactccgccgtggcctggtccaacaagtccgatttcgcctgcgccaacgccttcaacaacagcattatccccgaggacacattcttcccaagccccgagagcagctgcggctttaccagcgagagctaccagcagggcgtgctgagcgccaccatcctgtacgagatcctgctgggcaaggccaccctgtacgccgtgctggtgtctgccctggtgctgatggctatggtcaagcggaaggacagccggggataa

SEQ ID NO: 34245 - DNA, 2307 bp, synthetic construct
  source 1..2307: mol_type = other DNA
atggccttaccagtgaccgccttgctcctgccgctggccttgctgctccacgccgccaggccggaagtgcagctggttgaatctggcggaggactggttcagcctggcggatctctgagactgtcttgtgccgcctctggcttcgccagcgactactatatcatcggctggttcagacaggcccctggcaaagagagagagggcgtcagctgtatcagcagcagatacgccaacaccaactacgccgacagcgtgaagggcagattcaccatcagccgggacaacgccaagaacaccgtgtacctccagatgaacagcctgaagcctgaggacaccgccgtgtactactgtgccgccgacaccagaagatacacctgtcctgacattgccaccatgcaccggaacttcgattcttggggccagggcacactggtcaccgtttcttctggtaccggcggaggcggatctggcggcggaggtagcggtggcggaggatctgaattcgagatcgtgctgacacagagccctgccaccctgtctctgagccctggcgaaagagccaccctgagctgtagagccagccagagcgtgtccagctacctggcctggtatcagcagaagcccggccaggctccccggctgctgatctacgatgccagcaatagagccaccggcatccccgccagattttccggctctggcagcggcaccgacttcaccctgaccatcagctccctggaacccgaggacttcgccgtgtactactgccagcagcggagcaactggcccatcacattcggccagggcacccggctggaaatcaaactcgagatccagaaccctgatcctgccgtgtaccagctgcgggatagcaagagcagcgacaagagcgtgtgtctgttcaccgacttcgacagccagaccaacgtgtcccagagcaaggactccgacgtgtacatcaccgataagtgcgtgctggacatgcggagcatggacttcaagagcaactccgccgtggcctggtccaacaagtccgatttcgcctgcgccaacgccttcaacaacagcattatccccgaggacacattcttcccaagccccgagagcagctgcggctttaccagcgagagctaccagcagggcgtgctgagcgccaccatcctgtacgagatcctgctgggcaaggccaccctgtacgccgtgctggtgtctgccctggtgctgatggctatggtcaagcggaaggacagccggggaagggccaagcgatctggatctggagcaacaaacttctcactactcaaacaagcaggtgacgtggaggagaatcccgggcctactagtatggactggatttggcgcatccttttccttgtcggcgctgctaccggcgcgcattccttcgaagaagtgcagctggtggaatcaggcggcggactggtgcagcctggcagaagcctgagactgagctgtgccgccagcggcttcaccttcaacgactacgccatgcactgggtgcgccaggcccctggaaaaggactggaatgggtgtccacaatcagctggaacagcggcagcatcggctacgccgatagcgtgaagggccggttcaccatcagccgggacaacgccaagaagtccctgtacctccagatgaacagcctgcgggccgaggacacagccctgtactattgcgccaaggacatccagtacggcaactactactacggcatggacgtgtggggccagggaaccaccgtgaccgtgtcatctacgcgtgacctgaagaacgtgttcccacctgaggtggccgtgttcgagcctagcgaggccgagatcagccacacccagaaagccaccctcgtgtgcctggctaccggcttctaccccgaccatgtggaactgtcttggtgggtcaacggcaaagaggtgcacagcggcgtgtgtaccgacccccagccactgaaagaacagcccgccctgaacgacagccggtactgcctgagcagcagactgagagtgtccgccaccttctggcagaacccccggaaccacttcagatgccaggtgcagttctacggcctgagcgagaacgacgagtggacccaggacagagccaagcccgtgacccagatcgtgtctgccgaagcctggggcagagccgattgcgacgtgaagctggtggaaaagagcttcgagacagacaccaacctgaacttccagaacctgagcgtgatcggcttcagaatcctgctgctgaaagtggccggctttaacctgctgatgaccctgcggctgtggtccagc

SEQ ID NO: 34246 - DNA, 2307 bp, synthetic construct
  source 1..2307: mol_type = other DNA
atggccttaccagtgaccgccttgctcctgccgctggccttgctgctccacgccgccaggccggaagtgcagctggttgaatctggcggaggactggttcagcctggcggatctctgagactgagctgtgaagccagcggcttcgccagcgacgattacatcatcggctggttcagacaggcccctggcaaagagagagagggcgtcagctgcatcagctctaagtacgccaacaccgtgtacaccgacagcgtgaagggcagattcagactgagcagaggcaccgccaagaataccgtgtacctccagatgagcgccctgaagcctgaggataccgccgtgtactactgcgctatggacagccgcagagtgacatgccctgagatcagcaccatgcaccggaacttcgattcttggggccagggcacactggtcacagtgtcatctggtaccggcggaggcggatctggcggcggaggtagcggtggcggaggatctgaattcgagatcgtgctgacacagagccctgccaccctgtctctgagccctggcgaaagagccaccctgagctgtagagccagccagagcgtgtccagctacctggcctggtatcagcagaagcccggccaggctccccggctgctgatctacgatgccagcaatagagccaccggcatccccgccagattttccggctctggcagcggcaccgacttcaccctgaccatcagctccctggaacccgaggacttcgccgtgtactactgccagcagcggagcaactggcccatcacattcggccagggcacccggctggaaatcaaactcgagatccagaaccctgatcctgccgtgtaccagctgcgggatagcaagagcagcgacaagagcgtgtgtctgttcaccgacttcgacagccagaccaacgtgtcccagagcaaggactccgacgtgtacatcaccgataagtgcgtgctggacatgcggagcatggacttcaagagcaactccgccgtggcctggtccaacaagtccgatttcgcctgcgccaacgccttcaacaacagcattatccccgaggacacattcttcccaagccccgagagcagctgcggctttaccagcgagagctaccagcagggcgtgctgagcgccaccatcctgtacgagatcctgctgggcaaggccaccctgtacgccgtgctggtgtctgccctggtgctgatggctatggtcaagcggaaggacagccggggaagggccaagcgatctggatctggagcaacaaacttctcactactcaaacaagcaggtgacgtggaggagaatcccgggcctactagtatggactggatttggcgcatccttttccttgtcggcgctgctaccggcgcgcattccttcgaagaagtgcagctggtggaatcaggcggcggactggtgcagcctggcagaagcctgagactgagctgtgccgccagcggcttcaccttcaacgactacgccatgcactgggtgcgccaggcccctggaaaaggactggaatgggtgtccacaatcagctggaacagcggcagcatcggctacgccgatagcgtgaagggccggttcaccatcagccgggacaacgccaagaagtccctgtacctccagatgaacagcctgcgggccgaggacacagccctgtactattgcgccaaggacatccagtacggcaactactactacggcatggacgtgtggggccagggaaccaccgtgaccgtgtcatctacgcgtgacctgaagaacgtgttcccacctgaggtggccgtgttcgagcctagcgaggccgagatcagccacacccagaaagccaccctcgtgtgcctggctaccggcttctaccccgaccatgtggaactgtcttggtgggtcaacggcaaagaggtgcacagcggcgtgtgtaccgacccccagccactgaaagaacagcccgccctgaacgacagccggtactgcctgagcagcagactgagagtgtccgccaccttctggcagaacccccggaaccacttcagatgccaggtgcagttctacggcctgagcgagaacgacgagtggacccaggacagagccaagcccgtgacccagatcgtgtctgccgaagcctggggcagagccgattgcgacgtgaagctggtggaaaagagcttcgagacagacaccaacctgaacttccagaacctgagcgtgatcggcttcagaatcctgctgctgaaagtggccggctttaacctgctgatgaccctgcggctgtggtccagc

SEQ ID NO: 34247 - DNA, 2280 bp, synthetic construct
  source 1..2280: mol_type = other DNA
atggccttaccagtgaccgccttgctcctgccgctggccttgctgctccacgccgccaggccgcaagtcaaactggaagaaagcggtggcggcctggtgcaacctggcgaatctctgagactgagctgtagcgccagcggctccatcttcaaggtgttcagagtgttcgccatgagctggtacaggcaaggccctggcaagcagagagagctggtcgcctctatcagcagcggcgagacaaccacatacgccgaatctgtgaaaggccggttcaccatcagccgggataatgccaagaataccgcctatctccagatggactccctgaagcctgaagatacagctgtgtactactgcaacgccgaccataccttcaccggcgatttttggggccagggaacccaagtgaccgtgtctagtggtaccggcggaggcggatctggcggcggaggtagcggtggcggaggatctgaattcgagatcgtgctgacacagagccctgccaccctgtctctgagccctggcgaaagagccaccctgagctgtagagccagccagagcgtgtccagctacctggcctggtatcagcagaagcccggccaggctccccggctgctgatctacgatgccagcaatagagccaccggcatccccgccagattttccggctctggcagcggcaccgacttcaccctgaccatcagctccctggaacccgaggacttcgccgtgtactactgccagcagcggagcaactggcccatcacattcggccagggcacccggctggaaatcaaactcgagatccagaaccctgatcctgccgtgtaccagctgcgggatagcaagagcagcgacaagagcgtgtgtctgttcaccgacttcgacagccagaccaacgtgtcccagagcaaggactccgacgtgtacatcaccgataagtgcgtgctggacatgcggagcatggacttcaagagcaactccgccgtggcctggtccaacaagtccgatttcgcctgcgccaacgccttcaacaacagcattatccccgaggacacattcttcccaagccccgagagcagctgcggctttaccagcgagagctaccagcagggcgtgctgagcgccaccatcctgtacgagatcctgctgggcaaggccaccctgtacgccgtgctggtgtctgccctggtgctgatggctatggtcaagcggaaggacagccggggaagggccaagcgatctggatctggagcaacaaacttctcactactcaaacaagcaggtgacgtggaggagaatcccgggcctactagtatggactggatttggcgcatccttttccttgtcggcgctgctaccggcgcgcattccttcgaagaagtgcagctggtggaatcaggcggcggactggtgcagcctggcagaagcctgagactgagctgtgccgccagcggcttcaccttcaacgactacgccatgcactgggtgcgccaggcccctggaaaaggactggaatgggtgtccacaatcagctggaacagcggcagcatcggctacgccgatagcgtgaagggccggttcaccatcagccgggacaacgccaagaagtccctgtacctccagatgaacagcctgcgggccgaggacacagccctgtactattgcgccaaggacatccagtacggcaactactactacggcatggacgtgtggggccagggaaccaccgtgaccgtgtcatctacgcgtgacctgaagaacgtgttcccacctgaggtggccgtgttcgagcctagcgaggccgagatcagccacacccagaaagccaccctcgtgtgcctggctaccggcttctaccccgaccatgtggaactgtcttggtgggtcaacggcaaagaggtgcacagcggcgtgtgtaccgacccccagccactgaaagaacagcccgccctgaacgacagccggtactgcctgagcagcagactgagagtgtccgccaccttctggcagaacccccggaaccacttcagatgccaggtgcagttctacggcctgagcgagaacgacgagtggacccaggacagagccaagcccgtgacccagatcgtgtctgccgaagcctggggcagagccgattgcgacgtgaagctggtggaaaagagcttcgagacagacaccaacctgaacttccagaacctgagcgtgatcggcttcagaatcctgctgctgaaagtggccggctttaacctgctgatgaccctgcggctgtggtccagc

SEQ ID NO: 34248 - DNA, 2286 bp, synthetic construct
  source 1..2286: mol_type = other DNA
atggccttaccagtgaccgccttgctcctgccgctggccttgctgctccacgccgccaggccggagatcgtgctgacacagagccctgccaccctgtctctgagccctggcgaaagagccaccctgagctgtagagccagccagagcgtgtccagctacctggcctggtatcagcagaagcccggccaggctccccggctgctgatctacgatgccagcaatagagccaccggcatccccgccagattttccggctctggcagcggcaccgacttcaccctgaccatcagctccctggaacccgaggacttcgccgtgtactactgccagcagcggagcaactggcccatcacattcggccagggcacccggctggaaatcaaactcgaggacctgaagaacgtgttcccacctgaggtggccgtgttcgagcctagcgaggccgagatcagccacacccagaaagccaccctcgtgtgcctggctaccggcttctaccccgaccatgtggaactgtcttggtgggtcaacggcaaagaggtgcacagcggcgtgtgtaccgacccccagccactgaaagaacagcccgccctgaacgacagccggtactgcctgagcagcagactgagagtgtccgccaccttctggcagaacccccggaaccacttcagatgccaggtgcagttctacggcctgagcgagaacgacgagtggacccaggacagagccaagcccgtgacccagatcgtgtctgccgaagcctggggcagagccgattgcgacgtgaagctggtggaaaagagcttcgagacagacaccaacctgaacttccagaacctgagcgtgatcggcttcagaatcctgctgctgaaagtggccggctttaacctgctgatgaccctgcggctgtggtccagcagggccaagcgatctggatctggagcaacaaacttctcactactcaaacaagcaggtgacgtggaggagaatcccgggcctactagtgccaccatggactggatttggcgcatccttttccttgtcggcgctgctaccggcgcccattccgggcccgaagtgcagctggttgaatctggcggaggactggttcaggctggcggatctctgagactgtcttgtgccgccagcggcagaacctttagcatgggctggtttagacaggcccctggcaaagagagagagttcgtcgccgccatcacatactctggcggcagcccttactacgccgactctgtgaagggcagattcaccatcagccgggacaacgccaagaacaccgtgtacctccagatgaacagcctgaagcctgaggacaccgccgtgtactactgcgccgccaatccaacatacggcagcgactggaacgccgagaattggggccagggaacccaagtgacagtgtctagcggatccggcggcggaggatctggcggaggcggatctgggggcggaggctctttcgaagaagtgcagctggtggaatcaggcggcggactggtgcagcctggcagaagcctgagactgagctgtgccgccagcggcttcaccttcaacgactacgccatgcactgggtgcgccaggcccctggaaaaggactggaatgggtgtccacaatcagctggaacagcggcagcatcggctacgccgatagcgtgaagggccggttcaccatcagccgggacaacgccaagaagtccctgtacctccagatgaacagcctgcgggccgaggacacagccctgtactattgcgccaaggacatccagtacggcaactactactacggcatggacgtgtggggccagggaaccaccgtgaccgtgtcatctacgcgtatccagaaccctgatcctgccgtgtaccagctgcgggatagcaagagcagcgacaagagcgtgtgtctgttcaccgacttcgacagccagaccaacgtgtcccagagcaaggactccgacgtgtacatcaccgataagtgcgtgctggacatgcggagcatggacttcaagagcaactccgccgtggcctggtccaacaagtccgatttcgcctgcgccaacgccttcaacaacagcattatccccgaggacacattcttcccaagccccgagagcagctgcggctttaccagcgagagctaccagcagggcgtgctgagcgccaccatcctgtacgagatcctgctgggcaaggccaccctgtacgccgtgctggtgtctgccctggtgctgatggctatggtcaagcggaaggacagccggggataa

SEQ ID NO: 34249 - DNA, 2289 bp, synthetic construct
  source 1..2289: mol_type = other DNA
atggccttaccagtgaccgccttgctcctgccgctggccttgctgctccacgccgccaggccggagatcgtgctgacacagagccctgccaccctgtctctgagccctggcgaaagagccaccctgagctgtagagccagccagagcgtgtccagctacctggcctggtatcagcagaagcccggccaggctccccggctgctgatctacgatgccagcaatagagccaccggcatccccgccagattttccggctctggcagcggcaccgacttcaccctgaccatcagctccctggaacccgaggacttcgccgtgtactactgccagcagcggagcaactggcccatcacattcggccagggcacccggctggaaatcaaactcgaggacctgaagaacgtgttcccacctgaggtggccgtgttcgagcctagcgaggccgagatcagccacacccagaaagccaccctcgtgtgcctggctaccggcttctaccccgaccatgtggaactgtcttggtgggtcaacggcaaagaggtgcacagcggcgtgtgtaccgacccccagccactgaaagaacagcccgccctgaacgacagccggtactgcctgagcagcagactgagagtgtccgccaccttctggcagaacccccggaaccacttcagatgccaggtgcagttctacggcctgagcgagaacgacgagtggacccaggacagagccaagcccgtgacccagatcgtgtctgccgaagcctggggcagagccgattgcgacgtgaagctggtggaaaagagcttcgagacagacaccaacctgaacttccagaacctgagcgtgatcggcttcagaatcctgctgctgaaagtggccggctttaacctgctgatgaccctgcggctgtggtccagcagggccaagcgatctggatctggagcaacaaacttctcactactcaaacaagcaggtgacgtggaggagaatcccgggcctactagtgccaccatggactggatttggcgcatccttttccttgtcggcgctgctaccggcgcccattccgggcccgaagtgcaactggtggaatctgggggcggactggtgcagccaggcggaagtctgaggctgtcttgtgccgcctccggcagcatcttcggcttcaacgacatggcctggtatcggcaggctcccggaaaacagcgcgagctggtggctctgattagcagagtgggcgtgaccagcagcgccgactctgtgaagggcagattcacaatctccagagtgaacgccaaggatacagtgtacctccagatgaactctctgaaacctgaggatacagcagtgtactattgctacatggaccagcggctggacggcagcacactggcctactggggacagggaactcaagtgacagtgtctagcggatccggcggcggaggatctggcggaggcggatctgggggcggaggctctttcgaagaagtgcagctggtggaatcaggcggcggactggtgcagcctggcagaagcctgagactgagctgtgccgccagcggcttcaccttcaacgactacgccatgcactgggtgcgccaggcccctggaaaaggactggaatgggtgtccacaatcagctggaacagcggcagcatcggctacgccgatagcgtgaagggccggttcaccatcagccgggacaacgccaagaagtccctgtacctccagatgaacagcctgcgggccgaggacacagccctgtactattgcgccaaggacatccagtacggcaactactactacggcatggacgtgtggggccagggaaccaccgtgaccgtgtcatctacgcgtatccagaaccctgatcctgccgtgtaccagctgcgggatagcaagagcagcgacaagagcgtgtgtctgttcaccgacttcgacagccagaccaacgtgtcccagagcaaggactccgacgtgtacatcaccgataagtgcgtgctggacatgcggagcatggacttcaagagcaactccgccgtggcctggtccaacaagtccgatttcgcctgcgccaacgccttcaacaacagcattatccccgaggacacattcttcccaagccccgagagcagctgcggctttaccagcgagagctaccagcagggcgtgctgagcgccaccatcctgtacgagatcctgctgggcaaggccaccctgtacgccgtgctggtgtctgccctggtgctgatggctatggtcaagcggaaggacagccggggataa

SEQ ID NO: 34250 - DNA, 2277 bp, synthetic construct
  source 1..2277: mol_type = other DNA
atggccttaccagtgaccgccttgctcctgccgctggccttgctgctccacgccgccaggccggagatcgtgctgacacagagccctgccaccctgtctctgagccctggcgaaagagccaccctgagctgtagagccagccagagcgtgtccagctacctggcctggtatcagcagaagcccggccaggctccccggctgctgatctacgatgccagcaatagagccaccggcatccccgccagattttccggctctggcagcggcaccgacttcaccctgaccatcagctccctggaacccgaggacttcgccgtgtactactgccagcagcggagcaactggcccatcacattcggccagggcacccggctggaaatcaaactcgaggacctgaagaacgtgttcccacctgaggtggccgtgttcgagcctagcgaggccgagatcagccacacccagaaagccaccctcgtgtgcctggctaccggcttctaccccgaccatgtggaactgtcttggtgggtcaacggcaaagaggtgcacagcggcgtgtgtaccgacccccagccactgaaagaacagcccgccctgaacgacagccggtactgcctgagcagcagactgagagtgtccgccaccttctggcagaacccccggaaccacttcagatgccaggtgcagttctacggcctgagcgagaacgacgagtggacccaggacagagccaagcccgtgacccagatcgtgtctgccgaagcctggggcagagccgattgcgacgtgaagctggtggaaaagagcttcgagacagacaccaacctgaacttccagaacctgagcgtgatcggcttcagaatcctgctgctgaaagtggccggctttaacctgctgatgaccctgcggctgtggtccagcagggccaagcgatctggatctggagcaacaaacttctcactactcaaacaagcaggtgacgtggaggagaatcccgggcctactagtgccaccatggactggatttggcgcatccttttccttgtcggcgctgctaccggcgcccattccgggcccgaggtgcagctggttgaatctggcggaggactggttcaggctggcggatctctgagactgtcttgtgccgccagcggctctgtgttcagcggcaatgtgatgggctggtacagacaggcccctggcaaagaaagagagtgggttgccgccattgccagcggcggcagcatctactacagagactctgtgaagggcagattcaccatcagccgggacaacgccaagaacaccgtgtacctccagatgaacagcctgaagcctgaggacaccgccgtgtactactgcaactctcaccctcctacactgccctattggggcctgggaacccaagtgacagtgtcctctggatccggcggcggaggatctggcggaggcggatctgggggcggaggctctttcgaagaagtgcagctggtggaatcaggcggcggactggtgcagcctggcagaagcctgagactgagctgtgccgccagcggcttcaccttcaacgactacgccatgcactgggtgcgccaggcccctggaaaaggactggaatgggtgtccacaatcagctggaacagcggcagcatcggctacgccgatagcgtgaagggccggttcaccatcagccgggacaacgccaagaagtccctgtacctccagatgaacagcctgcgggccgaggacacagccctgtactattgcgccaaggacatccagtacggcaactactactacggcatggacgtgtggggccagggaaccaccgtgaccgtgtcatctacgcgtatccagaaccctgatcctgccgtgtaccagctgcgggatagcaagagcagcgacaagagcgtgtgtctgttcaccgacttcgacagccagaccaacgtgtcccagagcaaggactccgacgtgtacatcaccgataagtgcgtgctggacatgcggagcatggacttcaagagcaactccgccgtggcctggtccaacaagtccgatttcgcctgcgccaacgccttcaacaacagcattatccccgaggacacattcttcccaagccccgagagcagctgcggctttaccagcgagagctaccagcagggcgtgctgagcgccaccatcctgtacgagatcctgctgggcaaggccaccctgtacgccgtgctggtgtctgccctggtgctgatggctatggtcaagcggaaggacagccggggataa

SEQ ID NO: 34251 - DNA, 2271 bp, synthetic construct
  source 1..2271: mol_type = other DNA
atggccttaccagtgaccgccttgctcctgccgctggccttgctgctccacgccgccaggccggagatcgtgctgacacagagccctgccaccctgtctctgagccctggcgaaagagccaccctgagctgtagagccagccagagcgtgtccagctacctggcctggtatcagcagaagcccggccaggctccccggctgctgatctacgatgccagcaatagagccaccggcatccccgccagattttccggctctggcagcggcaccgacttcaccctgaccatcagctccctggaacccgaggacttcgccgtgtactactgccagcagcggagcaactggcccatcacattcggccagggcacccggctggaaatcaaactcgaggacctgaagaacgtgttcccacctgaggtggccgtgttcgagcctagcgaggccgagatcagccacacccagaaagccaccctcgtgtgcctggctaccggcttctaccccgaccatgtggaactgtcttggtgggtcaacggcaaagaggtgcacagcggcgtgtgtaccgacccccagccactgaaagaacagcccgccctgaacgacagccggtactgcctgagcagcagactgagagtgtccgccaccttctggcagaacccccggaaccacttcagatgccaggtgcagttctacggcctgagcgagaacgacgagtggacccaggacagagccaagcccgtgacccagatcgtgtctgccgaagcctggggcagagccgattgcgacgtgaagctggtggaaaagagcttcgagacagacaccaacctgaacttccagaacctgagcgtgatcggcttcagaatcctgctgctgaaagtggccggctttaacctgctgatgaccctgcggctgtggtccagcagggccaagcgatctggatctggagcaacaaacttctcactactcaaacaagcaggtgacgtggaggagaatcccgggcctactagtgccaccatggactggatttggcgcatccttttccttgtcggcgctgctaccggcgcccattccgggcccgaagttcagctgctggaatctggcggaggactcgttcaacctggcggctctctgagactgagctgtgccgcttctggcttcagcttctctagctacgccctgagctgggttcgacaagctcccggaaagggccttgaatgggtgtccagcatcggcgagaatgacggcaccacagactatgccgatgccgtgaaaggccggtttaccatcagcagagacaattccaagaacacgctctatctgcaaatgaactccctgcgcgtggaagatacagccgtgtattattgcgtgaaggacggcatccactggggacagggaaccctggttacagtgtctagcggatccggcggcggaggatctggcggaggcggatctgggggcggaggctctttcgaagaagtgcagctggtggaatcaggcggcggactggtgcagcctggcagaagcctgagactgagctgtgccgccagcggcttcaccttcaacgactacgccatgcactgggtgcgccaggcccctggaaaaggactggaatgggtgtccacaatcagctggaacagcggcagcatcggctacgccgatagcgtgaagggccggttcaccatcagccgggacaacgccaagaagtccctgtacctccagatgaacagcctgcgggccgaggacacagccctgtactattgcgccaaggacatccagtacggcaactactactacggcatggacgtgtggggccagggaaccaccgtgaccgtgtcatctacgcgtatccagaaccctgatcctgccgtgtaccagctgcgggatagcaagagcagcgacaagagcgtgtgtctgttcaccgacttcgacagccagaccaacgtgtcccagagcaaggactccgacgtgtacatcaccgataagtgcgtgctggacatgcggagcatggacttcaagagcaactccgccgtggcctggtccaacaagtccgatttcgcctgcgccaacgccttcaacaacagcattatccccgaggacacattcttcccaagccccgagagcagctgcggctttaccagcgagagctaccagcagggcgtgctgagcgccaccatcctgtacgagatcctgctgggcaaggccaccctgtacgccgtgctggtgtctgccctggtgctgatggctatggtcaagcggaaggacagccggggataa

SEQ ID NO: 34252 - DNA, 3378 bp, synthetic construct
  source 1..3378: mol_type = other DNA
atgggacccagactgctgttttgggctctgctgtgtctgctcggcacaggacctgttgaagctggcgtgacacagagccccacacacctgattaagaccagaggccagcaggccacactgagatgcagccctatcagcggccacaccagcgtgtactggtatcagcaggctctcggactgggcctccagttcctgctttggtacgacgagggcgaagagagaaaccggggcaacttccctcctcggttttccggcagacagttccccaactacagcagcgagctgaacgtgaacgccctggaactggaagatagcgccctgtacctgtgtgcctcttctcttggtggacctcgcggactggctggactgagaggggatgagcagtttttcggccctggcaccagactgaccgtgctggaaggtaccggcggaggcggatctggcggcggagaattcgagatcgtgctgacacagagccctgccaccctgtctctgagccctggcgaaagagccaccctgagctgtagagccagccagagcgtgtccagctacctggcctggtatcagcagaagcccggccaggctccccggctgctgatctacgatgccagcaatagagccaccggcatccccgccagattttccggctctggcagcggcaccgacttcaccctgaccatcagctccctggaacccgaggacttcgccgtgtactactgccagcagcggagcaactggcccatcacattcggccagggcacccggctggaaatcaaactcgaggacctgaagaacgtgttcccacctgaggtggccgtgttcgagcctagcgaggccgagatcagccacacccagaaagccaccctcgtgtgcctggctaccggcttctaccccgaccatgtggaactgtcttggtgggtcaacggcaaagaggtgcacagcggcgtgtgtaccgacccccagccactgaaagaacagcccgccctgaacgacagccggtactgcctgagcagcagactgagagtgtccgccaccttctggcagaacccccggaaccacttcagatgccaggtgcagttctacggcctgagcgagaacgacgagtggacccaggacagagccaagcccgtgacccagatcgtgtctgccgaagcctggggcagagccgattgcgacgtgaagctggtggaaaagagcttcgagacagacaccaacctgaacttccagaacctgagcgtgatcggcttcagaatcctgctgctgaaagtggccggctttaacctgctgatgaccctgcggctgtggtccagcagggccaagcgatctggatctggagcaacaaacttctcactactcaaacaagcaggtgacgtggaggagaatcccgggcctactagtgccaccatggactggatttggcgcatccttttccttgtcggcgctgctaccggcgcccattccgggcccgaagtgcagctggttgaatctggcggaggactggttcaggctggcggatctctgagactgtcttgtgccgccagcggcagaacctttagcatgggctggtttagacaggcccctggcaaagagagagagttcgtcgccgccatcacatactctggcggcagcccttactacgccgactctgtgaagggcagattcaccatcagccgggacaacgccaagaacaccgtgtacctccagatgaacagcctgaagcctgaggacaccgccgtgtactactgcgccgccaatccaacatacggcagcgactggaacgccgagaattggggccagggaacccaagtgacagtgtctagcggatccggcggcggaggatctggcggaggcggatctgggggcggaggctctttcgaagaagtgcagctggtggaatcaggcggcggactggtgcagcctggcagaagcctgagactgagctgtgccgccagcggcttcaccttcaacgactacgccatgcactgggtgcgccaggcccctggaaaaggactggaatgggtgtccacaatcagctggaacagcggcagcatcggctacgccgatagcgtgaagggccggttcaccatcagccgggacaacgccaagaagtccctgtacctccagatgaacagcctgcgggccgaggacacagccctgtactattgcgccaaggacatccagtacggcaactactactacggcatggacgtgtggggccagggaaccaccgtgaccgtgtcatctacgcgtatccagaaccctgatcctgccgtgtaccagctgcgggatagcaagagcagcgacaagagcgtgtgtctgttcaccgacttcgacagccagaccaacgtgtcccagagcaaggactccgacgtgtacatcaccgataagtgcgtgctggacatgcggagcatggacttcaagagcaactccgccgtggcctggtccaacaagtccgatttcgcctgcgccaacgccttcaacaacagcattatccccgaggacacattcttcccaagccccgagagcagctgcggctttaccagcgagagctaccagcagggcgtgctgagcgccaccatcctgtacgagatcctgctgggcaaggccaccctgtacgccgtgctggtgtctgccctggtgctgatggctatggtcaagcggaaggacagccggggacgcgccaagagaagcggatctggcgtgaagcagaccctgaatttcgacctgctgaagctggctggcgacgtggaatccaacccaggcccttctagaggccatatgaccgagtacaagcccacggtgcgcctcgccacccgcgacgacgtccccagggccgtacgcaccctcgccgccgcgttcgccgactaccccgccacgcgccacaccgtcgatccggaccgccacatcgagcgggtcaccgagctgcaagaactcttcctcacgcgcgtcgggctcgacatcggcaaggtgtgggtcgcggacgacggcgccgcggtggcggtctggaccacgccggagagcgtcgaagcgggggcggtgttcgccgagatcggcccgcgcatggccgagttgagcggttcccggctggccgcgcagcaacagatggaaggcctcctggcgccgcaccggcccaaggagcccgcgtggttcctggccaccgtcggcgtctcgcccgaccaccagggcaagggtctgggcagcgccgtcgtgctccccggagtggaggcggccgagcgcgccggggtgcccgccttcctggagacctccgcgccccgcaacctccccttctacgagcggctcggcttcaccgtcaccgccgacgtcgaggtgcccgaaggaccgcgcacctggtgcatgacccgcaagcccggtgcctga

SEQ ID NO: 34253 - DNA, 3375 bp, synthetic construct
  source 1..3375: mol_type = other DNA
atgggacccagactgctgttttgggctctgctgtgtctgctcggcacaggacctgttgaagctggcgtgacacagagccccacacacctgattaagaccagaggccagcaggccacactgagatgcagccctatcagcggccacaccagcgtgtactggtatcagcaggctctcggactgggcctccagttcctgctttggtacgacgagggcgaagagagaaaccggggcaacttccctcctcggttttccggcagacagttccccaactacagcagcgagctgaacgtgaacgccctggaactggaagatagcgccctgtacctgtgtgccagctctctcggcggagatgaactgggagccgatggcaacgagcagttctttggccctggcaccagactgaccgtgctggaaggtaccggcggaggcggatctggcggcggaagcgaattcgagatcgtgctgacacagagccctgccaccctgtctctgagccctggcgaaagagccaccctgagctgtagagccagccagagcgtgtccagctacctggcctggtatcagcagaagcccggccaggctccccggctgctgatctacgatgccagcaatagagccaccggcatccccgccagattttccggctctggcagcggcaccgacttcaccctgaccatcagctccctggaacccgaggacttcgccgtgtactactgccagcagcggagcaactggcccatcacattcggccagggcacccggctggaaatcaaactcgaggacctgaagaacgtgttcccacctgaggtggccgtgttcgagcctagcgaggccgagatcagccacacccagaaagccaccctcgtgtgcctggctaccggcttctaccccgaccatgtggaactgtcttggtgggtcaacggcaaagaggtgcacagcggcgtgtgtaccgacccccagccactgaaagaacagcccgccctgaacgacagccggtactgcctgagcagcagactgagagtgtccgccaccttctggcagaacccccggaaccacttcagatgccaggtgcagttctacggcctgagcgagaacgacgagtggacccaggacagagccaagcccgtgacccagatcgtgtctgccgaagcctggggcagagccgattgcgacgtgaagctggtggaaaagagcttcgagacagacaccaacctgaacttccagaacctgagcgtgatcggcttcagaatcctgctgctgaaagtggccggctttaacctgctgatgaccctgcggctgtggtccagcagggccaagcgatctggatctggagcaacaaacttctcactactcaaacaagcaggtgacgtggaggagaatcccgggcctactagtgccaccatggactggatttggcgcatccttttccttgtcggcgctgctaccggcgcccattccgggcccgaagtgcagctggttgaatctggcggaggactggttcaggctggcggatctctgagactgtcttgtgccgccagcggcagaacctttagcatgggctggtttagacaggcccctggcaaagagagagagttcgtcgccgccatcacatactctggcggcagcccttactacgccgactctgtgaagggcagattcaccatcagccgggacaacgccaagaacaccgtgtacctccagatgaacagcctgaagcctgaggacaccgccgtgtactactgcgccgccaatccaacatacggcagcgactggaacgccgagaattggggccagggaacccaagtgacagtgtctagcggatccggcggcggaggatctggcggaggcggatctgggggcggaggctctttcgaagaagtgcagctggtggaatcaggcggcggactggtgcagcctggcagaagcctgagactgagctgtgccgccagcggcttcaccttcaacgactacgccatgcactgggtgcgccaggcccctggaaaaggactggaatgggtgtccacaatcagctggaacagcggcagcatcggctacgccgatagcgtgaagggccggttcaccatcagccgggacaacgccaagaagtccctgtacctccagatgaacagcctgcgggccgaggacacagccctgtactattgcgccaaggacatccagtacggcaactactactacggcatggacgtgtggggccagggaaccaccgtgaccgtgtcatctacgcgtatccagaaccctgatcctgccgtgtaccagctgcgggatagcaagagcagcgacaagagcgtgtgtctgttcaccgacttcgacagccagaccaacgtgtcccagagcaaggactccgacgtgtacatcaccgataagtgcgtgctggacatgcggagcatggacttcaagagcaactccgccgtggcctggtccaacaagtccgatttcgcctgcgccaacgccttcaacaacagcattatccccgaggacacattcttcccaagccccgagagcagctgcggctttaccagcgagagctaccagcagggcgtgctgagcgccaccatcctgtacgagatcctgctgggcaaggccaccctgtacgccgtgctggtgtctgccctggtgctgatggctatggtcaagcggaaggacagccggggacgcgccaagagaagcggatctggcgtgaagcagaccctgaatttcgacctgctgaagctggctggcgacgtggaatccaacccaggcccttctagaggccatatgaccgagtacaagcccacggtgcgcctcgccacccgcgacgacgtccccagggccgtacgcaccctcgccgccgcgttcgccgactaccccgccacgcgccacaccgtcgatccggaccgccacatcgagcgggtcaccgagctgcaagaactcttcctcacgcgcgtcgggctcgacatcggcaaggtgtgggtcgcggacgacggcgccgcggtggcggtctggaccacgccggagagcgtcgaagcgggggcggtgttcgccgagatcggcccgcgcatggccgagttgagcggttcccggctggccgcgcagcaacagatggaaggcctcctggcgccgcaccggcccaaggagcccgcgtggttcctggccaccgtcggcgtctcgcccgaccaccagggcaagggtctgggcagcgccgtcgtgctccccggagtggaggcggccgagcgcgccggggtgcccgccttcctggagacctccgcgccccgcaacctccccttctacgagcggctcggcttcaccgtcaccgccgacgtcgaggtgcccgaaggaccgcgcacctggtgcatgacccgcaagcccggtgcctga

SEQ ID NO: 34254 - DNA, 2850 bp, synthetic construct
  source 1..2850: mol_type = other DNA
atggccttaccagtgaccgccttgctcctgccgctggccttgctgctccacgccgccaggccggagatcgtgctgacacagagccctgccaccctgtctctgagccctggcgaaagagccaccctgagctgtagagccagccagagcgtgtccagctacctggcctggtatcagcagaagcccggccaggctccccggctgctgatctacgatgccagcaatagagccaccggcatccccgccagattttccggctctggcagcggcaccgacttcaccctgaccatcagctccctggaacccgaggacttcgccgtgtactactgccagcagcggagcaactggcccatcacattcggccagggcacccggctggaaatcaaactcgaggacctgaagaacgtgttcccacctgaggtggccgtgttcgagcctagcgaggccgagatcagccacacccagaaagccaccctcgtgtgcctggctaccggcttctaccccgaccatgtggaactgtcttggtgggtcaacggcaaagaggtgcacagcggcgtgtgtaccgacccccagccactgaaagaacagcccgccctgaacgacagccggtactgcctgagcagcagactgagagtgtccgccaccttctggcagaacccccggaaccacttcagatgccaggtgcagttctacggcctgagcgagaacgacgagtggacccaggacagagccaagcccgtgacccagatcgtgtctgccgaagcctggggcagagccgattgcgacgtgaagctggtggaaaagagcttcgagacagacaccaacctgaacttccagaacctgagcgtgatcggcttcagaatcctgctgctgaaagtggccggctttaacctgctgatgaccctgcggctgtggtccagcagggccaagcgatctggatctggagcaacaaacttctcactactcaaacaagcaggtgacgtggaggagaatcccgggcctactagtgccaccatggactggatttggcgcatccttttccttgtcggcgctgctaccggcgcccattccgggcccatgggaagctggcttgagttctaccacagactcaacgccattgacagcaggctgtgggcacttggcggaagcgaagctgaactcgccgcttttgaaaaagaaattgccgctttcgagtccgagcttcaggcttacaaaggcaaagggaatcctgaggtcgagagcctgagagatcacgctgcccacattagagagtggttgcaggcataccggcacaatggatccggcggcggaggatctggcggaggcggatctgggggcggaggctctttcgaagaagtgcagctggtggaatcaggcggcggactggtgcagcctggcagaagcctgagactgagctgtgccgccagcggcttcaccttcaacgactacgccatgcactgggtgcgccaggcccctggaaaaggactggaatgggtgtccacaatcagctggaacagcggcagcatcggctacgccgatagcgtgaagggccggttcaccatcagccgggacaacgccaagaagtccctgtacctccagatgaacagcctgcgggccgaggacacagccctgtactattgcgccaaggacatccagtacggcaactactactacggcatggacgtgtggggccagggaaccaccgtgaccgtgtcatctacgcgtatccagaaccctgatcctgccgtgtaccagctgcgggatagcaagagcagcgacaagagcgtgtgtctgttcaccgacttcgacagccagaccaacgtgtcccagagcaaggactccgacgtgtacatcaccgataagtgcgtgctggacatgcggagcatggacttcaagagcaactccgccgtggcctggtccaacaagtccgatttcgcctgcgccaacgccttcaacaacagcattatccccgaggacacattcttcccaagccccgagagcagctgcggctttaccagcgagagctaccagcagggcgtgctgagcgccaccatcctgtacgagatcctgctgggcaaggccaccctgtacgccgtgctggtgtctgccctggtgctgatggctatggtcaagcggaaggacagccggggacgcgccaagagaagcggatctggcgtgaagcagaccctgaatttcgacctgctgaagctggctggcgacgtggaatccaacccaggcccttctagaggccatatgaccgagtacaagcccacggtgcgcctcgccacccgcgacgacgtccccagggccgtacgcaccctcgccgccgcgttcgccgactaccccgccacgcgccacaccgtcgatccggaccgccacatcgagcgggtcaccgagctgcaagaactcttcctcacgcgcgtcgggctcgacatcggcaaggtgtgggtcgcggacgacggcgccgcggtggcggtctggaccacgccggagagcgtcgaagcgggggcggtgttcgccgagatcggcccgcgcatggccgagttgagcggttcccggctggccgcgcagcaacagatggaaggcctcctggcgccgcaccggcccaaggagcccgcgtggttcctggccaccgtcggcgtctcgcccgaccaccagggcaagggtctgggcagcgccgtcgtgctccccggagtggaggcggccgagcgcgccggggtgcccgccttcctggagacctccgcgccccgcaacctccccttctacgagcggctcggcttcaccgtcaccgccgacgtcgaggtgcccgaaggaccgcgcacctggtgcatgacccgcaagcccggtgcctga

SEQ ID NO: 34255 - DNA, 2850 bp, synthetic construct
  source 1..2850: mol_type = other DNA
atggccttaccagtgaccgccttgctcctgccgctggccttgctgctccacgccgccaggccggcatgcatgggcagttggttcgagttctacgaccggctgaatgccatcgacgccagactgtgggctctcggaggatctgaagctgagctggccgccttcgagaaagagatcgccgcctttgagagcgagctgcaagcctacaaaggcaagggcaaccccgaggtggaaaacctgagagtgcacgccgctgccatcagagaatggctccaggcttacagacacaacggtaccggcggaggcggatctggcggcggaggtagcggtggcggaggatctgaattcgagatcgtgctgacacagagccctgccaccctgtctctgagccctggcgaaagagccaccctgagctgtagagccagccagagcgtgtccagctacctggcctggtatcagcagaagcccggccaggctccccggctgctgatctacgatgccagcaatagagccaccggcatccccgccagattttccggctctggcagcggcaccgacttcaccctgaccatcagctccctggaacccgaggacttcgccgtgtactactgccagcagcggagcaactggcccatcacattcggccagggcacccggctggaaatcaaactcgaggacctgaagaacgtgttcccacctgaggtggccgtgttcgagcctagcgaggccgagatcagccacacccagaaagccaccctcgtgtgcctggctaccggcttctaccccgaccatgtggaactgtcttggtgggtcaacggcaaagaggtgcacagcggcgtgtgtaccgacccccagccactgaaagaacagcccgccctgaacgacagccggtactgcctgagcagcagactgagagtgtccgccaccttctggcagaacccccggaaccacttcagatgccaggtgcagttctacggcctgagcgagaacgacgagtggacccaggacagagccaagcccgtgacccagatcgtgtctgccgaagcctggggcagagccgattgcgacgtgaagctggtggaaaagagcttcgagacagacaccaacctgaacttccagaacctgagcgtgatcggcttcagaatcctgctgctgaaagtggccggctttaacctgctgatgaccctgcggctgtggtccagcagggccaagcgatctggatctggagcaacaaacttctcactactcaaacaagcaggtgacgtggaggagaatcccgggcctactagtatggactggatttggcgcatccttttccttgtcggcgctgctaccggcgcgcattccttcgaagaagtgcagctggtggaatcaggcggcggactggtgcagcctggcagaagcctgagactgagctgtgccgccagcggcttcaccttcaacgactacgccatgcactgggtgcgccaggcccctggaaaaggactggaatgggtgtccacaatcagctggaacagcggcagcatcggctacgccgatagcgtgaagggccggttcaccatcagccgggacaacgccaagaagtccctgtacctccagatgaacagcctgcgggccgaggacacagccctgtactattgcgccaaggacatccagtacggcaactactactacggcatggacgtgtggggccagggaaccaccgtgaccgtgtcatctacgcgtatccagaaccctgatcctgccgtgtaccagctgcgggatagcaagagcagcgacaagagcgtgtgtctgttcaccgacttcgacagccagaccaacgtgtcccagagcaaggactccgacgtgtacatcaccgataagtgcgtgctggacatgcggagcatggacttcaagagcaactccgccgtggcctggtccaacaagtccgatttcgcctgcgccaacgccttcaacaacagcattatccccgaggacacattcttcccaagccccgagagcagctgcggctttaccagcgagagctaccagcagggcgtgctgagcgccaccatcctgtacgagatcctgctgggcaaggccaccctgtacgccgtgctggtgtctgccctggtgctgatggctatggtcaagcggaaggacagccggggacgcgccaagagaagcggatctggcgtgaagcagaccctgaatttcgacctgctgaagctggctggcgacgtggaatccaacccaggcccttctagaggccatatgaccgagtacaagcccacggtgcgcctcgccacccgcgacgacgtccccagggccgtacgcaccctcgccgccgcgttcgccgactaccccgccacgcgccacaccgtcgatccggaccgccacatcgagcgggtcaccgagctgcaagaactcttcctcacgcgcgtcgggctcgacatcggcaaggtgtgggtcgcggacgacggcgccgcggtggcggtctggaccacgccggagagcgtcgaagcgggggcggtgttcgccgagatcggcccgcgcatggccgagttgagcggttcccggctggccgcgcagcaacagatggaaggcctcctggcgccgcaccggcccaaggagcccgcgtggttcctggccaccgtcggcgtctcgcccgaccaccagggcaagggtctgggcagcgccgtcgtgctccccggagtggaggcggccgagcgcgccggggtgcccgccttcctggagacctccgcgccccgcaacctccccttctacgagcggctcggcttcaccgtcaccgccgacgtcgaggtgcccgaaggaccgcgcacctggtgcatgacccgcaagcccggtgcctga

SEQ ID NO: 34256 - DNA, 3201 bp, synthetic construct
  source 1..3201: mol_type = other DNA
atggccttaccagtgaccgccttgctcctgccgctggccttgctgctccacgccgccaggccggcatgcatggaccccgacctggaaatcagagccgccttcctgcggcagagaaacacagccctgagaacagaggtggccgagctggaacaagaggtgcagcggctggaaaacgaggtgtcccagtacgagacaagatacggccctctcggaggcggaaaaggtaccggcggaggcggatctggcggcggaggtagcggtggcggaggatctgaattcgagatcgtgctgacacagagccctgccaccctgtctctgagccctggcgaaagagccaccctgagctgtagagccagccagagcgtgtccagctacctggcctggtatcagcagaagcccggccaggctccccggctgctgatctacgatgccagcaatagagccaccggcatccccgccagattttccggctctggcagcggcaccgacttcaccctgaccatcagctccctggaacccgaggacttcgccgtgtactactgccagcagcggagcaactggcccatcacattcggccagggcacccggctggaaatcaaactcgaggacctgaagaacgtgttcccacctgaggtggccgtgttcgagcctagcgaggccgagatcagccacacccagaaagccaccctcgtgtgcctggctaccggcttctaccccgaccatgtggaactgtcttggtgggtcaacggcaaagaggtgcacagcggcgtgtgtaccgacccccagccactgaaagaacagcccgccctgaacgacagccggtactgcctgagcagcagactgagagtgtccgccaccttctggcagaacccccggaaccacttcagatgccaggtgcagttctacggcctgagcgagaacgacgagtggacccaggacagagccaagcccgtgacccagatcgtgtctgccgaagcctggggcagagccgattgcgacgtgaagctggtggaaaagagcttcgagacagacaccaacctgaacttccagaacctgagcgtgatcggcttcagaatcctgctgctgaaagtggccggctttaacctgctgatgaccctgcggctgtggtccagcagggccaagcgatctggatctggagcaacaaacttctcactactcaaacaagcaggtgacgtggaggagaatcccgggcctactagtgccaccatggactggatttggcgcatccttttccttgtcggcgctgctaccggcgcccattccgggcccgaagtgcagctggttgaatctggcggaggactggttcaggctggcggatctctgagactgtcttgtgccgccagcggcagaacctttagcatgggctggtttagacaggcccctggcaaagagagagagttcgtcgccgccatcacatactctggcggcagcccttactacgccgactctgtgaagggcagattcaccatcagccgggacaacgccaagaacaccgtgtacctccagatgaacagcctgaagcctgaggacaccgccgtgtactactgcgccgccaatccaacatacggcagcgactggaacgccgagaattggggccagggaacccaagtgacagtgtctagcggatccggcggcggaggatctggcggaggcggatctgggggcggaggctctttcgaagaagtgcagctggtggaatcaggcggcggactggtgcagcctggcagaagcctgagactgagctgtgccgccagcggcttcaccttcaacgactacgccatgcactgggtgcgccaggcccctggaaaaggactggaatgggtgtccacaatcagctggaacagcggcagcatcggctacgccgatagcgtgaagggccggttcaccatcagccgggacaacgccaagaagtccctgtacctccagatgaacagcctgcgggccgaggacacagccctgtactattgcgccaaggacatccagtacggcaactactactacggcatggacgtgtggggccagggaaccaccgtgaccgtgtcatctacgcgtatccagaaccctgatcctgccgtgtaccagctgcgggatagcaagagcagcgacaagagcgtgtgtctgttcaccgacttcgacagccagaccaacgtgtcccagagcaaggactccgacgtgtacatcaccgataagtgcgtgctggacatgcggagcatggacttcaagagcaactccgccgtggcctggtccaacaagtccgatttcgcctgcgccaacgccttcaacaacagcattatccccgaggacacattcttcccaagccccgagagcagctgcggctttaccagcgagagctaccagcagggcgtgctgagcgccaccatcctgtacgagatcctgctgggcaaggccaccctgtacgccgtgctggtgtctgccctggtgctgatggctatggtcaagcggaaggacagccggggacgcgccaagagaagcggatctggcgtgaagcagaccctgaatttcgacctgctgaagctggctggcgacgtggaatccaacccaggcccttctagaggccatatgaccgagtacaagcccacggtgcgcctcgccacccgcgacgacgtccccagggccgtacgcaccctcgccgccgcgttcgccgactaccccgccacgcgccacaccgtcgatccggaccgccacatcgagcgggtcaccgagctgcaagaactcttcctcacgcgcgtcgggctcgacatcggcaaggtgtgggtcgcggacgacggcgccgcggtggcggtctggaccacgccggagagcgtcgaagcgggggcggtgttcgccgagatcggcccgcgcatggccgagttgagcggttcccggctggccgcgcagcaacagatggaaggcctcctggcgccgcaccggcccaaggagcccgcgtggttcctggccaccgtcggcgtctcgcccgaccaccagggcaagggtctgggcagcgccgtcgtgctccccggagtggaggcggccgagcgcgccggggtgcccgccttcctggagacctccgcgccccgcaacctccccttctacgagcggctcggcttcaccgtcaccgccgacgtcgaggtgcccgaaggaccgcgcacctggtgcatgacccgcaagcccggtgcctga

SEQ ID NO: 34257 - DNA, 2850 bp, synthetic construct
  source 1..2850: mol_type = other DNA
atggccttaccagtgaccgccttgctcctgccgctggccttgctgctccacgccgccaggccggagatcgtgctgacacagagccctgccaccctgtctctgagccctggcgaaagagccaccctgagctgtagagccagccagagcgtgtccagctacctggcctggtatcagcagaagcccggccaggctccccggctgctgatctacgatgccagcaatagagccaccggcatccccgccagattttccggctctggcagcggcaccgacttcaccctgaccatcagctccctggaacccgaggacttcgccgtgtactactgccagcagcggagcaactggcccatcacattcggccagggcacccggctggaaatcaaactcgaggacctgaagaacgtgttcccacctgaggtggccgtgttcgagcctagcgaggccgagatcagccacacccagaaagccaccctcgtgtgcctggctaccggcttctaccccgaccatgtggaactgtcttggtgggtcaacggcaaagaggtgcacagcggcgtgtgtaccgacccccagccactgaaagaacagcccgccctgaacgacagccggtactgcctgagcagcagactgagagtgtccgccaccttctggcagaacccccggaaccacttcagatgccaggtgcagttctacggcctgagcgagaacgacgagtggacccaggacagagccaagcccgtgacccagatcgtgtctgccgaagcctggggcagagccgattgcgacgtgaagctggtggaaaagagcttcgagacagacaccaacctgaacttccagaacctgagcgtgatcggcttcagaatcctgctgctgaaagtggccggctttaacctgctgatgaccctgcggctgtggtccagcagggccaagcgatctggatctggagcaacaaacttctcactactcaaacaagcaggtgacgtggaggagaatcccgggcctactagtgccaccatggactggatttggcgcatccttttccttgtcggcgctgctaccggcgcccattccgggcccatgggatcttggagcgagttttacgatcggctgcacgccattcaccaccggctgtatgctctcggaggaagcgaagctgagctggccgcttttgaaaaagaaattgccgctttcgagtccgagcttcaggcttacaaaggcaaagggaatcctgaggtcgaggccctgagagataccgccgccttcatcagaacccggttgcaggcataccggcacaacggatccggcggcggaggatctggcggaggcggatctgggggcggaggctctttcgaagaagtgcagctggtggaatcaggcggcggactggtgcagcctggcagaagcctgagactgagctgtgccgccagcggcttcaccttcaacgactacgccatgcactgggtgcgccaggcccctggaaaaggactggaatgggtgtccacaatcagctggaacagcggcagcatcggctacgccgatagcgtgaagggccggttcaccatcagccgggacaacgccaagaagtccctgtacctccagatgaacagcctgcgggccgaggacacagccctgtactattgcgccaaggacatccagtacggcaactactactacggcatggacgtgtggggccagggaaccaccgtgaccgtgtcatctacgcgtatccagaaccctgatcctgccgtgtaccagctgcgggatagcaagagcagcgacaagagcgtgtgtctgttcaccgacttcgacagccagaccaacgtgtcccagagcaaggactccgacgtgtacatcaccgataagtgcgtgctggacatgcggagcatggacttcaagagcaactccgccgtggcctggtccaacaagtccgatttcgcctgcgccaacgccttcaacaacagcattatccccgaggacacattcttcccaagccccgagagcagctgcggctttaccagcgagagctaccagcagggcgtgctgagcgccaccatcctgtacgagatcctgctgggcaaggccaccctgtacgccgtgctggtgtctgccctggtgctgatggctatggtcaagcggaaggacagccggggacgcgccaagagaagcggatctggcgtgaagcagaccctgaatttcgacctgctgaagctggctggcgacgtggaatccaacccaggcccttctagaggccatatgaccgagtacaagcccacggtgcgcctcgccacccgcgacgacgtccccagggccgtacgcaccctcgccgccgcgttcgccgactaccccgccacgcgccacaccgtcgatccggaccgccacatcgagcgggtcaccgagctgcaagaactcttcctcacgcgcgtcgggctcgacatcggcaaggtgtgggtcgcggacgacggcgccgcggtggcggtctggaccacgccggagagcgtcgaagcgggggcggtgttcgccgagatcggcccgcgcatggccgagttgagcggttcccggctggccgcgcagcaacagatggaaggcctcctggcgccgcaccggcccaaggagcccgcgtggttcctggccaccgtcggcgtctcgcccgaccaccagggcaagggtctgggcagcgccgtcgtgctccccggagtggaggcggccgagcgcgccggggtgcccgccttcctggagacctccgcgccccgcaacctccccttctacgagcggctcggcttcaccgtcaccgccgacgtcgaggtgcccgaaggaccgcgcacctggtgcatgacccgcaagcccggtgcctga

SEQ ID NO: 34258 - DNA, 3480 bp, synthetic construct
  source 1..3480: mol_type = other DNA
atggccttaccagtgaccgccttgctcctgccgctggccttgctgctccacgccgccaggccggagatcgtgctgacacagagccctgccaccctgtctctgagccctggcgaaagagccaccctgagctgtagagccagccagagcgtgtccagctacctggcctggtatcagcagaagcccggccaggctccccggctgctgatctacgatgccagcaatagagccaccggcatccccgccagattttccggctctggcagcggcaccgacttcaccctgaccatcagctccctggaacccgaggacttcgccgtgtactactgccagcagcggagcaactggcccatcacattcggccagggcacccggctggaaatcaaactcgaggacctgaagaacgtgttcccacctgaggtggccgtgttcgagcctagcgaggccgagatcagccacacccagaaagccaccctcgtgtgcctggctaccggcttctaccccgaccatgtggaactgtcttggtgggtcaacggcaaagaggtgcacagcggcgtgtgtaccgacccccagccactgaaagaacagcccgccctgaacgacagccggtactgcctgagcagcagactgagagtgtccgccaccttctggcagaacccccggaaccacttcagatgccaggtgcagttctacggcctgagcgagaacgacgagtggacccaggacagagccaagcccgtgacccagatcgtgtctgccgaagcctggggcagagccgattgcgacgtgaagctggtggaaaagagcttcgagacagacaccaacctgaacttccagaacctgagcgtgatcggcttcagaatcctgctgctgaaagtggccggctttaacctgctgatgaccctgcggctgtggtccagcagggccaagcgatctggatctggagcaacaaacttctcactactcaaacaagcaggtgacgtggaggagaatcccgggcctactagtaccatggactggatttggcgcatccttttccttgtcggcgctgctaccggcgcccattccctgttcaatcaagaggtgcagatccctctgaccgagagctactgtggcccctgtcctaagaactggatctgctacaagaacaactgctaccagttcttcgacgagagcaagaattggtacgagagccaggccagctgcatgagccagaatgccagcctgctgaaggtgtacagcaaagaggaccaggacctgctgaaactggtcaagagcgcccactggatgggccttgtgcacatccccaccaatggctcttggcagtgggaggacggcagcattctgagccctaacctgctgaccatcatcgagatgcagaagggcgactgcgccctgtacgccagcagctttaagggctacatcgagaattgcagcaccccgaacacctacatctgtatgcagagaaccgtttctggcggaggcggctctggaggaggcggaagtggcggcggaggcgacctctttaatcaagaagtccagattccactcaccgaatcctactgcggaccttgtccaaaaaattggatttgttataagaacaactgttatcaattctttgatgagtctaaaaattggtatgagtcccaggcttcctgcatgtctcagaacgcttctctgctgaaagtctactctaaagaagatcaggatctcctgaagctcgtcaagtctgcccattggatggggctcgtccacattcctaccaacggaagctggcaatgggaagatggctccatcctgtctccaaatctgctcacgattattgaaatgcagaaaggggattgtgctctctacgccagctccttcaagggatatattgagaactgtagcacgcccaatacttatatctgtatgcaacggaccgtgggatccggcggcggaggatctggcggaggcggatctgggggcggaggctctttcgaagaagtgcagctggtggaatcaggcggcggactggtgcagcctggcagaagcctgagactgagctgtgccgccagcggcttcaccttcaacgactacgccatgcactgggtgcgccaggcccctggaaaaggactggaatgggtgtccacaatcagctggaacagcggcagcatcggctacgccgatagcgtgaagggccggttcaccatcagccgggacaacgccaagaagtccctgtacctccagatgaacagcctgcgggccgaggacacagccctgtactattgcgccaaggacatccagtacggcaactactactacggcatggacgtgtggggccagggaaccaccgtgaccgtgtcatctacgcgtatccagaaccctgatcctgccgtgtaccagctgcgggatagcaagagcagcgacaagagcgtgtgtctgttcaccgacttcgacagccagaccaacgtgtcccagagcaaggactccgacgtgtacatcaccgataagtgcgtgctggacatgcggagcatggacttcaagagcaactccgccgtggcctggtccaacaagtccgatttcgcctgcgccaacgccttcaacaacagcattatccccgaggacacattcttcccaagccccgagagcagctgcggctttaccagcgagagctaccagcagggcgtgctgagcgccaccatcctgtacgagatcctgctgggcaaggccaccctgtacgccgtgctggtgtctgccctggtgctgatggctatggtcaagcggaaggacagccggggacgcgccaagagaagcggatctggcgtgaagcagaccctgaatttcgacctgctgaagctggctggcgacgtggaatccaacccaggcccttctagaggccatatgaccgagtacaagcccacggtgcgcctcgccacccgcgacgacgtccccagggccgtacgcaccctcgccgccgcgttcgccgactaccccgccacgcgccacaccgtcgatccggaccgccacatcgagcgggtcaccgagctgcaagaactcttcctcacgcgcgtcgggctcgacatcggcaaggtgtgggtcgcggacgacggcgccgcggtggcggtctggaccacgccggagagcgtcgaagcgggggcggtgttcgccgagatcggcccgcgcatggccgagttgagcggttcccggctggccgcgcagcaacagatggaaggcctcctggcgccgcaccggcccaaggagcccgcgtggttcctggccaccgtcggcgtctcgcccgaccaccagggcaagggtctgggcagcgccgtcgtgctccccggagtggaggcggccgagcgcgccggggtgcccgccttcctggagacctccgcgccccgcaacctccccttctacgagcggctcggcttcaccgtcaccgccgacgtcgaggtgcccgaaggaccgcgcacctggtgcatgacccgcaagcccggtgcctga

SEQ ID NO: 34259 - DNA, 1866 bp, synthetic construct
  source 1..1866: mol_type = other DNA
atggccttaccagtgaccgccttgctcctgccgctggccttgctgctccacgccgccaggccggagatcgtgctgacacagagccctgccaccctgtctctgagccctggcgaaagagccaccctgagctgtagagccagccagagcgtgtccagctacctggcctggtatcagcagaagcccggccaggctccccggctgctgatctacgatgccagcaatagagccaccggcatccccgccagattttccggctctggcagcggcaccgacttcaccctgaccatcagctccctggaacccgaggacttcgccgtgtactactgccagcagcggagcaactggcccatcacattcggccagggcacccggctggaaatcaaactcgaggacctgaagaacgtgttcccacctgaggtggccgtgttcgagcctagcgaggccgagatcagccacacccagaaagccaccctcgtgtgcctggctaccggcttctaccccgaccatgtggaactgtcttggtgggtcaacggcaaagaggtgcacagcggcgtgtgtaccgacccccagccactgaaagaacagcccgccctgaacgacagccggtactgcctgagcagcagactgagagtgtccgccaccttctggcagaacccccggaaccacttcagatgccaggtgcagttctacggcctgagcgagaacgacgagtggacccaggacagagccaagcccgtgacccagatcgtgtctgccgaagcctggggcagagccgattgcggctttaccagcgagagctaccagcagggcgtgctgagcgccaccaacctgagcgtgatcggcttcagaatcctgctgctgaaagtggccggctttaacctgctgatgaccctgcggctgtggtccagcagggccaagcgatctggatctggagcaacaaacttctcactactcaaacaagcaggtgacgtggaggagaatcccgggcctactagtatggactggatttggcgcatccttttccttgtcggcgctgctaccggcgcgcattccttcgaagaagtgcagctggtggaatcaggcggcggactggtgcagcctggcagaagcctgagactgagctgtgccgccagcggcttcaccttcaacgactacgccatgcactgggtgcgccaggcccctggaaaaggactggaatgggtgtccacaatcagctggaacagcggcagcatcggctacgccgatagcgtgaagggccggttcaccatcagccgggacaacgccaagaagtccctgtacctccagatgaacagcctgcgggccgaggacacagccctgtactattgcgccaaggacatccagtacggcaactactactacggcatggacgtgtggggccagggaaccaccgtgaccgtgtcatctacgcgtatccagaaccctgatcctgccgtgtaccagctgcgggatagcaagagcagcgacaagagcgtgtgtctgttcaccgacttcgacagccagaccaacgtgtcccagagcaaggactccgacgtgtacatcaccgataagtgcgtgctggacatgcggagcatggacttcaagagcaactccgccgtggcctggtccaacaagtccgatttcgcctgcgccaacgccttcaacaacagcattatccccgaggacacattcttcccaagccccgagagcagctgcgacgtgaagctggtggaaaagagcttcgagacagacaccaacctgaacttccagatcctgtacgagatcctgctgggcaaggccaccctgtacgccgtgctggtgtctgccctggtgctgatggctatggtcaagcggaaggacagccgggga

SEQ ID NO: 34260 - DNA, 1878 bp, synthetic construct
  source 1..1878: mol_type = other DNA
atggccttaccagtgaccgccttgctcctgccgctggccttgctgctccacgccgccaggccggagatcgtgctgacacagagccctgccaccctgtctctgagccctggcgaaagagccaccctgagctgtagagccagccagagcgtgtccagctacctggcctggtatcagcagaagcccggccaggctccccggctgctgatctacgatgccagcaatagagccaccggcatccccgccagattttccggctctggcagcggcaccgacttcaccctgaccatcagctccctggaacccgaggacttcgccgtgtactactgccagcagcggagcaactggcccatcacattcggccagggcacccggctggaaatcaaactcgagatccagaaccctgatcctgccgtgtaccagctgcgggatagcaagagcagcgacaagagcgtgtgtctgttcaccgacttcgacagccagaccaacgtgtcccagagcaaggactccgacgtgtacatcaccgataagtgcgtgctggacatgcggagcatggacttcaagagcaactccgccgtggcctggtccaacaagtccgatttcgcctgcgccaacgccttcaacaacagcattatccccgaggacacattcttcccaagccccgagagcagctgcgacgtgaagctggtggaaaagagcttcgagacagacaccaacctgaacttccagatcctgtacgagatcctgctgggcaaggccaccctgtacgccgtgctggtgtctgccctggtgctgatggctatggtcaagcggaaggacagccggggacgcgccaagagaagcggatctggcgtgaagcagaccctgaatttcgacctgctgaagctggctggcgacgtggaatccaacccaggccctactagtatggactggatttggcgcatccttttccttgtcggcgctgctaccggcgcgcattccttcgaagaagtgcagctggtggaatcaggcggcggactggtgcagcctggcagaagcctgagactgagctgtgccgccagcggcttcaccttcaacgactacgccatgcactgggtgcgccaggcccctggaaaaggactggaatgggtgtccacaatcagctggaacagcggcagcatcggctacgccgatagcgtgaagggccggttcaccatcagccgggacaacgccaagaagtccctgtacctccagatgaacagcctgcgggccgaggacacagccctgtactattgcgccaaggacatccagtacggcaactactactacggcatggacgtgtggggccagggaaccaccgtgaccgtgtcatctacgcgtgaggacctgaagaacgtgttcccacctgaggtggccgtgttcgagcctagcgaggccgagatcagccacacccagaaagccaccctcgtgtgcctggctaccggcttctaccccgaccatgtggaactgtcttggtgggtcaacggcaaagaggtgcacagcggcgtgtgtaccgacccccagccactgaaagaacagcccgccctgaacgacagccggtactgcctgagcagcagactgagagtgtccgccaccttctggcagaacccccggaaccacttcagatgccaggtgcagttctacggcctgagcgagaacgacgagtggacccaggacagagccaagcccgtgacccagatcgtgtctgccgaagcctggggcagagccgattgcggctttaccagcgagagctaccagcagggcgtgctgagcgccaccaacctgagcgtgatcggcttcagaatcctgctgctgaaagtggccggctttaacctgctgatgaccctgcggctgtggtccagc

SEQ ID NO: 34261 - DNA, 2271 bp, synthetic construct
  source 1..2271: mol_type = other DNA
atggccttaccagtgaccgccttgctcctgccgctggccttgctgctccacgccgccaggccggaagtgcagctggttgaatctggcggaggactggttcagcctggcggatctctgagactgtcttgtgccgccagcggcttcagcttcagcgacttttggatgagctgggtccgacaggcccctggcaaaggacttgaatgggtcgccacaatcagccaggccggcagcgagaaggactacgtggactctgtgaagggcagattcaccatcagccgggacaacgccaagaagtccctgtacctccagatgaacagcctgagagccgaggacaccgccgtgtactattgtgcctctggcgtgtacagcttcgactacagaggccagggcaccctggtcacagtctcttctggtaccggcggaggcggatctggcggcggaggtagcggtggcggaggatctgaattcgagatcgtgctgacacagagccctgccaccctgtctctgagccctggcgaaagagccaccctgagctgtagagccagccagagcgtgtccagctacctggcctggtatcagcagaagcccggccaggctccccggctgctgatctacgatgccagcaatagagccaccggcatccccgccagattttccggctctggcagcggcaccgacttcaccctgaccatcagctccctggaacccgaggacttcgccgtgtactactgccagcagcggagcaactggcccatcacattcggccagggcacccggctggaaatcaaactcgaggacctgaagaacgtgttcccacctgaggtggccgtgttcgagcctagcgaggccgagatcagccacacccagaaagccaccctcgtgtgcctggctaccggcttctaccccgaccatgtggaactgtcttggtgggtcaacggcaaagaggtgcacagcggcgtgtgtaccgacccccagccactgaaagaacagcccgccctgaacgacagccggtactgcctgagcagcagactgagagtgtccgccaccttctggcagaacccccggaaccacttcagatgccaggtgcagttctacggcctgagcgagaacgacgagtggacccaggacagagccaagcccgtgacccagatcgtgtctgccgaagcctggggcagagccgattgcggctttaccagcgagagctaccagcagggcgtgctgagcgccaccaacctgagcgtgatcggcttcagaatcctgctgctgaaagtggccggctttaacctgctgatgaccctgcggctgtggtccagcagggccaagcgatctggatctggagcaacaaacttctcactactcaaacaagcaggtgacgtggaggagaatcccgggcctactagtatggactggatttggcgcatccttttccttgtcggcgctgctaccggcgcgcattccttcgaagaagtgcagctggtggaatcaggcggcggactggtgcagcctggcagaagcctgagactgagctgtgccgccagcggcttcaccttcaacgactacgccatgcactgggtgcgccaggcccctggaaaaggactggaatgggtgtccacaatcagctggaacagcggcagcatcggctacgccgatagcgtgaagggccggttcaccatcagccgggacaacgccaagaagtccctgtacctccagatgaacagcctgcgggccgaggacacagccctgtactattgcgccaaggacatccagtacggcaactactactacggcatggacgtgtggggccagggaaccaccgtgaccgtgtcatctacgcgtatccagaaccctgatcctgccgtgtaccagctgcgggatagcaagagcagcgacaagagcgtgtgtctgttcaccgacttcgacagccagaccaacgtgtcccagagcaaggactccgacgtgtacatcaccgataagtgcgtgctggacatgcggagcatggacttcaagagcaactccgccgtggcctggtccaacaagtccgatttcgcctgcgccaacgccttcaacaacagcattatccccgaggacacattcttcccaagccccgagagcagctgcgacgtgaagctggtggaaaagagcttcgagacagacaccaacctgaacttccagatcctgtacgagatcctgctgggcaaggccaccctgtacgccgtgctggtgtctgccctggtgctgatggctatggtcaagcggaaggacagccgggga

SEQ ID NO: 34262 - DNA, 2283 bp, synthetic construct
  source 1..2283: mol_type = other DNA
atggccttaccagtgaccgccttgctcctgccgctggccttgctgctccacgccgccaggccggaagtgcagctggttgaatctggcggaggactggttcagcctggcggatctctgagactgtcttgtgccgccagcggcttcagcttcagcgacttttggatgagctgggtccgacaggcccctggcaaaggacttgaatgggtcgccacaatcagccaggccggcagcgagaaggactacgtggactctgtgaagggcagattcaccatcagccgggacaacgccaagaagtccctgtacctccagatgaacagcctgagagccgaggacaccgccgtgtactattgtgcctctggcgtgtacagcttcgactacagaggccagggcaccctggtcacagtctcttctggtaccggcggaggcggatctggcggcggaggtagcggtggcggaggatctgaattcgagatcgtgctgacacagagccctgccaccctgtctctgagccctggcgaaagagccaccctgagctgtagagccagccagagcgtgtccagctacctggcctggtatcagcagaagcccggccaggctccccggctgctgatctacgatgccagcaatagagccaccggcatccccgccagattttccggctctggcagcggcaccgacttcaccctgaccatcagctccctggaacccgaggacttcgccgtgtactactgccagcagcggagcaactggcccatcacattcggccagggcacccggctggaaatcaaactcgagatccagaaccctgatcctgccgtgtaccagctgcgggatagcaagagcagcgacaagagcgtgtgtctgttcaccgacttcgacagccagaccaacgtgtcccagagcaaggactccgacgtgtacatcaccgataagtgcgtgctggacatgcggagcatggacttcaagagcaactccgccgtggcctggtccaacaagtccgatttcgcctgcgccaacgccttcaacaacagcattatccccgaggacacattcttcccaagccccgagagcagctgcgacgtgaagctggtggaaaagagcttcgagacagacaccaacctgaacttccagatcctgtacgagatcctgctgggcaaggccaccctgtacgccgtgctggtgtctgccctggtgctgatggctatggtcaagcggaaggacagccggggacgcgccaagagaagcggatctggcgtgaagcagaccctgaatttcgacctgctgaagctggctggcgacgtggaatccaacccaggccctactagtatggactggatttggcgcatccttttccttgtcggcgctgctaccggcgcgcattccttcgaagaagtgcagctggtggaatcaggcggcggactggtgcagcctggcagaagcctgagactgagctgtgccgccagcggcttcaccttcaacgactacgccatgcactgggtgcgccaggcccctggaaaaggactggaatgggtgtccacaatcagctggaacagcggcagcatcggctacgccgatagcgtgaagggccggttcaccatcagccgggacaacgccaagaagtccctgtacctccagatgaacagcctgcgggccgaggacacagccctgtactattgcgccaaggacatccagtacggcaactactactacggcatggacgtgtggggccagggaaccaccgtgaccgtgtcatctacgcgtgaggacctgaagaacgtgttcccacctgaggtggccgtgttcgagcctagcgaggccgagatcagccacacccagaaagccaccctcgtgtgcctggctaccggcttctaccccgaccatgtggaactgtcttggtgggtcaacggcaaagaggtgcacagcggcgtgtgtaccgacccccagccactgaaagaacagcccgccctgaacgacagccggtactgcctgagcagcagactgagagtgtccgccaccttctggcagaacccccggaaccacttcagatgccaggtgcagttctacggcctgagcgagaacgacgagtggacccaggacagagccaagcccgtgacccagatcgtgtctgccgaagcctggggcagagccgattgcggctttaccagcgagagctaccagcagggcgtgctgagcgccaccaacctgagcgtgatcggcttcagaatcctgctgctgaaagtggccggctttaacctgctgatgaccctgcggctgtggtccagc

SEQ ID NO: 34263 - DNA, 2682 bp, synthetic construct
  source 1..2682: mol_type = other DNA
atggccttaccagtgaccgccttgctcctgccgctggccttgctgctccacgccgccaggccggaagtgcagctggttgaatctggcggaggactggttcagcctggcggatctctgagactgtcttgtgccgccagcggcttcagcttcagcgacttttggatgagctgggtccgacaggcccctggcaaaggacttgaatgggtcgccacaatcagccaggccggcagcgagaaggactacgtggactctgtgaagggcagattcaccatcagccgggacaacgccaagaagtccctgtacctccagatgaacagcctgagagccgaggacaccgccgtgtactattgtgcctctggcgtgtacagcttcgactacagaggccagggcaccctggtcacagtctcttctggtaccggcggaggcggatctggcggcggaggtagcggtggcggaggatctgaattcgagatcgtgctgacacagagccctgccaccctgtctctgagccctggcgaaagagccaccctgagctgtagagccagccagagcgtgtccagctacctggcctggtatcagcagaagcccggccaggctccccggctgctgatctacgatgccagcaatagagccaccggcatccccgccagattttccggctctggcagcggcaccgacttcaccctgaccatcagctccctggaacccgaggacttcgccgtgtactactgccagcagcggagcaactggcccatcacattcggccagggcacccggctggaaatcaaactcgaggacctgaagaacgtgttcccacctgaggtggccgtgttcgagcctagcgaggccgagatcagccacacccagaaagccaccctcgtgtgcctggctaccggcttctaccccgaccatgtggaactgtcttggtgggtcaacggcaaagaggtgcacagcggcgtgtgtaccgacccccagccactgaaagaacagcccgccctgaacgacagccggtactgcctgagcagcagactgagagtgtccgccaccttctggcagaacccccggaaccacttcagatgccaggtgcagttctacggcctgagcgagaacgacgagtggacccaggacagagccaagcccgtgacccagatcgtgtctgccgaagcctggggcagagccgattgcggctttaccagcgagagctaccagcagggcgtgctgagcgccaccaacctgagcgtgatcggcttcagaatcctgctgctgaaagtggccggctttaacctgctgatgaccctgcggctgtggtccagcagggccaagcgatctggatctggagcaacaaacttctcactactcaaacaagcaggtgacgtggaggagaatcccgggcctactagtatggactggatttggcgcatccttttccttgtcggcgctgctaccggcgcgcattccgggccccagctccagctgcaagagtctggacctggcctggtcaagcctagcgagacactgagcctgacctgtaccgtgtccggcgatagcatcagcagcggcgattactactggggctggatcagacagcctcctggcaaaggactggaatggatcggccacatctactacagcggcgtgacctactacaaccccagcctgaagtccagagtgaccatcagcgtggacaccagccggaaccagttctccctgaagctgtctagcgtgacagccgccgataccgccgtgtactactgcaccagagaggacagcagcaactggcggagtagaggccagggaacactggtcacagttagctctggatccggcggaggcggaagtggaggcggaggatctggcggcggaggctctttcgaagaagtgcagctggtggaatcaggcggcggactggtgcagcctggcagaagcctgagactgagctgtgccgccagcggcttcaccttcaacgactacgccatgcactgggtgcgccaggcccctggaaaaggactggaatgggtgtccacaatcagctggaacagcggcagcatcggctacgccgatagcgtgaagggccggttcaccatcagccgggacaacgccaagaagtccctgtacctccagatgaacagcctgcgggccgaggacacagccctgtactattgcgccaaggacatccagtacggcaactactactacggcatggacgtgtggggccagggaaccaccgtgaccgtgtcatctacgcgtatccagaaccctgatcctgccgtgtaccagctgcgggatagcaagagcagcgacaagagcgtgtgtctgttcaccgacttcgacagccagaccaacgtgtcccagagcaaggactccgacgtgtacatcaccgataagtgcgtgctggacatgcggagcatggacttcaagagcaactccgccgtggcctggtccaacaagtccgatttcgcctgcgccaacgccttcaacaacagcattatccccgaggacacattcttcccaagccccgagagcagctgcgacgtgaagctggtggaaaagagcttcgagacagacaccaacctgaacttccagatcctgtacgagatcctgctgggcaaggccaccctgtacgccgtgctggtgtctgccctggtgctgatggctatggtcaagcggaaggacagccgggga

SEQ ID NO: 34264 - DNA, 2694 bp, synthetic construct
  source 1..2694: mol_type = other DNA
atggccttaccagtgaccgccttgctcctgccgctggccttgctgctccacgccgccaggccggaagtgcagctggttgaatctggcggaggactggttcagcctggcggatctctgagactgtcttgtgccgccagcggcttcagcttcagcgacttttggatgagctgggtccgacaggcccctggcaaaggacttgaatgggtcgccacaatcagccaggccggcagcgagaaggactacgtggactctgtgaagggcagattcaccatcagccgggacaacgccaagaagtccctgtacctccagatgaacagcctgagagccgaggacaccgccgtgtactattgtgcctctggcgtgtacagcttcgactacagaggccagggcaccctggtcacagtctcttctggtaccggcggaggcggatctggcggcggaggtagcggtggcggaggatctgaattcgagatcgtgctgacacagagccctgccaccctgtctctgagccctggcgaaagagccaccctgagctgtagagccagccagagcgtgtccagctacctggcctggtatcagcagaagcccggccaggctccccggctgctgatctacgatgccagcaatagagccaccggcatccccgccagattttccggctctggcagcggcaccgacttcaccctgaccatcagctccctggaacccgaggacttcgccgtgtactactgccagcagcggagcaactggcccatcacattcggccagggcacccggctggaaatcaaactcgagatccagaaccctgatcctgccgtgtaccagctgcgggatagcaagagcagcgacaagagcgtgtgtctgttcaccgacttcgacagccagaccaacgtgtcccagagcaaggactccgacgtgtacatcaccgataagtgcgtgctggacatgcggagcatggacttcaagagcaactccgccgtggcctggtccaacaagtccgatttcgcctgcgccaacgccttcaacaacagcattatccccgaggacacattcttcccaagccccgagagcagctgcgacgtgaagctggtggaaaagagcttcgagacagacaccaacctgaacttccagatcctgtacgagatcctgctgggcaaggccaccctgtacgccgtgctggtgtctgccctggtgctgatggctatggtcaagcggaaggacagccggggacgcgccaagagaagcggatctggcgtgaagcagaccctgaatttcgacctgctgaagctggctggcgacgtggaatccaacccaggccctactagtatggactggatttggcgcatccttttccttgtcggcgctgctaccggcgcgcattccgggccccagctccagctgcaagagtctggacctggcctggtcaagcctagcgagacactgagcctgacctgtaccgtgtccggcgatagcatcagcagcggcgattactactggggctggatcagacagcctcctggcaaaggactggaatggatcggccacatctactacagcggcgtgacctactacaaccccagcctgaagtccagagtgaccatcagcgtggacaccagccggaaccagttctccctgaagctgtctagcgtgacagccgccgataccgccgtgtactactgcaccagagaggacagcagcaactggcggagtagaggccagggaacactggtcacagttagctctggatccggcggaggcggaagtggaggcggaggatctggcggcggaggctctttcgaagaagtgcagctggtggaatcaggcggcggactggtgcagcctggcagaagcctgagactgagctgtgccgccagcggcttcaccttcaacgactacgccatgcactgggtgcgccaggcccctggaaaaggactggaatgggtgtccacaatcagctggaacagcggcagcatcggctacgccgatagcgtgaagggccggttcaccatcagccgggacaacgccaagaagtccctgtacctccagatgaacagcctgcgggccgaggacacagccctgtactattgcgccaaggacatccagtacggcaactactactacggcatggacgtgtggggccagggaaccaccgtgaccgtgtcatctacgcgtgaggacctgaagaacgtgttcccacctgaggtggccgtgttcgagcctagcgaggccgagatcagccacacccagaaagccaccctcgtgtgcctggctaccggcttctaccccgaccatgtggaactgtcttggtgggtcaacggcaaagaggtgcacagcggcgtgtgtaccgacccccagccactgaaagaacagcccgccctgaacgacagccggtactgcctgagcagcagactgagagtgtccgccaccttctggcagaacccccggaaccacttcagatgccaggtgcagttctacggcctgagcgagaacgacgagtggacccaggacagagccaagcccgtgacccagatcgtgtctgccgaagcctggggcagagccgattgcggctttaccagcgagagctaccagcagggcgtgctgagcgccaccaacctgagcgtgatcggcttcagaatcctgctgctgaaagtggccggctttaacctgctgatgaccctgcggctgtggtccagc

SEQ ID NO: 34265 - DNA, 2178 bp, synthetic construct
  source 1..2178: mol_type = other DNA
atggccttaccagtgaccgccttgctcctgccgctggccttgctgctccacgccgccaggccggagatcgtgctgacacagagccctgccaccctgtctctgagccctggcgaaagagccaccctgagctgtagagccagccagagcgtgtccagctacctggcctggtatcagcagaagcccggccaggctccccggctgctgatctacgatgccagcaatagagccaccggcatccccgccagattttccggctctggcagcggcaccgacttcaccctgaccatcagctccctggaacccgaggacttcgccgtgtactactgccagcagcggagcaactggcccatcacattcggccagggcacccggctggaaatcaaactcgaggacctgaagaacgtgttcccacctgaggtggccgtgttcgagcctagcgaggccgagatcagccacacccagaaagccaccctcgtgtgcctggctaccggcttctaccccgaccatgtggaactgtcttggtgggtcaacggcaaagaggtgcacagcggcgtgtgtaccgacccccagccactgaaagaacagcccgccctgaacgacagccggtactgcctgagcagcagactgagagtgtccgccaccttctggcagaacccccggaaccacttcagatgccaggtgcagttctacggcctgagcgagaacgacgagtggacccaggacagagccaagcccgtgacccagatcgtgtctgccgaagcctggggcagagccgatgatgtgattaagatccactggcaggaaaagaagtccaacaccatcctgggcagccaggaaggcaacaccatgaagaccaacgacacctacatgaagttcagctggctgaccgtgcccgagaagtccctggacaaagaacacagatgcatcgtgcggcacgaaaacaacaagaacggcgtggaccaggaaatcatcttcccacccatcaagaccgatgtgattacaatggaccccaaggacaactgctccaaggacgccaacgataccctgctgctccagctgaccaacaccagcgcctactacatgtacttgttgctgctgctgaagtccgtggtgtacttcgccatcatcacatgctgcctgctgatggctatggtcaagcggaaggacagccggggaagggccaagcgatctggatctggagcaacaaacttctcactactcaaacaagcaggtgacgtggaggagaatcccgggcctactagtatggactggatttggcgcatccttttccttgtcggcgctgctaccggcgcgcattccttcgaagaagtgcagctggtggaatcaggcggcggactggtgcagcctggcagaagcctgagactgagctgtgccgccagcggcttcaccttcaacgactacgccatgcactgggtgcgccaggcccctggaaaaggactggaatgggtgtccacaatcagctggaacagcggcagcatcggctacgccgatagcgtgaagggccggttcaccatcagccgggacaacgccaagaagtccctgtacctccagatgaacagcctgcgggccgaggacacagccctgtactattgcgccaaggacatccagtacggcaactactactacggcatggacgtgtggggccagggaaccaccgtgaccgtgtcatctacgcgtatccagaaccctgatcctgccgtgtaccagctgcgggatagcaagagcagcgacaagagcgtgtgtctgttcaccgacttcgacagccagaccaacgtgtcccagagcaaggactccgacgtgtacatcaccgataagtgcgtgctggacatgcggagcatggacttcaagagcaactccgccgtggcctggtccaacaagtccgatttcgcctgcgccaacgccttcaacaacagcattatccccgaggacacattcttcccaagccccgagagcagcgactccaccgaccacgtgaagcccaaagagacagagaacaccaagcagcccagcaagagctgccacaagcccaaggccatcgtgcacaccgagaaagtgaacatgatgagcctgaccgtgctgggcctgcggatgctgttcgccaaaaccgtggccgtgaacttcctgctgaccgccaagctgttcttcctcctcaccgcc

SEQ ID NO: 34266 - DNA, 2190 bp, synthetic construct
  source 1..2190: mol_type = other DNA
atggccttaccagtgaccgccttgctcctgccgctggccttgctgctccacgccgccaggccggagatcgtgctgacacagagccctgccaccctgtctctgagccctggcgaaagagccaccctgagctgtagagccagccagagcgtgtccagctacctggcctggtatcagcagaagcccggccaggctccccggctgctgatctacgatgccagcaatagagccaccggcatccccgccagattttccggctctggcagcggcaccgacttcaccctgaccatcagctccctggaacccgaggacttcgccgtgtactactgccagcagcggagcaactggcccatcacattcggccagggcacccggctggaaatcaaactcgagatccagaaccctgatcctgccgtgtaccagctgcgggatagcaagagcagcgacaagagcgtgtgtctgttcaccgacttcgacagccagaccaacgtgtcccagagcaaggactccgacgtgtacatcaccgataagtgcgtgctggacatgcggagcatggacttcaagagcaactccgccgtggcctggtccaacaagtccgatttcgcctgcgccaacgccttcaacaacagcattatccccgaggacacattcttcccaagccccgagagcagcgactccaccgaccacgtgaagcccaaagagacagagaacaccaagcagcccagcaagagctgccacaagcccaaggccatcgtgcacaccgagaaagtgaacatgatgagcctgaccgtgctgggcctgcggatgctgttcgccaaaaccgtggccgtgaacttcctgctgaccgccaagctgttcttcctcctcaccgcccgcgccaagagaagcggatctggcgtgaagcagaccctgaatttcgacctgctgaagctggctggcgacgtggaatccaacccaggccctactagtatggactggatttggcgcatccttttccttgtcggcgctgctaccggcgcgcattccttcgaagaagtgcagctggtggaatcaggcggcggactggtgcagcctggcagaagcctgagactgagctgtgccgccagcggcttcaccttcaacgactacgccatgcactgggtgcgccaggcccctggaaaaggactggaatgggtgtccacaatcagctggaacagcggcagcatcggctacgccgatagcgtgaagggccggttcaccatcagccgggacaacgccaagaagtccctgtacctccagatgaacagcctgcgggccgaggacacagccctgtactattgcgccaaggacatccagtacggcaactactactacggcatggacgtgtggggccagggaaccaccgtgaccgtgtcatctacgcgtgaggacctgaagaacgtgttcccacctgaggtggccgtgttcgagcctagcgaggccgagatcagccacacccagaaagccaccctcgtgtgcctggctaccggcttctaccccgaccatgtggaactgtcttggtgggtcaacggcaaagaggtgcacagcggcgtgtgtaccgacccccagccactgaaagaacagcccgccctgaacgacagccggtactgcctgagcagcagactgagagtgtccgccaccttctggcagaacccccggaaccacttcagatgccaggtgcagttctacggcctgagcgagaacgacgagtggacccaggacagagccaagcccgtgacccagatcgtgtctgccgaagcctggggcagagccgatgatgtgattaagatccactggcaggaaaagaagtccaacaccatcctgggcagccaggaaggcaacaccatgaagaccaacgacacctacatgaagttcagctggctgaccgtgcccgagaagtccctggacaaagaacacagatgcatcgtgcggcacgaaaacaacaagaacggcgtggaccaggaaatcatcttcccacccatcaagaccgatgtgattacaatggaccccaaggacaactgctccaaggacgccaacgataccctgctgctccagctgaccaacaccagcgcctactacatgtacttgttgctgctgctgaagtccgtggtgtacttcgccatcatcacatgctgcctgctgatggctatggtcaagcggaaggacagccgggga

SEQ ID NO: 34267 - DNA, 2583 bp, synthetic construct
  source 1..2583: mol_type = other DNA
atggccttaccagtgaccgccttgctcctgccgctggccttgctgctccacgccgccaggccggaagtgcagctggttgaatctggcggaggactggttcagcctggcggatctctgagactgtcttgtgccgccagcggcttcagcttcagcgacttttggatgagctgggtccgacaggcccctggcaaaggacttgaatgggtcgccacaatcagccaggccggcagcgagaaggactacgtggactctgtgaagggcagattcaccatcagccgggacaacgccaagaagtccctgtacctccagatgaacagcctgagagccgaggacaccgccgtgtactattgtgcctctggcgtgtacagcttcgactacagaggccagggcaccctggtcacagtctcttctggtaccggcggaggcggatctggcggcggaggtagcggtggcggaggatctgaattcgagatcgtgctgacacagagccctgccaccctgtctctgagccctggcgaaagagccaccctgagctgtagagccagccagagcgtgtccagctacctggcctggtatcagcagaagcccggccaggctccccggctgctgatctacgatgccagcaatagagccaccggcatccccgccagattttccggctctggcagcggcaccgacttcaccctgaccatcagctccctggaacccgaggacttcgccgtgtactactgccagcagcggagcaactggcccatcacattcggccagggcacccggctggaaatcaaactcgaggacctgaagaacgtgttcccacctgaggtggccgtgttcgagcctagcgaggccgagatcagccacacccagaaagccaccctcgtgtgcctggctaccggcttctaccccgaccatgtggaactgtcttggtgggtcaacggcaaagaggtgcacagcggcgtgtgtaccgacccccagccactgaaagaacagcccgccctgaacgacagccggtactgcctgagcagcagactgagagtgtccgccaccttctggcagaacccccggaaccacttcagatgccaggtgcagttctacggcctgagcgagaacgacgagtggacccaggacagagccaagcccgtgacccagatcgtgtctgccgaagcctggggcagagccgatgatgtgattaagatccactggcaggaaaagaagtccaacaccatcctgggcagccaggaaggcaacaccatgaagaccaacgacacctacatgaagttcagctggctgaccgtgcccgagaagtccctggacaaagaacacagatgcatcgtgcggcacgaaaacaacaagaacggcgtggaccaggaaatcatcttcccacccatcaagaccgatgtgattacaatggaccccaaggacaactgctccaaggacgccaacgataccctgctgctccagctgaccaacaccagcgcctactacatgtacttgttgctgctgctgaagtccgtggtgtacttcgccatcatcacatgctgcctgctgatggctatggtcaagcggaaggacagccggggaagggccaagcgatctggatctggagcaacaaacttctcactactcaaacaagcaggtgacgtggaggagaatcccgggcctactagtatggactggatttggcgcatccttttccttgtcggcgctgctaccggcgcgcattccttcgaagaagtgcagctggtggaatcaggcggcggactggtgcagcctggcagaagcctgagactgagctgtgccgccagcggcttcaccttcaacgactacgccatgcactgggtgcgccaggcccctggaaaaggactggaatgggtgtccacaatcagctggaacagcggcagcatcggctacgccgatagcgtgaagggccggttcaccatcagccgggacaacgccaagaagtccctgtacctccagatgaacagcctgcgggccgaggacacagccctgtactattgcgccaaggacatccagtacggcaactactactacggcatggacgtgtggggccagggaaccaccgtgaccgtgtcatctacgcgtatccagaaccctgatcctgccgtgtaccagctgcgggatagcaagagcagcgacaagagcgtgtgtctgttcaccgacttcgacagccagaccaacgtgtcccagagcaaggactccgacgtgtacatcaccgataagtgcgtgctggacatgcggagcatggacttcaagagcaactccgccgtggcctggtccaacaagtccgatttcgcctgcgccaacgccttcaacaacagcattatccccgaggacacattcttcccaagccccgagagcagcgactccaccgaccacgtgaagcccaaagagacagagaacaccaagcagcccagcaagagctgccacaagcccaaggccatcgtgcacaccgagaaagtgaacatgatgagcctgaccgtgctgggcctgcggatgctgttcgccaaaaccgtggccgtgaacttcctgctgaccgccaagctgttcttcctcctcaccgcc

SEQ ID NO: 34268 - DNA, 2595 bp, synthetic construct
  source 1..2595: mol_type = other DNA
atggccttaccagtgaccgccttgctcctgccgctggccttgctgctccacgccgccaggccggaagtgcagctggttgaatctggcggaggactggttcagcctggcggatctctgagactgtcttgtgccgccagcggcttcagcttcagcgacttttggatgagctgggtccgacaggcccctggcaaaggacttgaatgggtcgccacaatcagccaggccggcagcgagaaggactacgtggactctgtgaagggcagattcaccatcagccgggacaacgccaagaagtccctgtacctccagatgaacagcctgagagccgaggacaccgccgtgtactattgtgcctctggcgtgtacagcttcgactacagaggccagggcaccctggtcacagtctcttctggtaccggcggaggcggatctggcggcggaggtagcggtggcggaggatctgaattcgagatcgtgctgacacagagccctgccaccctgtctctgagccctggcgaaagagccaccctgagctgtagagccagccagagcgtgtccagctacctggcctggtatcagcagaagcccggccaggctccccggctgctgatctacgatgccagcaatagagccaccggcatccccgccagattttccggctctggcagcggcaccgacttcaccctgaccatcagctccctggaacccgaggacttcgccgtgtactactgccagcagcggagcaactggcccatcacattcggccagggcacccggctggaaatcaaactcgagatccagaaccctgatcctgccgtgtaccagctgcgggatagcaagagcagcgacaagagcgtgtgtctgttcaccgacttcgacagccagaccaacgtgtcccagagcaaggactccgacgtgtacatcaccgataagtgcgtgctggacatgcggagcatggacttcaagagcaactccgccgtggcctggtccaacaagtccgatttcgcctgcgccaacgccttcaacaacagcattatccccgaggacacattcttcccaagccccgagagcagcgactccaccgaccacgtgaagcccaaagagacagagaacaccaagcagcccagcaagagctgccacaagcccaaggccatcgtgcacaccgagaaagtgaacatgatgagcctgaccgtgctgggcctgcggatgctgttcgccaaaaccgtggccgtgaacttcctgctgaccgccaagctgttcttcctcctcaccgcccgcgccaagagaagcggatctggcgtgaagcagaccctgaatttcgacctgctgaagctggctggcgacgtggaatccaacccaggccctactagtatggactggatttggcgcatccttttccttgtcggcgctgctaccggcgcgcattccttcgaagaagtgcagctggtggaatcaggcggcggactggtgcagcctggcagaagcctgagactgagctgtgccgccagcggcttcaccttcaacgactacgccatgcactgggtgcgccaggcccctggaaaaggactggaatgggtgtccacaatcagctggaacagcggcagcatcggctacgccgatagcgtgaagggccggttcaccatcagccgggacaacgccaagaagtccctgtacctccagatgaacagcctgcgggccgaggacacagccctgtactattgcgccaaggacatccagtacggcaactactactacggcatggacgtgtggggccagggaaccaccgtgaccgtgtcatctacgcgtgaggacctgaagaacgtgttcccacctgaggtggccgtgttcgagcctagcgaggccgagatcagccacacccagaaagccaccctcgtgtgcctggctaccggcttctaccccgaccatgtggaactgtcttggtgggtcaacggcaaagaggtgcacagcggcgtgtgtaccgacccccagccactgaaagaacagcccgccctgaacgacagccggtactgcctgagcagcagactgagagtgtccgccaccttctggcagaacccccggaaccacttcagatgccaggtgcagttctacggcctgagcgagaacgacgagtggacccaggacagagccaagcccgtgacccagatcgtgtctgccgaagcctggggcagagccgatgatgtgattaagatccactggcaggaaaagaagtccaacaccatcctgggcagccaggaaggcaacaccatgaagaccaacgacacctacatgaagttcagctggctgaccgtgcccgagaagtccctggacaaagaacacagatgcatcgtgcggcacgaaaacaacaagaacggcgtggaccaggaaatcatcttcccacccatcaagaccgatgtgattacaatggaccccaaggacaactgctccaaggacgccaacgataccctgctgctccagctgaccaacaccagcgcctactacatgtacttgttgctgctgctgaagtccgtggtgtacttcgccatcatcacatgctgcctgctgatggctatggtcaagcggaaggacagccgggga

SEQ ID NO: 34269 - DNA, 2994 bp, synthetic construct
  source 1..2994: mol_type = other DNA
atggccttaccagtgaccgccttgctcctgccgctggccttgctgctccacgccgccaggccggaagtgcagctggttgaatctggcggaggactggttcagcctggcggatctctgagactgtcttgtgccgccagcggcttcagcttcagcgacttttggatgagctgggtccgacaggcccctggcaaaggacttgaatgggtcgccacaatcagccaggccggcagcgagaaggactacgtggactctgtgaagggcagattcaccatcagccgggacaacgccaagaagtccctgtacctccagatgaacagcctgagagccgaggacaccgccgtgtactattgtgcctctggcgtgtacagcttcgactacagaggccagggcaccctggtcacagtctcttctggtaccggcggaggcggatctggcggcggaggtagcggtggcggaggatctgaattcgagatcgtgctgacacagagccctgccaccctgtctctgagccctggcgaaagagccaccctgagctgtagagccagccagagcgtgtccagctacctggcctggtatcagcagaagcccggccaggctccccggctgctgatctacgatgccagcaatagagccaccggcatccccgccagattttccggctctggcagcggcaccgacttcaccctgaccatcagctccctggaacccgaggacttcgccgtgtactactgccagcagcggagcaactggcccatcacattcggccagggcacccggctggaaatcaaactcgaggacctgaagaacgtgttcccacctgaggtggccgtgttcgagcctagcgaggccgagatcagccacacccagaaagccaccctcgtgtgcctggctaccggcttctaccccgaccatgtggaactgtcttggtgggtcaacggcaaagaggtgcacagcggcgtgtgtaccgacccccagccactgaaagaacagcccgccctgaacgacagccggtactgcctgagcagcagactgagagtgtccgccaccttctggcagaacccccggaaccacttcagatgccaggtgcagttctacggcctgagcgagaacgacgagtggacccaggacagagccaagcccgtgacccagatcgtgtctgccgaagcctggggcagagccgatgatgtgattaagatccactggcaggaaaagaagtccaacaccatcctgggcagccaggaaggcaacaccatgaagaccaacgacacctacatgaagttcagctggctgaccgtgcccgagaagtccctggacaaagaacacagatgcatcgtgcggcacgaaaacaacaagaacggcgtggaccaggaaatcatcttcccacccatcaagaccgatgtgattacaatggaccccaaggacaactgctccaaggacgccaacgataccctgctgctccagctgaccaacaccagcgcctactacatgtacttgttgctgctgctgaagtccgtggtgtacttcgccatcatcacatgctgcctgctgatggctatggtcaagcggaaggacagccggggaagggccaagcgatctggatctggagcaacaaacttctcactactcaaacaagcaggtgacgtggaggagaatcccgggcctactagtatggactggatttggcgcatccttttccttgtcggcgctgctaccggcgcgcattccgggccccagctccagctgcaagagtctggacctggcctggtcaagcctagcgagacactgagcctgacctgtaccgtgtccggcgatagcatcagcagcggcgattactactggggctggatcagacagcctcctggcaaaggactggaatggatcggccacatctactacagcggcgtgacctactacaaccccagcctgaagtccagagtgaccatcagcgtggacaccagccggaaccagttctccctgaagctgtctagcgtgacagccgccgataccgccgtgtactactgcaccagagaggacagcagcaactggcggagtagaggccagggaacactggtcacagttagctctggatccggcggaggcggaagtggaggcggaggatctggcggcggaggctctttcgaagaagtgcagctggtggaatcaggcggcggactggtgcagcctggcagaagcctgagactgagctgtgccgccagcggcttcaccttcaacgactacgccatgcactgggtgcgccaggcccctggaaaaggactggaatgggtgtccacaatcagctggaacagcggcagcatcggctacgccgatagcgtgaagggccggttcaccatcagccgggacaacgccaagaagtccctgtacctccagatgaacagcctgcgggccgaggacacagccctgtactattgcgccaaggacatccagtacggcaactactactacggcatggacgtgtggggccagggaaccaccgtgaccgtgtcatctacgcgtatccagaaccctgatcctgccgtgtaccagctgcgggatagcaagagcagcgacaagagcgtgtgtctgttcaccgacttcgacagccagaccaacgtgtcccagagcaaggactccgacgtgtacatcaccgataagtgcgtgctggacatgcggagcatggacttcaagagcaactccgccgtggcctggtccaacaagtccgatttcgcctgcgccaacgccttcaacaacagcattatccccgaggacacattcttcccaagccccgagagcagcgactccaccgaccacgtgaagcccaaagagacagagaacaccaagcagcccagcaagagctgccacaagcccaaggccatcgtgcacaccgagaaagtgaacatgatgagcctgaccgtgctgggcctgcggatgctgttcgccaaaaccgtggccgtgaacttcctgctgaccgccaagctgttcttcctcctcaccgcc

SEQ ID NO: 34270 - DNA, 3006 bp, synthetic construct
  source 1..3006: mol_type = other DNA
atggccttaccagtgaccgccttgctcctgccgctggccttgctgctccacgccgccaggccggaagtgcagctggttgaatctggcggaggactggttcagcctggcggatctctgagactgtcttgtgccgccagcggcttcagcttcagcgacttttggatgagctgggtccgacaggcccctggcaaaggacttgaatgggtcgccacaatcagccaggccggcagcgagaaggactacgtggactctgtgaagggcagattcaccatcagccgggacaacgccaagaagtccctgtacctccagatgaacagcctgagagccgaggacaccgccgtgtactattgtgcctctggcgtgtacagcttcgactacagaggccagggcaccctggtcacagtctcttctggtaccggcggaggcggatctggcggcggaggtagcggtggcggaggatctgaattcgagatcgtgctgacacagagccctgccaccctgtctctgagccctggcgaaagagccaccctgagctgtagagccagccagagcgtgtccagctacctggcctggtatcagcagaagcccggccaggctccccggctgctgatctacgatgccagcaatagagccaccggcatccccgccagattttccggctctggcagcggcaccgacttcaccctgaccatcagctccctggaacccgaggacttcgccgtgtactactgccagcagcggagcaactggcccatcacattcggccagggcacccggctggaaatcaaactcgagatccagaaccctgatcctgccgtgtaccagctgcgggatagcaagagcagcgacaagagcgtgtgtctgttcaccgacttcgacagccagaccaacgtgtcccagagcaaggactccgacgtgtacatcaccgataagtgcgtgctggacatgcggagcatggacttcaagagcaactccgccgtggcctggtccaacaagtccgatttcgcctgcgccaacgccttcaacaacagcattatccccgaggacacattcttcccaagccccgagagcagcgactccaccgaccacgtgaagcccaaagagacagagaacaccaagcagcccagcaagagctgccacaagcccaaggccatcgtgcacaccgagaaagtgaacatgatgagcctgaccgtgctgggcctgcggatgctgttcgccaaaaccgtggccgtgaacttcctgctgaccgccaagctgttcttcctcctcaccgcccgcgccaagagaagcggatctggcgtgaagcagaccctgaatttcgacctgctgaagctggctggcgacgtggaatccaacccaggccctactagtatggactggatttggcgcatccttttccttgtcggcgctgctaccggcgcgcattccgggccccagctccagctgcaagagtctggacctggcctggtcaagcctagcgagacactgagcctgacctgtaccgtgtccggcgatagcatcagcagcggcgattactactggggctggatcagacagcctcctggcaaaggactggaatggatcggccacatctactacagcggcgtgacctactacaaccccagcctgaagtccagagtgaccatcagcgtggacaccagccggaaccagttctccctgaagctgtctagcgtgacagccgccgataccgccgtgtactactgcaccagagaggacagcagcaactggcggagtagaggccagggaacactggtcacagttagctctggatccggcggaggcggaagtggaggcggaggatctggcggcggaggctctttcgaagaagtgcagctggtggaatcaggcggcggactggtgcagcctggcagaagcctgagactgagctgtgccgccagcggcttcaccttcaacgactacgccatgcactgggtgcgccaggcccctggaaaaggactggaatgggtgtccacaatcagctggaacagcggcagcatcggctacgccgatagcgtgaagggccggttcaccatcagccgggacaacgccaagaagtccctgtacctccagatgaacagcctgcgggccgaggacacagccctgtactattgcgccaaggacatccagtacggcaactactactacggcatggacgtgtggggccagggaaccaccgtgaccgtgtcatctacgcgtgaggacctgaagaacgtgttcccacctgaggtggccgtgttcgagcctagcgaggccgagatcagccacacccagaaagccaccctcgtgtgcctggctaccggcttctaccccgaccatgtggaactgtcttggtgggtcaacggcaaagaggtgcacagcggcgtgtgtaccgacccccagccactgaaagaacagcccgccctgaacgacagccggtactgcctgagcagcagactgagagtgtccgccaccttctggcagaacccccggaaccacttcagatgccaggtgcagttctacggcctgagcgagaacgacgagtggacccaggacagagccaagcccgtgacccagatcgtgtctgccgaagcctggggcagagccgatgatgtgattaagatccactggcaggaaaagaagtccaacaccatcctgggcagccaggaaggcaacaccatgaagaccaacgacacctacatgaagttcagctggctgaccgtgcccgagaagtccctggacaaagaacacagatgcatcgtgcggcacgaaaacaacaagaacggcgtggaccaggaaatcatcttcccacccatcaagaccgatgtgattacaatggaccccaaggacaactgctccaaggacgccaacgataccctgctgctccagctgaccaacaccagcgcctactacatgtacttgttgctgctgctgaagtccgtggtgtacttcgccatcatcacatgctgcctgctgatggctatggtcaagcggaaggacagccgggga

SEQ ID NO: 34271 - DNA, 2172 bp, synthetic construct
  source 1..2172: mol_type = other DNA
atggccttaccagtgaccgccttgctcctgccgctggccttgctgctccacgccgccaggccggagatcgtgctgacacagagccctgccaccctgtctctgagccctggcgaaagagccaccctgagctgtagagccagccagagcgtgtccagctacctggcctggtatcagcagaagcccggccaggctccccggctgctgatctacgatgccagcaatagagccaccggcatccccgccagattttccggctctggcagcggcaccgacttcaccctgaccatcagctccctggaacccgaggacttcgccgtgtactactgccagcagcggagcaactggcccatcacattcggccagggcacccggctggaaatcaaactcgaggacctgaagaacgtgttcccacctgaggtggccgtgttcgagcctagcgaggccgagatcagccacacccagaaagccaccctcgtgtgcctggctaccggcttctaccccgaccatgtggaactgtcttggtgggtcaacggcaaagaggtgcacagcggcgtgtgtaccgacccccagccactgaaagaacagcccgccctgaacgacagccggtactgcctgagcagcagactgagagtgtccgccaccttctggcagaacccccggaaccacttcagatgccaggtgcagttctacggcctgagcgagaacgacgagtggacccaggacagagccaagcccgtgacccagatcgtgtctgccgaagcctggggcagagccgatgatgtgattaagatccactggcaggaaaagaagtccaacaccatcctgggcagccaggaaggcaacaccatgaagaccaacgacacctacatgaagttcagctggctgaccgtgcccgagaagtccctggacaaagaacacagatgcatcgtgcggcacgaaaacaacaagaacggcgtggaccaggaaatcatcttcccacccatcaagaccgatgtgattacaatggaccccaaggacaactgctccaaggacgccaacgataccctgctgctccagctgaccaacaccagcgcctactacatgtacttgttgctgctgctgaagtccgtggtgtacttcgccatcatcacatgctgcctgctgcggagaaccgccttctgctgcaacggcgagaagtctagggccaagcgatctggatctggagcaacaaacttctcactactcaaacaagcaggtgacgtggaggagaatcccgggcctactagtatggactggatttggcgcatccttttccttgtcggcgctgctaccggcgcgcattccttcgaagaagtgcagctggtggaatcaggcggcggactggtgcagcctggcagaagcctgagactgagctgtgccgccagcggcttcaccttcaacgactacgccatgcactgggtgcgccaggcccctggaaaaggactggaatgggtgtccacaatcagctggaacagcggcagcatcggctacgccgatagcgtgaagggccggttcaccatcagccgggacaacgccaagaagtccctgtacctccagatgaacagcctgcgggccgaggacacagccctgtactattgcgccaaggacatccagtacggcaactactactacggcatggacgtgtggggccagggaaccaccgtgaccgtgtcatctacgcgtatccagaaccctgatcctgccgtgtaccagctgcgggatagcaagagcagcgacaagagcgtgtgtctgttcaccgacttcgacagccagaccaacgtgtcccagagcaaggactccgacgtgtacatcaccgataagtgcgtgctggacatgcggagcatggacttcaagagcaactccgccgtggcctggtccaacaagtccgatttcgcctgcgccaacgccttcaacaacagcattatccccgaggacacattcttcccaagccccgagagcagcgactccaccgaccacgtgaagcccaaagagacagagaacaccaagcagcccagcaagagctgccacaagcccaaggccatcgtgcacaccgagaaagtgaacatgatgagcctgaccgtgctgggcctgcggatgctgttcgccaaaaccgtggccgtgaacttcctgctgaccgccaagctgttcttcctc

SEQ ID NO: 34272 - DNA, 2184 bp, synthetic construct
  source 1..2184: mol_type = other DNA
atggccttaccagtgaccgccttgctcctgccgctggccttgctgctccacgccgccaggccggagatcgtgctgacacagagccctgccaccctgtctctgagccctggcgaaagagccaccctgagctgtagagccagccagagcgtgtccagctacctggcctggtatcagcagaagcccggccaggctccccggctgctgatctacgatgccagcaatagagccaccggcatccccgccagattttccggctctggcagcggcaccgacttcaccctgaccatcagctccctggaacccgaggacttcgccgtgtactactgccagcagcggagcaactggcccatcacattcggccagggcacccggctggaaatcaaactcgagatccagaaccctgatcctgccgtgtaccagctgcgggatagcaagagcagcgacaagagcgtgtgtctgttcaccgacttcgacagccagaccaacgtgtcccagagcaaggactccgacgtgtacatcaccgataagtgcgtgctggacatgcggagcatggacttcaagagcaactccgccgtggcctggtccaacaagtccgatttcgcctgcgccaacgccttcaacaacagcattatccccgaggacacattcttcccaagccccgagagcagcgactccaccgaccacgtgaagcccaaagagacagagaacaccaagcagcccagcaagagctgccacaagcccaaggccatcgtgcacaccgagaaagtgaacatgatgagcctgaccgtgctgggcctgcggatgctgttcgccaaaaccgtggccgtgaacttcctgctgaccgccaagctgttcttcctccgcgccaagagaagcggatctggcgtgaagcagaccctgaatttcgacctgctgaagctggctggcgacgtggaatccaacccaggccctactagtatggactggatttggcgcatccttttccttgtcggcgctgctaccggcgcgcattccttcgaagaagtgcagctggtggaatcaggcggcggactggtgcagcctggcagaagcctgagactgagctgtgccgccagcggcttcaccttcaacgactacgccatgcactgggtgcgccaggcccctggaaaaggactggaatgggtgtccacaatcagctggaacagcggcagcatcggctacgccgatagcgtgaagggccggttcaccatcagccgggacaacgccaagaagtccctgtacctccagatgaacagcctgcgggccgaggacacagccctgtactattgcgccaaggacatccagtacggcaactactactacggcatggacgtgtggggccagggaaccaccgtgaccgtgtcatctacgcgtgaggacctgaagaacgtgttcccacctgaggtggccgtgttcgagcctagcgaggccgagatcagccacacccagaaagccaccctcgtgtgcctggctaccggcttctaccccgaccatgtggaactgtcttggtgggtcaacggcaaagaggtgcacagcggcgtgtgtaccgacccccagccactgaaagaacagcccgccctgaacgacagccggtactgcctgagcagcagactgagagtgtccgccaccttctggcagaacccccggaaccacttcagatgccaggtgcagttctacggcctgagcgagaacgacgagtggacccaggacagagccaagcccgtgacccagatcgtgtctgccgaagcctggggcagagccgatgatgtgattaagatccactggcaggaaaagaagtccaacaccatcctgggcagccaggaaggcaacaccatgaagaccaacgacacctacatgaagttcagctggctgaccgtgcccgagaagtccctggacaaagaacacagatgcatcgtgcggcacgaaaacaacaagaacggcgtggaccaggaaatcatcttcccacccatcaagaccgatgtgattacaatggaccccaaggacaactgctccaaggacgccaacgataccctgctgctccagctgaccaacaccagcgcctactacatgtacttgttgctgctgctgaagtccgtggtgtacttcgccatcatcacatgctgcctgctgcggagaaccgccttctgctgcaacggcgagaagtct

SEQ ID NO: 34273 - DNA, 2577 bp, synthetic construct
  source 1..2577: mol_type = other DNA
atggccttaccagtgaccgccttgctcctgccgctggccttgctgctccacgccgccaggccggaagtgcagctggttgaatctggcggaggactggttcagcctggcggatctctgagactgtcttgtgccgccagcggcttcagcttcagcgacttttggatgagctgggtccgacaggcccctggcaaaggacttgaatgggtcgccacaatcagccaggccggcagcgagaaggactacgtggactctgtgaagggcagattcaccatcagccgggacaacgccaagaagtccctgtacctccagatgaacagcctgagagccgaggacaccgccgtgtactattgtgcctctggcgtgtacagcttcgactacagaggccagggcaccctggtcacagtctcttctggtaccggcggaggcggatctggcggcggaggtagcggtggcggaggatctgaattcgagatcgtgctgacacagagccctgccaccctgtctctgagccctggcgaaagagccaccctgagctgtagagccagccagagcgtgtccagctacctggcctggtatcagcagaagcccggccaggctccccggctgctgatctacgatgccagcaatagagccaccggcatccccgccagattttccggctctggcagcggcaccgacttcaccctgaccatcagctccctggaacccgaggacttcgccgtgtactactgccagcagcggagcaactggcccatcacattcggccagggcacccggctggaaatcaaactcgaggacctgaagaacgtgttcccacctgaggtggccgtgttcgagcctagcgaggccgagatcagccacacccagaaagccaccctcgtgtgcctggctaccggcttctaccccgaccatgtggaactgtcttggtgggtcaacggcaaagaggtgcacagcggcgtgtgtaccgacccccagccactgaaagaacagcccgccctgaacgacagccggtactgcctgagcagcagactgagagtgtccgccaccttctggcagaacccccggaaccacttcagatgccaggtgcagttctacggcctgagcgagaacgacgagtggacccaggacagagccaagcccgtgacccagatcgtgtctgccgaagcctggggcagagccgatgatgtgattaagatccactggcaggaaaagaagtccaacaccatcctgggcagccaggaaggcaacaccatgaagaccaacgacacctacatgaagttcagctggctgaccgtgcccgagaagtccctggacaaagaacacagatgcatcgtgcggcacgaaaacaacaagaacggcgtggaccaggaaatcatcttcccacccatcaagaccgatgtgattacaatggaccccaaggacaactgctccaaggacgccaacgataccctgctgctccagctgaccaacaccagcgcctactacatgtacttgttgctgctgctgaagtccgtggtgtacttcgccatcatcacatgctgcctgctgcggagaaccgccttctgctgcaacggcgagaagtctagggccaagcgatctggatctggagcaacaaacttctcactactcaaacaagcaggtgacgtggaggagaatcccgggcctactagtatggactggatttggcgcatccttttccttgtcggcgctgctaccggcgcgcattccttcgaagaagtgcagctggtggaatcaggcggcggactggtgcagcctggcagaagcctgagactgagctgtgccgccagcggcttcaccttcaacgactacgccatgcactgggtgcgccaggcccctggaaaaggactggaatgggtgtccacaatcagctggaacagcggcagcatcggctacgccgatagcgtgaagggccggttcaccatcagccgggacaacgccaagaagtccctgtacctccagatgaacagcctgcgggccgaggacacagccctgtactattgcgccaaggacatccagtacggcaactactactacggcatggacgtgtggggccagggaaccaccgtgaccgtgtcatctacgcgtatccagaaccctgatcctgccgtgtaccagctgcgggatagcaagagcagcgacaagagcgtgtgtctgttcaccgacttcgacagccagaccaacgtgtcccagagcaaggactccgacgtgtacatcaccgataagtgcgtgctggacatgcggagcatggacttcaagagcaactccgccgtggcctggtccaacaagtccgatttcgcctgcgccaacgccttcaacaacagcattatccccgaggacacattcttcccaagccccgagagcagcgactccaccgaccacgtgaagcccaaagagacagagaacaccaagcagcccagcaagagctgccacaagcccaaggccatcgtgcacaccgagaaagtgaacatgatgagcctgaccgtgctgggcctgcggatgctgttcgccaaaaccgtggccgtgaacttcctgctgaccgccaagctgttcttcctc

SEQ ID NO: 34274 - DNA, 2988 bp, synthetic construct
  source 1..2988: mol_type = other DNA
atggccttaccagtgaccgccttgctcctgccgctggccttgctgctccacgccgccaggccggaagtgcagctggttgaatctggcggaggactggttcagcctggcggatctctgagactgtcttgtgccgccagcggcttcagcttcagcgacttttggatgagctgggtccgacaggcccctggcaaaggacttgaatgggtcgccacaatcagccaggccggcagcgagaaggactacgtggactctgtgaagggcagattcaccatcagccgggacaacgccaagaagtccctgtacctccagatgaacagcctgagagccgaggacaccgccgtgtactattgtgcctctggcgtgtacagcttcgactacagaggccagggcaccctggtcacagtctcttctggtaccggcggaggcggatctggcggcggaggtagcggtggcggaggatctgaattcgagatcgtgctgacacagagccctgccaccctgtctctgagccctggcgaaagagccaccctgagctgtagagccagccagagcgtgtccagctacctggcctggtatcagcagaagcccggccaggctccccggctgctgatctacgatgccagcaatagagccaccggcatccccgccagattttccggctctggcagcggcaccgacttcaccctgaccatcagctccctggaacccgaggacttcgccgtgtactactgccagcagcggagcaactggcccatcacattcggccagggcacccggctggaaatcaaactcgaggacctgaagaacgtgttcccacctgaggtggccgtgttcgagcctagcgaggccgagatcagccacacccagaaagccaccctcgtgtgcctggctaccggcttctaccccgaccatgtggaactgtcttggtgggtcaacggcaaagaggtgcacagcggcgtgtgtaccgacccccagccactgaaagaacagcccgccctgaacgacagccggtactgcctgagcagcagactgagagtgtccgccaccttctggcagaacccccggaaccacttcagatgccaggtgcagttctacggcctgagcgagaacgacgagtggacccaggacagagccaagcccgtgacccagatcgtgtctgccgaagcctggggcagagccgatgatgtgattaagatccactggcaggaaaagaagtccaacaccatcctgggcagccaggaaggcaacaccatgaagaccaacgacacctacatgaagttcagctggctgaccgtgcccgagaagtccctggacaaagaacacagatgcatcgtgcggcacgaaaacaacaagaacggcgtggaccaggaaatcatcttcccacccatcaagaccgatgtgattacaatggaccccaaggacaactgctccaaggacgccaacgataccctgctgctccagctgaccaacaccagcgcctactacatgtacttgttgctgctgctgaagtccgtggtgtacttcgccatcatcacatgctgcctgctgcggagaaccgccttctgctgcaacggcgagaagtctagggccaagcgatctggatctggagcaacaaacttctcactactcaaacaagcaggtgacgtggaggagaatcccgggcctactagtatggactggatttggcgcatccttttccttgtcggcgctgctaccggcgcgcattccgggccccagctccagctgcaagagtctggacctggcctggtcaagcctagcgagacactgagcctgacctgtaccgtgtccggcgatagcatcagcagcggcgattactactggggctggatcagacagcctcctggcaaaggactggaatggatcggccacatctactacagcggcgtgacctactacaaccccagcctgaagtccagagtgaccatcagcgtggacaccagccggaaccagttctccctgaagctgtctagcgtgacagccgccgataccgccgtgtactactgcaccagagaggacagcagcaactggcggagtagaggccagggaacactggtcacagttagctctggatccggcggaggcggaagtggaggcggaggatctggcggcggaggctctttcgaagaagtgcagctggtggaatcaggcggcggactggtgcagcctggcagaagcctgagactgagctgtgccgccagcggcttcaccttcaacgactacgccatgcactgggtgcgccaggcccctggaaaaggactggaatgggtgtccacaatcagctggaacagcggcagcatcggctacgccgatagcgtgaagggccggttcaccatcagccgggacaacgccaagaagtccctgtacctccagatgaacagcctgcgggccgaggacacagccctgtactattgcgccaaggacatccagtacggcaactactactacggcatggacgtgtggggccagggaaccaccgtgaccgtgtcatctacgcgtatccagaaccctgatcctgccgtgtaccagctgcgggatagcaagagcagcgacaagagcgtgtgtctgttcaccgacttcgacagccagaccaacgtgtcccagagcaaggactccgacgtgtacatcaccgataagtgcgtgctggacatgcggagcatggacttcaagagcaactccgccgtggcctggtccaacaagtccgatttcgcctgcgccaacgccttcaacaacagcattatccccgaggacacattcttcccaagccccgagagcagcgactccaccgaccacgtgaagcccaaagagacagagaacaccaagcagcccagcaagagctgccacaagcccaaggccatcgtgcacaccgagaaagtgaacatgatgagcctgaccgtgctgggcctgcggatgctgttcgccaaaaccgtggccgtgaacttcctgctgaccgccaagctgttcttcctc

SEQ ID NO: 34275 - DNA, 1866 bp, synthetic construct
  source 1..1866: mol_type = other DNA
atggccttaccagtgaccgccttgctcctgccgctggccttgctgctccacgccgccaggccggagatcgtgctgacacagagccctgccaccctgtctctgagccctggcgaaagagccaccctgagctgtagagccagccagagcgtgtccagctacctggcctggtatcagcagaagcccggccaggctccccggctgctgatctacgatgccagcaatagagccaccggcatccccgccagattttccggctctggcagcggcaccgacttcaccctgaccatcagctccctggaacccgaggacttcgccgtgtactactgccagcagcggagcaactggcccatcacattcggccagggcacccggctggaaatcaaactcgaggacctgaagaacgtgttcccacctgaggtggccgtgttcgagcctagcgaggccgagatcagccacacccagaaagccaccctcgtgtgcctggctaccggcttctaccccgaccatgtggaactgtcttggtgggtcaacggcaaagaggtgcacagcggcgtgtctaccgacccccagccactgaaagaacagcccgccctgaacgacagccggtactgcctgagcagcagactgagagtgtccgccaccttctggcagaacccccggaaccacttcagatgccaggtgcagttctacggcctgagcgagaacgacgagtggacccaggacagagccaagcccgtgacccagatcgtgtctgccgaagcctggggcagagccgattgcgacgtgaagctggtggaaaagagcttcgagacagacaccaacctgaacttccagaacctgagcgtgatcggcttcagaatcctgctgctgaaagtggccggctttaacctgctgatgaccctgcggctgtggtccagcagggccaagcgatctggatctggagcaacaaacttctcactactcaaacaagcaggtgacgtggaggagaatcccgggcctactagtatggactggatttggcgcatccttttccttgtcggcgctgctaccggcgcgcattccttcgaagaagtgcagctggtggaatcaggcggcggactggtgcagcctggcagaagcctgagactgagctgtgccgccagcggcttcaccttcaacgactacgccatgcactgggtgcgccaggcccctggaaaaggactggaatgggtgtccacaatcagctggaacagcggcagcatcggctacgccgatagcgtgaagggccggttcaccatcagccgggacaacgccaagaagtccctgtacctccagatgaacagcctgcgggccgaggacacagccctgtactattgcgccaaggacatccagtacggcaactactactacggcatggacgtgtggggccagggaaccaccgtgaccgtgtcatctacgcgtatccagaaccctgatcctgccgtgtaccagctgcgggatagcaagagcagcgacaagagcgtgtgtctgttcaccgacttcgacagccagaccaacgtgtcccagagcaaggactccgacgtgtacatcaccgataagaccgtgctggacatgcggagcatggacttcaagagcaactccgccgtggcctggtccaacaagtccgatttcgcctgcgccaacgccttcaacaacagcattatccccgaggacacattcttcccaagccccgagagcagctgcggctttaccagcgagagctaccagcagggcgtgctgagcgccaccatcctgtacgagatcctgctgggcaaggccaccctgtacgccgtgctggtgtctgccctggtgctgatggctatggtcaagcggaaggacagccgggga

SEQ ID NO: 34276 - DNA, 1866 bp, synthetic construct
  source 1..1866: mol_type = other DNA
atggccttaccagtgaccgccttgctcctgccgctggccttgctgctccacgccgccaggccggagatcgtgctgacacagagccctgccaccctgtctctgagccctggcgaaagagccaccctgagctgtagagccagccagagcgtgtccagctacctggcctggtatcagcagaagcccggccaggctccccggctgctgatctacgatgccagcaatagagccaccggcatccccgccagattttccggctctggcagcggcaccgacttcaccctgaccatcagctccctggaacccgaggacttcgccgtgtactactgccagcagcggagcaactggcccatcacattcggccagggcacccggctggaaatcaaactcgaggacctgaagaacgtgttcccacctgaggtggccgtgttcgagcctagcgaggccgagatcagccacacccagaaagccaccctcgtgtgcctggctaccggcttctaccccgaccatgtggaactgtcttggtgggtcaacggcaaagaggtgcacagcggcgtgtctaccgacccccagccactgaaagaacagcccgccctgaacgacagccggtactgcctgagcagcagactgagagtgtccgccaccttctggcagaacccccggaaccacttcagatgccaggtgcagttctacggcctgagcgagaacgacgagtggacccaggacagagccaagcccgtgacccagatcgtgtctgccgaagcctggggcagagccgattgcggctttaccagcgagagctaccagcagggcgtgctgagcgccaccaacctgagcgtgatcggcttcagaatcctgctgctgaaagtggccggctttaacctgctgatgaccctgcggctgtggtccagcagggccaagcgatctggatctggagcaacaaacttctcactactcaaacaagcaggtgacgtggaggagaatcccgggcctactagtatggactggatttggcgcatccttttccttgtcggcgctgctaccggcgcgcattccttcgaagaagtgcagctggtggaatcaggcggcggactggtgcagcctggcagaagcctgagactgagctgtgccgccagcggcttcaccttcaacgactacgccatgcactgggtgcgccaggcccctggaaaaggactggaatgggtgtccacaatcagctggaacagcggcagcatcggctacgccgatagcgtgaagggccggttcaccatcagccgggacaacgccaagaagtccctgtacctccagatgaacagcctgcgggccgaggacacagccctgtactattgcgccaaggacatccagtacggcaactactactacggcatggacgtgtggggccagggaaccaccgtgaccgtgtcatctacgcgtatccagaaccctgatcctgccgtgtaccagctgcgggatagcaagagcagcgacaagagcgtgtgtctgttcaccgacttcgacagccagaccaacgtgtcccagagcaaggactccgacgtgtacatcaccgataagaccgtgctggacatgcggagcatggacttcaagagcaactccgccgtggcctggtccaacaagtccgatttcgcctgcgccaacgccttcaacaacagcattatccccgaggacacattcttcccaagccccgagagcagctgcgacgtgaagctggtggaaaagagcttcgagacagacaccaacctgaacttccagatcctgtacgagatcctgctgggcaaggccaccctgtacgccgtgctggtgtctgccctggtgctgatggctatggtcaagcggaaggacagccgggga

SEQ ID NO: 34277 - DNA, 2178 bp, synthetic construct
  source 1..2178: mol_type = other DNA
atggccttaccagtgaccgccttgctcctgccgctggccttgctgctccacgccgccaggccggagatcgtgctgacacagagccctgccaccctgtctctgagccctggcgaaagagccaccctgagctgtagagccagccagagcgtgtccagctacctggcctggtatcagcagaagcccggccaggctccccggctgctgatctacgatgccagcaatagagccaccggcatccccgccagattttccggctctggcagcggcaccgacttcaccctgaccatcagctccctggaacccgaggacttcgccgtgtactactgccagcagcggagcaactggcccatcacattcggccagggcacccggctggaaatcaaactcgaggacctgaagaacgtgttcccacctgaggtggccgtgttcgagcctagcgaggccgagatcagccacacccagaaagccaccctcgtgtgcctggctaccggcttctaccccgaccatgtggaactgtcttggtgggtcaacggcaaagaggtgcacagcggcgtgtctaccgacccccagccactgaaagaacagcccgccctgaacgacagccggtactgcctgagcagcagactgagagtgtccgccaccttctggcagaacccccggaaccacttcagatgccaggtgcagttctacggcctgagcgagaacgacgagtggacccaggacagagccaagcccgtgacccagatcgtgtctgccgaagcctggggcagagccgatgatgtgattaagatccactggcaggaaaagaagtccaacaccatcctgggcagccaggaaggcaacaccatgaagaccaacgacacctacatgaagttcagctggctgaccgtgcccgagaagtccctggacaaagaacacagatgcatcgtgcggcacgaaaacaacaagaacggcgtggaccaggaaatcatcttcccacccatcaagaccgatgtgattacaatggaccccaaggacaactgctccaaggacgccaacgataccctgctgctccagctgaccaacaccagcgcctactacatgtacttgttgctgctgctgaagtccgtggtgtacttcgccatcatcacatgctgcctgctgatggctatggtcaagcggaaggacagccggggaagggccaagcgatctggatctggagcaacaaacttctcactactcaaacaagcaggtgacgtggaggagaatcccgggcctactagtatggactggatttggcgcatccttttccttgtcggcgctgctaccggcgcgcattccttcgaagaagtgcagctggtggaatcaggcggcggactggtgcagcctggcagaagcctgagactgagctgtgccgccagcggcttcaccttcaacgactacgccatgcactgggtgcgccaggcccctggaaaaggactggaatgggtgtccacaatcagctggaacagcggcagcatcggctacgccgatagcgtgaagggccggttcaccatcagccgggacaacgccaagaagtccctgtacctccagatgaacagcctgcgggccgaggacacagccctgtactattgcgccaaggacatccagtacggcaactactactacggcatggacgtgtggggccagggaaccaccgtgaccgtgtcatctacgcgtatccagaaccctgatcctgccgtgtaccagctgcgggatagcaagagcagcgacaagagcgtgtgtctgttcaccgacttcgacagccagaccaacgtgtcccagagcaaggactccgacgtgtacatcaccgataagaccgtgctggacatgcggagcatggacttcaagagcaactccgccgtggcctggtccaacaagtccgatttcgcctgcgccaacgccttcaacaacagcattatccccgaggacacattcttcccaagccccgagagcagcgactccaccgaccacgtgaagcccaaagagacagagaacaccaagcagcccagcaagagctgccacaagcccaaggccatcgtgcacaccgagaaagtgaacatgatgagcctgaccgtgctgggcctgcggatgctgttcgccaaaaccgtggccgtgaacttcctgctgaccgccaagctgttcttcctcctcaccgcc

SEQ ID NO: 34278 - DNA, 2172 bp, synthetic construct
  source 1..2172: mol_type = other DNA
atggccttaccagtgaccgccttgctcctgccgctggccttgctgctccacgccgccaggccggagatcgtgctgacacagagccctgccaccctgtctctgagccctggcgaaagagccaccctgagctgtagagccagccagagcgtgtccagctacctggcctggtatcagcagaagcccggccaggctccccggctgctgatctacgatgccagcaatagagccaccggcatccccgccagattttccggctctggcagcggcaccgacttcaccctgaccatcagctccctggaacccgaggacttcgccgtgtactactgccagcagcggagcaactggcccatcacattcggccagggcacccggctggaaatcaaactcgaggacctgaagaacgtgttcccacctgaggtggccgtgttcgagcctagcgaggccgagatcagccacacccagaaagccaccctcgtgtgcctggctaccggcttctaccccgaccatgtggaactgtcttggtgggtcaacggcaaagaggtgcacagcggcgtgtctaccgacccccagccactgaaagaacagcccgccctgaacgacagccggtactgcctgagcagcagactgagagtgtccgccaccttctggcagaacccccggaaccacttcagatgccaggtgcagttctacggcctgagcgagaacgacgagtggacccaggacagagccaagcccgtgacccagatcgtgtctgccgaagcctggggcagagccgatgatgtgattaagatccactggcaggaaaagaagtccaacaccatcctgggcagccaggaaggcaacaccatgaagaccaacgacacctacatgaagttcagctggctgaccgtgcccgagaagtccctggacaaagaacacagatgcatcgtgcggcacgaaaacaacaagaacggcgtggaccaggaaatcatcttcccacccatcaagaccgatgtgattacaatggaccccaaggacaactgctccaaggacgccaacgataccctgctgctccagctgaccaacaccagcgcctactacatgtacttgttgctgctgctgaagtccgtggtgtacttcgccatcatcacatgctgcctgctgcggagaaccgccttctgctgcaacggcgagaagtctagggccaagcgatctggatctggagcaacaaacttctcactactcaaacaagcaggtgacgtggaggagaatcccgggcctactagtatggactggatttggcgcatccttttccttgtcggcgctgctaccggcgcgcattccttcgaagaagtgcagctggtggaatcaggcggcggactggtgcagcctggcagaagcctgagactgagctgtgccgccagcggcttcaccttcaacgactacgccatgcactgggtgcgccaggcccctggaaaaggactggaatgggtgtccacaatcagctggaacagcggcagcatcggctacgccgatagcgtgaagggccggttcaccatcagccgggacaacgccaagaagtccctgtacctccagatgaacagcctgcgggccgaggacacagccctgtactattgcgccaaggacatccagtacggcaactactactacggcatggacgtgtggggccagggaaccaccgtgaccgtgtcatctacgcgtatccagaaccctgatcctgccgtgtaccagctgcgggatagcaagagcagcgacaagagcgtgtgtctgttcaccgacttcgacagccagaccaacgtgtcccagagcaaggactccgacgtgtacatcaccgataagaccgtgctggacatgcggagcatggacttcaagagcaactccgccgtggcctggtccaacaagtccgatttcgcctgcgccaacgccttcaacaacagcattatccccgaggacacattcttcccaagccccgagagcagcgactccaccgaccacgtgaagcccaaagagacagagaacaccaagcagcccagcaagagctgccacaagcccaaggccatcgtgcacaccgagaaagtgaacatgatgagcctgaccgtgctgggcctgcggatgctgttcgccaaaaccgtggccgtgaacttcctgctgaccgccaagctgttcttcctc

SEQ ID NO: 34279 - DNA, 2604 bp, synthetic construct
  source 1..2604: mol_type = other DNA
atggccttaccagtgaccgccttgctcctgccgctggccttgctgctccacgccgccaggccgctcgaggaggacctgaagaacgtgttcccacctgaggtggccgtgttcgagcctagcgaggccgagatcagccacacccagaaagccaccctcgtgtgcctggctaccggcttctaccccgaccatgtggaactgtcttggtgggtcaacggcaaagaggtgcacagcggcgtgtgtaccgacccccagccactgaaagaacagcccgccctgaacgacagccggtactgcctgagcagcagactgagagtgtccgccaccttctggcagaacccccggaaccacttcagatgccaggtgcagttctacggcctgagcgagaacgacgagtggacccaggacagagccaagcccgtgacccagatcgtgtctgccgaagcctggggcagagccgattgcggctttaccagcgagagctaccagcagggcgtgctgagcgccaccaacctgagcgtgatcggcttcagaatcctgctgctgaaagtggccggctttaacctgctgatgaccctgcggctgtggtccagcagggccaagcgatctggatctggagcaacaaacttctcactactcaaacaagcaggtgacgtggaggagaatcccgggcctactagcatggccttaccagtgaccgccttgctcctgccgctggccttgctgctccacgccgccaggccggagatcgtgctgacacagagccctgccaccctgtctctgagccctggcgaaagagccaccctgagctgtagagccagccagagcgtgtccagctacctggcctggtatcagcagaagcccggccaggctccccggctgctgatctacgatgccagcaatagagccaccggcatccccgccagattttccggctctggcagcggcaccgacttcaccctgaccatcagctccctggaacccgaggacttcgccgtgtactactgccagcagcggagcaactggcccatcacattcggccagggcacccggctggaaatcaaaggcggaggcggaagtggaggcggaggatctggcggcggaggctctgaagtgcagctggtggaatcaggcggcggactggtgcagcctggcagaagcctgagactgagctgtgccgccagcggcttcaccttcaacgactacgccatgcactgggtgcgccaggcccctggaaaaggactggaatgggtgtccacaatcagctggaacagcggcagcatcggctacgccgatagcgtgaagggccggttcaccatcagccgggacaacgccaagaagtccctgtacctccagatgaacagcctgcgggccgaggacacagccctgtactattgcgccaaggacatccagtacggcaactactactacggcatggacgtgtggggccagggaaccaccgtgaccgtgtcatctacgcgtatccagaaccctgatcctgccgtgtaccagctgcgggatagcaagagcagcgacaagagcgtgtgtctgttcaccgacttcgacagccagaccaacgtgtcccagagcaaggactccgacgtgtacatcaccgataagtgcgtgctggacatgcggagcatggacttcaagagcaactccgccgtggcctggtccaacaagtccgatttcgcctgcgccaacgccttcaacaacagcattatccccgaggacacattcttcccaagccccgagagcagctgcgacgtgaagctggtggaaaagagcttcgagacagacaccaacctgaacttccagatcctgtacgaggtgatcggcttcagaatcctgctgctgaaagtggccggctttaacctgctgatgaccctgcggctgtggtccagccgcgccaagagaagcggatctggcgtgaagcagaccctgaatttcgacctgctgaagctggctggcgacgtggaatccaacccaggcccttctagaggccatatgaccgagtacaagcccacggtgcgcctcgccacccgcgacgacgtccccagggccgtacgcaccctcgccgccgcgttcgccgactaccccgccacgcgccacaccgtcgatccggaccgccacatcgagcgggtcaccgagctgcaagaactcttcctcacgcgcgtcgggctcgacatcggcaaggtgtgggtcgcggacgacggcgccgcggtggcggtctggaccacgccggagagcgtcgaagcgggggcggtgttcgccgagatcggcccgcgcatggccgagttgagcggttcccggctggccgcgcagcaacagatggaaggcctcctggcgccgcaccggcccaaggagcccgcgtggttcctggccaccgtcggcgtctcgcccgaccaccagggcaagggtctgggcagcgccgtcgtgctccccggagtggaggcggccgagcgcgccggggtgcccgccttcctggagacctccgcgccccgcaacctccccttctacgagcggctcggcttcaccgtcaccgccgacgtcgaggtgcccgaaggaccgcgcacctggtgcatgacccgcaagcccggtgcctga

SEQ ID NO: 34280 - DNA, 2604 bp, synthetic construct
  source 1..2604: mol_type = other DNA
atggccttaccagtgaccgccttgctcctgccgctggccttgctgctccacgccgccaggccgctcgagatccagaaccctgatcctgccgtgtaccagctgcgggatagcaagagcagcgacaagagcgtgtgtctgttcaccgacttcgacagccagaccaacgtgtcccagagcaaggactccgacgtgtacatcaccgataagtgcgtgctggacatgcggagcatggacttcaagagcaactccgccgtggcctggtccaacaagtccgatttcgcctgcgccaacgccttcaacaacagcattatccccgaggacacattcttcccaagccccgagagcagctgcgacgtgaagctggtggaaaagagcttcgagacagacaccaacctgaacttccagatcctgtacgaggtgatcggcttcagaatcctgctgctgaaagtggccggctttaacctgctgatgaccctgcggctgtggtccagcagggccaagcgatctggatctggagcaacaaacttctcactactcaaacaagcaggtgacgtggaggagaatcccgggcctactagcatggccttaccagtgaccgccttgctcctgccgctggccttgctgctccacgccgccaggccggagatcgtgctgacacagagccctgccaccctgtctctgagccctggcgaaagagccaccctgagctgtagagccagccagagcgtgtccagctacctggcctggtatcagcagaagcccggccaggctccccggctgctgatctacgatgccagcaatagagccaccggcatccccgccagattttccggctctggcagcggcaccgacttcaccctgaccatcagctccctggaacccgaggacttcgccgtgtactactgccagcagcggagcaactggcccatcacattcggccagggcacccggctggaaatcaaaggcggaggcggaagtggaggcggaggatctggcggcggaggctctgaagtgcagctggtggaatcaggcggcggactggtgcagcctggcagaagcctgagactgagctgtgccgccagcggcttcaccttcaacgactacgccatgcactgggtgcgccaggcccctggaaaaggactggaatgggtgtccacaatcagctggaacagcggcagcatcggctacgccgatagcgtgaagggccggttcaccatcagccgggacaacgccaagaagtccctgtacctccagatgaacagcctgcgggccgaggacacagccctgtactattgcgccaaggacatccagtacggcaactactactacggcatggacgtgtggggccagggaaccaccgtgaccgtgtcatctacgcgtgaggacctgaagaacgtgttcccacctgaggtggccgtgttcgagcctagcgaggccgagatcagccacacccagaaagccaccctcgtgtgcctggctaccggcttctaccccgaccatgtggaactgtcttggtgggtcaacggcaaagaggtgcacagcggcgtgtgtaccgacccccagccactgaaagaacagcccgccctgaacgacagccggtactgcctgagcagcagactgagagtgtccgccaccttctggcagaacccccggaaccacttcagatgccaggtgcagttctacggcctgagcgagaacgacgagtggacccaggacagagccaagcccgtgacccagatcgtgtctgccgaagcctggggcagagccgattgcggctttaccagcgagagctaccagcagggcgtgctgagcgccaccaacctgagcgtgatcggcttcagaatcctgctgctgaaagtggccggctttaacctgctgatgaccctgcggctgtggtccagccgcgccaagagaagcggatctggcgtgaagcagaccctgaatttcgacctgctgaagctggctggcgacgtggaatccaacccaggcccttctagaggccatatgaccgagtacaagcccacggtgcgcctcgccacccgcgacgacgtccccagggccgtacgcaccctcgccgccgcgttcgccgactaccccgccacgcgccacaccgtcgatccggaccgccacatcgagcgggtcaccgagctgcaagaactcttcctcacgcgcgtcgggctcgacatcggcaaggtgtgggtcgcggacgacggcgccgcggtggcggtctggaccacgccggagagcgtcgaagcgggggcggtgttcgccgagatcggcccgcgcatggccgagttgagcggttcccggctggccgcgcagcaacagatggaaggcctcctggcgccgcaccggcccaaggagcccgcgtggttcctggccaccgtcggcgtctcgcccgaccaccagggcaagggtctgggcagcgccgtcgtgctccccggagtggaggcggccgagcgcgccggggtgcccgccttcctggagacctccgcgccccgcaacctccccttctacgagcggctcggcttcaccgtcaccgccgacgtcgaggtgcccgaaggaccgcgcacctggtgcatgacccgcaagcccggtgcctga

SEQ ID NO: 34281 - DNA, 2604 bp, synthetic construct; identical to SEQ ID NO: 34279
  source 1..2604: mol_type = other DNA

SEQ ID NO: 34282 - DNA, 2928 bp, synthetic construct
  source 1..2928: mol_type = other DNA
atggccttaccagtgaccgccttgctcctgccgctggccttgctgctccacgccgccaggccgctcgaggaggacctgaagaacgtgttcccacctgaggtggccgtgttcgagcctagcgaggccgagatcagccacacccagaaagccaccctcgtgtgcctggctaccggcttctaccccgaccatgtggaactgtcttggtgggtcaacggcaaagaggtgcacagcggcgtgtctaccgacccccagccactgaaagaacagcccgccctgaacgacagccggtactgcctgagcagcagactgagagtgtccgccaccttctggcagaacccccggaaccacttcagatgccaggtgcagttctacggcctgagcgagaacgacgagtggacccaggacagagccaagcccgtgacccagatcgtgtctgccgaagcctggggcagagccgatgatgtgattaagatccactggcaggaaaagaagtccaacaccatcctgggcagccaggaaggcaacaccatgaagaccaacgacacctacatgaagttcagctggctgaccgtgcccgagaagtccctggacaaagaacacagatgcatcgtgcggcacgaaaacaacaagaacggcgtggaccaggaaatcatcttcccacccatcaagaccgatgtgattacaatggaccccaaggacaactgctccaaggacgccaacgataccctgctgctccagctgaccaacaccagcgcctactacatgtacttgttgctgctgctgaagtccgtggtgtacttcgccatcatcacatgctgcctgctgatggctatggtcaagcggaaggacagccggggaagggccaagcgatctggatctggagcaacaaacttctcactactcaaacaagcaggtgacgtggaggagaatcccgggcctactagcatggccttaccagtgaccgccttgctcctgccgctggccttgctgctccacgccgccaggccggagatcgtgctgacacagagccctgccaccctgtctctgagccctggcgaaagagccaccctgagctgtagagccagccagagcgtgtccagctacctggcctggtatcagcagaagcccggccaggctccccggctgctgatctacgatgccagcaatagagccaccggcatccccgccagattttccggctctggcagcggcaccgacttcaccctgaccatcagctccctggaacccgaggacttcgccgtgtactactgccagcagcggagcaactggcccatcacattcggccagggcacccggctggaaatcaaaggcggaggcggaagtggaggcggaggatctggcggcggaggctctgaagtgcagctggtggaatcaggcggcggactggtgcagcctggcagaagcctgagactgagctgtgccgccagcggcttcaccttcaacgactacgccatgcactgggtgcgccaggcccctggaaaaggactggaatgggtgtccacaatcagctggaacagcggcagcatcggctacgccgatagcgtgaagggccggttcaccatcagccgggacaacgccaagaagtccctgtacctccagatgaacagcctgcgggccgaggacacagccctgtactattgcgccaaggacatccagtacggcaactactactacggcatggacgtgtggggccagggaaccaccgtgaccgtgtcatctacgcgtatccagaaccctgatcctgccgtgtaccagctgcgggatagcaagagcagcgacaagagcgtgtgtctgttcaccgacttcgacagccagaccaacgtgtcccagagcaaggactccgacgtgtacatcaccgataagaccgtgctggacatgcggagcatggacttcaagagcaactccgccgtggcctggtccaacaagtccgatttcgcctgcgccaacgccttcaacaacagcattatccccgaggacacattcttcccaagccccgagagcagcgactccaccgaccacgtgaagcccaaagagacagagaacaccaagcagcccagcaagagctgccacaagcccaaggccatcgtgcacaccgagaaagtgaacatgatgagcctgaccgtgctgggcctgcggatgctgttcgccaaaaccgtggccgtgaacttcctgctgaccgccaagctgttcttcctcctcaccgcccgcgccaagagaagcggatctggcgtgaagcagaccctgaatttcgacctgctgaagctggctggcgacgtggaatccaacccaggcccttctagaggccatatgaccgagtacaagcccacggtgcgcctcgccacccgcgacgacgtccccagggccgtacgcaccctcgccgccgcgttcgccgactaccccgccacgcgccacaccgtcgatccggaccgccacatcgagcgggtcaccgagctgcaagaactcttcctcacgcgcgtcgggctcgacatcggcaaggtgtgggtcgcggacgacggcgccgcggtggcggtctggaccacgccggagagcgtcgaagcgggggcggtgttcgccgagatcggcccgcgcatggccgagttgagcggttcccggctggccgcgcagcaacagatggaaggcctcctggcgccgcaccggcccaaggagcccgcgtggttcctggccaccgtcggcgtctcgcccgaccaccagggcaagggtctgggcagcgccgtcgtgctccccggagtggaggcggccgagcgcgccggggtgcccgccttcctggagacctccgcgccccgcaacctccccttctacgagcggctcggcttcaccgtcaccgccgacgtcgaggtgcccgaaggaccgcgcacctggtgcatgacccgcaagcccggtgcctga

SEQ ID NO: 34283 - DNA, 2928 bp, synthetic construct
  source 1..2928: mol_type = other DNA
atggccttaccagtgaccgccttgctcctgccgctggccttgctgctccacgccgccaggccgctcgagatccagaaccctgatcctgccgtgtaccagctgcgggatagcaagagcagcgacaagagcgtgtgtctgttcaccgacttcgacagccagaccaacgtgtcccagagcaaggactccgacgtgtacatcaccgataagaccgtgctggacatgcggagcatggacttcaagagcaactccgccgtggcctggtccaacaagtccgatttcgcctgcgccaacgccttcaacaacagcattatccccgaggacacattcttcccaagccccgagagcagcgactccaccgaccacgtgaagcccaaagagacagagaacaccaagcagcccagcaagagctgccacaagcccaaggccatcgtgcacaccgagaaagtgaacatgatgagcctgaccgtgctgggcctgcggatgctgttcgccaaaaccgtggccgtgaacttcctgctgaccgccaagctgttcttcctcctcaccgccagggccaagcgatctggatctggagcaacaaacttctcactactcaaacaagcaggtgacgtggaggagaatcccgggcctactagcatggccttaccagtgaccgccttgctcctgccgctggccttgctgctccacgccgccaggccggagatcgtgctgacacagagccctgccaccctgtctctgagccctggcgaaagagccaccctgagctgtagagccagccagagcgtgtccagctacctggcctggtatcagcagaagcccggccaggctccccggctgctgatctacgatgccagcaatagagccaccggcatccccgccagattttccggctctggcagcggcaccgacttcaccctgaccatcagctccctggaacccgaggacttcgccgtgtactactgccagcagcggagcaactggcccatcacattcggccagggcacccggctggaaatcaaaggcggaggcggaagtggaggcggaggatctggcggcggaggctctgaagtgcagctggtggaatcaggcggcggactggtgcagcctggcagaagcctgagactgagctgtgccgccagcggcttcaccttcaacgactacgccatgcactgggtgcgccaggcccctggaaaaggactggaatgggtgtccacaatcagctggaacagcggcagcatcggctacgccgatagcgtgaagggccggttcaccatcagccgggacaacgccaagaagtccctgtacctccagatgaacagcctgcgggccgaggacacagccctgtactattgcgccaaggacatccagtacggcaactactactacggcatggacgtgtggggccagggaaccaccgtgaccgtgtcatctacgcgtgaggacctgaagaacgtgttcccacctgaggtggccgtgttcgagcctagcgaggccgagatcagccacacccagaaagccaccctcgtgtgcctggctaccggcttctaccccgaccatgtggaactgtcttggtgggtcaacggcaaagaggtgcacagcggcgtgtctaccgacccccagccactgaaagaacagcccgccctgaacgacagccggtactgcctgagcagcagactgagagtgtccgccaccttctggcagaacccccggaaccacttcagatgccaggtgcagttctacggcctgagcgagaacgacgagtggacccaggacagagccaagcccgtgacccagatcgtgtctgccgaagcctggggcagagccgatgatgtgattaagatccactggcaggaaaagaagtccaacaccatcctgggcagccaggaaggcaacaccatgaagaccaacgacacctacatgaagttcagctggctgaccgtgcccgagaagtccctggacaaagaacacagatgcatcgtgcggcacgaaaacaacaagaacggcgtggaccaggaaatcatcttcccacccatcaagaccgatgtgattacaatggaccccaaggacaactgctccaaggacgccaacgataccctgctgctccagctgaccaacaccagcgcctactacatgtacttgttgctgctgctgaagtccgtggtgtacttcgccatcatcacatgctgcctgctgatggctatggtcaagcggaaggacagccggggacgcgccaagagaagcggatctggcgtgaagcagaccctgaatttcgacctgctgaagctggctggcgacgtggaatccaacccaggcccttctagaggccatatgaccgagtacaagcccacggtgcgcctcgccacccgcgacgacgtccccagggccgtacgcaccctcgccgccgcgttcgccgactaccccgccacgcgccacaccgtcgatccggaccgccacatcgagcgggtcaccgagctgcaagaactcttcctcacgcgcgtcgggctcgacatcggcaaggtgtgggtcgcggacgacggcgccgcggtggcggtctggaccacgccggagagcgtcgaagcgggggcggtgttcgccgagatcggcccgcgcatggccgagttgagcggttcccggctggccgcgcagcaacagatggaaggcctcctggcgccgcaccggcccaaggagcccgcgtggttcctggccaccgtcggcgtctcgcccgaccaccagggcaagggtctgggcagcgccgtcgtgctccccggagtggaggcggccgagcgcgccggggtgcccgccttcctggagacctccgcgccccgcaacctccccttctacgagcggctcggcttcaccgtcaccgccgacgtcgaggtgcccgaaggaccgcgcacctggtgcatgacccgcaagcccggtgcctga

SEQ ID NO: 34284 - DNA, 2922 bp, synthetic construct
  source 1..2922: mol_type = other DNA
atggccttaccagtgaccgccttgctcctgccgctggccttgctgctccacgccgccaggccgctcgaggaggacctgaagaacgtgttcccacctgaggtggccgtgttcgagcctagcgaggccgagatcagccacacccagaaagccaccctcgtgtgcctggctaccggcttctaccccgaccatgtggaactgtcttggtgggtcaacggcaaagaggtgcacagcggcgtgtgtaccgacccccagccactgaaagaacagcccgccctgaacgacagccggtactgcctgagcagcagactgagagtgtccgccaccttctggcagaacccccggaaccacttcagatgccaggtgcagttctacggcctgagcgagaacgacgagtggacccaggacagagccaagcccgtgacccagatcgtgtctgccgaagcctggggcagagccgatgatgtgattaagatccactggcaggaaaagaagtccaacaccatcctgggcagccaggaaggcaacaccatgaagaccaacgacacctacatgaagttcagctggctgaccgtgcccgagaagtccctggacaaagaacacagatgcatcgtgcggcacgaaaacaacaagaacggcgtggaccaggaaatcatcttcccacccatcaagaccgatgtgattacaatggaccccaaggacaactgctccaaggacgccaacgataccctgctgctccagctgaccaacaccagcgcctactacatgtacttgttgctgctgctgaagtccgtggtgtacttcgccatcatcacatgctgcctgctgcggagaaccgccttctgctgcaacggcgagaagtctagggccaagcgatctggatctggagcaacaaacttctcactactcaaacaagcaggtgacgtggaggagaatcccgggcctactagcatggccttaccagtgaccgccttgctcctgccgctggccttgctgctccacgccgccaggccggagatcgtgctgacacagagccctgccaccctgtctctgagccctggcgaaagagccaccctgagctgtagagccagccagagcgtgtccagctacctggcctggtatcagcagaagcccggccaggctccccggctgctgatctacgatgccagcaatagagccaccggcatccccgccagattttccggctctggcagcggcaccgacttcaccctgaccatcagctccctggaacccgaggacttcgccgtgtactactgccagcagcggagcaactggcccatcacattcggccagggcacccggctggaaatcaaaggcggaggcggaagtggaggcggaggatctggcggcggaggctctgaagtgcagctggtggaatcaggcggcggactggtgcagcctggcagaagcctgagactgagctgtgccgccagcggcttcaccttcaacgactacgccatgcactgggtgcgccaggcccctggaaaaggactggaatgggtgtccacaatcagctggaacagcggcagcatcggctacgccgatagcgtgaagggccggttcaccatcagccgggacaacgccaagaagtccctgtacctccagatgaacagcctgcgggccgaggacacagccctgtactattgcgccaaggacatccagtacggcaactactactacggcatggacgtgtggggccagggaaccaccgtgaccgtgtcatctacgcgtatccagaaccctgatcctgccgtgtaccagctgcgggatagcaagagcagcgacaagagcgtgtgtctgttcaccgacttcgacagccagaccaacgtgtcccagagcaaggactccgacgtgtacatcaccgataagtgcgtgctggacatgcggagcatggacttcaagagcaactccgccgtggcctggtccaacaagtccgatttcgcctgcgccaacgccttcaacaacagcattatccccgaggacacattcttcccaagccccgagagcagcgactccaccgaccacgtgaagcccaaagagacagagaacaccaagcagcccagcaagagctgccacaagcccaaggccatcgtgcacaccgagaaagtgaacatgatgagcctgaccgtgctgggcctgcggatgctgttcgccaaaaccgtggccgtgaacttcctgctgaccgccaagctgttcttcctccgcgccaagagaagcggatctggcgtgaagcagaccctgaatttcgacctgctgaagctggctggcgacgtggaatccaacccaggcccttctagaggccatatgaccgagtacaagcccacggtgcgcctcgccacccgcgacgacgtccccagggccgtacgcaccctcgccgccgcgttcgccgactaccccgccacgcgccacaccgtcgatccggaccgccacatcgagcgggtcaccgagctgcaagaactcttcctcacgcgcgtcgggctcgacatcggcaaggtgtgggtcgcggacgacggcgccgcggtggcggtctggaccacgccggagagcgtcgaagcgggggcggtgttcgccgagatcggcccgcgcatggccgagttgagcggttcccggctggccgcgcagcaacagatggaaggcctcctggcgccgcaccggcccaaggagcccgcgtggttcctggccaccgtcggcgtctcgcccgaccaccagggcaagggtctgggcagcgccgtcgtgctccccggagtggaggcggccgagcgcgccggggtgcccgccttcctggagacctccgcgccccgcaacctccccttctacgagcggctcggcttcaccgtcaccgccgacgtcgaggtgcccgaaggaccgcgcacctggtgcatgacccgcaagcccggtgcctga

SEQ ID NO: 34285 - DNA, 2922 bp, synthetic construct
  source 1..2922: mol_type = other DNA
atggccttaccagtgaccgccttgctcctgccgctggccttgctgctccacgccgccaggccgctcgagatccagaaccctgatcctgccgtgtaccagctgcgggatagcaagagcagcgacaagagcgtgtgtctgttcaccgacttcgacagccagaccaacgtgtcccagagcaaggactccgacgtgtacatcaccgataagtgcgtgctggacatgcggagcatggacttcaagagcaactccgccgtggcctggtccaacaagtccgatttcgcctgcgccaacgccttcaacaacagcattatccccgaggacacattcttcccaagccccgagagcagcgactccaccgaccacgtgaagcccaaagagacagagaacaccaagcagcccagcaagagctgccacaagcccaaggccatcgtgcacaccgagaaagtgaacatgatgagcctgaccgtgctgggcctgcggatgctgttcgccaaaaccgtggccgtgaacttcctgctgaccgccaagctgttcttcctcagggccaagcgatctggatctggagcaacaaacttctcactactcaaacaagcaggtgacgtggaggagaatcccgggcctactagcatggccttaccagtgaccgccttgctcctgccgctggccttgctgctccacgccgccaggccggagatcgtgctgacacagagccctgccaccctgtctctgagccctggcgaaagagccaccctgagctgtagagccagccagagcgtgtccagctacctggcctggtatcagcagaagcccggccaggctccccggctgctgatctacgatgccagcaatagagccaccggcatccccgccagattttccggctctggcagcggcaccgacttcaccctgaccatcagctccctggaacccgaggacttcgccgtgtactactgccagcagcggagcaactggcccatcacattcggccagggcacccggctggaaatcaaaggcggaggcggaagtggaggcggaggatctggcggcggaggctctgaagtgcagctggtggaatcaggcggcggactggtgcagcctggcagaagcctgagactgagctgtgccgccagcggcttcaccttcaacgactacgccatgcactgggtgcgccaggcccctggaaaaggactggaatgggtgtccacaatcagctggaacagcggcagcatcggctacgccgatagcgtgaagggccggttcaccatcagccgggacaacgccaagaagtccctgtacctccagatgaacagcctgcgggccgaggacacagccctgtactattgcgccaaggacatccagtacggcaactactactacggcatggacgtgtggggccagggaaccaccgtgaccgtgtcatctacgcgtgaggacctgaagaacgtgttcccacctgaggtggccgtgttcgagcctagcgaggccgagatcagccacacccagaaagccaccctcgtgtgcctggctaccggcttctaccccgaccatgtggaactgtcttggtgggtcaacggcaaagaggtgcacagcggcgtgtgtaccgacccccagccactgaaagaacagcccgccctgaacgacagccggtactgcctgagcagcagactgagagtgtccgccaccttctggcagaacccccggaaccacttcagatgccaggtgcagttctacggcctgagcgagaacgacgagtggacccaggacagagccaagcccgtgacccagatcgtgtctgccgaagcctggggcagagccgatgatgtgattaagatccactggcaggaaaagaagtccaacaccatcctgggcagccaggaaggcaacaccatgaagaccaacgacacctacatgaagttcagctggctgaccgtgcccgagaagtccctggacaaagaacacagatgcatcgtgcggcacgaaaacaacaagaacggcgtggaccaggaaatcatcttcccacccatcaagaccgatgtgattacaatggaccccaaggacaactgctccaaggacgccaacgataccctgctgctccagctgaccaacaccagcgcctactacatgtacttgttgctgctgctgaagtccgtggtgtacttcgccatcatcacatgctgcctgctgcggagaaccgccttctgctgcaacggcgagaagtctcgcgccaagagaagcggatctggcgtgaagcagaccctgaatttcgacctgctgaagctggctggcgacgtggaatccaacccaggcccttctagaggccatatgaccgagtacaagcccacggtgcgcctcgccacccgcgacgacgtccccagggccgtacgcaccctcgccgccgcgttcgccgactaccccgccacgcgccacaccgtcgatccggaccgccacatcgagcgggtcaccgagctgcaagaactcttcctcacgcgcgtcgggctcgacatcggcaaggtgtgggtcgcggacgacggcgccgcggtggcggtctggaccacgccggagagcgtcgaagcgggggcggtgttcgccgagatcggcccgcgcatggccgagttgagcggttcccggctggccgcgcagcaacagatggaaggcctcctggcgccgcaccggcccaaggagcccgcgtggttcctggccaccgtcggcgtctcgcccgaccaccagggcaagggtctgggcagcgccgtcgtgctccccggagtggaggcggccgagcgcgccggggtgcccgccttcctggagacctccgcgccccgcaacctccccttctacgagcggctcggcttcaccgtcaccgccgacgtcgaggtgcccgaaggaccgcgcacctggtgcatgacccgcaagcccggtgcctga

SEQ ID NO: 34286 - DNA, 2922 bp, synthetic construct
  source 1..2922: mol_type = other DNA
atggccttaccagtgaccgccttgctcctgccgctggccttgctgctccacgccgccaggccgctcgaggaggacctgaagaacgtgttcccacctgaggtggccgtgttcgagcctagcgaggccgagatcagccacacccagaaagccaccctcgtgtgcctggctaccggcttctaccccgaccatgtggaactgtcttggtgggtcaacggcaaagaggtgcacagcggcgtgtctaccgacccccagccactgaaagaacagcccgccctgaacgacagccggtactgcctgagcagcagactgagagtgtccgccaccttctggcagaacccccggaaccacttcagatgccaggtgcagttctacggcctgagcgagaacgacgagtggacccaggacagagccaagcccgtgacccagatcgtgtctgccgaagcctggggcagagccgatgatgtgattaagatccactggcaggaaaagaagtccaacaccatcctgggcagccaggaaggcaacaccatgaagaccaacgacacctacatgaagttcagctggctgaccgtgcccgagaagtccctggacaaagaacacagatgcatcgtgcggcacgaaaacaacaagaacggcgtggaccaggaaatcatcttcccacccatcaagaccgatgtgattacaatggaccccaaggacaactgctccaaggacgccaacgataccctgctgctccagctgaccaacaccagcgcctactacatgtacttgttgctgctgctgaagtccgtggtgtacttcgccatcatcacatgctgcctgctgcggagaaccgccttctgctgcaacggcgagaagtctagggccaagcgatctggatctggagcaacaaacttctcactactcaaacaagcaggtgacgtggaggagaatcccgggcctactagcatggccttaccagtgaccgccttgctcctgccgctggccttgctgctccacgccgccaggccggagatcgtgctgacacagagccctgccaccctgtctctgagccctggcgaaagagccaccctgagctgtagagccagccagagcgtgtccagctacctggcctggtatcagcagaagcccggccaggctccccggctgctgatctacgatgccagcaatagagccaccggcatccccgccagattttccggctctggcagcggcaccgacttcaccctgaccatcagctccctggaacccgaggacttcgccgtgtactactgccagcagcggagcaactggcccatcacattcggccagggcacccggctggaaatcaaaggcggaggcggaagtggaggcggaggatctggcggcggaggctctgaagtgcagctggtggaatcaggcggcggactggtgcagcctggcagaagcctgagactgagctgtgccgccagcggcttcaccttcaacgactacgccatgcactgggtgcgccaggcccctggaaaaggactggaatgggtgtccacaatcagctggaacagcggcagcatcggctacgccgatagcgtgaagggccggttcaccatcagccgggacaacgccaagaagtccctgtacctccagatgaacagcctgcgggccgaggacacagccctgtactattgcgccaaggacatccagtacggcaactactactacggcatggacgtgtggggccagggaaccaccgtgaccgtgtcatctacgcgtatccagaaccctgatcctgccgtgtaccagctgcgggatagcaagagcagcgacaagagcgtgtgtctgttcaccgacttcgacagccagaccaacgtgtcccagagcaaggactccgacgtgtacatcaccgataagaccgtgctggacatgcggagcatggacttcaagagcaactccgccgtggcctggtccaacaagtccgatttcgcctgcgccaacgccttcaacaacagcattatccccgaggacacattcttcccaagccccgagagcagcgactccaccgaccacgtgaagcccaaagagacagagaacaccaagcagcccagcaagagctgccacaagcccaaggccatcgtgcacaccgagaaagtgaacatgatgagcctgaccgtgctgggcctgcggatgctgttcgccaaaaccgtggccgtgaacttcctgctgaccgccaagctgttcttcctccgcgccaagagaagcggatctggcgtgaagcagaccctgaatttcgacctgctgaagctggctggcgacgtggaatccaacccaggcccttctagaggccatatgaccgagtacaagcccacggtgcgcctcgccacccgcgacgacgtccccagggccgtacgcaccctcgccgccgcgttcgccgactaccccgccacgcgccacaccgtcgatccggaccgccacatcgagcgggtcaccgagctgcaagaactcttcctcacgcgcgtcgggctcgacatcggcaaggtgtgggtcgcggacgacggcgccgcggtggcggtctggaccacgccggagagcgtcgaagcgggggcggtgttcgccgagatcggcccgcgcatggccgagttgagcggttcccggctggccgcgcagcaacagatggaaggcctcctggcgccgcaccggcccaaggagcccgcgtggttcctggccaccgtcggcgtctcgcccgaccaccagggcaagggtctgggcagcgccgtcgtgctccccggagtggaggcggccgagcgcgccggggtgcccgccttcctggagacctccgcgccccgcaacctccccttctacgagcggctcggcttcaccgtcaccgccgacgtcgaggtgcccgaaggaccgcgcacctggtgcatgacccgcaagcccggtgcctga

SEQ ID NO: 34287 - DNA, 2922 bp, synthetic construct
  source 1..2922: mol_type = other DNA
atggccttaccagtgaccgccttgctcctgccgctggccttgctgctccacgccgccaggccgctcgagatccagaaccctgatcctgccgtgtaccagctgcgggatagcaagagcagcgacaagagcgtgtgtctgttcaccgacttcgacagccagaccaacgtgtcccagagcaaggactccgacgtgtacatcaccgataagaccgtgctggacatgcggagcatggacttcaagagcaactccgccgtggcctggtccaacaagtccgatttcgcctgcgccaacgccttcaacaacagcattatccccgaggacacattcttcccaagccccgagagcagcgactccaccgaccacgtgaagcccaaagagacagagaacaccaagcagcccagcaagagctgccacaagcccaaggccatcgtgcacaccgagaaagtgaacatgatgagcctgaccgtgctgggcctgcggatgctgttcgccaaaaccgtggccgtgaacttcctgctgaccgccaagctgttcttcctcagggccaagcgatctggatctggagcaacaaacttctcactactcaaacaagcaggtgacgtggaggagaatcccgggcctactagcatggccttaccagtgaccgccttgctcctgccgctggccttgctgctccacgccgccaggccggagatcgtgctgacacagagccctgccaccctgtctctgagccctggcgaaagagccaccctgagctgtagagccagccagagcgtgtccagctacctggcctggtatcagcagaagcccggccaggctccccggctgctgatctacgatgccagcaatagagccaccggcatccccgccagattttccggctctggcagcggcaccgacttcaccctgaccatcagctccctggaacccgaggacttcgccgtgtactactgccagcagcggagcaactggcccatcacattcggccagggcacccggctggaaatcaaaggcggaggcggaagtggaggcggaggatctggcggcggaggctctgaagtgcagctggtggaatcaggcggcggactggtgcagcctggcagaagcctgagactgagctgtgccgccagcggcttcaccttcaacgactacgccatgcactgggtgcgccaggcccctggaaaaggactggaatgggtgtccacaatcagctggaacagcggcagcatcggctacgccgatagcgtgaagggccggttcaccatcagccgggacaacgccaagaagtccctgtacctccagatgaacagcctgcgggccgaggacacagccctgtactattgcgccaaggacatccagtacggcaactactactacggcatggacgtgtggggccagggaaccaccgtgaccgtgtcatctacgcgtgaggacctgaagaacgtgttcccacctgaggtggccgtgttcgagcctagcgaggccgagatcagccacacccagaaagccaccctcgtgtgcctggctaccggcttctaccccgaccatgtggaactgtcttggtgggtcaacggcaaagaggtgcacagcggcgtgtctaccgacccccagccactgaaagaacagcccgccctgaacgacagccggtactgcctgagcagcagactgagagtgtccgccaccttctggcagaacccccggaaccacttcagatgccaggtgcagttctacggcctgagcgagaacgacgagtggacccaggacagagccaagcccgtgacccagatcgtgtctgccgaagcctggggcagagccgatgatgtgattaagatccactggcaggaaaagaagtccaacaccatcctgggcagccaggaaggcaacaccatgaagaccaacgacacctacatgaagttcagctggctgaccgtgcccgagaagtccctggacaaagaacacagatgcatcgtgcggcacgaaaacaacaagaacggcgtggaccaggaaatcatcttcccacccatcaagaccgatgtgattacaatggaccccaaggacaactgctccaaggacgccaacgataccctgctgctccagctgaccaacaccagcgcctactacatgtacttgttgctgctgctgaagtccgtggtgtacttcgccatcatcacatgctgcctgctgcggagaaccgccttctgctgcaacggcgagaagtctcgcgccaagagaagcggatctggcgtgaagcagaccctgaatttcgacctgctgaagctggctggcgacgtggaatccaacccaggcccttctagaggccatatgaccgagtacaagcccacggtgcgcctcgccacccgcgacgacgtccccagggccgtacgcaccctcgccgccgcgttcgccgactaccccgccacgcgccacaccgtcgatccggaccgccacatcgagcgggtcaccgagctgcaagaactcttcctcacgcgcgtcgggctcgacatcggcaaggtgtgggtcgcggacgacggcgccgcggtggcggtctggaccacgccggagagcgtcgaagcgggggcggtgttcgccgagatcggcccgcgcatggccgagttgagcggttcccggctggccgcgcagcaacagatggaaggcctcctggcgccgcaccggcccaaggagcccgcgtggttcctggccaccgtcggcgtctcgcccgaccaccagggcaagggtctgggcagcgccgtcgtgctccccggagtggaggcggccgagcgcgccggggtgcccgccttcctggagacctccgcgccccgcaacctccccttctacgagcggctcggcttcaccgtcaccgccgacgtcgaggtgcccgaaggaccgcgcacctggtgcatgacccgcaagcccggtgcctga

SEQ ID NO: 34288 - DNA, 2616 bp, synthetic construct
  source 1..2616: mol_type = other DNA
atggccttaccagtgaccgccttgctcctgccgctggccttgctgctccacgccgccaggccgctcgaggaggacctgaagaacgtgttcccacctgaggtggccgtgttcgagcctagcaaggccgagatcgcccacacccagaaagccaccctcgtgtgcctggctaccggcttctaccccgaccatgtggaactgtcttggtgggtcaacggcaaagaggtgcacagcggcgtgtgtaccgacccccagccactgaaagaacagcccgccctgaacgacagccggtactgcctgagcagcagactgagagtgtccgccaccttctggcagaacccccggaaccacttcagatgccaggtgcagttctacggcctgagcgagaacgacgagtggacccaggacagagccaagcccgtgacccagatcgtgtctgccgaagcctggggcagagccgattgcggcatcaccagcgccagctaccaccagggcgtgctgagcgccaccatcctgtacgagatcctgctgggcaaggccaccctgtacgccgtgctggtgtctgccctggtgctgatggctatggtcaagcggaaggacagccggggaagggccaagcgatctggatctggagcaacaaacttctcactactcaaacaagcaggtgacgtggaggagaatcccgggcctactagcatggccttaccagtgaccgccttgctcctgccgctggccttgctgctccacgccgccaggccggagatcgtgctgacacagagccctgccaccctgtctctgagccctggcgaaagagccaccctgagctgtagagccagccagagcgtgtccagctacctggcctggtatcagcagaagcccggccaggctccccggctgctgatctacgatgccagcaatagagccaccggcatccccgccagattttccggctctggcagcggcaccgacttcaccctgaccatcagctccctggaacccgaggacttcgccgtgtactactgccagcagcggagcaactggcccatcacattcggccagggcacccggctggaaatcaaaggcggaggcggaagtggaggcggaggatctggcggcggaggctctgaagtgcagctggtggaatcaggcggcggactggtgcagcctggcagaagcctgagactgagctgtgccgccagcggcttcaccttcaacgactacgccatgcactgggtgcgccaggcccctggaaaaggactggaatgggtgtccacaatcagctggaacagcggcagcatcggctacgccgatagcgtgaagggccggttcaccatcagccgggacaacgccaagaagtccctgtacctccagatgaacagcctgcgggccgaggacacagccctgtactattgcgccaaggacatccagtacggcaactactactacggcatggacgtgtggggccagggaaccaccgtgaccgtgtcatctacgcgtatccagaaccctgatcctgccgtgtaccagctgcgggatagcaagagcagcgacaagagcgtgtgtctgttcaccgacttcgacagccagaccaacgtgtcccagagcaaggactccgacgtgtacatcaccgataagtgcgtgctggacatgcggagcatggacttcaagagcaactccgccgtggcctggtccaacaagtccgatttcgcctgcgccaacgccttcaacaacagcattatccccgaggacacattcttcccaagcagcgacgtgccctgcgacgtgaagctggtggaaaagagcttcgagacagacaccaacctgaacttccagaacctgagcgtgatcggcttcagaatcctgctgctgaaagtggccggctttaacctgctgatgaccctgcggctgtggtccagccgcgccaagagaagcggatctggcgtgaagcagaccctgaatttcgacctgctgaagctggctggcgacgtggaatccaacccaggcccttctagaggccatatgaccgagtacaagcccacggtgcgcctcgccacccgcgacgacgtccccagggccgtacgcaccctcgccgccgcgttcgccgactaccccgccacgcgccacaccgtcgatccggaccgccacatcgagcgggtcaccgagctgcaagaactcttcctcacgcgcgtcgggctcgacatcggcaaggtgtgggtcgcggacgacggcgccgcggtggcggtctggaccacgccggagagcgtcgaagcgggggcggtgttcgccgagatcggcccgcgcatggccgagttgagcggttcccggctggccgcgcagcaacagatggaaggcctcctggcgccgcaccggcccaaggagcccgcgtggttcctggccaccgtcggcgtctcgcccgaccaccagggcaagggtctgggcagcgccgtcgtgctccccggagtggaggcggccgagcgcgccggggtgcccgccttcctggagacctccgcgccccgcaacctccccttctacgagcggctcggcttcaccgtcaccgccgacgtcgaggtgcccgaaggaccgcgcacctggtgcatgacccgcaagcccggtgcctga

SEQ ID NO: 34289 - DNA, 2616 bp, synthetic construct
  source 1..2616: mol_type = other DNA
atggccttaccagtgaccgccttgctcctgccgctggccttgctgctccacgccgccaggccgctcgagatccagaaccctgatcctgccgtgtaccagctgcgggatagcaagagcagcgacaagagcgtgtgtctgttcaccgacttcgacagccagaccaacgtgtcccagagcaaggactccgacgtgtacatcaccgataagtgcgtgctggacatgcggagcatggacttcaagagcaactccgccgtggcctggtccaacaagtccgatttcgcctgcgccaacgccttcaacaacagcattatccccgaggacacattcttcccaagcagcgacgtgccctgcgacgtgaagctggtggaaaagagcttcgagacagacaccaacctgaacttccagaacctgagcgtgatcggcttcagaatcctgctgctgaaagtggccggctttaacctgctgatgaccctgcggctgtggtccagcagggccaagcgatctggatctggagcaacaaacttctcactactcaaacaagcaggtgacgtggaggagaatcccgggcctactagcatggccttaccagtgaccgccttgctcctgccgctggccttgctgctccacgccgccaggccggagatcgtgctgacacagagccctgccaccctgtctctgagccctggcgaaagagccaccctgagctgtagagccagccagagcgtgtccagctacctggcctggtatcagcagaagcccggccaggctccccggctgctgatctacgatgccagcaatagagccaccggcatccccgccagattttccggctctggcagcggcaccgacttcaccctgaccatcagctccctggaacccgaggacttcgccgtgtactactgccagcagcggagcaactggcccatcacattcggccagggcacccggctggaaatcaaaggcggaggcggaagtggaggcggaggatctggcggcggaggctctgaagtgcagctggtggaatcaggcggcggactggtgcagcctggcagaagcctgagactgagctgtgccgccagcggcttcaccttcaacgactacgccatgcactgggtgcgccaggcccctggaaaaggactggaatgggtgtccacaatcagctggaacagcggcagcatcggctacgccgatagcgtgaagggccggttcaccatcagccgggacaacgccaagaagtccctgtacctccagatgaacagcctgcgggccgaggacacagccctgtactattgcgccaaggacatccagtacggcaactactactacggcatggacgtgtggggccagggaaccaccgtgaccgtgtcatctacgcgtgaggacctgaagaacgtgttcccacctgaggtggccgtgttcgagcctagcaaggccgagatcgcccacacccagaaagccaccctcgtgtgcctggctaccggcttctaccccgaccatgtggaactgtcttggtgggtcaacggcaaagaggtgcacagcggcgtgtgtaccgacccccagccactgaaagaacagcccgccctgaacgacagccggtactgcctgagcagcagactgagagtgtccgccaccttctggcagaacccccggaaccacttcagatgccaggtgcagttctacggcctgagcgagaacgacgagtggacccaggacagagccaagcccgtgacccagatcgtgtctgccgaagcctggggcagagccgattgcggcatcaccagcgccagctaccaccagggcgtgctgagcgccaccatcctgtacgagatcctgctgggcaaggccaccctgtacgccgtgctggtgtctgccctggtgctgatggctatggtcaagcggaaggacagccggggacgcgccaagagaagcggatctggcgtgaagcagaccctgaatttcgacctgctgaagctggctggcgacgtggaatccaacccaggcccttctagaggccatatgaccgagtacaagcccacggtgcgcctcgccacccgcgacgacgtccccagggccgtacgcaccctcgccgccgcgttcgccgactaccccgccacgcgccacaccgtcgatccggaccgccacatcgagcgggtcaccgagctgcaagaactcttcctcacgcgcgtcgggctcgacatcggcaaggtgtgggtcgcggacgacggcgccgcggtggcggtctggaccacgccggagagcgtcgaagcgggggcggtgttcgccgagatcggcccgcgcatggccgagttgagcggttcccggctggccgcgcagcaacagatggaaggcctcctggcgccgcaccggcccaaggagcccgcgtggttcctggccaccgtcggcgtctcgcccgaccaccagggcaagggtctgggcagcgccgtcgtgctccccggagtggaggcggccgagcgcgccggggtgcccgccttcctggagacctccgcgccccgcaacctccccttctacgagcggctcggcttcaccgtcaccgccgacgtcgaggtgcccgaaggaccgcgcacctggtgcatgacccgcaagcccggtgcctga

SEQ ID NO: 34290 - DNA, 2295 bp, synthetic construct
  source 1..2295: mol_type = other DNA
atggccttaccagtgaccgccttgctcctgccgctggccttgctgctccacgccgccaggccgctcgagcagagttttgggttgttggaccctaaattgtgctatctgttggacggaatcctgttcatttacggagtgatcctgaccgcattgttcctgcgggttaagttttccagatccgcagacgcacccgcttaccaacaagggcagaaccaactctacaatgaacttaatttggggcggagggaagagtacgacgttctggacaaaaggaggggacgagatcccgagatgggcggaaagcctcagcgaaggaagaatccgcaagaggggctttataacgaactccagaaagataaaatggcagaagcctatagtgagattgggatgaagggagaaaggaggaggggtaaaggtcacgatgggttgtaccaaggattgagcacagccactaaagatacctatgatgcgctccacatgcaggccctgccgccaagaagggccaagcgatctggatctggagcaacaaacttctcactactcaaacaagcaggtgacgtggaggagaatcccgggcctactagcatggccttaccagtgaccgccttgctcctgccgctggccttgctgctccacgccgccaggccggagatcgtgctgacacagagccctgccaccctgtctctgagccctggcgaaagagccaccctgagctgtagagccagccagagcgtgtccagctacctggcctggtatcagcagaagcccggccaggctccccggctgctgatctacgatgccagcaatagagccaccggcatccccgccagattttccggctctggcagcggcaccgacttcaccctgaccatcagctccctggaacccgaggacttcgccgtgtactactgccagcagcggagcaactggcccatcacattcggccagggcacccggctggaaatcaaaggcggaggcggaagtggaggcggaggatctggcggcggaggctctgaagtgcagctggtggaatcaggcggcggactggtgcagcctggcagaagcctgagactgagctgtgccgccagcggcttcaccttcaacgactacgccatgcactgggtgcgccaggcccctggaaaaggactggaatgggtgtccacaatcagctggaacagcggcagcatcggctacgccgatagcgtgaagggccggttcaccatcagccgggacaacgccaagaagtccctgtacctccagatgaacagcctgcgggccgaggacacagccctgtactattgcgccaaggacatccagtacggcaactactactacggcatggacgtgtggggccagggaaccaccgtgaccgtgtcatctacgcgtgagctgggagagcctcagctgtgctatatcctggacgccatcctgtttctgtacggcatcgtgctgaccctgctgtactgccggctgaagatccaagtgcggaaggccgccatcaccagctacgagaaatccgacggcgtgtacaccggcctgagcaccagaaatcaagagacatacgagacactgaagcacgaaaagcctccacaacgcgccaagagaagcggatctggcgtgaagcagaccctgaatttcgacctgctgaagctggctggcgacgtggaatccaacccaggcccttctagaggccatatgaccgagtacaagcccacggtgcgcctcgccacccgcgacgacgtccccagggccgtacgcaccctcgccgccgcgttcgccgactaccccgccacgcgccacaccgtcgatccggaccgccacatcgagcgggtcaccgagctgcaagaactcttcctcacgcgcgtcgggctcgacatcggcaaggtgtgggtcgcggacgacggcgccgcggtggcggtctggaccacgccggagagcgtcgaagcgggggcggtgttcgccgagatcggcccgcgcatggccgagttgagcggttcccggctggccgcgcagcaacagatggaaggcctcctggcgccgcaccggcccaaggagcccgcgtggttcctggccaccgtcggcgtctcgcccgaccaccagggcaagggtctgggcagcgccgtcgtgctccccggagtggaggcggccgagcgcgccggggtgcccgccttcctggagacctccgcgccccgcaacctccccttctacgagcggctcggcttcaccgtcaccgccgacgtcgaggtgcccgaaggaccgcgcacctggtgcatgacccgcaagcccggtgcctga

SEQ ID NO: 34291 - DNA, 2928 bp, synthetic construct; identical to SEQ ID NO: 34282
  source 1..2928: mol_type = other DNA

SEQ ID NO: 34292 - DNA, 2928 bp, synthetic construct; identical to SEQ ID NO: 34283
  source 1..2928: mol_type = other DNA

SEQ ID NO: 34293 - DNA, 2925 bp, synthetic construct
  source 1..2925: mol_type = other DNA
atggccttaccagtgaccgccttgctcctgccgctggccttgctgctccacgccgccaggccgctcgaggaggaggacctgaagaacgtgttcccacctgaggtggccgtgttcgagcctagcgaggccgagatcagccacacccagaaagccaccctcgtgtgcctggctaccggcttctaccccgaccatgtggaactgtcttggtgggtcaacggcaaagaggtgcacagcggcgtgtgtaccgacccccagccactgaaagaacagcccgccctgaacgacagccggtactgcctgagcagcagactgagagtgtccgccaccttctggcagaacccccggaaccacttcagatgccaggtgcagttctacggcctgagcgagaacgacgagtggacccaggacagagccaagcccgtgacccagatcgtgtctgccgaagcctggggcagagccgatgatgtgattaagatccactggcaggaaaagaagtccaacaccatcctgggcagccaggaaggcaacaccatgaagaccaacgacacctacatgaagttcagctggctgaccgtgcccgagaagtccctggacaaagaacacagatgcatcgtgcggcacgaaaacaacaagaacggcgtggaccaggaaatcatcttcccacccatcaagaccgatgtgattacaatggaccccaaggacaactgctccaaggacgccaacgataccctgctgctccagctgaccaacaccagcgcctactacatgtacttgttgctgctgctgaagtccgtggtgtacttcgccatcatcacatgctgcctgctgcggagaaccgccttctgctgcaacggcgagaagtctagggccaagcgatctggatctggagcaacaaacttctcactactcaaacaagcaggtgacgtggaggagaatcccgggcctactagcatggccttaccagtgaccgccttgctcctgccgctggccttgctgctccacgccgccaggccggagatcgtgctgacacagagccctgccaccctgtctctgagccctggcgaaagagccaccctgagctgtagagccagccagagcgtgtccagctacctggcctggtatcagcagaagcccggccaggctccccggctgctgatctacgatgccagcaatagagccaccggcatccccgccagattttccggctctggcagcggcaccgacttcaccctgaccatcagctccctggaacccgaggacttcgccgtgtactactgccagcagcggagcaactggcccatcacattcggccagggcacccggctggaaatcaaaggcggaggcggaagtggaggcggaggatctggcggcggaggctctgaagtgcagctggtggaatcaggcggcggactggtgcagcctggcagaagcctgagactgagctgtgccgccagcggcttcaccttcaacgactacgccatgcactgggtgcgccaggcccctggaaaaggactggaatgggtgtccacaatcagctggaacagcggcagcatcggctacgccgatagcgtgaagggccggttcaccatcagccgggacaacgccaagaagtccctgtacctccagatgaacagcctgcgggccgaggacacagccctgtactattgcgccaaggacatccagtacggcaactactactacggcatggacgtgtggggccagggaaccaccgtgaccgtgtcatctacgcgtatccagaaccctgatcctgccgtgtaccagctgcgggatagcaagagcagcgacaagagcgtgtgtctgttcaccgacttcgacagccagaccaacgtgtcccagagcaaggactccgacgtgtacatcaccgataagtgcgtgctggacatgcggagcatggacttcaagagcaactccgccgtggcctggtccaacaagtccgatttcgcctgcgccaacgccttcaacaacagcattatccccgaggacacattcttcccaagccccgagagcagcgactccaccgaccacgtgaagcccaaagagacagagaacaccaagcagcccagcaagagctgccacaagcccaaggccatcgtgcacaccgagaaagtgaacatgatgagcctgaccgtgctgggcctgcggatgctgttcgccaaaaccgtggccgtgaacttcctgctgaccgccaagctgttcttcctccgcgccaagagaagcggatctggcgtgaagcagaccctgaatttcgacctgctgaagctggctggcgacgtggaatccaacccaggcccttctagaggccatatgaccgagtacaagcccacggtgcgcctcgccacccgcgacgacgtccccagggccgtacgcaccctcgccgccgcgttcgccgactaccccgccacgcgccacaccgtcgatccggaccgccacatcgagcgggtcaccgagctgcaagaactcttcctcacgcgcgtcgggctcgacatcggcaaggtgtgggtcgcggacgacggcgccgcggtggcggtctggaccacgccggagagcgtcgaagcgggggcggtgttcgccgagatcggcccgcgcatggccgagttgagcggttcccggctggccgcgcagcaacagatggaaggcctcctggcgccgcaccggcccaaggagcccgcgtggttcctggccaccgtcggcgtctcgcccgaccaccagggcaagggtctgggcagcgccgtcgtgctccccggagtggaggcggccgagcgcgccggggtgcccgccttcctggagacctccgcgccccgcaacctccccttctacgagcggctcggcttcaccgtcaccgccgacgtcgaggtgcccgaaggaccgcgcacctggtgcatgacccgcaagcccggtgcctga

SEQ ID NO: 34294 - DNA, 2925 bp, synthetic construct
  source 1..2925: mol_type = other DNA
atggccttaccagtgaccgccttgctcctgccgctggccttgctgctccacgccgccaggccgctcgagatccagaaccctgatcctgccgtgtaccagctgcgggatagcaagagcagcgacaagagcgtgtgtctgttcaccgacttcgacagccagaccaacgtgtcccagagcaaggactccgacgtgtacatcaccgataagtgcgtgctggacatgcggagcatggacttcaagagcaactccgccgtggcctggtccaacaagtccgatttcgcctgcgccaacgccttcaacaacagcattatccccgaggacacattcttcccaagccccgagagcagcgactccaccgaccacgtgaagcccaaagagacagagaacaccaagcagcccagcaagagctgccacaagcccaaggccatcgtgcacaccgagaaagtgaacatgatgagcctgaccgtgctgggcctgcggatgctgttcgccaaaaccgtggccgtgaacttcctgctgaccgccaagctgttcttcctcagggccaagcgatctggatctggagcaacaaacttctcactactcaaacaagcaggtgacgtggaggagaatcccgggcctactagcatggccttaccagtgaccgccttgctcctgccgctggccttgctgctccacgccgccaggccggagatcgtgctgacacagagccctgccaccctgtctctgagccctggcgaaagagccaccctgagctgtagagccagccagagcgtgtccagctacctggcctggtatcagcagaagcccggccaggctccccggctgctgatctacgatgccagcaatagagccaccggcatccccgccagattttccggctctggcagcggcaccgacttcaccctgaccatcagctccctggaacccgaggacttcgccgtgtactactgccagcagcggagcaactggcccatcacattcggccagggcacccggctggaaatcaaaggcggaggcggaagtggaggcggaggatctggcggcggaggctctgaagtgcagctggtggaatcaggcggcggactggtgcagcctggcagaagcctgagactgagctgtgccgccagcggcttcaccttcaacgactacgccatgcactgggtgcgccaggcccctggaaaaggactggaatgggtgtccacaatcagctggaacagcggcagcatcggctacgccgatagcgtgaagggccggttcaccatcagccgggacaacgccaagaagtccctgtacctccagatgaacagcctgcgggccgaggacacagccctgtactattgcgccaaggacatccagtacggcaactactactacggcatggacgtgtggggccagggaaccaccgtgaccgtgtcatctacgcgtgaggaggacctgaagaacgtgttcccacctgaggtggccgtgttcgagcctagcgaggccgagatcagccacacccagaaagccaccctcgtgtgcctggctaccggcttctaccccgaccatgtggaactgtcttggtgggtcaacggcaaagaggtgcacagcggcgtgtgtaccgacccccagccactgaaagaacagcccgccctgaacgacagccggtactgcctgagcagcagactgagagtgtccgccaccttctggcagaacccccggaaccacttcagatgccaggtgcagttctacggcctgagcgagaacgacgagtggacccaggacagagccaagcccgtgacccagatcgtgtctgccgaagcctggggcagagccgatgatgtgattaagatccactggcaggaaaagaagtccaacaccatcctgggcagccaggaaggcaacaccatgaagaccaacgacacctacatgaagttcagctggctgaccgtgcccgagaagtccctggacaaagaacacagatgcatcgtgcggcacgaaaacaacaagaacggcgtggaccaggaaatcatcttcccacccatcaagaccgatgtgattacaatggaccccaaggacaactgctccaaggacgccaacgataccctgctgctccagctgaccaacaccagcgcctactacatgtacttgttgctgctgctgaagtccgtggtgtacttcgccatcatcacatgctgcctgctgcggagaaccgccttctgctgcaacggcgagaagtctcgcgccaagagaagcggatctggcgtgaagcagaccctgaatttcgacctgctgaagctggctggcgacgtggaatccaacccaggcccttctagaggccatatgaccgagtacaagcccacggtgcgcctcgccacccgcgacgacgtccccagggccgtacgcaccctcgccgccgcgttcgccgactaccccgccacgcgccacaccgtcgatccggaccgccacatcgagcgggtcaccgagctgcaagaactcttcctcacgcgcgtcgggctcgacatcggcaaggtgtgggtcgcggacgacggcgccgcggtggcggtctggaccacgccggagagcgtcgaagcgggggcggtgttcgccgagatcggcccgcgcatggccgagttgagcggttcccggctggccgcgcagcaacagatggaaggcctcctggcgccgcaccggcccaaggagcccgcgtggttcctggccaccgtcggcgtctcgcccgaccaccagggcaagggtctgggcagcgccgtcgtgctccccggagtggaggcggccgagcgcgccggggtgcccgccttcctggagacctccgcgccccgcaacctccccttctacgagcggctcggcttcaccgtcaccgccgacgtcgaggtgcccgaaggaccgcgcacctggtgcatgacccgcaagcccggtgcctga

SEQ ID NO: 34295 - DNA, 2616 bp, synthetic construct
  source 1..2616: mol_type = other DNA
atggccttaccagtgaccgccttgctcctgccgctggccttgctgctccacgccgccaggccgctcgaggaggacctgaagaacgtgttcccacctgaggtggccgtgttcgagcctagcgaggccgagatcagccacacccagaaagccaccctcgtgtgcctggctaccggcttctaccccgaccatgtggaactgtcttggtgggtcaacggcaaagaggtgcacagcggcgtgtctaccgacccccagccactgaaagaacagcccgccctgaacgacagccggtactgcctgagcagcagactgagagtgtccgccaccttctggcagaacccccggaaccacttcagatgccaggtgcagttctacggcctgagcgagaacgacgagtggacccaggacagagccaagcccgtgacccagatcgtgtctgccgaagcctggggcagagccgattgcggctttaccagcgagagctaccagcagggcgtgctgagcgccaccaacctgagcgtgatcggcttcagaatcctgctgctgaaagtggccggctttaacctgctgatgaccctgcggctgtggtccagcagggccaagcgatctggatctggagcaacaaacttctcactactcaaacaagcaggtgacgtggaggagaatcccgggcctactagcatggccttaccagtgaccgccttgctcctgccgctggccttgctgctccacgccgccaggccggagatcgtgctgacacagagccctgccaccctgtctctgagccctggcgaaagagccaccctgagctgtagagccagccagagcgtgtccagctacctggcctggtatcagcagaagcccggccaggctccccggctgctgatctacgatgccagcaatagagccaccggcatccccgccagattttccggctctggcagcggcaccgacttcaccctgaccatcagctccctggaacccgaggacttcgccgtgtactactgccagcagcggagcaactggcccatcacattcggccagggcacccggctggaaatcaaaggcggaggcggaagtggaggcggaggatctggcggcggaggctctgaagtgcagctggtggaatcaggcggcggactggtgcagcctggcagaagcctgagactgagctgtgccgccagcggcttcaccttcaacgactacgccatgcactgggtgcgccaggcccctggaaaaggactggaatgggtgtccacaatcagctggaacagcggcagcatcggctacgccgatagcgtgaagggccggttcaccatcagccgggacaacgccaagaagtccctgtacctccagatgaacagcctgcgggccgaggacacagccctgtactattgcgccaaggacatccagtacggcaactactactacggcatggacgtgtggggccagggaaccaccgtgaccgtgtcatctacgcgtatccagaaccctgatcctgccgtgtaccagctgcgggatagcaagagcagcgacaagagcgtgtgtctgttcaccgacttcgacagccagaccaacgtgtcccagagcaaggactccgacgtgtacatcaccgataagaccgtgctggacatgcggagcatggacttcaagagcaactccgccgtggcctggtccaacaagtccgatttcgcctgcgccaacgccttcaacaacagcattatccccgaggacacattcttcccaagccccgagagcagctgcgacgtgaagctggtggaaaagagcttcgagacagacaccaacctgaacttccagatcctgtacgagatcctgctgggcaaggccaccctgtacgccgtgctggtgtctgccctggtgctgatggctatggtcaagcggaaggacagccggggacgcgccaagagaagcggatctggcgtgaagcagaccctgaatttcgacctgctgaagctggctggcgacgtggaatccaacccaggcccttctagaggccatatgaccgagtacaagcccacggtgcgcctcgccacccgcgacgacgtccccagggccgtacgcaccctcgccgccgcgttcgccgactaccccgccacgcgccacaccgtcgatccggaccgccacatcgagcgggtcaccgagctgcaagaactcttcctcacgcgcgtcgggctcgacatcggcaaggtgtgggtcgcggacgacggcgccgcggtggcggtctggaccacgccggagagcgtcgaagcgggggcggtgttcgccgagatcggcccgcgcatggccgagttgagcggttcccggctggccgcgcagcaacagatggaaggcctcctggcgccgcaccggcccaaggagcccgcgtggttcctggccaccgtcggcgtctcgcccgaccaccagggcaagggtctgggcagcgccgtcgtgctccccggagtggaggcggccgagcgcgccggggtgcccgccttcctggagacctccgcgccccgcaacctccccttctacgagcggctcggcttcaccgtcaccgccgacgtcgaggtgcccgaaggaccgcgcacctggtgcatgacccgcaagcccggtgcctga

SEQ ID NO: 34296 - DNA, 2616 bp, synthetic construct
  source 1..2616: mol_type = other DNA
atggccttaccagtgaccgccttgctcctgccgctggccttgctgctccacgccgccaggccgctcgagatccagaaccctgatcctgccgtgtaccagctgcgggatagcaagagcagcgacaagagcgtgtgtctgttcaccgacttcgacagccagaccaacgtgtcccagagcaaggactccgacgtgtacatcaccgataagaccgtgctggacatgcggagcatggacttcaagagcaactccgccgtggcctggtccaacaagtccgatttcgcctgcgccaacgccttcaacaacagcattatccccgaggacacattcttcccaagccccgagagcagctgcgacgtgaagctggtggaaaagagcttcgagacagacaccaacctgaacttccagatcctgtacgagatcctgctgggcaaggccaccctgtacgccgtgctggtgtctgccctggtgctgatggctatggtcaagcggaaggacagccggggaagggccaagcgatctggatctggagcaacaaacttctcactactcaaacaagcaggtgacgtggaggagaatcccgggcctactagcatggccttaccagtgaccgccttgctcctgccgctggccttgctgctccacgccgccaggccggagatcgtgctgacacagagccctgccaccctgtctctgagccctggcgaaagagccaccctgagctgtagagccagccagagcgtgtccagctacctggcctggtatcagcagaagcccggccaggctccccggctgctgatctacgatgccagcaatagagccaccggcatccccgccagattttccggctctggcagcggcaccgacttcaccctgaccatcagctccctggaacccgaggacttcgccgtgtactactgccagcagcggagcaactggcccatcacattcggccagggcacccggctggaaatcaaaggcggaggcggaagtggaggcggaggatctggcggcggaggctctgaagtgcagctggtggaatcaggcggcggactggtgcagcctggcagaagcctgagactgagctgtgccgccagcggcttcaccttcaacgactacgccatgcactgggtgcgccaggcccctggaaaaggactggaatgggtgtccacaatcagctggaacagcggcagcatcggctacgccgatagcgtgaagggccggttcaccatcagccgggacaacgccaagaagtccctgtacctccagatgaacagcctgcgggccgaggacacagccctgtactattgcgccaaggacatccagtacggcaactactactacggcatggacgtgtggggccagggaaccaccgtgaccgtgtcatctacgcgtgaggacctgaagaacgtgttcccacctgaggtggccgtgttcgagcctagcgaggccgagatcagccacacccagaaagccaccctcgtgtgcctggctaccggcttctaccccgaccatgtggaactgtcttggtgggtcaacggcaaagaggtgcacagcggcgtgtctaccgacccccagccactgaaagaacagcccgccctgaacgacagccggtactgcctgagcagcagactgagagtgtccgccaccttctggcagaacccccggaaccacttcagatgccaggtgcagttctacggcctgagcgagaacgacgagtggacccaggacagagccaagcccgtgacccagatcgtgtctgccgaagcctggggcagagccgattgcggctttaccagcgagagctaccagcagggcgtgctgagcgccaccaacctgagcgtgatcggcttcagaatcctgctgctgaaagtggccggctttaacctgctgatgaccctgcggctgtggtccagccgcgccaagagaagcggatctggcgtgaagcagaccctgaatttcgacctgctgaagctggctggcgacgtggaatccaacccaggcccttctagaggccatatgaccgagtacaagcccacggtgcgcctcgccacccgcgacgacgtccccagggccgtacgcaccctcgccgccgcgttcgccgactaccccgccacgcgccacaccgtcgatccggaccgccacatcgagcgggtcaccgagctgcaagaactcttcctcacgcgcgtcgggctcgacatcggcaaggtgtgggtcgcggacgacggcgccgcggtggcggtctggaccacgccggagagcgtcgaagcgggggcggtgttcgccgagatcggcccgcgcatggccgagttgagcggttcccggctggccgcgcagcaacagatggaaggcctcctggcgccgcaccggcccaaggagcccgcgtggttcctggccaccgtcggcgtctcgcccgaccaccagggcaagggtctgggcagcgccgtcgtgctccccggagtggaggcggccgagcgcgccggggtgcccgccttcctggagacctccgcgccccgcaacctccccttctacgagcggctcggcttcaccgtcaccgccgacgtcgaggtgcccgaaggaccgcgcacctggtgcatgacccgcaagcccggtgcctga

SEQ ID NO: 34297 - DNA, 2616 bp, synthetic construct
  source 1..2616: mol_type = other DNA
atggccttaccagtgaccgccttgctcctgccgctggccttgctgctccacgccgccaggccgctcgaggaggacctgaagaacgtgttcccacctgaggtggccgtgttcgagcctagcgaggccgagatcagccacacccagaaagccaccctcgtgtgcctggctaccggcttctaccccgaccatgtggaactgtcttggtgggtcaacggcaaagaggtgcacagcggcgtgtgtaccgacccccagccactgaaagaacagcccgccctgaacgacagccggtactgcctgagcagcagactgagagtgtccgccaccttctggcagaacccccggaaccacttcagatgccaggtgcagttctacggcctgagcgagaacgacgagtggacccaggacagagccaagcccgtgacccagatcgtgtctgccgaagcctggggcagagccgattgcgacgtgaagctggtggaaaagagcttcgagacagacaccaacctgaacttccagaacctgagcgtgatcggcttcagaatcctgctgctgaaagtggccggctttaacctgctgatgaccctgcggctgtggtccagcagggccaagcgatctggatctggagcaacaaacttctcactactcaaacaagcaggtgacgtggaggagaatcccgggcctactagcatggccttaccagtgaccgccttgctcctgccgctggccttgctgctccacgccgccaggccggagatcgtgctgacacagagccctgccaccctgtctctgagccctggcgaaagagccaccctgagctgtagagccagccagagcgtgtccagctacctggcctggtatcagcagaagcccggccaggctccccggctgctgatctacgatgccagcaatagagccaccggcatccccgccagattttccggctctggcagcggcaccgacttcaccctgaccatcagctccctggaacccgaggacttcgccgtgtactactgccagcagcggagcaactggcccatcacattcggccagggcacccggctggaaatcaaaggcggaggcggaagtggaggcggaggatctggcggcggaggctctgaagtgcagctggtggaatcaggcggcggactggtgcagcctggcagaagcctgagactgagctgtgccgccagcggcttcaccttcaacgactacgccatgcactgggtgcgccaggcccctggaaaaggactggaatgggtgtccacaatcagctggaacagcggcagcatcggctacgccgatagcgtgaagggccggttcaccatcagccgggacaacgccaagaagtccctgtacctccagatgaacagcctgcgggccgaggacacagccctgtactattgcgccaaggacatccagtacggcaactactactacggcatggacgtgtggggccagggaaccaccgtgaccgtgtcatctacgcgtatccagaaccctgatcctgccgtgtaccagctgcgggatagcaagagcagcgacaagagcgtgtgtctgttcaccgacttcgacagccagaccaacgtgtcccagagcaaggactccgacgtgtacatcaccgataagtgcgtgctggacatgcggagcatggacttcaagagcaactccgccgtggcctggtccaacaagtccgatttcgcctgcgccaacgccttcaacaacagcattatccccgaggacacattcttcccaagccccgagagcagctgcggctttaccagcgagagctaccagcagggcgtgctgagcgccaccatcctgtacgagatcctgctgggcaaggccaccctgtacgccgtgctggtgtctgccctggtgctgatggctatggtcaagcggaaggacagccggggacgcgccaagagaagcggatctggcgtgaagcagaccctgaatttcgacctgctgaagctggctggcgacgtggaatccaacccaggcccttctagaggccatatgaccgagtacaagcccacggtgcgcctcgccacccgcgacgacgtccccagggccgtacgcaccctcgccgccgcgttcgccgactaccccgccacgcgccacaccgtcgatccggaccgccacatcgagcgggtcaccgagctgcaagaactcttcctcacgcgcgtcgggctcgacatcggcaaggtgtgggtcgcggacgacggcgccgcggtggcggtctggaccacgccggagagcgtcgaagcgggggcggtgttcgccgagatcggcccgcgcatggccgagttgagcggttcccggctggccgcgcagcaacagatggaaggcctcctggcgccgcaccggcccaaggagcccgcgtggttcctggccaccgtcggcgtctcgcccgaccaccagggcaagggtctgggcagcgccgtcgtgctccccggagtggaggcggccgagcgcgccggggtgcccgccttcctggagacctccgcgccccgcaacctccccttctacgagcggctcggcttcaccgtcaccgccgacgtcgaggtgcccgaaggaccgcgcacctggtgcatgacccgcaagcccggtgcctga

SEQ ID NO: 34298 - DNA, 2616 bp, synthetic construct
  source 1..2616: mol_type = other DNA
atggccttaccagtgaccgccttgctcctgccgctggccttgctgctccacgccgccaggccgctcgaggaggacctgaagaacgtgttcccacctgaggtggccgtgttcgagcctagcgaggccgagatcagccacacccagaaagccaccctcgtgtgcctggctaccggcttctaccccgaccatgtggaactgtcttggtgggtcaacggcaaagaggtgcacagcggcgtgtctaccgacccccagccactgaaagaacagcccgccctgaacgacagccggtactgcctgagcagcagactgagagtgtccgccaccttctggcagaacccccggaaccacttcagatgccaggtgcagttctacggcctgagcgagaacgacgagtggacccaggacagagccaagcccgtgacccagatcgtgtctgccgaagcctggggcagagccgattgcgacgtgaagctggtggaaaagagcttcgagacagacaccaacctgaacttccagaacctgagcgtgatcggcttcagaatcctgctgctgaaagtggccggctttaacctgctgatgaccctgcggctgtggtccagcagggccaagcgatctggatctggagcaacaaacttctcactactcaaacaagcaggtgacgtggaggagaatcccgggcctactagcatggccttaccagtgaccgccttgctcctgccgctggccttgctgctccacgccgccaggccggagatcgtgctgacacagagccctgccaccctgtctctgagccctggcgaaagagccaccctgagctgtagagccagccagagcgtgtccagctacctggcctggtatcagcagaagcccggccaggctccccggctgctgatctacgatgccagcaatagagccaccggcatccccgccagattttccggctctggcagcggcaccgacttcaccctgaccatcagctccctggaacccgaggacttcgccgtgtactactgccagcagcggagcaactggcccatcacattcggccagggcacccggctggaaatcaaaggcggaggcggaagtggaggcggaggatctggcggcggaggctctgaagtgcagctggtggaatcaggcggcggactggtgcagcctggcagaagcctgagactgagctgtgccgccagcggcttcaccttcaacgactacgccatgcactgggtgcgccaggcccctggaaaaggactggaatgggtgtccacaatcagctggaacagcggcagcatcggctacgccgatagcgtgaagggccggttcaccatcagccgggacaacgccaagaagtccctgtacctccagatgaacagcctgcgggccgaggacacagccctgtactattgcgccaaggacatccagtacggcaactactactacggcatggacgtgtggggccagggaaccaccgtgaccgtgtcatctacgcgtatccagaaccctgatcctgccgtgtaccagctgcgggatagcaagagcagcgacaagagcgtgtgtctgttcaccgacttcgacagccagaccaacgtgtcccagagcaaggactccgacgtgtacatcaccgataagaccgtgctggacatgcggagcatggacttcaagagcaactccgccgtggcctggtccaacaagtccgatttcgcctgcgccaacgccttcaacaacagcattatccccgaggacacattcttcccaagccccgagagcagctgcggctttaccagcgagagctaccagcagggcgtgctgagcgccaccatcctgtacgagatcctgctgggcaaggccaccctgtacgccgtgctggtgtctgccctggtgctgatggctatggtcaagcggaaggacagccggggacgcgccaagagaagcggatctggcgtgaagcagaccctgaatttcgacctgctgaagctggctggcgacgtggaatccaacccaggcccttctagaggccatatgaccgagtacaagcccacggtgcgcctcgccacccgcgacgacgtccccagggccgtacgcaccctcgccgccgcgttcgccgactaccccgccacgcgccacaccgtcgatccggaccgccacatcgagcgggtcaccgagctgcaagaactcttcctcacgcgcgtcgggctcgacatcggcaaggtgtgggtcgcggacgacggcgccgcggtggcggtctggaccacgccggagagcgtcgaagcgggggcggtgttcgccgagatcggcccgcgcatggccgagttgagcggttcccggctggccgcgcagcaacagatggaaggcctcctggcgccgcaccggcccaaggagcccgcgtggttcctggccaccgtcggcgtctcgcccgaccaccagggcaagggtctgggcagcgccgtcgtgctccccggagtggaggcggccgagcgcgccggggtgcccgccttcctggagacctccgcgccccgcaacctccccttctacgagcggctcggcttcaccgtcaccgccgacgtcgaggtgcccgaaggaccgcgcacctggtgcatgacccgcaagcccggtgcctga

SEQ ID NO: 34299 - DNA, 2925 bp, synthetic construct
  source 1..2925: mol_type = other DNA
atggccttaccagtgaccgccttgctcctgccgctggccttgctgctccacgccgccaggccgctcgaggaggaggacctgaagaacgtgttcccacctgaggtggccgtgttcgagcctagcgaggccgagatcagccacacccagaaagccaccctcgtgtgcctggctaccggcttctaccccgaccatgtggaactgtcttggtgggtcaacggcaaagaggtgcacagcggcgtgtctaccgacccccagccactgaaagaacagcccgccctgaacgacagccggtactgcctgagcagcagactgagagtgtccgccaccttctggcagaacccccggaaccacttcagatgccaggtgcagttctacggcctgagcgagaacgacgagtggacccaggacagagccaagcccgtgacccagatcgtgtctgccgaagcctggggcagagccgatgatgtgattaagatccactggcaggaaaagaagtccaacaccatcctgggcagccaggaaggcaacaccatgaagaccaacgacacctacatgaagttcagctggctgaccgtgcccgagaagtccctggacaaagaacacagatgcatcgtgcggcacgaaaacaacaagaacggcgtggaccaggaaatcatcttcccacccatcaagaccgatgtgattacaatggaccccaaggacaactgctccaaggacgccaacgataccctgctgctccagctgaccaacaccagcgcctactacatgtacttgttgctgctgctgaagtccgtggtgtacttcgccatcatcacatgctgcctgctgcggagaaccgccttctgctgcaacggcgagaagtctagggccaagcgatctggatctggagcaacaaacttctcactactcaaacaagcaggtgacgtggaggagaatcccgggcctactagcatggccttaccagtgaccgccttgctcctgccgctggccttgctgctccacgccgccaggccggagatcgtgctgacacagagccctgccaccctgtctctgagccctggcgaaagagccaccctgagctgtagagccagccagagcgtgtccagctacctggcctggtatcagcagaagcccggccaggctccccggctgctgatctacgatgccagcaatagagccaccggcatccccgccagattttccggctctggcagcggcaccgacttcaccctgaccatcagctccctggaacccgaggacttcgccgtgtactactgccagcagcggagcaactggcccatcacattcggccagggcacccggctggaaatcaaaggcggaggcggaagtggaggcggaggatctggcggcggaggctctgaagtgcagctggtggaatcaggcggcggactggtgcagcctggcagaagcctgagactgagctgtgccgccagcggcttcaccttcaacgactacgccatgcactgggtgcgccaggcccctggaaaaggactggaatgggtgtccacaatcagctggaacagcggcagcatcggctacgccgatagcgtgaagggccggttcaccatcagccgggacaacgccaagaagtccctgtacctccagatgaacagcctgcgggccgaggacacagccctgtactattgcgccaaggacatccagtacggcaactactactacggcatggacgtgtggggccagggaaccaccgtgaccgtgtcatctacgcgtatccagaaccctgatcctgccgtgtaccagctgcgggatagcaagagcagcgacaagagcgtgtgtctgttcaccgacttcgacagccagaccaacgtgtcccagagcaaggactccgacgtgtacatcaccgataagaccgtgctggacatgcggagcatggacttcaagagcaactccgccgtggcctggtccaacaagtccgatttcgcctgcgccaacgccttcaacaacagcattatccccgaggacacattcttcccaagccccgagagcagcgactccaccgaccacgtgaagcccaaagagacagagaacaccaagcagcccagcaagagctgccacaagcccaaggccatcgtgcacaccgagaaagtgaacatgatgagcctgaccgtgctgggcctgcggatgctgttcgccaaaaccgtggccgtgaacttcctgctgaccgccaagctgttcttcctccgcgccaagagaagcggatctggcgtgaagcagaccctgaatttcgacctgctgaagctggctggcgacgtggaatccaacccaggcccttctagaggccatatgaccgagtacaagcccacggtgcgcctcgccacccgcgacgacgtccccagggccgtacgcaccctcgccgccgcgttcgccgactaccccgccacgcgccacaccgtcgatccggaccgccacatcgagcgggtcaccgagctgcaagaactcttcctcacgcgcgtcgggctcgacatcggcaaggtgtgggtcgcggacgacggcgccgcggtggcggtctggaccacgccggagagcgtcgaagcgggggcggtgttcgccgagatcggcccgcgcatggccgagttgagcggttcccggctggccgcgcagcaacagatggaaggcctcctggcgccgcaccggcccaaggagcccgcgtggttcctggccaccgtcggcgtctcgcccgaccaccagggcaagggtctgggcagcgccgtcgtgctccccggagtggaggcggccgagcgcgccggggtgcccgccttcctggagacctccgcgccccgcaacctccccttctacgagcggctcggcttcaccgtcaccgccgacgtcgaggtgcccgaaggaccgcgcacctggtgcatgacccgcaagcccggtgcctga

SEQ ID NO: 34300 - DNA, 2616 bp, synthetic construct
  source 1..2616: mol_type = other DNA
atggccttaccagtgaccgccttgctcctgccgctggccttgctgctccacgccgccaggccgctcgaggaggacctgaagaacgtgttcccacctgaggtggccgtgttcgagcctagcgaggccgagatcagccacacccagaaagccaccctcgtgtgcctggctaccggcttctaccccgaccatgtggaactgtcttggtgggtcaacggcaaagaggtgcacagcggcgtgtgtaccgacccccagccactgaaagaacagcccgccctgaacgacagccggtactgcctgagcagcagactgagagtgtccgccaccttctggcagaacccccggaaccacttcagatgccaggtgcagttctacggcctgagcgagaacgacgagtggacccaggacagagccaagcccgtgacccagatcgtgtctgccgaagcctggggcagagccgattgcggctttaccagcgagagctaccagcagggcgtgctgagcgccaccaacctgagcgtgatcggcttcagaatcctgctgctgaaagtggccggctttaacctgctgatgaccctgcggctgtggtccagcagggccaagcgatctggatctggagcaacaaacttctcactactcaaacaagcaggtgacgtggaggagaatcccgggcctactagcatggccttaccagtgaccgccttgctcctgccgctggccttgctgctccacgccgccaggccggagatcgtgctgacacagagccctgccaccctgtctctgagccctggcgaaagagccaccctgagctgtagagccagccagagcgtgtccagctacctggcctggtatcagcagaagcccggccaggctccccggctgctgatctacgatgccagcaatagagccaccggcatccccgccagattttccggctctggcagcggcaccgacttcaccctgaccatcagctccctggaacccgaggacttcgccgtgtactactgccagcagcggagcaactggcccatcacattcggccagggcacccggctggaaatcaaaggcggaggcggaagtggaggcggaggatctggcggcggaggctctgaagtgcagctggtggaatcaggcggcggactggtgcagcctggcagaagcctgagactgagctgtgccgccagcggcttcaccttcaacgactacgccatgcactgggtgcgccaggcccctggaaaaggactggaatgggtgtccacaatcagctggaacagcggcagcatcggctacgccgatagcgtgaagggccggttcaccatcagccgggacaacgccaagaagtccctgtacctccagatgaacagcctgcgggccgaggacacagccctgtactattgcgccaaggacatccagtacggcaactactactacggcatggacgtgtggggccagggaaccaccgtgaccgtgtcatctacgcgtatccagaaccctgatcctgccgtgtaccagctgcgggatagcaagagcagcgacaagagcgtgtgtctgttcaccgacttcgacagccagaccaacgtgtcccagagcaaggactccgacgtgtacatcaccgataagtgcgtgctggacatgcggagcatggacttcaagagcaactccgccgtggcctggtccaacaagtccgatttcgcctgcgccaacgccttcaacaacagcattatccccgaggacacattcttcccaagccccgagagcagctgcgacgtgaagctggtggaaaagagcttcgagacagacaccaacctgaacttccagatcctgtacgagatcctgctgggcaaggccaccctgtacgccgtgctggtgtctgccctggtgctgatggctatggtcaagcggaaggacagccggggacgcgccaagagaagcggatctggcgtgaagcagaccctgaatttcgacctgctgaagctggctggcgacgtggaatccaacccaggcccttctagaggccatatgaccgagtacaagcccacggtgcgcctcgccacccgcgacgacgtccccagggccgtacgcaccctcgccgccgcgttcgccgactaccccgccacgcgccacaccgtcgatccggaccgccacatcgagcgggtcaccgagctgcaagaactcttcctcacgcgcgtcgggctcgacatcggcaaggtgtgggtcgcggacgacggcgccgcggtggcggtctggaccacgccggagagcgtcgaagcgggggcggtgttcgccgagatcggcccgcgcatggccgagttgagcggttcccggctggccgcgcagcaacagatggaaggcctcctggcgccgcaccggcccaaggagcccgcgtggttcctggccaccgtcggcgtctcgcccgaccaccagggcaagggtctgggcagcgccgtcgtgctccccggagtggaggcggccgagcgcgccggggtgcccgccttcctggagacctccgcgccccgcaacctccccttctacgagcggctcggcttcaccgtcaccgccgacgtcgaggtgcccgaaggaccgcgcacctggtgcatgacccgcaagcccggtgcctga

SEQ ID NO: 34301 - DNA, 2703 bp, synthetic construct
  source 1..2703: mol_type = other DNA
atggccttaccagtgaccgccttgctcctgccgctggccttgctgctccacgccgccaggccgctcgaggaggaggacctgaagaacgtgttcccacctgaggtggccgtgttcgagcctagcgaggccgagatcagccacacccagaaagccaccctcgtgtgcctggctaccggcttctaccccgaccatgtggaactgtcttggtgggtcaacggcaaagaggtgcacagcggcgtgtgtaccgacccccagccactgaaagaacagcccgccctgaacgacagccggtactgcctgagcagcagactgagagtgtccgccaccttctggcagaacccccggaaccacttcagatgccaggtgcagttctacggcctgagcgagaacgacgagtggacccaggacagagccaagcccgtgacccagatcgtgtctgccgaagcctggggcagagccgattgcggctttaccagcgagagctaccagcagggcgtgctgagcgccaccaacctgagcgtgatcggcttcagaatcctgctgctgaaagtggccggctttaacctgctgatgaccctgcggctgtggtccagcagggccaagcgatctggatctggagcaacaaacttctcactactcaaacaagcaggtgacgtggaggagaatcccgggcctactagcatggccttaccagtgaccgccttgctcctgccgctggccttgctgctccacgccgccaggccggagatcgtgctgacacagagccctgccaccctgtctctgagccctggcgaaagagccaccctgagctgtagagccagccagagcgtgtccagctacctggcctggtatcagcagaagcccggccaggctccccggctgctgatctacgatgccagcaatagagccaccggcatccccgccagattttccggctctggcagcggcaccgacttcaccctgaccatcagctccctggaacccgaggacttcgccgtgtactactgccagcagcggagcaactggcccatcacattcggccagggcacccggctggaaatcaaaggcggaggcggaagtggaggcggaggatctggcggcggaggctctgaagtgcagctggtggaatcaggcggcggactggtgcagcctggcagaagcctgagactgagctgtgccgccagcggcttcaccttcaacgactacgccatgcactgggtgcgccaggcccctggaaaaggactggaatgggtgtccacaatcagctggaacagcggcagcatcggctacgccgatagcgtgaagggccggttcaccatcagccgggacaacgccaagaagtccctgtacctccagatgaacagcctgcgggccgaggacacagccctgtactattgcgccaaggacatccagtacggcaactactactacggcatggacgtgtggggccagggaaccaccgtgaccgtgtcatctacgcgtggacagcctaaggccaatcctaccgtgacactgttccctccaagcagcgaagaactccaggccaacaaggccacacttgtgtgcctgatctccgacttctaccctggggctgtgacagtggcttggaaggccgatggatctcctgtgaaagccggcgtggaaaccaccaagccatccaagcagagcaacaacaaatacgccgccagctcctacctgagcctgacacctgagcagtggaagtcccacagatcctacagctgccaagtgacccacgaaggcagcaccgtggaaaagacagtggcccctacagagtgcagccccatcaagaccgatgtgattacaatggaccccaaggacaactgctccaaggacgccaacgataccctgctgctccagctgaccaacaccagcgcctactacatgtacttgttgctgctgctgaagtccgtggtgtacttcgccatcatcacatgctgcctgctgcggagaaccgccttctgctgcaacggcgagaagtctcgcgccaagagaagcggatctggcgtgaagcagaccctgaatttcgacctgctgaagctggctggcgacgtggaatccaacccaggcccttctagaggccatatgaccgagtacaagcccacggtgcgcctcgccacccgcgacgacgtccccagggccgtacgcaccctcgccgccgcgttcgccgactaccccgccacgcgccacaccgtcgatccggaccgccacatcgagcgggtcaccgagctgcaagaactcttcctcacgcgcgtcgggctcgacatcggcaaggtgtgggtcgcggacgacggcgccgcggtggcggtctggaccacgccggagagcgtcgaagcgggggcggtgttcgccgagatcggcccgcgcatggccgagttgagcggttcccggctggccgcgcagcaacagatggaaggcctcctggcgccgcaccggcccaaggagcccgcgtggttcctggccaccgtcggcgtctcgcccgaccaccagggcaagggtctgggcagcgccgtcgtgctccccggagtggaggcggccgagcgcgccggggtgcccgccttcctggagacctccgcgccccgcaacctccccttctacgagcggctcggcttcaccgtcaccgccgacgtcgaggtgcccgaaggaccgcgcacctggtgcatgacccgcaagcccggtgcctga

SEQ ID NO: 34302 - DNA, 2703 bp, synthetic construct
  source 1..2703: mol_type = other DNA
atggccttaccagtgaccgccttgctcctgccgctggccttgctgctccacgccgccaggccgctcgagggacagcctaaggccaatcctaccgtgacactgttccctccaagcagcgaagaactccaggccaacaaggccacacttgtgtgcctgatctccgacttctaccctggggctgtgacagtggcttggaaggccgatggatctcctgtgaaagccggcgtggaaaccaccaagccatccaagcagagcaacaacaaatacgccgccagctcctacctgagcctgacacctgagcagtggaagtcccacagatcctacagctgccaagtgacccacgaaggcagcaccgtggaaaagacagtggcccctacagagtgcagccccatcaagaccgatgtgattacaatggaccccaaggacaactgctccaaggacgccaacgataccctgctgctccagctgaccaacaccagcgcctactacatgtacttgttgctgctgctgaagtccgtggtgtacttcgccatcatcacatgctgcctgctgcggagaaccgccttctgctgcaacggcgagaagtctagggccaagcgatctggatctggagcaacaaacttctcactactcaaacaagcaggtgacgtggaggagaatcccgggcctactagcatggccttaccagtgaccgccttgctcctgccgctggccttgctgctccacgccgccaggccggagatcgtgctgacacagagccctgccaccctgtctctgagccctggcgaaagagccaccctgagctgtagagccagccagagcgtgtccagctacctggcctggtatcagcagaagcccggccaggctccccggctgctgatctacgatgccagcaatagagccaccggcatccccgccagattttccggctctggcagcggcaccgacttcaccctgaccatcagctccctggaacccgaggacttcgccgtgtactactgccagcagcggagcaactggcccatcacattcggccagggcacccggctggaaatcaaaggcggaggcggaagtggaggcggaggatctggcggcggaggctctgaagtgcagctggtggaatcaggcggcggactggtgcagcctggcagaagcctgagactgagctgtgccgccagcggcttcaccttcaacgactacgccatgcactgggtgcgccaggcccctggaaaaggactggaatgggtgtccacaatcagctggaacagcggcagcatcggctacgccgatagcgtgaagggccggttcaccatcagccgggacaacgccaagaagtccctgtacctccagatgaacagcctgcgggccgaggacacagccctgtactattgcgccaaggacatccagtacggcaactactactacggcatggacgtgtggggccagggaaccaccgtgaccgtgtcatctacgcgtgaggaggacctgaagaacgtgttcccacctgaggtggccgtgttcgagcctagcgaggccgagatcagccacacccagaaagccaccctcgtgtgcctggctaccggcttctaccccgaccatgtggaactgtcttggtgggtcaacggcaaagaggtgcacagcggcgtgtgtaccgacccccagccactgaaagaacagcccgccctgaacgacagccggtactgcctgagcagcagactgagagtgtccgccaccttctggcagaacccccggaaccacttcagatgccaggtgcagttctacggcctgagcgagaacgacgagtggacccaggacagagccaagcccgtgacccagatcgtgtctgccgaagcctggggcagagccgattgcggctttaccagcgagagctaccagcagggcgtgctgagcgccaccaacctgagcgtgatcggcttcagaatcctgctgctgaaagtggccggctttaacctgctgatgaccctgcggctgtggtccagccgcgccaagagaagcggatctggcgtgaagcagaccctgaatttcgacctgctgaagctggctggcgacgtggaatccaacccaggcccttctagaggccatatgaccgagtacaagcccacggtgcgcctcgccacccgcgacgacgtccccagggccgtacgcaccctcgccgccgcgttcgccgactaccccgccacgcgccacaccgtcgatccggaccgccacatcgagcgggtcaccgagctgcaagaactcttcctcacgcgcgtcgggctcgacatcggcaaggtgtgggtcgcggacgacggcgccgcggtggcggtctggaccacgccggagagcgtcgaagcgggggcggtgttcgccgagatcggcccgcgcatggccgagttgagcggttcccggctggccgcgcagcaacagatggaaggcctcctggcgccgcaccggcccaaggagcccgcgtggttcctggccaccgtcggcgtctcgcccgaccaccagggcaagggtctgggcagcgccgtcgtgctccccggagtggaggcggccgagcgcgccggggtgcccgccttcctggagacctccgcgccccgcaacctccccttctacgagcggctcggcttcaccgtcaccgccgacgtcgaggtgcccgaaggaccgcgcacctggtgcatgacccgcaagcccggtgcctga

SEQ ID NO: 34303 - DNA, 2694 bp, synthetic construct
  source 1..2694: mol_type = other DNA
atggccttaccagtgaccgccttgctcctgccgctggccttgctgctccacgccgccaggccgctcgaggaggcctctacaaagggaccctccgtgtttcctctggctcccagcagcaagtctacaagcggaggaacagccgctctgggctgcctggtcaaggattactttcccgagcctgtgaccgtgtcctggaatagcggagcactgacaagcggcgtgcacacctttccagccgtgctgcaaagcagcggcctgtactctctgagcagcgtggtcacagtgcctagctctagcctgggcacccagacctacatctgcaatgtgaaccacaagcctagcaacaccaaggtggacaagagagtggaacccaagagctgtcccatcaagaccgatgtgattacaatggaccccaaggacaactgctccaaggacgccaacgataccctgctgctccagctgaccaacaccagcgcctactacatgtacttgttgctgctgctgaagtccgtggtgtacttcgccatcatcacatgctgcctgctgcggagaaccgccttctgctgcaacggcgagaagtctagggccaagcgatctggatctggagcaacaaacttctcactactcaaacaagcaggtgacgtggaggagaatcccgggcctactagcatggccttaccagtgaccgccttgctcctgccgctggccttgctgctccacgccgccaggccggagatcgtgctgacacagagccctgccaccctgtctctgagccctggcgaaagagccaccctgagctgtagagccagccagagcgtgtccagctacctggcctggtatcagcagaagcccggccaggctccccggctgctgatctacgatgccagcaatagagccaccggcatccccgccagattttccggctctggcagcggcaccgacttcaccctgaccatcagctccctggaacccgaggacttcgccgtgtactactgccagcagcggagcaactggcccatcacattcggccagggcacccggctggaaatcaaaggcggaggcggaagtggaggcggaggatctggcggcggaggctctgaagtgcagctggtggaatcaggcggcggactggtgcagcctggcagaagcctgagactgagctgtgccgccagcggcttcaccttcaacgactacgccatgcactgggtgcgccaggcccctggaaaaggactggaatgggtgtccacaatcagctggaacagcggcagcatcggctacgccgatagcgtgaagggccggttcaccatcagccgggacaacgccaagaagtccctgtacctccagatgaacagcctgcgggccgaggacacagccctgtactattgcgccaaggacatccagtacggcaactactactacggcatggacgtgtggggccagggaaccaccgtgaccgtgtcatctacgcgtggacagcctaaggccaatcctaccgtgacactgttccctccaagcagcgaagaactccaggccaacaaggccacacttgtgtgcctgatctccgacttctaccctggggctgtgacagtggcttggaaggccgatggatctcctgtgaaagccggcgtggaaaccaccaagccatccaagcagagcaacaacaaatacgccgccagctcctacctgagcctgacacctgagcagtggaagtcccacagatcctacagctgccaagtgacccacgaaggcagcaccgtggaaaagacagtggcccctacagagtgcagcgaagtgaaaaccgactccaccgaccacgtgaagcccaaagagacagagaacaccaagcagcccagcaagagctgccacaagcccaaggccatcgtgcacaccgagaaagtgaacatgatgagcctgaccgtgctgggcctgcggatgctgttcgccaaaaccgtggccgtgaacttcctgctgaccgccaagctgttcttcctccgcgccaagagaagcggatctggcgtgaagcagaccctgaatttcgacctgctgaagctggctggcgacgtggaatccaacccaggcccttctagaggccatatgaccgagtacaagcccacggtgcgcctcgccacccgcgacgacgtccccagggccgtacgcaccctcgccgccgcgttcgccgactaccccgccacgcgccacaccgtcgatccggaccgccacatcgagcgggtcaccgagctgcaagaactcttcctcacgcgcgtcgggctcgacatcggcaaggtgtgggtcgcggacgacggcgccgcggtggcggtctggaccacgccggagagcgtcgaagcgggggcggtgttcgccgagatcggcccgcgcatggccgagttgagcggttcccggctggccgcgcagcaacagatggaaggcctcctggcgccgcaccggcccaaggagcccgcgtggttcctggccaccgtcggcgtctcgcccgaccaccagggcaagggtctgggcagcgccgtcgtgctccccggagtggaggcggccgagcgcgccggggtgcccgccttcctggagacctccgcgccccgcaacctccccttctacgagcggctcggcttcaccgtcaccgccgacgtcgaggtgcccgaaggaccgcgcacctggtgcatgacccgcaagcccggtgcctga

SEQ ID NO: 34304 - DNA, 2628 bp, synthetic construct
  source 1..2628: mol_type = other DNA
atggccttaccagtgaccgccttgctcctgccgctggccttgctgctccacgccgccaggccgctcgaggaggcctctacaaagggaccctccgtgtttcctctggctcccagcagcaagtctacaagcggaggaacagccgctctgggctgcctggtcaaggattactttcccgagcctgtgaccgtgtcctggaatagcggagcactgacaagcggcgtgcacacctttccagccgtgctgcaaagcagcggcctgtactctctgagcagcgtggtcacagtgcctagctctagcctgggcacccagacctacatctgcaatgtgaaccacaagcctagcaacaccaaggtggacaagagagtggaacccaagagctgtggcagagccgattgcggctttaccagcgagagctaccagcagggcgtgctgagcgccaccatcctgtacgagatcctgctgggcaaggccaccctgtacgccgtgctggtgtctgccctggtgctgatggctatggtcaagcggaaggacagccggggaagggccaagcgatctggatctggagcaacaaacttctcactactcaaacaagcaggtgacgtggaggagaatcccgggcctactagcatggccttaccagtgaccgccttgctcctgccgctggccttgctgctccacgccgccaggccggagatcgtgctgacacagagccctgccaccctgtctctgagccctggcgaaagagccaccctgagctgtagagccagccagagcgtgtccagctacctggcctggtatcagcagaagcccggccaggctccccggctgctgatctacgatgccagcaatagagccaccggcatccccgccagattttccggctctggcagcggcaccgacttcaccctgaccatcagctccctggaacccgaggacttcgccgtgtactactgccagcagcggagcaactggcccatcacattcggccagggcacccggctggaaatcaaaggcggaggcggaagtggaggcggaggatctggcggcggaggctctgaagtgcagctggtggaatcaggcggcggactggtgcagcctggcagaagcctgagactgagctgtgccgccagcggcttcaccttcaacgactacgccatgcactgggtgcgccaggcccctggaaaaggactggaatgggtgtccacaatcagctggaacagcggcagcatcggctacgccgatagcgtgaagggccggttcaccatcagccgggacaacgccaagaagtccctgtacctccagatgaacagcctgcgggccgaggacacagccctgtactattgcgccaaggacatccagtacggcaactactactacggcatggacgtgtggggccagggaaccaccgtgaccgtgtcatctacgcgtggacagcctaaggccaatcctaccgtgacactgttccctccaagcagcgaagaactccaggccaacaaggccacacttgtgtgcctgatctccgacttctaccctggggctgtgacagtggcttggaaggccgatggatctcctgtgaaagccggcgtggaaaccaccaagccatccaagcagagcaacaacaaatacgccgccagctcctacctgagcctgacacctgagcagtggaagtcccacagatcctacagctgccaagtgacccacgaaggcagcaccgtggaaaagacagtggcccctacagagtgcagcatccccgaggacacattcttcccaagccccgagagcagctgcgacgtgaagctggtggaaaagagcttcgagacagacaccaacctgaacttccagaacctgagcgtgatcggcttcagaatcctgctgctgaaagtggccggctttaacctgctgatgaccctgcggctgtggtccagccgcgccaagagaagcggatctggcgtgaagcagaccctgaatttcgacctgctgaagctggctggcgacgtggaatccaacccaggcccttctagaggccatatgaccgagtacaagcccacggtgcgcctcgccacccgcgacgacgtccccagggccgtacgcaccctcgccgccgcgttcgccgactaccccgccacgcgccacaccgtcgatccggaccgccacatcgagcgggtcaccgagctgcaagaactcttcctcacgcgcgtcgggctcgacatcggcaaggtgtgggtcgcggacgacggcgccgcggtggcggtctggaccacgccggagagcgtcgaagcgggggcggtgttcgccgagatcggcccgcgcatggccgagttgagcggttcccggctggccgcgcagcaacagatggaaggcctcctggcgccgcaccggcccaaggagcccgcgtggttcctggccaccgtcggcgtctcgcccgaccaccagggcaagggtctgggcagcgccgtcgtgctccccggagtggaggcggccgagcgcgccggggtgcccgccttcctggagacctccgcgccccgcaacctccccttctacgagcggctcggcttcaccgtcaccgccgacgtcgaggtgcccgaaggaccgcgcacctggtgcatgacccgcaagcccggtgcctga

SEQ ID NO: 34305 - DNA, 2628 bp, synthetic construct
  source 1..2628: mol_type = other DNA
atggccttaccagtgaccgccttgctcctgccgctggccttgctgctccacgccgccaggccgctcgaggaggcctctacaaagggaccctccgtgtttcctctggctcccagcagcaagtctacaagcggaggaacagccgctctgggctgcctggtcaaggattactttcccgagcctgtgaccgtgtcctggaatagcggagcactgacaagcggcgtgcacacctttccagccgtgctgcaaagcagcggcctgtactctctgagcagcgtggtcacagtgcctagctctagcctgggcacccagacctacatctgcaatgtgaaccacaagcctagcaacaccaaggtggacaagagagtggaacccaagagctgtatccccgaggacacattcttcccaagccccgagagcagctgcgacgtgaagctggtggaaaagagcttcgagacagacaccaacctgaacttccagaacctgagcgtgatcggcttcagaatcctgctgctgaaagtggccggctttaacctgctgatgaccctgcggctgtggtccagcagggccaagcgatctggatctggagcaacaaacttctcactactcaaacaagcaggtgacgtggaggagaatcccgggcctactagcatggccttaccagtgaccgccttgctcctgccgctggccttgctgctccacgccgccaggccggagatcgtgctgacacagagccctgccaccctgtctctgagccctggcgaaagagccaccctgagctgtagagccagccagagcgtgtccagctacctggcctggtatcagcagaagcccggccaggctccccggctgctgatctacgatgccagcaatagagccaccggcatccccgccagattttccggctctggcagcggcaccgacttcaccctgaccatcagctccctggaacccgaggacttcgccgtgtactactgccagcagcggagcaactggcccatcacattcggccagggcacccggctggaaatcaaaggcggaggcggaagtggaggcggaggatctggcggcggaggctctgaagtgcagctggtggaatcaggcggcggactggtgcagcctggcagaagcctgagactgagctgtgccgccagcggcttcaccttcaacgactacgccatgcactgggtgcgccaggcccctggaaaaggactggaatgggtgtccacaatcagctggaacagcggcagcatcggctacgccgatagcgtgaagggccggttcaccatcagccgggacaacgccaagaagtccctgtacctccagatgaacagcctgcgggccgaggacacagccctgtactattgcgccaaggacatccagtacggcaactactactacggcatggacgtgtggggccagggaaccaccgtgaccgtgtcatctacgcgtggacagcctaaggccaatcctaccgtgacactgttccctccaagcagcgaagaactccaggccaacaaggccacacttgtgtgcctgatctccgacttctaccctggggctgtgacagtggcttggaaggccgatggatctcctgtgaaagccggcgtggaaaccaccaagccatccaagcagagcaacaacaaatacgccgccagctcctacctgagcctgacacctgagcagtggaagtcccacagatcctacagctgccaagtgacccacgaaggcagcaccgtggaaaagacagtggcccctacagagtgcagcggcagagccgattgcggctttaccagcgagagctaccagcagggcgtgctgagcgccaccatcctgtacgagatcctgctgggcaaggccaccctgtacgccgtgctggtgtctgccctggtgctgatggctatggtcaagcggaaggacagccggggacgcgccaagagaagcggatctggcgtgaagcagaccctgaatttcgacctgctgaagctggctggcgacgtggaatccaacccaggcccttctagaggccatatgaccgagtacaagcccacggtgcgcctcgccacccgcgacgacgtccccagggccgtacgcaccctcgccgccgcgttcgccgactaccccgccacgcgccacaccgtcgatccggaccgccacatcgagcgggtcaccgagctgcaagaactcttcctcacgcgcgtcgggctcgacatcggcaaggtgtgggtcgcggacgacggcgccgcggtggcggtctggaccacgccggagagcgtcgaagcgggggcggtgttcgccgagatcggcccgcgcatggccgagttgagcggttcccggctggccgcgcagcaacagatggaaggcctcctggcgccgcaccggcccaaggagcccgcgtggttcctggccaccgtcggcgtctcgcccgaccaccagggcaagggtctgggcagcgccgtcgtgctccccggagtggaggcggccgagcgcgccggggtgcccgccttcctggagacctccgcgccccgcaacctccccttctacgagcggctcggcttcaccgtcaccgccgacgtcgaggtgcccgaaggaccgcgcacctggtgcatgacccgcaagcccggtgcctga

SEQ ID NO: 34306 - DNA, 1866 bp, synthetic construct
  source 1..1866: mol_type = other DNA
atggccttaccagtgaccgccttgctcctgccgctggccttgctgctccacgccgccaggccggagatcgtgctgacacagagccctgccaccctgtctctgagccctggcgaaagagccaccctgagctgtagagccagccagagcgtgtccagctacctggcctggtatcagcagaagcccggccaggctccccggctgctgatctacgatgccagcaatagagccaccggcatccccgccagattttccggctctggcagcggcaccgacttcaccctgaccatcagctccctggaacccgaggacttcgccgtgtactactgccagcagcggagcaactggcccatcacattcggccagggcacccggctggaaatcaaactcgaggacctgaagaacgtgttcccacctgaggtggccgtgttcgagcctagcgaggccgagatcagccacacccagaaagccaccctcgtgtgcctggctaccggcttctaccccgaccatgtggaactgtcttggtgggtcaacggcaaagaggtgcacagcggcgtgtgtaccgacccccagccactgaaagaacagcccgccctgaacgacagccggtactgcctgagcagcagactgagagtgtccgccaccttctggcagaacccccggaaccacttcagatgccaggtgcagttctacggcctgagcgagaacgacgagtggacccaggacagagccaagcccgtgacccagatcgtgtctgccgaagcctggggcagagccgatagcggctttaccagcgagagctaccagcagggcgtgctgagcgccaccatcctgtacgagatcctgctgggcaaggccaccctgtacgccgtgctggtgtctgccctggtgctgatggctatggtcaagcggaaggacagccggggaagggccaagcgatctggatctggagcaacaaacttctcactactcaaacaagcaggtgacgtggaggagaatcccgggcctactagtatggactggatttggcgcatccttttccttgtcggcgctgctaccggcgcgcattccttcgaagaagtgcagctggtggaatcaggcggcggactggtgcagcctggcagaagcctgagactgagctgtgccgccagcggcttcaccttcaacgactacgccatgcactgggtgcgccaggcccctggaaaaggactggaatgggtgtccacaatcagctggaacagcggcagcatcggctacgccgatagcgtgaagggccggttcaccatcagccgggacaacgccaagaagtccctgtacctccagatgaacagcctgcgggccgaggacacagccctgtactattgcgccaaggacatccagtacggcaactactactacggcatggacgtgtggggccagggaaccaccgtgaccgtgtcatctacgcgtatccagaaccctgatcctgccgtgtaccagctgcgggatagcaagagcagcgacaagagcgtgtgtctgttcaccgacttcgacagccagaccaacgtgtcccagagcaaggactccgacgtgtacatcaccgataagtgcgtgctggacatgcggagcatggacttcaagagcaactccgccgtggcctggtccaacaagtccgatttcgcctgcgccaacgccttcaacaacagcattatccccgaggacacattcttcccaagccccgagagcagcagcgacgtgaagctggtggaaaagagcttcgagacagacaccaacctgaacttccagaacctgagcgtgatcggcttcagaatcctgctgctgaaagtggccggctttaacctgctgatgaccctgcggctgtggtccagc

SEQ ID NO: 34307 - DNA, 2706 bp, synthetic construct
  source 1..2706: mol_type = other DNA
atggccttaccagtgaccgccttgctcctgccgctggccttgctgctccacgccgccaggccggaggttcagctgcttgagtctggcggaggactggttcaacctggcggaagcctgagactgtcttgtgccgcctctggcagaaccttcagcatgggctggtatagacaggcccctggcaagggcctcgaatttgtgtctgccatcacatacagcggcggcagcccttactacgccgattctgtgaagggcagattcaccatcagccgggacaacagcaagaacaccgtgtacctccagatgaacagcctgagagccgaggacaccgccgtgtactactgtgccgccaatccaacctacggcagcgactggaatgccgagaattggggccagggcacactggtcacagtgtctagtggtaccggcggaggcggatctggcggcggaggtagcggtggcggaggatctgaattcgagatcgtgctgacacagagccctgccaccctgtctctgagccctggcgaaagagccaccctgagctgtagagccagccagagcgtgtccagctacctggcctggtatcagcagaagcccggccaggctccccggctgctgatctacgatgccagcaatagagccaccggcatccccgccagattttccggctctggcagcggcaccgacttcaccctgaccatcagctccctggaacccgaggacttcgccgtgtactactgccagcagcggagcaactggcccatcacattcggccagggcacccggctggaaatcaaactcgagatccagaaccctgatcctgccgtgtaccagctgcgggatagcaagagcagcgacaagagcgtgtgtctgttcaccgacttcgacagccagaccaacgtgtcccagagcaaggactccgacgtgtacatcaccgataagtgcgtgctggacatgcggagcatggacttcaagagcaactccgccgtggcctggtccaacaagtccgatttcgcctgcgccaacgccttcaacaacagcattatccccgaggacacattcttcccaagcagcgacgtgccctgcgacgtgaagctggtggaaaagagcttcgagacagacaccaacctgaacttccagaacctgagcgtgatcggcttcagaatcctgctgctgaaagtggccggctttaacctgctgatgaccctgcggctgtggtccagccgcgccaagagaagcggatctggcgtgaagcagaccctgaatttcgacctgctgaagctggctggcgacgtggaatccaacccaggccctactagtaccatggactggatttggcgcatccttttccttgtcggcgctgctaccggcacccattccgggcccgaagtgcaactggttgaatccggtggcggcctggtgcaacccggcggatctctcagacttagctgtgccgcctccggcagaaccttcacaatgggatggtacaggcaggctccagggaaagagagagagttcgtcgccgccatctctctgtctcccacactggcctactacgccgactctgtgaaaggccggttcaccatctccagagataatagcaagaacaccgtggtgctgcaaatgaactctctgagagccgaggatacagccctgtactattgtgccgctgaccggaagtccgtgatgagcatcagacccgattactggggacagggcacactggtcacagtgtctagtggatccggcggcggaggatctggcggaggcggatctgggggcggaggctctttcgaagaagtgcagctggtggaatcaggcggcggactggtgcagcctggcagaagcctgagactgagctgtgccgccagcggcttcaccttcaacgactacgccatgcactgggtgcgccaggcccctggaaaaggactggaatgggtgtccacaatcagctggaacagcggcagcatcggctacgccgatagcgtgaagggccggttcaccatcagccgggacaacgccaagaagtccctgtacctccagatgaacagcctgcgggccgaggacacagccctgtactattgcgccaaggacatccagtacggcaactactactacggcatggacgtgtggggccagggaaccaccgtgaccgtgtcatctacgcgtgaggacctgaagaacgtgttcccacctgaggtggccgtgttcgagcctagcaaggccgagatcgcccacacccagaaagccaccctcgtgtgcctggctaccggcttctaccccgaccatgtggaactgtcttggtgggtcaacggcaaagaggtgcacagcggcgtgtgtaccgacccccagccactgaaagaacagcccgccctgaacgacagccggtactgcctgagcagcagactgagagtgtccgccaccttctggcagaacccccggaaccacttcagatgccaggtgcagttctacggcctgagcgagaacgacgagtggacccaggacagagccaagcccgtgacccagatcgtgtctgccgaagcctggggcagagccgattgcggcatcaccagcgccagctaccaccagggcgtgctgagcgccaccatcctgtacgagatcctgctgggcaaggccaccctgtacgccgtgctggtgtctgccctggtgctgatggctatggtcaagcggaaggacagccggggataa

SEQ ID NO: 34308 - DNA, 2706 bp, synthetic construct
  source 1..2706: mol_type = other DNA
atggccttaccagtgaccgccttgctcctgccgctggccttgctgctccacgccgccaggccggaagtgcagctggttgaatctggcggaggactggttcaggctggcggatctctgagactgtcttgtgccgccagcggcagaacctttagcatgggctggtttagacaggcccctggcaaagagagagagttcgtcgccgccatcacatactctggcggcagcccttactacgccgactctgtgaagggcagattcaccatcagccgggacaacgccaagaacaccgtgtacctccagatgaacagcctgaagcctgaggacaccgccgtgtactactgcgccgccaatccaacatacggcagcgactggaacgccgagaattggggccagggaacccaagtgacagtgtctagcggtaccggcggaggcggatctggcggcggaggtagcggtggcggaggatctgaattcgagatcgtgctgacacagagccctgccaccctgtctctgagccctggcgaaagagccaccctgagctgtagagccagccagagcgtgtccagctacctggcctggtatcagcagaagcccggccaggctccccggctgctgatctacgatgccagcaatagagccaccggcatccccgccagattttccggctctggcagcggcaccgacttcaccctgaccatcagctccctggaacccgaggacttcgccgtgtactactgccagcagcggagcaactggcccatcacattcggccagggcacccggctggaaatcaaactcgagatccagaaccctgatcctgccgtgtaccagctgcgggatagcaagagcagcgacaagagcgtgtgtctgttcaccgacttcgacagccagaccaacgtgtcccagagcaaggactccgacgtgtacatcaccgataagtgcgtgctggacatgcggagcatggacttcaagagcaactccgccgtggcctggtccaacaagtccgatttcgcctgcgccaacgccttcaacaacagcattatccccgaggacacattcttcccaagcagcgacgtgccctgcgacgtgaagctggtggaaaagagcttcgagacagacaccaacctgaacttccagaacctgagcgtgatcggcttcagaatcctgctgctgaaagtggccggctttaacctgctgatgaccctgcggctgtggtccagccgcgccaagagaagcggatctggcgtgaagcagaccctgaatttcgacctgctgaagctggctggcgacgtggaatccaacccaggccctactagtaccatggactggatttggcgcatccttttccttgtcggcgctgctaccggcgcccattccgggcccgaagtgcaactggttgaatccggtggcggcctggtgcaacccggcggatctctcagacttagctgtgccgcctccggcagaaccttcacaatgggatggtacaggcaggctccagggaaagagagagagttcgtcgccgccatctctctgtctcccacactggcctactacgccgactctgtgaaaggccggttcaccatctccagagataatagcaagaacaccgtggtgctgcaaatgaactctctgagagccgaggatacagccctgtactattgtgccgctgaccggaagtccgtgatgagcatcagacccgattactggggacagggcacactggtcacagtgtctagtggatccggcggcggaggatctggcggaggcggatctgggggcggaggctctttcgaagaagtgcagctggtggaatcaggcggcggactggtgcagcctggcagaagcctgagactgagctgtgccgccagcggcttcaccttcaacgactacgccatgcactgggtgcgccaggcccctggaaaaggactggaatgggtgtccacaatcagctggaacagcggcagcatcggctacgccgatagcgtgaagggccggttcaccatcagccgggacaacgccaagaagtccctgtacctccagatgaacagcctgcgggccgaggacacagccctgtactattgcgccaaggacatccagtacggcaactactactacggcatggacgtgtggggccagggaaccaccgtgaccgtgtcatctacgcgtgaggacctgaagaacgtgttcccacctgaggtggccgtgttcgagcctagcaaggccgagatcgcccacacccagaaagccaccctcgtgtgcctggctaccggcttctaccccgaccatgtggaactgtcttggtgggtcaacggcaaagaggtgcacagcggcgtgtgtaccgacccccagccactgaaagaacagcccgccctgaacgacagccggtactgcctgagcagcagactgagagtgtccgccaccttctggcagaacccccggaaccacttcagatgccaggtgcagttctacggcctgagcgagaacgacgagtggacccaggacagagccaagcccgtgacccagatcgtgtctgccgaagcctggggcagagccgattgcggcatcaccagcgccagctaccaccagggcgtgctgagcgccaccatcctgtacgagatcctgctgggcaaggccaccctgtacgccgtgctggtgtctgccctggtgctgatggctatggtcaagcggaaggacagccggggataa

SEQ ID NO: 34309 - DNA, 2697 bp, synthetic construct
  source 1..2697: mol_type = other DNA
atggccttaccagtgaccgccttgctcctgccgctggccttgctgctccacgccgccaggccggaagtgcagctggttgaatctggcggaggactggttcaggctggcggatctctgagactgtcttgtgccgccagcggcagaacctttagcatgggctggtttagacaggcccctggcaaagagagagagttcgtcgccgccatcacatactctggcggcagcccttactacgccgactctgtgaagggcagattcaccatcagccgggacaacgccaagaacaccgtgtacctccagatgaacagcctgaagcctgaggacaccgccgtgtactactgcgccgccaatccaacatacggcagcgactggaacgccgagaattggggccagggaacccaagtgacagtgtctagcggtaccggcggaggcggatctggcggcggaggtagcggtggcggaggatctgaattcgagatcgtgctgacacagagccctgccaccctgtctctgagccctggcgaaagagccaccctgagctgtagagccagccagagcgtgtccagctacctggcctggtatcagcagaagcccggccaggctccccggctgctgatctacgatgccagcaatagagccaccggcatccccgccagattttccggctctggcagcggcaccgacttcaccctgaccatcagctccctggaacccgaggacttcgccgtgtactactgccagcagcggagcaactggcccatcacattcggccagggcacccggctggaaatcaaactcgaggacctgaagaacgtgttcccacctgaggtggccgtgttcgagcctagcgaggccgagatcagccacacccagaaagccaccctcgtgtgcctggctaccggcttctaccccgaccatgtggaactgtcttggtgggtcaacggcaaagaggtgcacagcggcgtgtgtaccgacccccagccactgaaagaacagcccgccctgaacgacagccggtactgcctgagcagcagactgagagtgtccgccaccttctggcagaacccccggaaccacttcagatgccaggtgcagttctacggcctgagcgagaacgacgagtggacccaggacagagccaagcccgtgacccagatcgtgtctgccgaagcctggggcagagccgattgcggctttaccagcgagagctaccagcagggcgtgctgagcgccaccatcctgtacgagatcctgctgggcaaggccaccctgtacgccgtgctggtgtctgccctggtgctgatggctatggtcaagcggaaggacagccggggaagggccaagcgatctggatctggagcaacaaacttctcactactcaaacaagcaggtgacgtggaggagaatcccgggcctactagtgccaccatggactggatttggcgcatccttttccttgtcggcgctgctaccggcgcccattccgggcccgaagtgcaactggttgaatccggtggcggcctggtgcaagcaggcggatctctcagacttagctgtgccgcctccggcagaaccttcacaatgggatggtttaggcaggctccagggaaagagagagagttcgtcgccgccatctctctgtctcccacactggcctactacgccgactctgtgaaaggccggttcaccatctccagagataatgccaagaacaccgtggtgctgcaaatgaactctctgaaacccgaggatacagccctgtactattgtgccgctgaccggaagtccgtgatgagcatcagacccgattactggggacagggcacacaagtcacagtgtcctctggatccggcggcggaggatctggcggaggcggatctgggggcggaggctctttcgaagaagtgcagctggtggaatcaggcggcggactggtgcagcctggcagaagcctgagactgagctgtgccgccagcggcttcaccttcaacgactacgccatgcactgggtgcgccaggcccctggaaaaggactggaatgggtgtccacaatcagctggaacagcggcagcatcggctacgccgatagcgtgaagggccggttcaccatcagccgggacaacgccaagaagtccctgtacctccagatgaacagcctgcgggccgaggacacagccctgtactattgcgccaaggacatccagtacggcaactactactacggcatggacgtgtggggccagggaaccaccgtgaccgtgtcatctacgcgtatccagaaccctgatcctgccgtgtaccagctgcgggatagcaagagcagcgacaagagcgtgtgtctgttcaccgacttcgacagccagaccaacgtgtcccagagcaaggactccgacgtgtacatcaccgataagtgcgtgctggacatgcggagcatggacttcaagagcaactccgccgtggcctggtccaacaagtccgatttcgcctgcgccaacgccttcaacaacagcattatccccgaggacacattcttcccaagccccgagagcagctgcgacgtgaagctggtggaaaagagcttcgagacagacaccaacctgaacttccagaacctgagcgtgatcggcttcagaatcctgctgctgaaagtggccggctttaacctgctgatgaccctgcggctgtggtccagctaa

SEQ ID NO: 34310 - DNA, 2310 bp, synthetic construct
  source 1..2310: mol_type = other DNA
atggccttaccagtgaccgccttgctcctgccgctggccttgctgctccacgccgccaggccggaagtgcagctggttgaatctggcggaggactggttcagcctggcggatctctgagactgagctgtgaagccagcggcttcgccagcgacgattacatcatcggctggttcagacaggcccctggcaaagagagagagggcgtcagctgcatcagctctaagtacgccaacaccgtgtacaccgacagcgtgaagggcagattcagactgagcagaggcaccgccaagaataccgtgtacctccagatgagcgccctgaagcctgaggataccgccgtgtactactgcgctatggacagccgcagagtgacatgccctgagatcagcaccatgcaccggaacttcgattcttggggccagggcacactggtcacagtgtcatctggtaccggcggaggcggatctggcggcggaggtagcggtggcggaggatctgaattcgagatcgtgctgacacagagccctgccaccctgtctctgagccctggcgaaagagccaccctgagctgtagagccagccagagcgtgtccagctacctggcctggtatcagcagaagcccggccaggctccccggctgctgatctacgatgccagcaatagagccaccggcatccccgccagattttccggctctggcagcggcaccgacttcaccctgaccatcagctccctggaacccgaggacttcgccgtgtactactgccagcagcggagcaactggcccatcacattcggccagggcacccggctggaaatcaaactcgaggacctgaagaacgtgttcccacctgaggtggccgtgttcgagcctagcaaggccgagatcgcccacacccagaaagccaccctcgtgtgcctggctaccggcttctaccccgaccatgtggaactgtcttggtgggtcaacggcaaagaggtgcacagcggcgtgtgtaccgacccccagccactgaaagaacagcccgccctgaacgacagccggtactgcctgagcagcagactgagagtgtccgccaccttctggcagaacccccggaaccacttcagatgccaggtgcagttctacggcctgagcgagaacgacgagtggacccaggacagagccaagcccgtgacccagatcgtgtctgccgaagcctggggcagagccgattgcggcatcaccagcgccagctaccaccagggcgtgctgagcgccaccatcctgtacgagatcctgctgggcaaggccaccctgtacgccgtgctggtgtctgccctggtgctgatggctatggtcaagcggaaggacagccggggaagggccaagcgatctggatctggagcaacaaacttctcactactcaaacaagcaggtgacgtggaggagaatcccgggcctactagtatggactggatttggcgcatccttttccttgtcggcgctgctaccggcgcgcattccttcgaagaagtgcagctggtggaatcaggcggcggactggtgcagcctggcagaagcctgagactgagctgtgccgccagcggcttcaccttcaacgactacgccatgcactgggtgcgccaggcccctggaaaaggactggaatgggtgtccacaatcagctggaacagcggcagcatcggctacgccgatagcgtgaagggccggttcaccatcagccgggacaacgccaagaagtccctgtacctccagatgaacagcctgcgggccgaggacacagccctgtactattgcgccaaggacatccagtacggcaactactactacggcatggacgtgtggggccagggaaccaccgtgaccgtgtcatctacgcgtatccagaaccctgatcctgccgtgtaccagctgcgggatagcaagagcagcgacaagagcgtgtgtctgttcaccgacttcgacagccagaccaacgtgtcccagagcaaggactccgacgtgtacatcaccgataagtgcgtgctggacatgcggagcatggacttcaagagcaactccgccgtggcctggtccaacaagtccgatttcgcctgcgccaacgccttcaacaacagcattatccccgaggacacattcttcccaagcagcgacgtgccctgcgacgtgaagctggtggaaaagagcttcgagacagacaccaacctgaacttccagaacctgagcgtgatcggcttcagaatcctgctgctgaaagtggccggctttaacctgctgatgaccctgcggctgtggtccagctaa

SEQ ID NO: 34311 - DNA, 2283 bp, synthetic construct
  source 1..2283: mol_type = other DNA
atggccttaccagtgaccgccttgctcctgccgctggccttgctgctccacgccgccaggccggagatcgtgctgacacagagccctgccaccctgtctctgagccctggcgaaagagccaccctgagctgtagagccagccagagcgtgtccagctacctggcctggtatcagcagaagcccggccaggctccccggctgctgatctacgatgccagcaatagagccaccggcatccccgccagattttccggctctggcagcggcaccgacttcaccctgaccatcagctccctggaacccgaggacttcgccgtgtactactgccagcagcggagcaactggcccatcacattcggccagggcacccggctggaaatcaaactcgaggacctgaagaacgtgttcccacctgaggtggccgtgttcgagcctagcgaggccgagatcagccacacccagaaagccaccctcgtgtgcctggctaccggcttctaccccgaccatgtggaactgtcttggtgggtcaacggcaaagaggtgcacagcggcgtgtgtaccgacccccagccactgaaagaacagcccgccctgaacgacagccggtactgcctgagcagcagactgagagtgtccgccaccttctggcagaacccccggaaccacttcagatgccaggtgcagttctacggcctgagcgagaacgacgagtggacccaggacagagccaagcccgtgacccagatcgtgtctgccgaagcctggggcagagccgattgcggctttaccagcgagagctaccagcagggcgtgctgagcgccaccatcctgtacgagatcctgctgggcaaggccaccctgtacgccgtgctggtgtctgccctggtgctgatggctatggtcaagcggaaggacagccggggaagggccaagcgatctggatctggagcaacaaacttctcactactcaaacaagcaggtgacgtggaggagaatcccgggcctactagtaccatggactggatttggcgcatccttttccttgtcggcgctgctaccggcgcccattccgggcccgaagtgcaactggttgaatccggtggcggcctggtgcaacccggcggatctctcagacttagctgtgccgcctccggcagaaccttcacaatgggatggtacaggcaggctccagggaaagagagagagttcgtcgccgccatctctctgtctcccacactggcctactacgccgactctgtgaaaggccggttcaccatctccagagataatagcaagaacaccgtggtgctgcaaatgaactctctgagagccgaggatacagccctgtactattgtgccgctgaccggaagtccgtgatgagcatcagacccgattactggggacagggcacactggtcacagtgtctagtggatccggcggcggaggatctggcggaggcggatctgggggcggaggctctttcgaagaagtgcagctggtggaatcaggcggcggactggtgcagcctggcagaagcctgagactgagctgtgccgccagcggcttcaccttcaacgactacgccatgcactgggtgcgccaggcccctggaaaaggactggaatgggtgtccacaatcagctggaacagcggcagcatcggctacgccgatagcgtgaagggccggttcaccatcagccgggacaacgccaagaagtccctgtacctccagatgaacagcctgcgggccgaggacacagccctgtactattgcgccaaggacatccagtacggcaactactactacggcatggacgtgtggggccagggaaccaccgtgaccgtgtcatctacgcgtatccagaaccctgatcctgccgtgtaccagctgcgggatagcaagagcagcgacaagagcgtgtgtctgttcaccgacttcgacagccagaccaacgtgtcccagagcaaggactccgacgtgtacatcaccgataagtgcgtgctggacatgcggagcatggacttcaagagcaactccgccgtggcctggtccaacaagtccgatttcgcctgcgccaacgccttcaacaacagcattatccccgaggacacattcttcccaagccccgagagcagctgcgacgtgaagctggtggaaaagagcttcgagacagacaccaacctgaacttccagaacctgagcgtgatcggcttcagaatcctgctgctgaaagtggccggctttaacctgctgatgaccctgcggctgtggtccagctaa

SEQ ID NO: 34312 - DNA, 2301 bp, synthetic construct
  source 1..2301: mol_type = other DNA
atggccttaccagtgaccgccttgctcctgccgctggccttgctgctccacgccgccaggccggagatcgtgctgacacagagccctgccaccctgtctctgagccctggcgaaagagccaccctgagctgtagagccagccagagcgtgtccagctacctggcctggtatcagcagaagcccggccaggctccccggctgctgatctacgatgccagcaatagagccaccggcatccccgccagattttccggctctggcagcggcaccgacttcaccctgaccatcagctccctggaacccgaggacttcgccgtgtactactgccagcagcggagcaactggcccatcacattcggccagggcacccggctggaaatcaaactcgaggacctgaagaacgtgttcccacctgaggtggccgtgttcgagcctagcgaggccgagatcagccacacccagaaagccaccctcgtgtgcctggctaccggcttctaccccgaccatgtggaactgtcttggtgggtcaacggcaaagaggtgcacagcggcgtgtgtaccgacccccagccactgaaagaacagcccgccctgaacgacagccggtactgcctgagcagcagactgagagtgtccgccaccttctggcagaacccccggaaccacttcagatgccaggtgcagttctacggcctgagcgagaacgacgagtggacccaggacagagccaagcccgtgacccagatcgtgtctgccgaagcctggggcagagccgattgcggctttaccagcgagagctaccagcagggcgtgctgagcgccaccatcctgtacgagatcctgctgggcaaggccaccctgtacgccgtgctggtgtctgccctggtgctgatggctatggtcaagcggaaggacagccggggaagggccaagcgatctggatctggagcaacaaacttctcactactcaaacaagcaggtgacgtggaggagaatcccgggcctactagtaccatggactggatttggcgcatccttttccttgtcggcgctgctaccggcgcccattccgggccccaggtgcagctggttgaatctggcggaggactggttcagcctggcggatctctgagactgtcttgtgccgccagcggcaacatcaacagcagaaactgcatgggctggttcagacaggcccctggcaagggaagagaaggcgtggcagctatcggccaagtgaccggcagaacctactacgtggacagcgtgaagggcagattcaccatcagcctggacaacagcaagaacaccctgtacctccagatgaacagcctgagagccgaggacaccgccgtgtactattgtgctgctgcccctggctgtctgctgtctgcacttagaagcgccgactacagaaactggggccagggcacactggtcaccgtttcttctggatccggcggcggaggatctggcggaggcggatctgggggcggaggctctttcgaagaagtgcagctggtggaatcaggcggcggactggtgcagcctggcagaagcctgagactgagctgtgccgccagcggcttcaccttcaacgactacgccatgcactgggtgcgccaggcccctggaaaaggactggaatgggtgtccacaatcagctggaacagcggcagcatcggctacgccgatagcgtgaagggccggttcaccatcagccgggacaacgccaagaagtccctgtacctccagatgaacagcctgcgggccgaggacacagccctgtactattgcgccaaggacatccagtacggcaactactactacggcatggacgtgtggggccagggaaccaccgtgaccgtgtcatctacgcgtatccagaaccctgatcctgccgtgtaccagctgcgggatagcaagagcagcgacaagagcgtgtgtctgttcaccgacttcgacagccagaccaacgtgtcccagagcaaggactccgacgtgtacatcaccgataagtgcgtgctggacatgcggagcatggacttcaagagcaactccgccgtggcctggtccaacaagtccgatttcgcctgcgccaacgccttcaacaacagcattatccccgaggacacattcttcccaagccccgagagcagctgcgacgtgaagctggtggaaaagagcttcgagacagacaccaacctgaacttccagaacctgagcgtgatcggcttcagaatcctgctgctgaaagtggccggctttaacctgctgatgaccctgcggctgtggtccagc

SEQ ID NO: 34313 - DNA, 2304 bp, synthetic construct
  source 1..2304: mol_type = other DNA
atggccttaccagtgaccgccttgctcctgccgctggccttgctgctccacgccgccaggccggagatcgtgctgacacagagccctgccaccctgtctctgagccctggcgaaagagccaccctgagctgtagagccagccagagcgtgtccagctacctggcctggtatcagcagaagcccggccaggctccccggctgctgatctacgatgccagcaatagagccaccggcatccccgccagattttccggctctggcagcggcaccgacttcaccctgaccatcagctccctggaacccgaggacttcgccgtgtactactgccagcagcggagcaactggcccatcacattcggccagggcacccggctggaaatcaaactcgaggacctgaagaacgtgttcccacctgaggtggccgtgttcgagcctagcgaggccgagatcagccacacccagaaagccaccctcgtgtgcctggctaccggcttctaccccgaccatgtggaactgtcttggtgggtcaacggcaaagaggtgcacagcggcgtgtgtaccgacccccagccactgaaagaacagcccgccctgaacgacagccggtactgcctgagcagcagactgagagtgtccgccaccttctggcagaacccccggaaccacttcagatgccaggtgcagttctacggcctgagcgagaacgacgagtggacccaggacagagccaagcccgtgacccagatcgtgtctgccgaagcctggggcagagccgattgcggctttaccagcgagagctaccagcagggcgtgctgagcgccaccatcctgtacgagatcctgctgggcaaggccaccctgtacgccgtgctggtgtctgccctggtgctgatggctatggtcaagcggaaggacagccggggaagggccaagcgatctggatctggagcaacaaacttctcactactcaaacaagcaggtgacgtggaggagaatcccgggcctactagtaccatggactggatttggcgcatccttttccttgtcggcgctgctaccggcgcccattccgggccccaggtgcagctggttgaatctggcggaggatctgttcaggctggcggctctctgagactgtcttgtggcgcttccggcaacatcagcagcagaaactgcatgggctggttcagacaggcccctggcaaagagagagaaggcgttgccgccatcggacaagtgaccggcagatcctactacgtggacagcgtgaagggcagattcaccatcagcctggacaacgccaagaacaccctgtacctccagatgaacacactgaagcccgaggacaccgccatgtactactgtgctgctgcccctggctgtctgctgtctgcacttagaagcgccgactacagaaactggggccagggaacccaagtgacagtgtctagtggatccggcggcggaggatctggcggaggcggatctgggggcggaggctctttcgaagaagtgcagctggtggaatcaggcggcggactggtgcagcctggcagaagcctgagactgagctgtgccgccagcggcttcaccttcaacgactacgccatgcactgggtgcgccaggcccctggaaaaggactggaatgggtgtccacaatcagctggaacagcggcagcatcggctacgccgatagcgtgaagggccggttcaccatcagccgggacaacgccaagaagtccctgtacctccagatgaacagcctgcgggccgaggacacagccctgtactattgcgccaaggacatccagtacggcaactactactacggcatggacgtgtggggccagggaaccaccgtgaccgtgtcatctacgcgtatccagaaccctgatcctgccgtgtaccagctgcgggatagcaagagcagcgacaagagcgtgtgtctgttcaccgacttcgacagccagaccaacgtgtcccagagcaaggactccgacgtgtacatcaccgataagtgcgtgctggacatgcggagcatggacttcaagagcaactccgccgtggcctggtccaacaagtccgatttcgcctgcgccaacgccttcaacaacagcattatccccgaggacacattcttcccaagccccgagagcagctgcgacgtgaagctggtggaaaagagcttcgagacagacaccaacctgaacttccagaacctgagcgtgatcggcttcagaatcctgctgctgaaagtggccggctttaacctgctgatgaccctgcggctgtggtccagctaa

SEQ ID NO: 34314 - DNA, 2727 bp, synthetic construct
  source 1..2727: mol_type = other DNA
atggccttaccagtgaccgccttgctcctgccgctggccttgctgctccacgccgccaggccggaagtgcagctggttgaatctggcggaggactggttcaggctggcggatctctgagactgtcttgtgccgccagcggcagaacctttagcatgggctggtttagacaggcccctggcaaagagagagagttcgtcgccgccatcacatactctggcggcagcccttactacgccgactctgtgaagggcagattcaccatcagccgggacaacgccaagaacaccgtgtacctccagatgaacagcctgaagcctgaggacaccgccgtgtactactgcgccgccaatccaacatacggcagcgactggaacgccgagaattggggccagggaacccaagtgacagtgtctagcggtaccggcggaggcggatctggcggcggaggtagcggtggcggaggatctgaattcgagatcgtgctgacacagagccctgccaccctgtctctgagccctggcgaaagagccaccctgagctgtagagccagccagagcgtgtccagctacctggcctggtatcagcagaagcccggccaggctccccggctgctgatctacgatgccagcaatagagccaccggcatccccgccagattttccggctctggcagcggcaccgacttcaccctgaccatcagctccctggaacccgaggacttcgccgtgtactactgccagcagcggagcaactggcccatcacattcggccagggcacccggctggaaatcaaactcgagatccagaaccctgatcctgccgtgtaccagctgcgggatagcaagagcagcgacaagagcgtgtgtctgttcaccgacttcgacagccagaccaacgtgtcccagagcaaggactccgacgtgtacatcaccgataagtgcgtgctggacatgcggagcatggacttcaagagcaactccgccgtggcctggtccaacaagtccgatttcgcctgcgccaacgccttcaacaacagcattatccccgaggacacattcttcccaagcagcgacgtgccctgcgacgtgaagctggtggaaaagagcttcgagacagacaccaacctgaacttccagaacctgagcgtgatcggcttcagaatcctgctgctgaaagtggccggctttaacctgctgatgaccctgcggctgtggtccagccgcgccaagagaagcggatctggcgtgaagcagaccctgaatttcgacctgctgaagctggctggcgacgtggaatccaacccaggccctactagtaccatggactggatttggcgcatccttttccttgtcggcgctgctaccggcgcccattccgggccccaggtgcagctggttgaatctggcggaggatctgttcaggctggcggctctctgagactgtcttgtggcgcttccggcaacatcagcagcagaaactgcatgggctggttcagacaggcccctggcaaagagagagaaggcgttgccgccatcggacaagtgaccggcagatcctactacgtggacagcgtgaagggcagattcaccatcagcctggacaacgccaagaacaccctgtacctccagatgaacacactgaagcccgaggacaccgccatgtactactgtgctgctgcccctggctgtctgctgtctgcacttagaagcgccgactacagaaactggggccagggaacccaagtgacagtgtctagtggatccggcggcggaggatctggcggaggcggatctgggggcggaggctctttcgaagaagtgcagctggtggaatcaggcggcggactggtgcagcctggcagaagcctgagactgagctgtgccgccagcggcttcaccttcaacgactacgccatgcactgggtgcgccaggcccctggaaaaggactggaatgggtgtccacaatcagctggaacagcggcagcatcggctacgccgatagcgtgaagggccggttcaccatcagccgggacaacgccaagaagtccctgtacctccagatgaacagcctgcgggccgaggacacagccctgtactattgcgccaaggacatccagtacggcaactactactacggcatggacgtgtggggccagggaaccaccgtgaccgtgtcatctacgcgtgaggacctgaagaacgtgttcccacctgaggtggccgtgttcgagcctagcaaggccgagatcgcccacacccagaaagccaccctcgtgtgcctggctaccggcttctaccccgaccatgtggaactgtcttggtgggtcaacggcaaagaggtgcacagcggcgtgtgtaccgacccccagccactgaaagaacagcccgccctgaacgacagccggtactgcctgagcagcagactgagagtgtccgccaccttctggcagaacccccggaaccacttcagatgccaggtgcagttctacggcctgagcgagaacgacgagtggacccaggacagagccaagcccgtgacccagatcgtgtctgccgaagcctggggcagagccgattgcggcatcaccagcgccagctaccaccagggcgtgctgagcgccaccatcctgtacgagatcctgctgggcaaggccaccctgtacgccgtgctggtgtctgccctggtgctgatggctatggtcaagcggaaggacagccggggataa

SEQ ID NO: 34315 - DNA, 2718 bp, synthetic construct
  source 1..2718: mol_type = other DNA
atggccttaccagtgaccgccttgctcctgccgctggccttgctgctccacgccgccaggccgcaggtgcagctggttgaatctggcggaggatctgttcaggctggcggctctctgagactgtcttgtggcgcttccggcaacatcagcagcagaaactgcatgggctggttcagacaggcccctggcaaagagagagaaggcgttgccgccatcggacaagtgaccggcagatcctactacgtggacagcgtgaagggcagattcaccatcagcctggacaacgccaagaacaccctgtacctccagatgaacacactgaagcccgaggacaccgccatgtactactgtgctgctgcccctggctgtctgctgtctgcacttagaagcgccgactacagaaactggggccagggaacccaagtgacagtgtctagtggtaccggcggaggcggatctggcggcggaggtagcggtggcggaggatctgaattcgagatcgtgctgacacagagccctgccaccctgtctctgagccctggcgaaagagccaccctgagctgtagagccagccagagcgtgtccagctacctggcctggtatcagcagaagcccggccaggctccccggctgctgatctacgatgccagcaatagagccaccggcatccccgccagattttccggctctggcagcggcaccgacttcaccctgaccatcagctccctggaacccgaggacttcgccgtgtactactgccagcagcggagcaactggcccatcacattcggccagggcacccggctggaaatcaaactcgaggacctgaagaacgtgttcccacctgaggtggccgtgttcgagcctagcgaggccgagatcagccacacccagaaagccaccctcgtgtgcctggctaccggcttctaccccgaccatgtggaactgtcttggtgggtcaacggcaaagaggtgcacagcggcgtgtgtaccgacccccagccactgaaagaacagcccgccctgaacgacagccggtactgcctgagcagcagactgagagtgtccgccaccttctggcagaacccccggaaccacttcagatgccaggtgcagttctacggcctgagcgagaacgacgagtggacccaggacagagccaagcccgtgacccagatcgtgtctgccgaagcctggggcagagccgattgcggctttaccagcgagagctaccagcagggcgtgctgagcgccaccatcctgtacgagatcctgctgggcaaggccaccctgtacgccgtgctggtgtctgccctggtgctgatggctatggtcaagcggaaggacagccggggaagggccaagcgatctggatctggagcaacaaacttctcactactcaaacaagcaggtgacgtggaggagaatcccgggcctactagtgccaccatggactggatttggcgcatccttttccttgtcggcgctgctaccggcgcccattccgggcccgaagtgcaactggttgaatccggtggcggcctggtgcaagcaggcggatctctcagacttagctgtgccgcctccggcagaaccttcacaatgggatggtttaggcaggctccagggaaagagagagagttcgtcgccgccatctctctgtctcccacactggcctactacgccgactctgtgaaaggccggttcaccatctccagagataatgccaagaacaccgtggtgctgcaaatgaactctctgaaacccgaggatacagccctgtactattgtgccgctgaccggaagtccgtgatgagcatcagacccgattactggggacagggcacacaagtcacagtgtcctctggatccggcggcggaggatctggcggaggcggatctgggggcggaggctctttcgaagaagtgcagctggtggaatcaggcggcggactggtgcagcctggcagaagcctgagactgagctgtgccgccagcggcttcaccttcaacgactacgccatgcactgggtgcgccaggcccctggaaaaggactggaatgggtgtccacaatcagctggaacagcggcagcatcggctacgccgatagcgtgaagggccggttcaccatcagccgggacaacgccaagaagtccctgtacctccagatgaacagcctgcgggccgaggacacagccctgtactattgcgccaaggacatccagtacggcaactactactacggcatggacgtgtggggccagggaaccaccgtgaccgtgtcatctacgcgtatccagaaccctgatcctgccgtgtaccagctgcgggatagcaagagcagcgacaagagcgtgtgtctgttcaccgacttcgacagccagaccaacgtgtcccagagcaaggactccgacgtgtacatcaccgataagtgcgtgctggacatgcggagcatggacttcaagagcaactccgccgtggcctggtccaacaagtccgatttcgcctgcgccaacgccttcaacaacagcattatccccgaggacacattcttcccaagccccgagagcagctgcgacgtgaagctggtggaaaagagcttcgagacagacaccaacctgaacttccagaacctgagcgtgatcggcttcagaatcctgctgctgaaagtggccggctttaacctgctgatgaccctgcggctgtggtccagctaa

SEQ ID NO: 34316 - DNA, 2307 bp, synthetic construct
  source 1..2307: mol_type = other DNA
atggccttaccagtgaccgccttgctcctgccgctggccttgctgctccacgccgccaggccgcaggtgcagctggttgaatctggcggaggatctgttcaggctggcggctctctgagactgtcttgtggcgcttccggcaacatcagcagcagaaactgcatgggctggttcagacaggcccctggcaaagagagagaaggcgttgccgccatcggacaagtgaccggcagatcctactacgtggacagcgtgaagggcagattcaccatcagcctggacaacgccaagaacaccctgtacctccagatgaacacactgaagcccgaggacaccgccatgtactactgtgctgctgcccctggctgtctgctgtctgcacttagaagcgccgactacagaaactggggccagggaacccaagtgacagtgtctagtggtaccggcggaggcggatctggcggcggaggtagcggtggcggaggatctgaattcgagatcgtgctgacacagagccctgccaccctgtctctgagccctggcgaaagagccaccctgagctgtagagccagccagagcgtgtccagctacctggcctggtatcagcagaagcccggccaggctccccggctgctgatctacgatgccagcaatagagccaccggcatccccgccagattttccggctctggcagcggcaccgacttcaccctgaccatcagctccctggaacccgaggacttcgccgtgtactactgccagcagcggagcaactggcccatcacattcggccagggcacccggctggaaatcaaactcgaggacctgaagaacgtgttcccacctgaggtggccgtgttcgagcctagcgaggccgagatcagccacacccagaaagccaccctcgtgtgcctggctaccggcttctaccccgaccatgtggaactgtcttggtgggtcaacggcaaagaggtgcacagcggcgtgtgtaccgacccccagccactgaaagaacagcccgccctgaacgacagccggtactgcctgagcagcagactgagagtgtccgccaccttctggcagaacccccggaaccacttcagatgccaggtgcagttctacggcctgagcgagaacgacgagtggacccaggacagagccaagcccgtgacccagatcgtgtctgccgaagcctggggcagagccgattgcggctttaccagcgagagctaccagcagggcgtgctgagcgccaccatcctgtacgagatcctgctgggcaaggccaccctgtacgccgtgctggtgtctgccctggtgctgatggctatggtcaagcggaaggacagccggggaagggccaagcgatctggatctggagcaacaaacttctcactactcaaacaagcaggtgacgtggaggagaatcccgggcctactagtgccaccatggactggatttggcgcatccttttccttgtcggcgctgctaccggcgcccattccttcgaagaagtgcagctggtggaatcaggcggcggactggtgcagcctggcagaagcctgagactgagctgtgccgccagcggcttcaccttcaacgactacgccatgcactgggtgcgccaggcccctggaaaaggactggaatgggtgtccacaatcagctggaacagcggcagcatcggctacgccgatagcgtgaagggccggttcaccatcagccgggacaacgccaagaagtccctgtacctccagatgaacagcctgcgggccgaggacacagccctgtactattgcgccaaggacatccagtacggcaactactactacggcatggacgtgtggggccagggaaccaccgtgaccgtgtcatctacgcgtatccagaaccctgatcctgccgtgtaccagctgcgggatagcaagagcagcgacaagagcgtgtgtctgttcaccgacttcgacagccagaccaacgtgtcccagagcaaggactccgacgtgtacatcaccgataagtgcgtgctggacatgcggagcatggacttcaagagcaactccgccgtggcctggtccaacaagtccgatttcgcctgcgccaacgccttcaacaacagcattatccccgaggacacattcttcccaagccccgagagcagctgcgacgtgaagctggtggaaaagagcttcgagacagacaccaacctgaacttccagaacctgagcgtgatcggcttcagaatcctgctgctgaaagtggccggctttaacctgctgatgaccctgcggctgtggtccagctaa

SEQ ID NO: 34317 - DNA, 2307 bp, synthetic construct
  source 1..2307: mol_type = other DNA
atggccttaccagtgaccgccttgctcctgccgctggccttgctgctccacgccgccaggccgcaagttcagctggtggaaagcggtggtggcgttgtgcaacctggtggaagtctgaggctgagctgtgccgcttctggcctgagctttagcacctacactgtggcctggttcaggcaggctcccggaaagggtcttgaaggcgtggccgccattccttacaccagccagcacatggtgtacacagacagcgtcagaggccggttcaccatcagcagagacaactccaagaatacgctctatctccagatgaactctctgcgcgccgaagatacagccgtgtattactgcgccaccgacagacggcctggcacctctatgctggctatcaacggctacaacagatggggacagggaaccaccgtgaccgtgtcatctggtaccggcggaggcggatctggcggcggaggtagcggtggcggaggatctgaattcgagatcgtgctgacacagagccctgccaccctgtctctgagccctggcgaaagagccaccctgagctgtagagccagccagagcgtgtccagctacctggcctggtatcagcagaagcccggccaggctccccggctgctgatctacgatgccagcaatagagccaccggcatccccgccagattttccggctctggcagcggcaccgacttcaccctgaccatcagctccctggaacccgaggacttcgccgtgtactactgccagcagcggagcaactggcccatcacattcggccagggcacccggctggaaatcaaactcgaggacctgaagaacgtgttcccacctgaggtggccgtgttcgagcctagcgaggccgagatcagccacacccagaaagccaccctcgtgtgcctggctaccggcttctaccccgaccatgtggaactgtcttggtgggtcaacggcaaagaggtgcacagcggcgtgtgtaccgacccccagccactgaaagaacagcccgccctgaacgacagccggtactgcctgagcagcagactgagagtgtccgccaccttctggcagaacccccggaaccacttcagatgccaggtgcagttctacggcctgagcgagaacgacgagtggacccaggacagagccaagcccgtgacccagatcgtgtctgccgaagcctggggcagagccgattgcggctttaccagcgagagctaccagcagggcgtgctgagcgccaccatcctgtacgagatcctgctgggcaaggccaccctgtacgccgtgctggtgtctgccctggtgctgatggctatggtcaagcggaaggacagccggggaagggccaagcgatctggatctggagcaacaaacttctcactactcaaacaagcaggtgacgtggaggagaatcccgggcctactagtgccaccatggactggatttggcgcatccttttccttgtcggcgctgctaccggcgcccattccttcgaagaagtgcagctggtggaatcaggcggcggactggtgcagcctggcagaagcctgagactgagctgtgccgccagcggcttcaccttcaacgactacgccatgcactgggtgcgccaggcccctggaaaaggactggaatgggtgtccacaatcagctggaacagcggcagcatcggctacgccgatagcgtgaagggccggttcaccatcagccgggacaacgccaagaagtccctgtacctccagatgaacagcctgcgggccgaggacacagccctgtactattgcgccaaggacatccagtacggcaactactactacggcatggacgtgtggggccagggaaccaccgtgaccgtgtcatctacgcgtatccagaaccctgatcctgccgtgtaccagctgcgggatagcaagagcagcgacaagagcgtgtgtctgttcaccgacttcgacagccagaccaacgtgtcccagagcaaggactccgacgtgtacatcaccgataagtgcgtgctggacatgcggagcatggacttcaagagcaactccgccgtggcctggtccaacaagtccgatttcgcctgcgccaacgccttcaacaacagcattatccccgaggacacattcttcccaagccccgagagcagctgcgacgtgaagctggtggaaaagagcttcgagacagacaccaacctgaacttccagaacctgagcgtgatcggcttcagaatcctgctgctgaaagtggccggctttaacctgctgatgaccctgcggctgtggtccagctaa

SEQ ID NO: 34318 - DNA, 2304 bp, synthetic construct
  source 1..2304: mol_type = other DNA
atggccttaccagtgaccgccttgctcctgccgctggccttgctgctccacgccgccaggccggagatcgtgctgacacagagccctgccaccctgtctctgagccctggcgaaagagccaccctgagctgtagagccagccagagcgtgtccagctacctggcctggtatcagcagaagcccggccaggctccccggctgctgatctacgatgccagcaatagagccaccggcatccccgccagattttccggctctggcagcggcaccgacttcaccctgaccatcagctccctggaacccgaggacttcgccgtgtactactgccagcagcggagcaactggcccatcacattcggccagggcacccggctggaaatcaaactcgaggacctgaagaacgtgttcccacctgaggtggccgtgttcgagcctagcgaggccgagatcagccacacccagaaagccaccctcgtgtgcctggctaccggcttctaccccgaccatgtggaactgtcttggtgggtcaacggcaaagaggtgcacagcggcgtgtgtaccgacccccagccactgaaagaacagcccgccctgaacgacagccggtactgcctgagcagcagactgagagtgtccgccaccttctggcagaacccccggaaccacttcagatgccaggtgcagttctacggcctgagcgagaacgacgagtggacccaggacagagccaagcccgtgacccagatcgtgtctgccgaagcctggggcagagccgattgcggctttaccagcgagagctaccagcagggcgtgctgagcgccaccatcctgtacgagatcctgctgggcaaggccaccctgtacgccgtgctggtgtctgccctggtgctgatggctatggtcaagcggaaggacagccggggaagggccaagcgatctggatctggagcaacaaacttctcactactcaaacaagcaggtgacgtggaggagaatcccgggcctactagtaccatggactggatttggcgcatccttttccttgtcggcgctgctaccggcgcccattccgggccccaagttcagctggtggaaagcggtggtggcgttgtgcaacctggtggaagtctgaggctgagctgtgccgcttctggcctgagctttagcacctacactgtggcctggttcaggcaggctcccggaaagggtcttgaaggcgtggccgccattccttacaccagccagcacatggtgtacacagacagcgtcagaggccggttcaccatcagcagagacaactccaagaatacgctctatctccagatgaactctctgcgcgccgaagatacagccgtgtattactgcgccaccgacagacggcctggcacctctatgctggctatcaacggctacaacagatggggacagggaaccaccgtgaccgtgtcatctggatccggcggcggaggatctggcggaggcggatctgggggcggaggctctttcgaagaagtgcagctggtggaatcaggcggcggactggtgcagcctggcagaagcctgagactgagctgtgccgccagcggcttcaccttcaacgactacgccatgcactgggtgcgccaggcccctggaaaaggactggaatgggtgtccacaatcagctggaacagcggcagcatcggctacgccgatagcgtgaagggccggttcaccatcagccgggacaacgccaagaagtccctgtacctccagatgaacagcctgcgggccgaggacacagccctgtactattgcgccaaggacatccagtacggcaactactactacggcatggacgtgtggggccagggaaccaccgtgaccgtgtcatctacgcgtatccagaaccctgatcctgccgtgtaccagctgcgggatagcaagagcagcgacaagagcgtgtgtctgttcaccgacttcgacagccagaccaacgtgtcccagagcaaggactccgacgtgtacatcaccgataagtgcgtgctggacatgcggagcatggacttcaagagcaactccgccgtggcctggtccaacaagtccgatttcgcctgcgccaacgccttcaacaacagcattatccccgaggacacattcttcccaagccccgagagcagctgcgacgtgaagctggtggaaaagagcttcgagacagacaccaacctgaacttccagaacctgagcgtgatcggcttcagaatcctgctgctgaaagtggccggctttaacctgctgatgaccctgcggctgtggtccagctaa

SEQ ID NO: 34319 - DNA, 2310 bp, synthetic construct
  source 1..2310: mol_type = other DNA
atggccttaccagtgaccgccttgctcctgccgctggccttgctgctccacgccgccaggccggagatcgtgctgacacagagccctgccaccctgtctctgagccctggcgaaagagccaccctgagctgtagagccagccagagcgtgtccagctacctggcctggtatcagcagaagcccggccaggctccccggctgctgatctacgatgccagcaatagagccaccggcatccccgccagattttccggctctggcagcggcaccgacttcaccctgaccatcagctccctggaacccgaggacttcgccgtgtactactgccagcagcggagcaactggcccatcacattcggccagggcacccggctggaaatcaaactcgaggacctgaagaacgtgttcccacctgaggtggccgtgttcgagcctagcgaggccgagatcagccacacccagaaagccaccctcgtgtgcctggctaccggcttctaccccgaccatgtggaactgtcttggtgggtcaacggcaaagaggtgcacagcggcgtgtgtaccgacccccagccactgaaagaacagcccgccctgaacgacagccggtactgcctgagcagcagactgagagtgtccgccaccttctggcagaacccccggaaccacttcagatgccaggtgcagttctacggcctgagcgagaacgacgagtggacccaggacagagccaagcccgtgacccagatcgtgtctgccgaagcctggggcagagccgattgcggctttaccagcgagagctaccagcagggcgtgctgagcgccaccatcctgtacgagatcctgctgggcaaggccaccctgtacgccgtgctggtgtctgccctggtgctgatggctatggtcaagcggaaggacagccggggaagggccaagcgatctggatctggagcaacaaacttctcactactcaaacaagcaggtgacgtggaggagaatcccgggcctactagtaccatggactggatttggcgcatccttttccttgtcggcgctgctaccggcgcccattccgggcccgaggtgcagctggttgaatctggcggaggatctgttcaggctggcggctctctgagactgtcttgtgccgccagcggctacacctacagcatcaactgcatgggctggttcagacaggcccctggcaaagagagagaaggcgttgccgccatctctaccggcggaggcagaaccgattaccgggattctgtgaagggcagattcaccatcagccaggacaacgccaagaacaccgtgtacctccagatgaacagcctgaagcctgaggacaccgccatgtactactgtgccggcaagaccacctatcctggctacggatgtggcctgggcagaagcgcctacaattattggggccagggcacccaagtgaccgtgtcatctggatccggcggcggaggatctggcggaggcggatctgggggcggaggctctttcgaagaagtgcagctggtggaatcaggcggcggactggtgcagcctggcagaagcctgagactgagctgtgccgccagcggcttcaccttcaacgactacgccatgcactgggtgcgccaggcccctggaaaaggactggaatgggtgtccacaatcagctggaacagcggcagcatcggctacgccgatagcgtgaagggccggttcaccatcagccgggacaacgccaagaagtccctgtacctccagatgaacagcctgcgggccgaggacacagccctgtactattgcgccaaggacatccagtacggcaactactactacggcatggacgtgtggggccagggaaccaccgtgaccgtgtcatctacgcgtatccagaaccctgatcctgccgtgtaccagctgcgggatagcaagagcagcgacaagagcgtgtgtctgttcaccgacttcgacagccagaccaacgtgtcccagagcaaggactccgacgtgtacatcaccgataagtgcgtgctggacatgcggagcatggacttcaagagcaactccgccgtggcctggtccaacaagtccgatttcgcctgcgccaacgccttcaacaacagcattatccccgaggacacattcttcccaagccccgagagcagctgcgacgtgaagctggtggaaaagagcttcgagacagacaccaacctgaacttccagaacctgagcgtgatcggcttcagaatcctgctgctgaaagtggccggctttaacctgctgatgaccctgcggctgtggtccagctaa

SEQ ID NO: 34320 - DNA, 1866 bp, synthetic construct
  source 1..1866: mol_type = other DNA
atggccttaccagtgaccgccttgctcctgccgctggccttgctgctccacgccgccaggccggagatcgtgctgacacagagccctgccaccctgtctctgagccctggcgaaagagccaccctgagctgtagagccagccagagcgtgtccagctacctggcctggtatcagcagaagcccggccaggctccccggctgctgatctacgatgccagcaatagagccaccggcatccccgccagattttccggctctggcagcggcaccgacttcaccctgaccatcagctccctggaacccgaggacttcgccgtgtactactgccagcagcggagcaactggcccatcacattcggccagggcacccggctggaaatcaaactcgaggacctgaagcacgtgttcccacctgaggtggccgtgttcgagcctagcgacgccgagatctggcacacccagaaagccaccctcgtgtgcctggctaccggcttctaccccgaccatgtggaactgtcttggtgggtcaacggcaaagaggtgcacagcggcgtgtctaccgacccccagccactgaaagaacagcccgccctgaacgacagccggtactgcctgagcagcagactgagagtgtccgccaccttctggcagaacccccggaaccacttcagatgccaggtgcagttctacggcctgagcgagaacgacgagtggacccaggacagagccaagcccgtgacccagatcgtgtctgccgaagcctggggcagagccgattgcggctttaccagcgagagctaccagcagggcgtgctgagcgccaccatcctgtacgagatcctgctgggcaaggccaccctgtacgccgtgctggtgtctgccctggtgctgatggctatggtcaagcggaaggacagccggggaagggccaagcgatctggatctggagcaacaaacttctcactactcaaacaagcaggtgacgtggaggagaatcccgggcctactagtatggactggatttggcgcatccttttccttgtcggcgctgctaccggcgcgcattccttcgaagaagtgcagctggtggaatcaggcggcggactggtgcagcctggcagaagcctgagactgagctgtgccgccagcggcttcaccttcaacgactacgccatgcactgggtgcgccaggcccctggaaaaggactggaatgggtgtccacaatcagctggaacagcggcagcatcggctacgccgatagcgtgaagggccggttcaccatcagccgggacaacgccaagaagtccctgtacctccagatgaacagcctgcgggccgaggacacagccctgtactattgcgccaaggacatccagtacggcaactactactacggcatggacgtgtggggccagggaaccaccgtgaccgtgtcatctacgcgtatccagaaccctgatcctgccgtgtaccagctgcgggatagcaagagcagcgacaagagcgtgtgtctgttcaccgacttcgacagccagaccaacgtgtcccagagcaaggactccgacgtgtacatcaccgataagaccgtgctggacatgcggagcatggacttcaagagcaactccgccgtggcctggtccagcaagtccgatttcgcctgcgccaacgccttcaacaacagcattatccccgaggacacattcttcccaagccccgagatggcctgcgacgtgaagctggtggaaaagagcttcgagacagacaccaacctgaacttccagaacctgctcgtgatctggctgagaatcctgctgctgaaagtggccggctttaacctgctgatgaccctgcggctgtggtccagc

SEQ ID NO: 34321 - DNA, 1866 bp, synthetic construct
  source 1..1866: mol_type = other DNA
atggccttaccagtgaccgccttgctcctgccgctggccttgctgctccacgccgccaggccggagatcgtgctgacacagagccctgccaccctgtctctgagccctggcgaaagagccaccctgagctgtagagccagccagagcgtgtccagctacctggcctggtatcagcagaagcccggccaggctccccggctgctgatctacgatgccagcaatagagccaccggcatccccgccagattttccggctctggcagcggcaccgacttcaccctgaccatcagctccctggaacccgaggacttcgccgtgtactactgccagcagcggagcaactggcccatcacattcggccagggcacccggctggaaatcaaactcgaggacctgaagcacgtgttcccacctgaggtggccgtgttcgagcctagcgacgccgagatctggcacacccagaaagccaccctcgtgtgcctggctaccggcttctaccccgaccatgtggaactgtcttggtgggtcaacggcaaagaggtgcacagcggcgtgtctaccgacccccagccactgaaagaacagcccgccctgaacgacagccggtactgcctgagcagcagactgagagtgtccgccaccttctggcagaacccccggaaccacttcagatgccaggtgcagttctacggcctgagcgagaacgacgagtggacccaggacagagccaagcccgtgacccagatcgtgtctgccgaagcctggggcagagccgattgcggctttaccagcgagagctaccagcagggcgtgctgagcgccaccatcctgtacgagatcctgctgggcaaggccaccctgtacgccgtgctggtgtctgccctggtgctgatggctatggtcaagcggaaggacagccggggaagggccaagcgatctggatctggagcaacaaacttctcactactcaaacaagcaggtgacgtggaggagaatcccgggcctactagtatggactggatttggcgcatccttttccttgtcggcgctgctaccggcgcgcattccttcgaagaagtgcagctggtggaatcaggcggcggactggtgcagcctggcagaagcctgagactgagctgtgccgccagcggcttcaccttcaacgactacgccatgcactgggtgcgccaggcccctggaaaaggactggaatgggtgtccacaatcagctggaacagcggcagcatcggctacgccgatagcgtgaagggccggttcaccatcagccgggacaacgccaagaagtccctgtacctccagatgaacagcctgcgggccgaggacacagccctgtactattgcgccaaggacatccagtacggcaactactactacggcatggacgtgtggggccagggaaccaccgtgaccgtgtcatctacgcgtatccagaaccctgatcctgccgtgtaccagctgcgggatagcaagagcagcgacaagagcgtgtgtctgttcaccgacttcgacagccagaccaacgtgtcccagagcaaggactccgacgtgtacatcaccgataagaccgtgctggacatgcggagcatggacttcaagagcaactccgccgtggcctggtccaccaagtccgatttcgcctgcgccaacgccttcaacaacagcattatccccgaggacacattcttcccaagccccgaggtggtgtgcgacgtgaagctggtggaaaagagcttcgagacagacaccaacctgaacttccagaacctggtggtgatcggcgccagaatcctgctgctgaaagtggccggctttaacctgctgatgaccctgcggctgtggtccagc

SEQ ID NO: 34322 - DNA, 1866 bp, synthetic construct
  source 1..1866: mol_type = other DNA
atggccttaccagtgaccgccttgctcctgccgctggccttgctgctccacgccgccaggccggagatcgtgctgacacagagccctgccaccctgtctctgagccctggcgaaagagccaccctgagctgtagagccagccagagcgtgtccagctacctggcctggtatcagcagaagcccggccaggctccccggctgctgatctacgatgccagcaatagagccaccggcatccccgccagattttccggctctggcagcggcaccgacttcaccctgaccatcagctccctggaacccgaggacttcgccgtgtactactgccagcagcggagcaactggcccatcacattcggccagggcacccggctggaaatcaaactcgaggacctgaagaacgtgttcccacctgaggtggccgtgttcgagcctagcaaggccgagatcagcagaacccagaaagccaccctcgtgtgcctggctaccggcttctaccctcctcatgtggaactgtcttggtgggtcaacggcaaagaggtgcacgacggcgtgtgtaccgacccccagccactgaaagaacagcccgccctgaacgacagccggtactgcctgagcagcagactgagagtgtccgccaccttctggcagaacccccggaaccacttcagatgccaggtgcagttctacggcctgagcgagaacgacgagtggacccaggacagagccaagcccgtgacccagatcgtgtctgccgaagcctggggcagagccgattgcggctttaccagcgagagctaccagcagggcgtgctgagcgccaccatcctgtacgagatcctgctgggcaaggccaccctgtacgccgtgctggtgtctgccctggtgctgatggctatggtcaagcggaaggacagccggggaagggccaagcgatctggatctggagcaacaaacttctcactactcaaacaagcaggtgacgtggaggagaatcccgggcctactagtatggactggatttggcgcatccttttccttgtcggcgctgctaccggcgcgcattccttcgaagaagtgcagctggtggaatcaggcggcggactggtgcagcctggcagaagcctgagactgagctgtgccgccagcggcttcaccttcaacgactacgccatgcactgggtgcgccaggcccctggaaaaggactggaatgggtgtccacaatcagctggaacagcggcagcatcggctacgccgatagcgtgaagggccggttcaccatcagccgggacaacgccaagaagtccctgtacctccagatgaacagcctgcgggccgaggacacagccctgtactattgcgccaaggacatccagtacggcaactactactacggcatggacgtgtggggccagggaaccaccgtgaccgtgtcatctacgcgtatccagaaccctgatcctgccgtgtaccagctgcgggatagcaagagcagcgacaagttcgtgtgtctgttcaccgacttcgacagccagatcaacgtgtcccagagcaaggactccgacgtgtacatcaccgataagtgcgtgctggacatgcggagcatggacttcaagagcaactccgccgtggcctggtccaacaagtccgatttcacctgcgccaacgccttcaacaacagcattatccccgaggacacattcttcccaagccccgagagcagctgcgacgtgaagctggtggaaaagagcttcgagacagacaccaacctgaacttccagaacctgagcgtgatcggcttcagaatcctgctgctgaaagtggccggctttaacctgctgatgaccctgcggctgtggtccagc

SEQ ID NO: 34323 - DNA, 2292 bp, synthetic construct
  source 1..2292: mol_type = other DNA
atggccttaccagtgaccgccttgctcctgccgctggccttgctgctccacgccgccaggccggagatcgtgctgacacagagccctgccaccctgtctctgagccctggcgaaagagccaccctgagctgtagagccagccagagcgtgtccagctacctggcctggtatcagcagaagcccggccaggctccccggctgctgatctacgatgccagcaatagagccaccggcatccccgccagattttccggctctggcagcggcaccgacttcaccctgaccatcagctccctggaacccgaggacttcgccgtgtactactgccagcagcggagcaactggcccatcacattcggccagggcacccggctggaaatcaaactcgaggacctgaagaacgtgttcccacctgaggtggccgtgttcgagcctagcgaggccgagatcagccacacccagaaagccaccctcgtgtgcctggctaccggcttctaccccgaccatgtggaactgtcttggtgggtcaacggcaaagaggtgcacagcggcgtgtgtaccgacccccagccactgaaagaacagcccgccctgaacgacagccggtactgcctgagcagcagactgagagtgtccgccaccttctggcagaacccccggaaccacttcagatgccaggtgcagttctacggcctgagcgagaacgacgagtggacccaggacagagccaagcccgtgacccagatcgtgtctgccgaagcctggggcagagccgattgcggctttaccagcgagagctaccagcagggcgtgctgagcgccaccatcctgtacgagatcctgctgggcaaggccaccctgtacgccgtgctggtgtctgccctggtgctgatggctatggtcaagcggaaggacagccggggaagggccaagcgatctggatctggagcaacaaacttctcactactcaaacaagcaggtgacgtggaggagaatcccgggcctactagtaccatggactggatttggcgcatccttttccttgtcggcgctgctaccggcgcccattccgggccccaggtgcagctccaagaaagcggacccggactggttaagccctctcagaccctgtctctgacctgcacagttagcggagccagcattaccacaggcgagtattattggaattggtttcggcagccaccaggcaaggggcttgagtggatgggtgctattgctgcctctggcagcaccacctactctcccagctttgagagcagaacctccatcagccgggacacctccaaaaaccagttctctctgaagctgtcctccgtgaccgctgctgacaccgccgtctattattgtggccggtctttcggcgtggcagctgtgaccacaggacagaacagaggccagggaacacttgtgaccgtgtcctctggatccggcggcggaggatctggcggaggcggatctgggggcggaggctctttcgaagaagtgcagctggtggaatcaggcggcggactggtgcagcctggcagaagcctgagactgagctgtgccgccagcggcttcaccttcaacgactacgccatgcactgggtgcgccaggcccctggaaaaggactggaatgggtgtccacaatcagctggaacagcggcagcatcggctacgccgatagcgtgaagggccggttcaccatcagccgggacaacgccaagaagtccctgtacctccagatgaacagcctgcgggccgaggacacagccctgtactattgcgccaaggacatccagtacggcaactactactacggcatggacgtgtggggccagggaaccaccgtgaccgtgtcatctacgcgtatccagaaccctgatcctgccgtgtaccagctgcgggatagcaagagcagcgacaagagcgtgtgtctgttcaccgacttcgacagccagaccaacgtgtcccagagcaaggactccgacgtgtacatcaccgataagtgcgtgctggacatgcggagcatggacttcaagagcaactccgccgtggcctggtccaacaagtccgatttcgcctgcgccaacgccttcaacaacagcattatccccgaggacacattcttcccaagccccgagagcagctgcgacgtgaagctggtggaaaagagcttcgagacagacaccaacctgaacttccagaacctgagcgtgatcggcttcagaatcctgctgctgaaagtggccggctttaacctgctgatgaccctgcggctgtggtccagc

SEQ ID NO: 34324 - DNA, 2715 bp, synthetic construct
  source 1..2715: mol_type = other DNA
atggccttaccagtgaccgccttgctcctgccgctggccttgctgctccacgccgccaggccgcaggttcagctgcaagagtctggccctggcctggtcaagcctagccaaacactgagcctgacctgtaccgtgtctggcggctctatcaccaccggcgagttctactggaactggttcagacagcctcctggcaaaggactggaatggatgggagccattgccgccagcggcagcacaacatacagccctagcttcgagagccggaccagcatcagcagagacaccagcaagaatcagttcagcctgaagctgagcagcgtgacagccgccgatacagccgtgtattactgcggcagatcctttggagtggccgccgtgacaaccggccagaatagaggacagggcaccctggtcacagtgtctagcggtaccggcggaggcggatctggcggcggaggtagcggtggcggaggatctgaattcgagatcgtgctgacacagagccctgccaccctgtctctgagccctggcgaaagagccaccctgagctgtagagccagccagagcgtgtccagctacctggcctggtatcagcagaagcccggccaggctccccggctgctgatctacgatgccagcaatagagccaccggcatccccgccagattttccggctctggcagcggcaccgacttcaccctgaccatcagctccctggaacccgaggacttcgccgtgtactactgccagcagcggagcaactggcccatcacattcggccagggcacccggctggaaatcaaactcgagatccagaaccctgatcctgccgtgtaccagctgcgggatagcaagagcagcgacaagagcgtgtgtctgttcaccgacttcgacagccagaccaacgtgtcccagagcaaggactccgacgtgtacatcaccgataagtgcgtgctggacatgcggagcatggacttcaagagcaactccgccgtggcctggtccaacaagtccgatttcgcctgcgccaacgccttcaacaacagcattatccccgaggacacattcttcccaagcagcgacgtgccctgcgacgtgaagctggtggaaaagagcttcgagacagacaccaacctgaacttccagaacctgagcgtgatcggcttcagaatcctgctgctgaaagtggccggctttaacctgctgatgaccctgcggctgtggtccagccgcgccaagagaagcggatctggcgtgaagcagaccctgaatttcgacctgctgaagctggctggcgacgtggaatccaacccaggccctactagtaccatggactggatttggcgcatccttttccttgtcggcgctgctaccggcgcccattccgggcccgaagtgcaactggttgaatccggtggcggcctggtgcaacccggcggatctctcagacttagctgtgccgcctccggcagaaccttcacaatgggatggtacaggcaggctccagggaaagagagagagttcgtcgccgccatctctctgtctcccacactggcctactacgccgactctgtgaaaggccggttcaccatctccagagataatagcaagaacaccgtggtgctgcaaatgaactctctgagagccgaggatacagccctgtactattgtgccgctgaccggaagtccgtgatgagcatcagacccgattactggggacagggcacactggtcacagtgtctagtggatccggcggcggaggatctggcggaggcggatctgggggcggaggctctttcgaagaagtgcagctggtggaatcaggcggcggactggtgcagcctggcagaagcctgagactgagctgtgccgccagcggcttcaccttcaacgactacgccatgcactgggtgcgccaggcccctggaaaaggactggaatgggtgtccacaatcagctggaacagcggcagcatcggctacgccgatagcgtgaagggccggttcaccatcagccgggacaacgccaagaagtccctgtacctccagatgaacagcctgcgggccgaggacacagccctgtactattgcgccaaggacatccagtacggcaactactactacggcatggacgtgtggggccagggaaccaccgtgaccgtgtcatctacgcgtgaggacctgaagaacgtgttcccacctgaggtggccgtgttcgagcctagcaaggccgagatcgcccacacccagaaagccaccctcgtgtgcctggctaccggcttctaccccgaccatgtggaactgtcttggtgggtcaacggcaaagaggtgcacagcggcgtgtgtaccgacccccagccactgaaagaacagcccgccctgaacgacagccggtactgcctgagcagcagactgagagtgtccgccaccttctggcagaacccccggaaccacttcagatgccaggtgcagttctacggcctgagcgagaacgacgagtggacccaggacagagccaagcccgtgacccagatcgtgtctgccgaagcctggggcagagccgattgcggcatcaccagcgccagctaccaccagggcgtgctgagcgccaccatcctgtacgagatcctgctgggcaaggccaccctgtacgccgtgctggtgtctgccctggtgctgatggctatggtcaagcggaaggacagccgggga

SEQ ID NO: 34325 - DNA, 2304 bp, synthetic construct
  source 1..2304: mol_type = other DNA
atggccttaccagtgaccgccttgctcctgccgctggccttgctgctccacgccgccaggccgcaggttcagctgcaagagtctggccctggcctggtcaagcctagccaaacactgagcctgacctgtaccgtgtctggcggctctatcaccaccggcgagttctactggaactggttcagacagcctcctggcaaaggactggaatggatgggagccattgccgccagcggcagcacaacatacagccctagcttcgagagccggaccagcatcagcagagacaccagcaagaatcagttcagcctgaagctgagcagcgtgacagccgccgatacagccgtgtattactgcggcagatcctttggagtggccgccgtgacaaccggccagaatagaggacagggcaccctggtcacagtgtctagcggtaccggcggaggcggatctggcggcggaggtagcggtggcggaggatctgaattcgagatcgtgctgacacagagccctgccaccctgtctctgagccctggcgaaagagccaccctgagctgtagagccagccagagcgtgtccagctacctggcctggtatcagcagaagcccggccaggctccccggctgctgatctacgatgccagcaatagagccaccggcatccccgccagattttccggctctggcagcggcaccgacttcaccctgaccatcagctccctggaacccgaggacttcgccgtgtactactgccagcagcggagcaactggcccatcacattcggccagggcacccggctggaaatcaaactcgagatccagaaccctgatcctgccgtgtaccagctgcgggatagcaagagcagcgacaagagcgtgtgtctgttcaccgacttcgacagccagaccaacgtgtcccagagcaaggactccgacgtgtacatcaccgataagtgcgtgctggacatgcggagcatggacttcaagagcaactccgccgtggcctggtccaacaagtccgatttcgcctgcgccaacgccttcaacaacagcattatccccgaggacacattcttcccaagcagcgacgtgccctgcgacgtgaagctggtggaaaagagcttcgagacagacaccaacctgaacttccagaacctgagcgtgatcggcttcagaatcctgctgctgaaagtggccggctttaacctgctgatgaccctgcggctgtggtccagccgcgccaagagaagcggatctggcgtgaagcagaccctgaatttcgacctgctgaagctggctggcgacgtggaatccaacccaggccctactagtaccatggactggatttggcgcatccttttccttgtcggcgctgctaccggcgcccattccttcgaagaagtgcagctggtggaatcaggcggcggactggtgcagcctggcagaagcctgagactgagctgtgccgccagcggcttcaccttcaacgactacgccatgcactgggtgcgccaggcccctggaaaaggactggaatgggtgtccacaatcagctggaacagcggcagcatcggctacgccgatagcgtgaagggccggttcaccatcagccgggacaacgccaagaagtccctgtacctccagatgaacagcctgcgggccgaggacacagccctgtactattgcgccaaggacatccagtacggcaactactactacggcatggacgtgtggggccagggaaccaccgtgaccgtgtcatctacgcgtgaggacctgaagaacgtgttcccacctgaggtggccgtgttcgagcctagcaaggccgagatcgcccacacccagaaagccaccctcgtgtgcctggctaccggcttctaccccgaccatgtggaactgtcttggtgggtcaacggcaaagaggtgcacagcggcgtgtgtaccgacccccagccactgaaagaacagcccgccctgaacgacagccggtactgcctgagcagcagactgagagtgtccgccaccttctggcagaacccccggaaccacttcagatgccaggtgcagttctacggcctgagcgagaacgacgagtggacccaggacagagccaagcccgtgacccagatcgtgtctgccgaagcctggggcagagccgattgcggcatcaccagcgccagctaccaccagggcgtgctgagcgccaccatcctgtacgagatcctgctgggcaaggccaccctgtacgccgtgctggtgtctgccctggtgctgatggctatggtcaagcggaaggacagccgggga

SEQ ID NO: 34326 - DNA, 2703 bp, synthetic construct
  source 1..2703: mol_type = other DNA
atggccttaccagtgaccgccttgctcctgccgctggccttgctgctccacgccgccaggccggaagtgcagctggttgaatctggcggaggactggttcaggctggcggatctctgagactgtcttgtgccgccagcggcagaacctttagcatgggctggtttagacaggcccctggcaaagagagagagttcgtcgccgccatcacatactctggcggcagcccttactacgccgactctgtgaagggcagattcaccatcagccgggacaacgccaagaacaccgtgtacctccagatgaacagcctgaagcctgaggacaccgccgtgtactactgcgccgccaatccaacatacggcagcgactggaacgccgagaattggggccagggaacccaagtgacagtgtctagcggtaccggcggaggcggatctggcggcggaggtagcggtggcggaggatctgaattcgagatcgtgctgacacagagccctgccaccctgtctctgagccctggcgaaagagccaccctgagctgtagagccagccagagcgtgtccagctacctggcctggtatcagcagaagcccggccaggctccccggctgctgatctacgatgccagcaatagagccaccggcatccccgccagattttccggctctggcagcggcaccgacttcaccctgaccatcagctccctggaacccgaggacttcgccgtgtactactgccagcagcggagcaactggcccatcacattcggccagggcacccggctggaaatcaaactcgaggacctgaagaacgtgttcccacctgaggtggccgtgttcgagcctagcgaggccgagatcagccacacccagaaagccaccctcgtgtgcctggctaccggcttctaccccgaccatgtggaactgtcttggtgggtcaacggcaaagaggtgcacagcggcgtgtgtaccgacccccagccactgaaagaacagcccgccctgaacgacagccggtactgcctgagcagcagactgagagtgtccgccaccttctggcagaacccccggaaccacttcagatgccaggtgcagttctacggcctgagcgagaacgacgagtggacccaggacagagccaagcccgtgacccagatcgtgtctgccgaagcctggggcagagccgattgcggctttaccagcgagagctaccagcagggcgtgctgagcgccaccatcctgtacgagatcctgctgggcaaggccaccctgtacgccgtgctggtgtctgccctggtgctgatggctatggtcaagcggaaggacagccggggaagggccaagcgatctggatctggagcaacaaacttctcactactcaaacaagcaggtgacgtggaggagaatcccgggcctactagtaccatggactggatttggcgcatccttttccttgtcggcgctgctaccggcgcccattccgggccccaggtgcagctccaagaaagcggacccggactggttaagccctctcagaccctgtctctgacctgcacagttagcggagccagcattaccacaggcgagtattattggaattggtttcggcagccaccaggcaaggggcttgagtggatgggtgctattgctgcctctggcagcaccacctactctcccagctttgagagcagaacctccatcagccgggacacctccaaaaaccagttctctctgaagctgtcctccgtgaccgctgctgacaccgccgtctattattgtggccggtctttcggcgtggcagctgtgaccacaggacagaacagaggccagggaacacttgtgaccgtgtcctctggatccggcggcggaggatctggcggaggcggatctgggggcggaggctctttcgaagaagtgcagctggtggaatcaggcggcggactggtgcagcctggcagaagcctgagactgagctgtgccgccagcggcttcaccttcaacgactacgccatgcactgggtgcgccaggcccctggaaaaggactggaatgggtgtccacaatcagctggaacagcggcagcatcggctacgccgatagcgtgaagggccggttcaccatcagccgggacaacgccaagaagtccctgtacctccagatgaacagcctgcgggccgaggacacagccctgtactattgcgccaaggacatccagtacggcaactactactacggcatggacgtgtggggccagggaaccaccgtgaccgtgtcatctacgcgtatccagaaccctgatcctgccgtgtaccagctgcgggatagcaagagcagcgacaagagcgtgtgtctgttcaccgacttcgacagccagaccaacgtgtcccagagcaaggactccgacgtgtacatcaccgataagtgcgtgctggacatgcggagcatggacttcaagagcaactccgccgtggcctggtccaacaagtccgatttcgcctgcgccaacgccttcaacaacagcattatccccgaggacacattcttcccaagccccgagagcagctgcgacgtgaagctggtggaaaagagcttcgagacagacaccaacctgaacttccagaacctgagcgtgatcggcttcagaatcctgctgctgaaagtggccggctttaacctgctgatgaccctgcggctgtggtccagc

SEQ ID NO: 34327 - DNA, 2724 bp, synthetic construct
  source 1..2724: mol_type = other DNA
atggccttaccagtgaccgccttgctcctgccgctggccttgctgctccacgccgccaggccggaagtgcagctggttgaatctggcggaggactggttcaggctggcggatctctgagactgtcttgtgccgccagcggcagaacctttagcatgggctggtttagacaggcccctggcaaagagagagagttcgtcgccgccatcacatactctggcggcagcccttactacgccgactctgtgaagggcagattcaccatcagccgggacaacgccaagaacaccgtgtacctccagatgaacagcctgaagcctgaggacaccgccgtgtactactgcgccgccaatccaacatacggcagcgactggaacgccgagaattggggccagggaacccaagtgacagtgtctagcggtaccggcggaggcggatctggcggcggaggtagcggtggcggaggatctgaattcgagatcgtgctgacacagagccctgccaccctgtctctgagccctggcgaaagagccaccctgagctgtagagccagccagagcgtgtccagctacctggcctggtatcagcagaagcccggccaggctccccggctgctgatctacgatgccagcaatagagccaccggcatccccgccagattttccggctctggcagcggcaccgacttcaccctgaccatcagctccctggaacccgaggacttcgccgtgtactactgccagcagcggagcaactggcccatcacattcggccagggcacccggctggaaatcaaactcgagatccagaaccctgatcctgccgtgtaccagctgcgggatagcaagagcagcgacaagagcgtgtgtctgttcaccgacttcgacagccagaccaacgtgtcccagagcaaggactccgacgtgtacatcaccgataagtgcgtgctggacatgcggagcatggacttcaagagcaactccgccgtggcctggtccaacaagtccgatttcgcctgcgccaacgccttcaacaacagcattatccccgaggacacattcttcccaagcagcgacgtgccctgcgacgtgaagctggtggaaaagagcttcgagacagacaccaacctgaacttccagaacctgagcgtgatcggcttcagaatcctgctgctgaaagtggccggctttaacctgctgatgaccctgcggctgtggtccagccgcgccaagagaagcggatctggcgtgaagcagaccctgaatttcgacctgctgaagctggctggcgacgtggaatccaacccaggccctactagtaccatggactggatttggcgcatccttttccttgtcggcgctgctaccggcgcccattccgggccccaggtgcagctggttgaatctggcggaggactggttcagcctggcggatctctgagactgtcttgtgccgccagcggcaacatcaacagcagaaactgcatgggctggttcagacaggcccctggcaagggaagagaaggcgtggcagctatcggccaagtgaccggcagaacctactacgtggacagcgtgaagggcagattcaccatcagcctggacaacagcaagaacaccctgtacctccagatgaacagcctgagagccgaggacaccgccgtgtactattgtgctgctgcccctggctgtctgctgtctgcacttagaagcgccgactacagaaactggggccagggcacactggtcaccgtttcttctggatccggcggcggaggatctggcggaggcggatctgggggcggaggctctttcgaagaagtgcagctggtggaatcaggcggcggactggtgcagcctggcagaagcctgagactgagctgtgccgccagcggcttcaccttcaacgactacgccatgcactgggtgcgccaggcccctggaaaaggactggaatgggtgtccacaatcagctggaacagcggcagcatcggctacgccgatagcgtgaagggccggttcaccatcagccgggacaacgccaagaagtccctgtacctccagatgaacagcctgcgggccgaggacacagccctgtactattgcgccaaggacatccagtacggcaactactactacggcatggacgtgtggggccagggaaccaccgtgaccgtgtcatctacgcgtgaggacctgaagaacgtgttcccacctgaggtggccgtgttcgagcctagcaaggccgagatcgcccacacccagaaagccaccctcgtgtgcctggctaccggcttctaccccgaccatgtggaactgtcttggtgggtcaacggcaaagaggtgcacagcggcgtgtgtaccgacccccagccactgaaagaacagcccgccctgaacgacagccggtactgcctgagcagcagactgagagtgtccgccaccttctggcagaacccccggaaccacttcagatgccaggtgcagttctacggcctgagcgagaacgacgagtggacccaggacagagccaagcccgtgacccagatcgtgtctgccgaagcctggggcagagccgattgcggcatcaccagcgccagctaccaccagggcgtgctgagcgccaccatcctgtacgagatcctgctgggcaaggccaccctgtacgccgtgctggtgtctgccctggtgctgatggctatggtcaagcggaaggacagccgggga

SEQ ID NO: 34328 - DNA, 2712 bp, synthetic construct
  source 1..2712: mol_type = other DNA
atggccttaccagtgaccgccttgctcctgccgctggccttgctgctccacgccgccaggccggaagtgcagctggttgaatctggcggaggactggttcaggctggcggatctctgagactgtcttgtgccgccagcggcagaacctttagcatgggctggtttagacaggcccctggcaaagagagagagttcgtcgccgccatcacatactctggcggcagcccttactacgccgactctgtgaagggcagattcaccatcagccgggacaacgccaagaacaccgtgtacctccagatgaacagcctgaagcctgaggacaccgccgtgtactactgcgccgccaatccaacatacggcagcgactggaacgccgagaattggggccagggaacccaagtgacagtgtctagcggtaccggcggaggcggatctggcggcggaggtagcggtggcggaggatctgaattcgagatcgtgctgacacagagccctgccaccctgtctctgagccctggcgaaagagccaccctgagctgtagagccagccagagcgtgtccagctacctggcctggtatcagcagaagcccggccaggctccccggctgctgatctacgatgccagcaatagagccaccggcatccccgccagattttccggctctggcagcggcaccgacttcaccctgaccatcagctccctggaacccgaggacttcgccgtgtactactgccagcagcggagcaactggcccatcacattcggccagggcacccggctggaaatcaaactcgaggacctgaagaacgtgttcccacctgaggtggccgtgttcgagcctagcgaggccgagatcagccacacccagaaagccaccctcgtgtgcctggctaccggcttctaccccgaccatgtggaactgtcttggtgggtcaacggcaaagaggtgcacagcggcgtgtgtaccgacccccagccactgaaagaacagcccgccctgaacgacagccggtactgcctgagcagcagactgagagtgtccgccaccttctggcagaacccccggaaccacttcagatgccaggtgcagttctacggcctgagcgagaacgacgagtggacccaggacagagccaagcccgtgacccagatcgtgtctgccgaagcctggggcagagccgattgcggctttaccagcgagagctaccagcagggcgtgctgagcgccaccatcctgtacgagatcctgctgggcaaggccaccctgtacgccgtgctggtgtctgccctggtgctgatggctatggtcaagcggaaggacagccggggaagggccaagcgatctggatctggagcaacaaacttctcactactcaaacaagcaggtgacgtggaggagaatcccgggcctactagtaccatggactggatttggcgcatccttttccttgtcggcgctgctaccggcgcccattccgggccccaggtgcagctggttgaatctggcggaggactggttcagcctggcggatctctgagactgtcttgtgccgccagcggcaacatcaacagcagaaactgcatgggctggttcagacaggcccctggcaagggaagagaaggcgtggcagctatcggccaagtgaccggcagaacctactacgtggacagcgtgaagggcagattcaccatcagcctggacaacagcaagaacaccctgtacctccagatgaacagcctgagagccgaggacaccgccgtgtactattgtgctgctgcccctggctgtctgctgtctgcacttagaagcgccgactacagaaactggggccagggcacactggtcaccgtttcttctggatccggcggcggaggatctggcggaggcggatctgggggcggaggctctttcgaagaagtgcagctggtggaatcaggcggcggactggtgcagcctggcagaagcctgagactgagctgtgccgccagcggcttcaccttcaacgactacgccatgcactgggtgcgccaggcccctggaaaaggactggaatgggtgtccacaatcagctggaacagcggcagcatcggctacgccgatagcgtgaagggccggttcaccatcagccgggacaacgccaagaagtccctgtacctccagatgaacagcctgcgggccgaggacacagccctgtactattgcgccaaggacatccagtacggcaactactactacggcatggacgtgtggggccagggaaccaccgtgaccgtgtcatctacgcgtatccagaaccctgatcctgccgtgtaccagctgcgggatagcaagagcagcgacaagagcgtgtgtctgttcaccgacttcgacagccagaccaacgtgtcccagagcaaggactccgacgtgtacatcaccgataagtgcgtgctggacatgcggagcatggacttcaagagcaactccgccgtggcctggtccaacaagtccgatttcgcctgcgccaacgccttcaacaacagcattatccccgaggacacattcttcccaagccccgagagcagctgcgacgtgaagctggtggaaaagagcttcgagacagacaccaacctgaacttccagaacctgagcgtgatcggcttcagaatcctgctgctgaaagtggccggctttaacctgctgatgaccctgcggctgtggtccagc

SEQ ID NO: 34329 - DNA, 2712 bp, synthetic construct
  source 1..2712: mol_type = other DNA
atggccttaccagtgaccgccttgctcctgccgctggccttgctgctccacgccgccaggccggaagtgcaactggttgaatccggtggcggcctggtgcaagcaggcggatctctcagacttagctgtgccgcctccggcagaaccttcacaatgggatggtttaggcaggctccagggaaagagagagagttcgtcgccgccatctctctgtctcccacactggcctactacgccgactctgtgaaaggccggttcaccatctccagagataatgccaagaacaccgtggtgctgcaaatgaactctctgaaacccgaggatacagccctgtactattgtgccgctgaccggaagtccgtgatgagcatcagacccgattactggggacagggcacacaagtcacagtgtcctctggtaccggcggaggcggatctggcggcggaggtagcggtggcggaggatctgaattcgagatcgtgctgacacagagccctgccaccctgtctctgagccctggcgaaagagccaccctgagctgtagagccagccagagcgtgtccagctacctggcctggtatcagcagaagcccggccaggctccccggctgctgatctacgatgccagcaatagagccaccggcatccccgccagattttccggctctggcagcggcaccgacttcaccctgaccatcagctccctggaacccgaggacttcgccgtgtactactgccagcagcggagcaactggcccatcacattcggccagggcacccggctggaaatcaaactcgaggacctgaagaacgtgttcccacctgaggtggccgtgttcgagcctagcgaggccgagatcagccacacccagaaagccaccctcgtgtgcctggctaccggcttctaccccgaccatgtggaactgtcttggtgggtcaacggcaaagaggtgcacagcggcgtgtgtaccgacccccagccactgaaagaacagcccgccctgaacgacagccggtactgcctgagcagcagactgagagtgtccgccaccttctggcagaacccccggaaccacttcagatgccaggtgcagttctacggcctgagcgagaacgacgagtggacccaggacagagccaagcccgtgacccagatcgtgtctgccgaagcctggggcagagccgattgcggctttaccagcgagagctaccagcagggcgtgctgagcgccaccatcctgtacgagatcctgctgggcaaggccaccctgtacgccgtgctggtgtctgccctggtgctgatggctatggtcaagcggaaggacagccggggaagggccaagcgatctggatctggagcaacaaacttctcactactcaaacaagcaggtgacgtggaggagaatcccgggcctactagtaccatggactggatttggcgcatccttttccttgtcggcgctgctaccggcgcccattccgggccccaggtgcagctggttgaatctggcggaggactggttcagcctggcggatctctgagactgtcttgtgccgccagcggcaacatcaacagcagaaactgcatgggctggttcagacaggcccctggcaagggaagagaaggcgtggcagctatcggccaagtgaccggcagaacctactacgtggacagcgtgaagggcagattcaccatcagcctggacaacagcaagaacaccctgtacctccagatgaacagcctgagagccgaggacaccgccgtgtactattgtgctgctgcccctggctgtctgctgtctgcacttagaagcgccgactacagaaactggggccagggcacactggtcaccgtttcttctggatccggcggcggaggatctggcggaggcggatctgggggcggaggctctttcgaagaagtgcagctggtggaatcaggcggcggactggtgcagcctggcagaagcctgagactgagctgtgccgccagcggcttcaccttcaacgactacgccatgcactgggtgcgccaggcccctggaaaaggactggaatgggtgtccacaatcagctggaacagcggcagcatcggctacgccgatagcgtgaagggccggttcaccatcagccgggacaacgccaagaagtccctgtacctccagatgaacagcctgcgggccgaggacacagccctgtactattgcgccaaggacatccagtacggcaactactactacggcatggacgtgtggggccagggaaccaccgtgaccgtgtcatctacgcgtatccagaaccctgatcctgccgtgtaccagctgcgggatagcaagagcagcgacaagagcgtgtgtctgttcaccgacttcgacagccagaccaacgtgtcccagagcaaggactccgacgtgtacatcaccgataagtgcgtgctggacatgcggagcatggacttcaagagcaactccgccgtggcctggtccaacaagtccgatttcgcctgcgccaacgccttcaacaacagcattatccccgaggacacattcttcccaagccccgagagcagctgcgacgtgaagctggtggaaaagagcttcgagacagacaccaacctgaacttccagaacctgagcgtgatcggcttcagaatcctgctgctgaaagtggccggctttaacctgctgatgaccctgcggctgtggtccagc

SEQ ID NO: 34330 - DNA, 2724 bp, synthetic construct
  source 1..2724: mol_type = other DNA
atggccttaccagtgaccgccttgctcctgccgctggccttgctgctccacgccgccaggccgcaggttcagctgcaagagtctggccctggcctggtcaagcctagccaaacactgagcctgacctgtaccgtgtctggcggctctatcaccaccggcgagttctactggaactggttcagacagcctcctggcaaaggactggaatggatgggagccattgccgccagcggcagcacaacatacagccctagcttcgagagccggaccagcatcagcagagacaccagcaagaatcagttcagcctgaagctgagcagcgtgacagccgccgatacagccgtgtattactgcggcagatcctttggagtggccgccgtgacaaccggccagaatagaggacagggcaccctggtcacagtgtctagcggtaccggcggaggcggatctggcggcggaggtagcggtggcggaggatctgaattcgagatcgtgctgacacagagccctgccaccctgtctctgagccctggcgaaagagccaccctgagctgtagagccagccagagcgtgtccagctacctggcctggtatcagcagaagcccggccaggctccccggctgctgatctacgatgccagcaatagagccaccggcatccccgccagattttccggctctggcagcggcaccgacttcaccctgaccatcagctccctggaacccgaggacttcgccgtgtactactgccagcagcggagcaactggcccatcacattcggccagggcacccggctggaaatcaaactcgaggacctgaagaacgtgttcccacctgaggtggccgtgttcgagcctagcgaggccgagatcagccacacccagaaagccaccctcgtgtgcctggctaccggcttctaccccgaccatgtggaactgtcttggtgggtcaacggcaaagaggtgcacagcggcgtgtgtaccgacccccagccactgaaagaacagcccgccctgaacgacagccggtactgcctgagcagcagactgagagtgtccgccaccttctggcagaacccccggaaccacttcagatgccaggtgcagttctacggcctgagcgagaacgacgagtggacccaggacagagccaagcccgtgacccagatcgtgtctgccgaagcctggggcagagccgattgcggctttaccagcgagagctaccagcagggcgtgctgagcgccaccatcctgtacgagatcctgctgggcaaggccaccctgtacgccgtgctggtgtctgccctggtgctgatggctatggtcaagcggaaggacagccggggaagggccaagcgatctggatctggagcaacaaacttctcactactcaaacaagcaggtgacgtggaggagaatcccgggcctactagtaccatggactggatttggcgcatccttttccttgtcggcgctgctaccggcgcccattccgggccccaggtgcagctggttgaatctggcggaggactggttcagcctggcggatctctgagactgtcttgtgccgccagcggcaacatcaacagcagaaactgcatgggctggttcagacaggcccctggcaagggaagagaaggcgtggcagctatcggccaagtgaccggcagaacctactacgtggacagcgtgaagggcagattcaccatcagcctggacaacagcaagaacaccctgtacctccagatgaacagcctgagagccgaggacaccgccgtgtactattgtgctgctgcccctggctgtctgctgtctgcacttagaagcgccgactacagaaactggggccagggcacactggtcaccgtttcttctggatccggcggcggaggatctggcggaggcggatctgggggcggaggctctttcgaagaagtgcagctggtggaatcaggcggcggactggtgcagcctggcagaagcctgagactgagctgtgccgccagcggcttcaccttcaacgactacgccatgcactgggtgcgccaggcccctggaaaaggactggaatgggtgtccacaatcagctggaacagcggcagcatcggctacgccgatagcgtgaagggccggttcaccatcagccgggacaacgccaagaagtccctgtacctccagatgaacagcctgcgggccgaggacacagccctgtactattgcgccaaggacatccagtacggcaactactactacggcatggacgtgtggggccagggaaccaccgtgaccgtgtcatctacgcgtatccagaaccctgatcctgccgtgtaccagctgcgggatagcaagagcagcgacaagagcgtgtgtctgttcaccgacttcgacagccagaccaacgtgtcccagagcaaggactccgacgtgtacatcaccgataagtgcgtgctggacatgcggagcatggacttcaagagcaactccgccgtggcctggtccaacaagtccgatttcgcctgcgccaacgccttcaacaacagcattatccccgaggacacattcttcccaagccccgagagcagctgcgacgtgaagctggtggaaaagagcttcgagacagacaccaacctgaacttccagaacctgagcgtgatcggcttcagaatcctgctgctgaaagtggccggctttaacctgctgatgaccctgcggctgtggtccagc

SEQ ID NO: 34331 - DNA, 1470 bp, synthetic construct
  source 1..1470: mol_type = other DNA
atggccttaccagtgaccgccttgctcctgccgctggccttgctgctccacgccgccaggccgatccagatgacccagagccccagcagcctgtctgccagcgtgggcgacagagtgaccatcacctgtcggagcagccagagcatcgtgcactccgtgggcaacaccttcctggaatggtatcagcagaagcccggcaaggcccccaagctgctgatctacaaggtgtccaacagattcagcggcgtgcccagcaggtttagcggctctggcagcggcaccgacttcaccctgaccatctctagcctccagcccgaggacttcgccacctactactgttttcaaggcagccagttcccctacaccttcggccagggaacaaaggtggaaatcaagcggggcggaggcggaagtggaggcggaggatctggcggcggaggctctgaagtgcaactggtggaaagcggaggcggcctggtgcagcctggcggatctctgagactgagctgtgccgccagcggctacgagttcagccggtcctggatgaactgggtgcgccaggcccctggcaagggactggaatgggtgggaagaatctaccccggcgacggcgacaccaactacagcggcaagttcaagggccggttcaccatcagcgccgacaccagcaagaacaccgcctacctccagatgaacagcctgcgggccgaggataccgccgtgtactactgtgccagagatggcagctcctgggactggtacttcgacgtgtggggacagggaacccttgtgaccgtgtccagcacgcgtaaaattgaagttatgtatcctcctccttacctagacaatgagaagagcaatggaaccattatccatgtgaaagggaaacacctttgtccaagtcccctatttcccggaccttctaagcccttttgggtgctggtggtggttgggggagtcctggcttgctatagcttgctagtaacagtggcctttattattttctgggtgaggagtaagaggagcaggctcctgcacagtgactacatgaacatgactccacgccgccccggacccacccgcaagcattaccagccctatgccccaccacgcgacttcgcagcctatcgctccagagtgaagttcagcaggagcgcagacgcccccgcgtaccagcagggccagaaccagctctataacgagctcaatctaggacgaagagaggagtacgatgttttggacaagagacgtggccgggaccctgagatggggggaaagccgagaaggaagaaccctcaggaaggcctgtacaatgaactgcagaaagataagatggcggaggcctacagtgagattgggatgaaaggcgagcgccggaggggcaaggggcacgatggcctttaccagggtctcagtacagccaccaaggacacctacgacgcccttcacatgcaggccctgccccctcgc

SEQ ID NO: 34332 - DNA, 1488 bp, synthetic construct
  source 1..1488: mol_type = other DNA
atggccttaccagtgaccgccttgctcctgccgctggccttgctgctccacgccgccaggccgatccagatgacccagagccccagcagcctgtctgccagcgtgggcgacagagtgaccatcacctgtcggagcagccagagcatcgtgcactccgtgggcaacaccttcctggaatggtatcagcagaagcccggcaaggcccccaagctgctgatctacaaggtgtccaacagattcagcggcgtgcccagcaggtttagcggctctggcagcggcaccgacttcaccctgaccatctctagcctccagcccgaggacttcgccacctactactgttttcaaggcagccagttcccctacaccttcggccagggaacaaaggtggaaatcaagcggggcggaggcggaagtggaggcggaggatctggcggcggaggctctgaagtgcaactggtggaaagcggaggcggcctggtgcagcctggcggatctctgagactgagctgtgccgccagcggctacgagttcagccggtcctggatgaactgggtgcgccaggcccctggcaagggactggaatgggtgggaagaatctaccccggcgacggcgacaccaactacagcggcaagttcaagggccggttcaccatcagcgccgacaccagcaagaacaccgcctacctccagatgaacagcctgcgggccgaggataccgccgtgtactactgtgccagagatggcagctcctgggactggtacttcgacgtgtggggacagggaacccttgtgaccgtgtccagcacgcgtgcgaagcccaccacgacgccagcgccgcgaccaccaacaccggcgcccaccatcgcgtcgcagcccctgtccctgcgcccagaggcgtgccggccagcggcggggggcgcagtgcacacgagggggctggacttcgcctgtgacatctacatctgggcgcccttggccgggacttgtggggtccttctcctgtcactggttatcaccctttactgcaaacggggcagaaagaaactcctgtatatattcaaacaaccatttatgagaccagtacaaactactcaagaggaagatggctgtagctgccgatttccagaagaagaagaaggaggatgtgaactgagagtgaagttcagcaggagcgcagacgcccccgcgtaccagcagggccagaaccagctctataacgagctgaatctaggacgaagagaggagtacgatgttttggacaagagacgtggccgggaccctgagatggggggaaagccgagaaggaagaaccctcaggaaggcctgtacaatgaactgcagaaagataagatggcggaggcctacagtgagattgggatgaaaggcgagcgccggaggggcaaggggcacgatggcctttaccagggtctcagtacagccaccaaggacacctacgacgcccttcacatgcaggccctgccccctcgc

SEQ ID NO: 34333 - DNA, 1488 bp, synthetic construct
  source 1..1488: mol_type = other DNA
atggccttaccagtgaccgccttgctcctgccgctggccttgctgctccacgccgccaggccggaagtgcaactggtggaaagcggaggcggcctggtgcagcctggcggatctctgagactgagctgtgccgccagcggctacgagttcagccggtcctggatgaactgggtgcgccaggcccctggcaagggactggaatgggtgggaagaatctaccccggcgacggcgacaccaactacagcggcaagttcaagggccggttcaccatcagcgccgacaccagcaagaacaccgcctacctccagatgaacagcctgcgggccgaggataccgccgtgtactactgtgccagagatggcagctcctgggactggtacttcgacgtgtggggacagggaacccttgtgaccgtgtccagcggcggaggcggaagtggaggcggaggatctggcggcggaggctctatccagatgacccagagccccagcagcctgtctgccagcgtgggcgacagagtgaccatcacctgtcggagcagccagagcatcgtgcactccgtgggcaacaccttcctggaatggtatcagcagaagcccggcaaggcccccaagctgctgatctacaaggtgtccaacagattcagcggcgtgcccagcaggtttagcggctctggcagcggcaccgacttcaccctgaccatctctagcctccagcccgaggacttcgccacctactactgttttcaaggcagccagttcccctacaccttcggccagggaacaaaggtggaaatcaagcggacgcgtgcgaagcccaccacgacgccagcgccgcgaccaccaacaccggcgcccaccatcgcgtcgcagcccctgtccctgcgcccagaggcgtgccggccagcggcggggggcgcagtgcacacgagggggctggacttcgcctgtgacatctacatctgggcgcccttggccgggacttgtggggtccttctcctgtcactggttatcaccctttactgcaaacggggcagaaagaaactcctgtatatattcaaacaaccatttatgagaccagtacaaactactcaagaggaagatggctgtagctgccgatttccagaagaagaagaaggaggatgtgaactgagagtgaagttcagcaggagcgcagacgcccccgcgtaccagcagggccagaaccagctctataacgagctgaatctaggacgaagagaggagtacgatgttttggacaagagacgtggccgggaccctgagatggggggaaagccgagaaggaagaaccctcaggaaggcctgtacaatgaactgcagaaagataagatggcggaggcctacagtgagattgggatgaaaggcgagcgccggaggggcaaggggcacgatggcctttaccagggtctcagtacagccaccaaggacacctacgacgcccttcacatgcaggccctgccccctcgc

SEQ ID NO: 34334 - DNA, 1887 bp, synthetic construct
  source 1..1887: mol_type = other DNA
atggccttaccagtgaccgccttgctcctgccgctggccttgctgctccacgccgccaggccgatccagatgacccagagccccagcagcctgtctgccagcgtgggcgacagagtgaccatcacctgtcggagcagccagagcatcgtgcactccgtgggcaacaccttcctggaatggtatcagcagaagcccggcaaggcccccaagctgctgatctacaaggtgtccaacagattcagcggcgtgcccagcaggtttagcggctctggcagcggcaccgacttcaccctgaccatctctagcctccagcccgaggacttcgccacctactactgttttcaaggcagccagttcccctacaccttcggccagggaacaaaggtggaaatcaagcggctcgagatccagaaccctgatcctgccgtgtaccagctgcgggatagcaagagcagcgacaagagcgtgtgtctgttcaccgacttcgacagccagaccaacgtgtcccagagcaaggactccgacgtgtacatcaccgataagtgcgtgctggacatgcggagcatggacttcaagagcaactccgccgtggcctggtccaacaagtccgatttcgcctgcgccaacgccttcaacaacagcattatccccgaggacacattcttcccaagcagcgacgtgccctgcgacgtgaagctggtggaaaagagcttcgagacagacaccaacctgaacttccagaacctgagcgtgatcggcttcagaatcctgctgctgaaagtggccggctttaacctgctgatgaccctgcggctgtggtccagccgcgccaagagaagcggatctggcgtgaagcagaccctgaatttcgacctgctgaagctggctggcgacgtggaatccaacccaggccctactagtatggactggatttggcgcatccttttccttgtcggcgctgctaccggcgcgcattccttcgaagaagtgcaactggtggaaagcggaggcggcctggtgcagcctggcggatctctgagactgagctgtgccgccagcggctacgagttcagccggtcctggatgaactgggtgcgccaggcccctggcaagggactggaatgggtgggaagaatctaccccggcgacggcgacaccaactacagcggcaagttcaagggccggttcaccatcagcgccgacaccagcaagaacaccgcctacctccagatgaacagcctgcgggccgaggataccgccgtgtactactgtgccagagatggcagctcctgggactggtacttcgacgtgtggggacagggaacccttgtgaccgtgtccagcacgcgtgaggacctgaagaacgtgttcccacctgaggtggccgtgttcgagcctagcaaggccgagatcgcccacacccagaaagccaccctcgtgtgcctggctaccggcttctaccccgaccatgtggaactgtcttggtgggtcaacggcaaagaggtgcacagcggcgtgtgtaccgacccccagccactgaaagaacagcccgccctgaacgacagccggtactgcctgagcagcagactgagagtgtccgccaccttctggcagaacccccggaaccacttcagatgccaggtgcagttctacggcctgagcgagaacgacgagtggacccaggacagagccaagcccgtgacccagatcgtgtctgccgaagcctggggcagagccgattgcggcatcaccagcgccagctaccaccagggcgtgctgagcgccaccatcctgtacgagatcctgctgggcaaggccaccctgtacgccgtgctggtgtctgccctggtgctgatggctatggtcaagcggaaggacagccgggga

SEQ ID NO: 34335 - DNA, 1875 bp, synthetic construct
  source 1..1875: mol_type = other DNA
atggccttaccagtgaccgccttgctcctgccgctggccttgctgctccacgccgccaggccgatccagatgacccagagccccagcagcctgtctgccagcgtgggcgacagagtgaccatcacctgtcggagcagccagagcatcgtgcactccgtgggcaacaccttcctggaatggtatcagcagaagcccggcaaggcccccaagctgctgatctacaaggtgtccaacagattcagcggcgtgcccagcaggtttagcggctctggcagcggcaccgacttcaccctgaccatctctagcctccagcccgaggacttcgccacctactactgttttcaaggcagccagttcccctacaccttcggccagggaacaaaggtggaaatcaagcggctcgaggacctgaagaacgtgttcccacctgaggtggccgtgttcgagcctagcaaggccgagatcgcccacacccagaaagccaccctcgtgtgcctggctaccggcttctaccccgaccatgtggaactgtcttggtgggtcaacggcaaagaggtgcacagcggcgtgtgtaccgacccccagccactgaaagaacagcccgccctgaacgacagccggtactgcctgagcagcagactgagagtgtccgccaccttctggcagaacccccggaaccacttcagatgccaggtgcagttctacggcctgagcgagaacgacgagtggacccaggacagagccaagcccgtgacccagatcgtgtctgccgaagcctggggcagagccgattgcggcatcaccagcgccagctaccaccagggcgtgctgagcgccaccatcctgtacgagatcctgctgggcaaggccaccctgtacgccgtgctggtgtctgccctggtgctgatggctatggtcaagcggaaggacagccggggaagggccaagcgatctggatctggagcaacaaacttctcactactcaaacaagcaggtgacgtggaggagaatcccgggcctactagtatggactggatttggcgcatccttttccttgtcggcgctgctaccggcgcgcattccttcgaagaagtgcaactggtggaaagcggaggcggcctggtgcagcctggcggatctctgagactgagctgtgccgccagcggctacgagttcagccggtcctggatgaactgggtgcgccaggcccctggcaagggactggaatgggtgggaagaatctaccccggcgacggcgacaccaactacagcggcaagttcaagggccggttcaccatcagcgccgacaccagcaagaacaccgcctacctccagatgaacagcctgcgggccgaggataccgccgtgtactactgtgccagagatggcagctcctgggactggtacttcgacgtgtggggacagggaacccttgtgaccgtgtccagcacgcgtatccagaaccctgatcctgccgtgtaccagctgcgggatagcaagagcagcgacaagagcgtgtgtctgttcaccgacttcgacagccagaccaacgtgtcccagagcaaggactccgacgtgtacatcaccgataagtgcgtgctggacatgcggagcatggacttcaagagcaactccgccgtggcctggtccaacaagtccgatttcgcctgcgccaacgccttcaacaacagcattatccccgaggacacattcttcccaagcagcgacgtgccctgcgacgtgaagctggtggaaaagagcttcgagacagacaccaacctgaacttccagaacctgagcgtgatcggcttcagaatcctgctgctgaaagtggccggctttaacctgctgatgaccctgcggctgtggtccagc

SEQ ID NO: 34336 - DNA, 1875 bp, synthetic construct
  source 1..1875: mol_type = other DNA
atggccttaccagtgaccgccttgctcctgccgctggccttgctgctccacgccgccaggccgatccagatgacccagagccccagcagcctgtctgccagcgtgggcgacagagtgaccatcacctgtcggagcagccagagcatcgtgcactccgtgggcaacaccttcctggaatggtatcagcagaagcccggcaaggcccccaagctgctgatctacaaggtgtccaacagattcagcggcgtgcccagcaggtttagcggctctggcagcggcaccgacttcaccctgaccatctctagcctccagcccgaggacttcgccacctactactgttttcaaggcagccagttcccctacaccttcggccagggaacaaaggtggaaatcaagcggctcgaggacctgaagaacgtgttcccacctgaggtggccgtgttcgagcctagcgaggccgagatcagccacacccagaaagccaccctcgtgtgcctggctaccggcttctaccccgaccatgtggaactgtcttggtgggtcaacggcaaagaggtgcacagcggcgtgtgtaccgacccccagccactgaaagaacagcccgccctgaacgacagccggtactgcctgagcagcagactgagagtgtccgccaccttctggcagaacccccggaaccacttcagatgccaggtgcagttctacggcctgagcgagaacgacgagtggacccaggacagagccaagcccgtgacccagatcgtgtctgccgaagcctggggcagagccgattgcggctttaccagcgagagctaccagcagggcgtgctgagcgccaccatcctgtacgagatcctgctgggcaaggccaccctgtacgccgtgctggtgtctgccctggtgctgatggctatggtcaagcggaaggacagccggggaagggccaagcgatctggatctggagcaacaaacttctcactactcaaacaagcaggtgacgtggaggagaatcccgggcctactagtatggactggatttggcgcatccttttccttgtcggcgctgctaccggcgcgcattccttcgaagaagtgcaactggtggaaagcggaggcggcctggtgcagcctggcggatctctgagactgagctgtgccgccagcggctacgagttcagccggtcctggatgaactgggtgcgccaggcccctggcaagggactggaatgggtgggaagaatctaccccggcgacggcgacaccaactacagcggcaagttcaagggccggttcaccatcagcgccgacaccagcaagaacaccgcctacctccagatgaacagcctgcgggccgaggataccgccgtgtactactgtgccagagatggcagctcctgggactggtacttcgacgtgtggggacagggaacccttgtgaccgtgtccagcacgcgtatccagaaccctgatcctgccgtgtaccagctgcgggatagcaagagcagcgacaagagcgtgtgtctgttcaccgacttcgacagccagaccaacgtgtcccagagcaaggactccgacgtgtacatcaccgataagtgcgtgctggacatgcggagcatggacttcaagagcaactccgccgtggcctggtccaacaagtccgatttcgcctgcgccaacgccttcaacaacagcattatccccgaggacacattcttcccaagccccgagagcagctgcgacgtgaagctggtggaaaagagcttcgagacagacaccaacctgaacttccagaacctgagcgtgatcggcttcagaatcctgctgctgaaagtggccggctttaacctgctgatgaccctgcggctgtggtccagc

SEQ ID NO: 34337 - DNA, 1887 bp, synthetic construct
  source 1..1887: mol_type = other DNA
atggccttaccagtgaccgccttgctcctgccgctggccttgctgctccacgccgccaggccgatccagatgacccagagccccagcagcctgtctgccagcgtgggcgacagagtgaccatcacctgtcggagcagccagagcatcgtgcactccgtgggcaacaccttcctggaatggtatcagcagaagcccggcaaggcccccaagctgctgatctacaaggtgtccaacagattcagcggcgtgcccagcaggtttagcggctctggcagcggcaccgacttcaccctgaccatctctagcctccagcccgaggacttcgccacctactactgttttcaaggcagccagttcccctacaccttcggccagggaacaaaggtggaaatcaagcggctcgagatccagaaccctgatcctgccgtgtaccagctgcgggatagcaagagcagcgacaagagcgtgtgtctgttcaccgacttcgacagccagaccaacgtgtcccagagcaaggactccgacgtgtacatcaccgataagtgcgtgctggacatgcggagcatggacttcaagagcaactccgccgtggcctggtccaacaagtccgatttcgcctgcgccaacgccttcaacaacagcattatccccgaggacacattcttcccaagccccgagagcagctgcgacgtgaagctggtggaaaagagcttcgagacagacaccaacctgaacttccagaacctgagcgtgatcggcttcagaatcctgctgctgaaagtggccggctttaacctgctgatgaccctgcggctgtggtccagccgcgccaagagaagcggatctggcgtgaagcagaccctgaatttcgacctgctgaagctggctggcgacgtggaatccaacccaggccctactagtatggactggatttggcgcatccttttccttgtcggcgctgctaccggcgcgcattccttcgaagaagtgcaactggtggaaagcggaggcggcctggtgcagcctggcggatctctgagactgagctgtgccgccagcggctacgagttcagccggtcctggatgaactgggtgcgccaggcccctggcaagggactggaatgggtgggaagaatctaccccggcgacggcgacaccaactacagcggcaagttcaagggccggttcaccatcagcgccgacaccagcaagaacaccgcctacctccagatgaacagcctgcgggccgaggataccgccgtgtactactgtgccagagatggcagctcctgggactggtacttcgacgtgtggggacagggaacccttgtgaccgtgtccagcacgcgtgaggacctgaagaacgtgttcccacctgaggtggccgtgttcgagcctagcgaggccgagatcagccacacccagaaagccaccctcgtgtgcctggctaccggcttctaccccgaccatgtggaactgtcttggtgggtcaacggcaaagaggtgcacagcggcgtgtgtaccgacccccagccactgaaagaacagcccgccctgaacgacagccggtactgcctgagcagcagactgagagtgtccgccaccttctggcagaacccccggaaccacttcagatgccaggtgcagttctacggcctgagcgagaacgacgagtggacccaggacagagccaagcccgtgacccagatcgtgtctgccgaagcctggggcagagccgattgcggctttaccagcgagagctaccagcagggcgtgctgagcgccaccatcctgtacgagatcctgctgggcaaggccaccctgtacgccgtgctggtgtctgccctggtgctgatggctatggtcaagcggaaggacagccgggga

SEQ ID NO: 34338 - DNA, 1923 bp, synthetic construct
  source 1..1923: mol_type = other DNA
atggccttaccagtgaccgccttgctcctgccgctggccttgctgctccacgccgccaggccgctcgaggaggacctgaagaacgtgttcccacctgaggtggccgtgttcgagcctagcaaggccgagatcgcccacacccagaaagccaccctcgtgtgcctggctaccggcttctaccccgaccatgtggaactgtcttggtgggtcaacggcaaagaggtgcacagcggcgtgtgtaccgacccccagccactgaaagaacagcccgccctgaacgacagccggtactgcctgagcagcagactgagagtgtccgccaccttctggcagaacccccggaaccacttcagatgccaggtgcagttctacggcctgagcgagaacgacgagtggacccaggacagagccaagcccgtgacccagatcgtgtctgccgaagcctggggcagagccgattgcggcatcaccagcgccagctaccaccagggcgtgctgagcgccaccatcctgtacgagatcctgctgggcaaggccaccctgtacgccgtgctggtgtctgccctggtgctgatggctatggtcaagcggaaggacagccggggaagggccaagcgatctggatctggagcaacaaacttctcactactcaaacaagcaggtgacgtggaggagaatcccgggcctactagcatggccttaccagtgaccgccttgctcctgccgctggccttgctgctccacgccgccaggccgatccagatgacccagagccccagcagcctgtctgccagcgtgggcgacagagtgaccatcacctgtcggagcagccagagcatcgtgcactccgtgggcaacaccttcctggaatggtatcagcagaagcccggcaaggcccccaagctgctgatctacaaggtgtccaacagattcagcggcgtgcccagcaggtttagcggctctggcagcggcaccgacttcaccctgaccatctctagcctccagcccgaggacttcgccacctactactgttttcaaggcagccagttcccctacaccttcggccagggaacaaaggtggaaatcaagcggggcggaggcggaagtggaggcggaggatctggcggcggaggctctgaagtgcaactggtggaaagcggaggcggcctggtgcagcctggcggatctctgagactgagctgtgccgccagcggctacgagttcagccggtcctggatgaactgggtgcgccaggcccctggcaagggactggaatgggtgggaagaatctaccccggcgacggcgacaccaactacagcggcaagttcaagggccggttcaccatcagcgccgacaccagcaagaacaccgcctacctccagatgaacagcctgcgggccgaggataccgccgtgtactactgtgccagagatggcagctcctgggactggtacttcgacgtgtggggacagggaacccttgtgaccgtgtccagcacgcgtatccagaaccctgatcctgccgtgtaccagctgcgggatagcaagagcagcgacaagagcgtgtgtctgttcaccgacttcgacagccagaccaacgtgtcccagagcaaggactccgacgtgtacatcaccgataagtgcgtgctggacatgcggagcatggacttcaagagcaactccgccgtggcctggtccaacaagtccgatttcgcctgcgccaacgccttcaacaacagcattatccccgaggacacattcttcccaagcagcgacgtgccctgcgacgtgaagctggtggaaaagagcttcgagacagacaccaacctgaacttccagaacctgagcgtgatcggcttcagaatcctgctgctgaaagtggccggctttaacctgctgatgaccctgcggctgtggtccagc

SEQ ID NO: 34339 - DNA, 1944 bp, synthetic construct
  source 1..1944: mol_type = other DNA
atggccttaccagtgaccgccttgctcctgccgctggccttgctgctccacgccgccaggccgctcgagggctccggcgatcgccctgatcctgccgtgtaccagctgcgggatagcaagagcagcgacaagagcgtgtgtctgttcaccgacttcgacagccagaccaacgtgtcccagagcaaggactccgacgtgtacatcaccgataagtgcgtgctggacatgcggagcatggacttcaagagcaactccgccgtggcctggtccaacaagtccgatttcgcctgcgccaacgccttcaacaacagcattatccccgaggacacattcttcccaagccccgagagcagctgcgacgtgaagctggtggaaaagagcttcgagacagacaccaacctgaacttccagaacctgagcgtgatcggcttcagaatcctgctgctgaaagtggccggctttaacctgctgatgaccctgcggctgtggtccagctctagtcgcgccaagagaagcggatctggcgtgaagcagaccctgaatttcgacctgctgaagctggctggcgacgtggaatccaacccaggccccactagcatggccttaccagtgaccgccttgctcctgccgctggccttgctgctccacgccgccaggccgatccagatgacccagagccccagcagcctgtctgccagcgtgggcgacagagtgaccatcacctgtcggagcagccagagcatcgtgcactccgtgggcaacaccttcctggaatggtatcagcagaagcccggcaaggcccccaagctgctgatctacaaggtgtccaacagattcagcggcgtgcccagcaggtttagcggctctggcagcggcaccgacttcaccctgaccatctctagcctccagcccgaggacttcgccacctactactgttttcaaggcagccagttcccctacaccttcggccagggaacaaaggtggaaatcaagcggggcggaggcggaagtggaggcggaggatctggcggcggaggctctgaagtgcaactggtggaaagcggaggcggcctggtgcagcctggcggatctctgagactgagctgtgccgccagcggctacgagttcagccggtcctggatgaactgggtgcgccaggcccctggcaagggactggaatgggtgggaagaatctaccccggcgacggcgacaccaactacagcggcaagttcaagggccggttcaccatcagcgccgacaccagcaagaacaccgcctacctccagatgaacagcctgcgggccgaggataccgccgtgtactactgtgccagagatggcagctcctgggactggtacttcgacgtgtggggacagggaacccttgtgaccgtgtccagcacgcgtgaggacctgaagaacgtgttcccacctgaggtggccgtgttcgagcctagcgaggccgagatcagccacacccagaaagccaccctcgtgtgcctggctaccggcttctaccccgaccatgtggaactgtcttggtgggtcaacggcaaagaggtgcacagcggcgtgtgtaccgacccccagccactgaaagaacagcccgccctgaacgacagccggtactgcctgagcagcagactgagagtgtccgccaccttctggcagaacccccggaaccacttcagatgccaggtgcagttctacggcctgagcgagaacgacgagtggacccaggacagagccaagcccgtgacccagatcgtgtctgccgaagcctggggcagagccgattgcggctttaccagcgagagctaccagcagggcgtgctgagcgccaccatcctgtacgagatcctgctgggcaaggccaccctgtacgccgtgctggtgtctgccctggtgctgatggctatggtcaagcggaaggacagccgggga

SEQ ID NO: 34340 - DNA, 1875 bp, synthetic construct
  source 1..1875: mol_type = other DNA
atggccttaccagtgaccgccttgctcctgccgctggccttgctgctccacgccgccaggccgatccagatgacccagagccccagcagcctgtctgccagcgtgggcgacagagtgaccatcacctgtcggagcagccagagcatcgtgcactccgtgggcaacaccttcctggaatggtatcagcagaagcccggcaaggcccccaagctgctgatctacaaggtgtccaacagattcagcggcgtgcccagcaggtttagcggctctggcagcggcaccgacttcaccctgaccatctctagcctccagcccgaggacttcgccacctactactgttttcaaggcagccagttcccctacaccttcggccagggaacaaaggtggaaatcaagcggctcgaggacctgaagaacgtgttcccacctgaggtggccgtgttcgagcctagcgaggccgagatcagccacacccagaaagccaccctcgtgtgcctggctaccggcttctaccccgaccatgtggaactgtcttggtgggtcaacggcaaagaggtgcacagcggcgtgtctaccgacccccagccactgaaagaacagcccgccctgaacgacagccggtactgcctgagcagcagactgagagtgtccgccaccttctggcagaacccccggaaccacttcagatgccaggtgcagttctacggcctgagcgagaacgacgagtggacccaggacagagccaagcccgtgacccagatcgtgtctgccgaagcctggggcagagccgattgcggctttaccagcgagagctaccagcagggcgtgctgagcgccaccatcctgtacgagatcctgctgggcaaggccaccctgtacgccgtgctggtgtctgccctggtgctgatggctatggtcaagcggaaggacagccggggaagggccaagcgatctggatctggagcaacaaacttctcactactcaaacaagcaggtgacgtggaggagaatcccgggcctactagtatggactggatttggcgcatccttttccttgtcggcgctgctaccggcgcgcattccttcgaagaagtgcaactggtggaaagcggaggcggcctggtgcagcctggcggatctctgagactgagctgtgccgccagcggctacgagttcagccggtcctggatgaactgggtgcgccaggcccctggcaagggactggaatgggtgggaagaatctaccccggcgacggcgacaccaactacagcggcaagttcaagggccggttcaccatcagcgccgacaccagcaagaacaccgcctacctccagatgaacagcctgcgggccgaggataccgccgtgtactactgtgccagagatggcagctcctgggactggtacttcgacgtgtggggacagggaacccttgtgaccgtgtccagcacgcgtatccagaaccctgatcctgccgtgtaccagctgcgggatagcaagagcagcgacaagagcgtgtgtctgttcaccgacttcgacagccagaccaacgtgtcccagagcaaggactccgacgtgtacatcaccgataagaccgtgctggacatgcggagcatggacttcaagagcaactccgccgtggcctggtccaacaagtccgatttcgcctgcgccaacgccttcaacaacagcattatccccgaggacacattcttcccaagccccgagagcagctgcgacgtgaagctggtggaaaagagcttcgagacagacaccaacctgaacttccagaacctgagcgtgatcggcttcagaatcctgctgctgaaagtggccggctttaacctgctgatgaccctgcggctgtggtccagc

SEQ ID NO: 34341 - DNA, 1899 bp, synthetic construct
  source 1..1899: mol_type = other DNA
atggccttaccagtgaccgccttgctcctgccgctggccttgctgctccacgccgccaggccgatccagatgacccagagccccagcagcctgtctgccagcgtgggcgacagagtgaccatcacctgtcggagcagccagagcatcgtgcactccgtgggcaacaccttcctggaatggtatcagcagaagcccggcaaggcccccaagctgctgatctacaaggtgtccaacagattcagcggcgtgcccagcaggtttagcggctctggcagcggcaccgacttcaccctgaccatctctagcctccagcccgaggacttcgccacctactactgttttcaaggcagccagttcccctacaccttcggccagggaacaaaggtggaaatcaagcggctcgaggacaagcagctggacgccgacgtgtcccccaagcctaccatcttcctgccctctatcgccgagacaaagctccagaaggccggcacctacctgtgcctgctggaaaagttcttcccagatgtgattaagatccactggcaggaaaagaagtccaacaccatcctgggcagccaggaaggcaacaccatgaagaccaacgacacctacatgaagttcagctggctgaccgtgcccgagaagtccctggacaaagaacacagatgcatcgtgcggcacgaaaacaacaagaacggcgtggaccaggaaatcatcttcccacccatcaagaccgatgtgattacaatggaccccaaggacaactgctccaaggacgccaacgataccctgctgctccagctgaccaacaccagcgcctactacatgtacttgttgctgctgctgaagtccgtggtgtacttcgccatcatcacatgctgcctgctgcggagaaccgccttctgctgcaacggcgagaagtctagggccaagcgatctggatctggagcaacaaacttctcactactcaaacaagcaggtgacgtggaggagaatcccgggcctactagtatggactggatttggcgcatccttttccttgtcggcgctgctaccggcgcgcattccttcgaagaagtgcaactggtggaaagcggaggcggcctggtgcagcctggcggatctctgagactgagctgtgccgccagcggctacgagttcagccggtcctggatgaactgggtgcgccaggcccctggcaagggactggaatgggtgggaagaatctaccccggcgacggcgacaccaactacagcggcaagttcaagggccggttcaccatcagcgccgacaccagcaagaacaccgcctacctccagatgaacagcctgcgggccgaggataccgccgtgtactactgtgccagagatggcagctcctgggactggtacttcgacgtgtggggacagggaacccttgtgaccgtgtccagcacgcgtagccagcctcacaccaagcccagcgtgttcgtgatgaagaacggcaccaacgtggcctgcctcgtgaaagagttctaccccaaggacatcaggatcaacctggtgtccagcaagaagatcaccgagttcgaccccgccatcgtgatctcccccagcggcaagtacaacgccgtgaagctggggaagtacgaggacagcaacagcgtgacctgctccgtgcagcacgacaacaagaccgtgcacagcaccgactttgaagtgaaaaccgactccaccgaccacgtgaagcccaaagagacagagaacaccaagcagcccagcaagagctgccacaagcccaaggccatcgtgcacaccgagaaagtgaacatgatgagcctgaccgtgctgggcctgcggatgctgttcgccaaaaccgtggccgtgaacttcctgctgaccgccaagctgttcttcctc

SEQ ID NO: 34342 - DNA, 1899 bp, synthetic construct
  source 1..1899: mol_type = other DNA
atggccttaccagtgaccgccttgctcctgccgctggccttgctgctccacgccgccaggccgatccagatgacccagagccccagcagcctgtctgccagcgtgggcgacagagtgaccatcacctgtcggagcagccagagcatcgtgcactccgtgggcaacaccttcctggaatggtatcagcagaagcccggcaaggcccccaagctgctgatctacaaggtgtccaacagattcagcggcgtgcccagcaggtttagcggctctggcagcggcaccgacttcaccctgaccatctctagcctccagcccgaggacttcgccacctactactgttttcaaggcagccagttcccctacaccttcggccagggaacaaaggtggaaatcaagcggctcgagagccagcctcacaccaagcccagcgtgttcgtgatgaagaacggcaccaacgtggcctgcctcgtgaaagagttctaccccaaggacatcaggatcaacctggtgtccagcaagaagatcaccgagttcgaccccgccatcgtgatctcccccagcggcaagtacaacgccgtgaagctggggaagtacgaggacagcaacagcgtgacctgctccgtgcagcacgacaacaagaccgtgcacagcaccgactttgaagtgaaaaccgactccaccgaccacgtgaagcccaaagagacagagaacaccaagcagcccagcaagagctgccacaagcccaaggccatcgtgcacaccgagaaagtgaacatgatgagcctgaccgtgctgggcctgcggatgctgttcgccaaaaccgtggccgtgaacttcctgctgaccgccaagctgttcttcctcagggccaagcgatctggatctggagcaacaaacttctcactactcaaacaagcaggtgacgtggaggagaatcccgggcctactagtatggactggatttggcgcatccttttccttgtcggcgctgctaccggcgcgcattccttcgaagaagtgcaactggtggaaagcggaggcggcctggtgcagcctggcggatctctgagactgagctgtgccgccagcggctacgagttcagccggtcctggatgaactgggtgcgccaggcccctggcaagggactggaatgggtgggaagaatctaccccggcgacggcgacaccaactacagcggcaagttcaagggccggttcaccatcagcgccgacaccagcaagaacaccgcctacctccagatgaacagcctgcgggccgaggataccgccgtgtactactgtgccagagatggcagctcctgggactggtacttcgacgtgtggggacagggaacccttgtgaccgtgtccagcacgcgtgacaagcagctggacgccgacgtgtcccccaagcctaccatcttcctgccctctatcgccgagacaaagctccagaaggccggcacctacctgtgcctgctggaaaagttcttcccagatgtgattaagatccactggcaggaaaagaagtccaacaccatcctgggcagccaggaaggcaacaccatgaagaccaacgacacctacatgaagttcagctggctgaccgtgcccgagaagtccctggacaaagaacacagatgcatcgtgcggcacgaaaacaacaagaacggcgtggaccaggaaatcatcttcccacccatcaagaccgatgtgattacaatggaccccaaggacaactgctccaaggacgccaacgataccctgctgctccagctgaccaacaccagcgcctactacatgtacttgttgctgctgctgaagtccgtggtgtacttcgccatcatcacatgctgcctgctgcggagaaccgccttctgctgcaacggcgagaagtct

SEQ ID NO: 34343 - DNA, 1944 bp, synthetic construct
  source 1..1944: mol_type = other DNA
atggccttaccagtgaccgccttgctcctgccgctggccttgctgctccacgccgccaggccgctcgaggacaagcagctggacgccgacgtgtcccccaagcctaccatcttcctgccctctatcgccgagacaaagctccagaaggccggcacctacctgtgcctgctggaaaagttcttcccagatgtgattaagatccactggcaggaaaagaagtccaacaccatcctgggcagccaggaaggcaacaccatgaagaccaacgacacctacatgaagttcagctggctgaccgtgcccgagaagtccctggacaaagaacacagatgcatcgtgcggcacgaaaacaacaagaacggcgtggaccaggaaatcatcttcccacccatcaagaccgatgtgattacaatggaccccaaggacaactgctccaaggacgccaacgataccctgctgctccagctgaccaacaccagcgcctactacatgtacttgttgctgctgctgaagtccgtggtgtacttcgccatcatcacatgctgcctgctgcggagaaccgccttctgctgcaacggcgagaagtctagggccaagcgatctggatctggagcaacaaacttctcactactcaaacaagcaggtgacgtggaggagaatcccgggcctactagcatggccttaccagtgaccgccttgctcctgccgctggccttgctgctccacgccgccaggccgatccagatgacccagagccccagcagcctgtctgccagcgtgggcgacagagtgaccatcacctgtcggagcagccagagcatcgtgcactccgtgggcaacaccttcctggaatggtatcagcagaagcccggcaaggcccccaagctgctgatctacaaggtgtccaacagattcagcggcgtgcccagcaggtttagcggctctggcagcggcaccgacttcaccctgaccatctctagcctccagcccgaggacttcgccacctactactgttttcaaggcagccagttcccctacaccttcggccagggaacaaaggtggaaatcaagcggggcggaggcggaagtggaggcggaggatctggcggcggaggctctgaagtgcaactggtggaaagcggaggcggcctggtgcagcctggcggatctctgagactgagctgtgccgccagcggctacgagttcagccggtcctggatgaactgggtgcgccaggcccctggcaagggactggaatgggtgggaagaatctaccccggcgacggcgacaccaactacagcggcaagttcaagggccggttcaccatcagcgccgacaccagcaagaacaccgcctacctccagatgaacagcctgcgggccgaggataccgccgtgtactactgtgccagagatggcagctcctgggactggtacttcgacgtgtggggacagggaacccttgtgaccgtgtccagcacgcgtagccagcctcacaccaagcccagcgtgttcgtgatgaagaacggcaccaacgtggcctgcctcgtgaaagagttctaccccaaggacatcaggatcaacctggtgtccagcaagaagatcaccgagttcgaccccgccatcgtgatctcccccagcggcaagtacaacgccgtgaagctggggaagtacgaggacagcaacagcgtgacctgctccgtgcagcacgacaacaagaccgtgcacagcaccgactttgaagtgaaaaccgactccaccgaccacgtgaagcccaaagagacagagaacaccaagcagcccagcaagagctgccacaagcccaaggccatcgtgcacaccgagaaagtgaacatgatgagcctgaccgtgctgggcctgcggatgctgttcgccaaaaccgtggccgtgaacttcctgctgaccgccaagctgttcttcctc

SEQ ID NO: 34344 - DNA, 2406 bp, synthetic construct
  source 1..2406: mol_type = other DNA
atggccttaccagtgaccgccttgctcctgccgctggccttgctgctccacgccgccaggccgatccagatgacccagagccccagcagcctgtctgccagcgtgggcgacagagtgaccatcacctgtcggagcagccagagcatcgtgcactccgtgggcaacaccttcctggaatggtatcagcagaagcccggcaaggcccccaagctgctgatctacaaggtgtccaacagattcagcggcgtgcccagcaggtttagcggctctggcagcggcaccgacttcaccctgaccatctctagcctccagcccgaggacttcgccacctactactgttttcaaggcagccagttcccctacaccttcggccagggaacaaaggtggaaatcaagcggggacagcctaaggccaatcctaccgtgacactgttccctccaagcagcgaagaactccaggccaacaaggccacacttgtgtgcctgatctccgacttctaccctggggctgtgacagtggcttggaaggccgatggatctcctgtgaaagccggcgtggaaaccaccaagccatccaagcagagcaacaacaaatacgccgccagctcctacctgagcctgacacctgagcagtggaagtcccacagatcctacagctgccaagtgacccacgaaggcagcaccgtggaaaagacagtggcccctacagagtgcagcggatcccagagcttcggcctgctggaccccaagctgtgctacctgctggatggcatcctgttcatctacggcgtgatcctgaccgccctgttcctgagagtgaagttcagcagaagcgccgacgcccctgcctaccagcagggacagaaccaactgtacaacgagctgaacctgggcagacgggaagagtacgacgtgctggacaagcggagaggcagggaccctgagatgggcggaaagccccagcggagaaagaacccccaggaaggactgtataacgaactccagaaagacaagatggccgaagcctacagcgagatcggcatgaagggcgagcggagaagaggcaagggccacgatggcctgtaccagggcctgagcaccgccaccaaggacacctatgacgccctgcacatgcaggccctgcctccaagaagggccaagcgatctggatctggagcaacaaacttctcactactcaaacaagcaggtgacgtggaggagaatcccgggcctactagtatggactggatttggcgcatccttttccttgtcggcgctgctaccggcgcgcattccttcgaagaagtgcaactggtggaaagcggaggcggcctggtgcagcctggcggatctctgagactgagctgtgccgccagcggctacgagttcagccggtcctggatgaactgggtgcgccaggcccctggcaagggactggaatgggtgggaagaatctaccccggcgacggcgacaccaactacagcggcaagttcaagggccggttcaccatcagcgccgacaccagcaagaacaccgcctacctccagatgaacagcctgcgggccgaggataccgccgtgtactactgtgccagagatggcagctcctgggactggtacttcgacgtgtggggacagggaacccttgtgaccgtgtccagcgcctctacaaagggaccctccgtgtttcctctggctcccagcagcaagtctacaagcggaggaacagccgctctgggctgcctggtcaaggattactttcccgagcctgtgaccgtgtcctggaatagcggagcactgacaagcggcgtgcacacctttccagccgtgctgcaaagcagcggcctgtactctctgagcagcgtggtcacagtgcctagctctagcctgggcacccagacctacatctgcaatgtgaaccacaagcctagcaacaccaaggtggacaagagagtggaacccaagagctgtggtacccagagttttgggttgttggaccctaaattgtgctatctgttggacggaatcctgttcatttacggagtgatcctgaccgcattgttcctgcgggttaagttttccagatccgcagacgcacccgcttaccaacaagggcagaaccaactctacaatgaacttaatttggggcggagggaagagtacgacgttctggacaaaaggaggggacgagatcccgagatgggcggaaagcctcagcgaaggaagaatccgcaagaggggctttataacgaactccagaaagataaaatggcagaagcctatagtgagattgggatgaagggagaaaggaggaggggtaaaggtcacgatgggttgtaccaaggattgagcacagccactaaagatacctatgatgcgctccacatgcaggccctgccgccaaga

SEQ ID NO: 34345 - DNA, 2463 bp, synthetic construct
  source 1..2463: mol_type = other DNA
atggccttaccagtgaccgccttgctcctgccgctggccttgctgctccacgccgccaggccgatccagatgacccagagccccagcagcctgtctgccagcgtgggcgacagagtgaccatcacctgtcggagcagccagagcatcgtgcactccgtgggcaacaccttcctggaatggtatcagcagaagcccggcaaggcccccaagctgctgatctacaaggtgtccaacagattcagcggcgtgcccagcaggtttagcggctctggcagcggcaccgacttcaccctgaccatctctagcctccagcccgaggacttcgccacctactactgttttcaaggcagccagttcccctacaccttcggccagggaacaaaggtggaaatcaagcggctcgaggacctgaagaacgtgttcccacctgaggtggccgtgttcgagcctagcgaggccgagatcagccacacccagaaagccaccctcgtgtgcctggctaccggcttctaccccgaccatgtggaactgtcttggtgggtcaacggcaaagaggtgcacagcggcgtgtctaccgacccccagccactgaaagaacagcccgccctgaacgacagccggtactgcctgagcagcagactgagagtgtccgccaccttctggcagaacccccggaaccacttcagatgccaggtgcagttctacggcctgagcgagaacgacgagtggacccaggacagagccaagcccgtgacccagatcgtgtctgccgaagcctggggcagagccgattgcggatcccagagcttcggcctgctggaccccaagctgtgctacctgctggatggcatcctgttcatctacggcgtgatcctgaccgccctgttcctgagagtgaagttcagcagaagcgccgacgcccctgcctaccagcagggacagaaccaactgtacaacgagctgaacctgggcagacgggaagagtacgacgtgctggacaagcggagaggcagggaccctgagatgggcggaaagccccagcggagaaagaacccccaggaaggactgtataacgaactccagaaagacaagatggccgaagcctacagcgagatcggcatgaagggcgagcggagaagaggcaagggccacgatggcctgtaccagggcctgagcaccgccaccaaggacacctatgacgccctgcacatgcaggccctgcctccaagaagggccaagcgatctggatctggagcaacaaacttctcactactcaaacaagcaggtgacgtggaggagaatcccgggcctactagtatggactggatttggcgcatccttttccttgtcggcgctgctaccggcgcgcattccttcgaagaagtgcaactggtggaaagcggaggcggcctggtgcagcctggcggatctctgagactgagctgtgccgccagcggctacgagttcagccggtcctggatgaactgggtgcgccaggcccctggcaagggactggaatgggtgggaagaatctaccccggcgacggcgacaccaactacagcggcaagttcaagggccggttcaccatcagcgccgacaccagcaagaacaccgcctacctccagatgaacagcctgcgggccgaggataccgccgtgtactactgtgccagagatggcagctcctgggactggtacttcgacgtgtggggacagggaacccttgtgaccgtgtccagcacgcgtatccagaaccctgatcctgccgtgtaccagctgcgggatagcaagagcagcgacaagagcgtgtgtctgttcaccgacttcgacagccagaccaacgtgtcccagagcaaggactccgacgtgtacatcaccgataagaccgtgctggacatgcggagcatggacttcaagagcaactccgccgtggcctggtccaacaagtccgatttcgcctgcgccaacgccttcaacaacagcattatccccgaggacacattcttcccaagccccgagagcagctgcggtacccagagttttgggttgttggaccctaaattgtgctatctgttggacggaatcctgttcatttacggagtgatcctgaccgcattgttcctgcgggttaagttttccagatccgcagacgcacccgcttaccaacaagggcagaaccaactctacaatgaacttaatttggggcggagggaagagtacgacgttctggacaaaaggaggggacgagatcccgagatgggcggaaagcctcagcgaaggaagaatccgcaagaggggctttataacgaactccagaaagataaaatggcagaagcctatagtgagattgggatgaagggagaaaggaggaggggtaaaggtcacgatgggttgtaccaaggattgagcacagccactaaagatacctatgatgcgctccacatgcaggccctgccgccaaga

SEQ ID NO: 34346 - DNA, 2589 bp, synthetic construct
  source 1..2589: mol_type = other DNA
atggccttaccagtgaccgccttgctcctgccgctggccttgctgctccacgccgccaggccgatccagatgacccagagccccagcagcctgtctgccagcgtgggcgacagagtgaccatcacctgtcggagcagccagagcatcgtgcactccgtgggcaacaccttcctggaatggtatcagcagaagcccggcaaggcccccaagctgctgatctacaaggtgtccaacagattcagcggcgtgcccagcaggtttagcggctctggcagcggcaccgacttcaccctgaccatctctagcctccagcccgaggacttcgccacctactactgttttcaaggcagccagttcccctacaccttcggccagggaacaaaggtggaaatcaagcggctcgaggaggacctgaagaacgtgttcccacctgaggtggccgtgttcgagcctagcgaggccgagatcagccacacccagaaagccaccctcgtgtgcctggctaccggcttctaccccgaccatgtggaactgtcttggtgggtcaacggcaaagaggtgcacagcggcgtgtctaccgacccccagccactgaaagaacagcccgccctgaacgacagccggtactgcctgagcagcagactgagagtgtccgccaccttctggcagaacccccggaaccacttcagatgccaggtgcagttctacggcctgagcgagaacgacgagtggacccaggacagagccaagcccgtgacccagatcgtgtctgccgaagcctggggcagagccgattgcggatcccagagcttcggcctgctggaccccaagctgtgctacctgctggatggcatcctgttcatctacggcgtgatcctgaccgccctgttcctgagagtgaagttcagcagaagcgccgacgcccctgcctaccagcagggacagaaccaactgtacaacgagctgaacctgggcagacgggaagagtacgacgtgctggacaagcggagaggcagggaccctgagatgggcggaaagccccagcggagaaagaacccccaggaaggactgtataacgaactccagaaagacaagatggccgaagcctacagcgagatcggcatgaagggcgagcggagaagaggcaagggccacgatggcctgtaccagggcctgagcaccgccaccaaggacacctatgacgccctgcacatgcaggccctgcctccaagaagggccaagcgatctggatctggagcaacaaacttctcactactcaaacaagcaggtgacgtggaggagaatcccgggcctactagtatggactggatttggcgcatccttttccttgtcggcgctgctaccggcgcgcattccttcgaagaagtgcaactggtggaaagcggaggcggcctggtgcagcctggcggatctctgagactgagctgtgccgccagcggctacgagttcagccggtcctggatgaactgggtgcgccaggcccctggcaagggactggaatgggtgggaagaatctaccccggcgacggcgacaccaactacagcggcaagttcaagggccggttcaccatcagcgccgacaccagcaagaacaccgcctacctccagatgaacagcctgcgggccgaggataccgccgtgtactactgtgccagagatggcagctcctgggactggtacttcgacgtgtggggacagggaacccttgtgaccgtgtccagcacgcgtatccagaaccctgatcctgccgtgtaccagctgcgggatagcaagagcagcgacaagagcgtgtgtctgttcaccgacttcgacagccagaccaacgtgtcccagagcaaggactccgacgtgtacatcaccgataagaccgtgctggacatgcggagcatggacttcaagagcaactccgccgtggcctggtccaacaagtccgatttcgcctgcgccaacgccttcaacaacagcattatccccgaggacacattcttcccaagccccgagagcagctgcggtacccagagttttgggttgttggaccctaaattgtgctatctgttggacggaatcctgttcatttacggagtgatcctgaccgcattgttcctgaggagcaagcggtcacggctgctccacagcgattacatgaatatgacaccacgaagaccgggtcctactcgcaaacactaccaaccctacgcacctccccgcgactttgcagcgtaccgatctcgggttaagttttccagatccgcagacgcacccgcttaccaacaagggcagaaccaactctacaatgaacttaatttggggcggagggaagagtacgacgttctggacaaaaggaggggacgagatcccgagatgggcggaaagcctcagcgaaggaagaatccgcaagaggggctttataacgaactccagaaagataaaatggcagaagcctatagtgagattgggatgaagggagaaaggaggaggggtaaaggtcacgatgggttgtaccaaggattgagcacagccactaaagatacctatgatgcgctccacatgcaggccctgccgccaaga

SEQ ID NO: 34347 - DNA, 2718 bp, synthetic construct
  source 1..2718: mol_type = other DNA
atggccttaccagtgaccgccttgctcctgccgctggccttgctgctccacgccgccaggccgatccagatgacccagagccccagcagcctgtctgccagcgtgggcgacagagtgaccatcacctgtcggagcagccagagcatcgtgcactccgtgggcaacaccttcctggaatggtatcagcagaagcccggcaaggcccccaagctgctgatctacaaggtgtccaacagattcagcggcgtgcccagcaggtttagcggctctggcagcggcaccgacttcaccctgaccatctctagcctccagcccgaggacttcgccacctactactgttttcaaggcagccagttcccctacaccttcggccagggaacaaaggtggaaatcaagcggctcgaggaggacctgaagaacgtgttcccacctgaggtggccgtgttcgagcctagcgaggccgagatcagccacacccagaaagccaccctcgtgtgcctggctaccggcttctaccccgaccatgtggaactgtcttggtgggtcaacggcaaagaggtgcacagcggcgtgtctaccgacccccagccactgaaagaacagcccgccctgaacgacagccggtactgcctgagcagcagactgagagtgtccgccaccttctggcagaacccccggaaccacttcagatgccaggtgcagttctacggcctgagcgagaacgacgagtggacccaggacagagccaagcccgtgacccagatcgtgtctgccgaagcctggggcagagccgattgcggatcccagagcttcggcctgctggaccccaagctgtgctacctgctggatggcatcctgttcatctacggcgtgatcctgaccgccctgttcctgaaacggggcagaaagaaactcctgtatatattcaaacaaccatttatgagaccagtacaaactactcaagaggaagatggctgtagctgccgatttccagaagaagaagaaggaggatgtgaactgagagtgaagttcagcagaagcgccgacgcccctgcctaccagcagggacagaaccaactgtacaacgagctgaacctgggcagacgggaagagtacgacgtgctggacaagcggagaggcagggaccctgagatgggcggaaagccccagcggagaaagaacccccaggaaggactgtataacgaactccagaaagacaagatggccgaagcctacagcgagatcggcatgaagggcgagcggagaagaggcaagggccacgatggcctgtaccagggcctgagcaccgccaccaaggacacctatgacgccctgcacatgcaggccctgcctccaagaagggccaagcgatctggatctggagcaacaaacttctcactactcaaacaagcaggtgacgtggaggagaatcccgggcctactagtatggactggatttggcgcatccttttccttgtcggcgctgctaccggcgcgcattccttcgaagaagtgcaactggtggaaagcggaggcggcctggtgcagcctggcggatctctgagactgagctgtgccgccagcggctacgagttcagccggtcctggatgaactgggtgcgccaggcccctggcaagggactggaatgggtgggaagaatctaccccggcgacggcgacaccaactacagcggcaagttcaagggccggttcaccatcagcgccgacaccagcaagaacaccgcctacctccagatgaacagcctgcgggccgaggataccgccgtgtactactgtgccagagatggcagctcctgggactggtacttcgacgtgtggggacagggaacccttgtgaccgtgtccagcacgcgtatccagaaccctgatcctgccgtgtaccagctgcgggatagcaagagcagcgacaagagcgtgtgtctgttcaccgacttcgacagccagaccaacgtgtcccagagcaaggactccgacgtgtacatcaccgataagaccgtgctggacatgcggagcatggacttcaagagcaactccgccgtggcctggtccaacaagtccgatttcgcctgcgccaacgccttcaacaacagcattatccccgaggacacattcttcccaagccccgagagcagctgcggtacccagagttttgggttgttggaccctaaattgtgctatctgttggacggaatcctgttcatttacggagtgatcctgaccgcattgttcctgaagagaggccggaagaagctgctgtacatcttcaagcagcctttcatgcggcccgtgcagaccacccaggaagaggacggctgctcctgccggttccccgaggaagaagaaggcggctgcgagctgcgggttaagttttccagatccgcagacgcacccgcttaccaacaagggcagaaccaactctacaatgaacttaatttggggcggagggaagagtacgacgttctggacaaaaggaggggacgagatcccgagatgggcggaaagcctcagcgaaggaagaatccgcaagaggggctttataacgaactccagaaagataaaatggcagaagcctatagtgagattgggatgaagggagaaaggaggaggggtaaaggtcacgatgggttgtaccaaggattgagcacagccactaaagatacctatgatgcgctccacatgcaggccctgccgccaaga

SEQ ID NO: 34348 - DNA, 1779 bp, synthetic construct
  source 1..1779: mol_type = other DNA
atggccttaccagtgaccgccttgctcctgccgctggccttgctgctccacgccgccaggccgatccagatgacccagagccccagcagcctgtctgccagcgtgggcgacagagtgaccatcacctgtcggagcagccagagcatcgtgcactccgtgggcaacaccttcctggaatggtatcagcagaagcccggcaaggcccccaagctgctgatctacaaggtgtccaacagattcagcggcgtgcccagcaggtttagcggctctggcagcggcaccgacttcaccctgaccatctctagcctccagcccgaggacttcgccacctactactgttttcaaggcagccagttcccctacaccttcggccagggaacaaaggtggaaatcaagcggctcgagcagagcttcggcctgctggaccccaagctgtgctacctgctggatggcatcctgttcatctacggcgtgatcctgaccgccctgttcctgagagtgaagttcagcagaagcgccgacgcccctgcctaccagcagggacagaaccaactgtacaacgagctgaacctgggcagacgggaagagtacgacgtgctggacaagcggagaggcagggaccctgagatgggcggaaagccccagcggagaaagaacccccaggaaggactgtataacgaactccagaaagacaagatggccgaagcctacagcgagatcggcatgaagggcgagcggagaagaggcaagggccacgatggcctgtaccagggcctgagcaccgccaccaaggacacctatgacgccctgcacatgcaggccctgcctccaagaagggccaagcgatctggatctggagcaacaaacttctcactactcaaacaagcaggtgacgtggaggagaatcccgggcctactagtatggactggatttggcgcatccttttccttgtcggcgctgctaccggcgcgcattccttcgaagaagtgcaactggtggaaagcggaggcggcctggtgcagcctggcggatctctgagactgagctgtgccgccagcggctacgagttcagccggtcctggatgaactgggtgcgccaggcccctggcaagggactggaatgggtgggaagaatctaccccggcgacggcgacaccaactacagcggcaagttcaagggccggttcaccatcagcgccgacaccagcaagaacaccgcctacctccagatgaacagcctgcgggccgaggataccgccgtgtactactgtgccagagatggcagctcctgggactggtacttcgacgtgtggggacagggaacccttgtgaccgtgtccagcacgcgtcagagttttgggttgttggaccctaaattgtgctatctgttggacggaatcctgttcatttacggagtgatcctgaccgcattgttcctgcgggttaagttttccagatccgcagacgcacccgcttaccaacaagggcagaaccaactctacaatgaacttaatttggggcggagggaagagtacgacgttctggacaaaaggaggggacgagatcccgagatgggcggaaagcctcagcgaaggaagaatccgcaagaggggctttataacgaactccagaaagataaaatggcagaagcctatagtgagattgggatgaagggagaaaggaggaggggtaaaggtcacgatgggttgtaccaaggattgagcacagccactaaagatacctatgatgcgctccacatgcaggccctgccgccaaga

SEQ ID NO: 34349 - DNA, 1953 bp, synthetic construct
  source 1..1953: mol_type = other DNA
atggccttaccagtgaccgccttgctcctgccgctggccttgctgctccacgccgccaggccgatccagatgacccagagccccagcagcctgtctgccagcgtgggcgacagagtgaccatcacctgtcggagcagccagagcatcgtgcactccgtgggcaacaccttcctggaatggtatcagcagaagcccggcaaggcccccaagctgctgatctacaaggtgtccaacagattcagcggcgtgcccagcaggtttagcggctctggcagcggcaccgacttcaccctgaccatctctagcctccagcccgaggacttcgccacctactactgttttcaaggcagccagttcccctacaccttcggccagggaacaaaggtggaaatcaagcggctcgagggacagcctaaggccaatcctaccgtgacactgttccctccaagcagcgaagaactccaggccaacaaggccacacttgtgtgcctgatctccgacttctaccctggggctgtgacagtggcttggaaggccgatggatctcctgtgaaagccggcgtggaaaccaccaagccatccaagcagagcaacaacaaatacgccgccagctcctacctgagcctgacacctgagcagtggaagtcccacagatcctacagctgccaagtgacccacgaaggcagcaccgtggaaaagacagtggcccctacagagtgcagccccatcaagaccgatgtgattacaatggaccccaaggacaactgctccaaggacgccaacgataccctgctgctccagctgaccaacaccagcgcctactacatgtacttgttgctgctgctgaagtccgtggtgtacttcgccatcatcacatgctgcctgctgcggagaaccgccttctgctgcaacggcgagaagtctagggccaagcgatctggatctggagcaacaaacttctcactactcaaacaagcaggtgacgtggaggagaatcccgggcctactagtatggactggatttggcgcatccttttccttgtcggcgctgctaccggcgcgcattccttcgaagaagtgcaactggtggaaagcggaggcggcctggtgcagcctggcggatctctgagactgagctgtgccgccagcggctacgagttcagccggtcctggatgaactgggtgcgccaggcccctggcaagggactggaatgggtgggaagaatctaccccggcgacggcgacaccaactacagcggcaagttcaagggccggttcaccatcagcgccgacaccagcaagaacaccgcctacctccagatgaacagcctgcgggccgaggataccgccgtgtactactgtgccagagatggcagctcctgggactggtacttcgacgtgtggggacagggaacccttgtgaccgtgtccagcacgcgtgcctctacaaagggaccctccgtgtttcctctggctcccagcagcaagtctacaagcggaggaacagccgctctgggctgcctggtcaaggattactttcccgagcctgtgaccgtgtcctggaatagcggagcactgacaagcggcgtgcacacctttccagccgtgctgcaaagcagcggcctgtactctctgagcagcgtggtcacagtgcctagctctagcctgggcacccagacctacatctgcaatgtgaaccacaagcctagcaacaccaaggtggacaagagagtggaacccaagagctgtgaagtgaaaaccgactccaccgaccacgtgaagcccaaagagacagagaacaccaagcagcccagcaagagctgccacaagcccaaggccatcgtgcacaccgagaaagtgaacatgatgagcctgaccgtgctgggcctgcggatgctgttcgccaaaaccgtggccgtgaacttcctgctgaccgccaagctgttcttcctc

SEQ ID NO: 34350 - DNA, 1887 bp, synthetic construct
  source 1..1887: mol_type = other DNA
atggccttaccagtgaccgccttgctcctgccgctggccttgctgctccacgccgccaggccgatccagatgacccagagccccagcagcctgtctgccagcgtgggcgacagagtgaccatcacctgtcggagcagccagagcatcgtgcactccgtgggcaacaccttcctggaatggtatcagcagaagcccggcaaggcccccaagctgctgatctacaaggtgtccaacagattcagcggcgtgcccagcaggtttagcggctctggcagcggcaccgacttcaccctgaccatctctagcctccagcccgaggacttcgccacctactactgttttcaaggcagccagttcccctacaccttcggccagggaacaaaggtggaaatcaagcggctcgagggacagcctaaggccaatcctaccgtgacactgttccctccaagcagcgaagaactccaggccaacaaggccacacttgtgtgcctgatctccgacttctaccctggggctgtgacagtggcttggaaggccgatggatctcctgtgaaagccggcgtggaaaccaccaagccatccaagcagagcaacaacaaatacgccgccagctcctacctgagcctgacacctgagcagtggaagtcccacagatcctacagctgccaagtgacccacgaaggcagcaccgtggaaaagacagtggcccctacagagtgcagcggcagagccgattgcggcatcaccagcgccagctaccaccagggcgtgctgagcgccaccatcctgtacgagatcctgctgggcaaggccaccctgtacgccgtgctggtgtctgccctggtgctgatggctatggtcaagcggaaggacagccggggaagggccaagcgatctggatctggagcaacaaacttctcactactcaaacaagcaggtgacgtggaggagaatcccgggcctactagtatggactggatttggcgcatccttttccttgtcggcgctgctaccggcgcgcattccttcgaagaagtgcaactggtggaaagcggaggcggcctggtgcagcctggcggatctctgagactgagctgtgccgccagcggctacgagttcagccggtcctggatgaactgggtgcgccaggcccctggcaagggactggaatgggtgggaagaatctaccccggcgacggcgacaccaactacagcggcaagttcaagggccggttcaccatcagcgccgacaccagcaagaacaccgcctacctccagatgaacagcctgcgggccgaggataccgccgtgtactactgtgccagagatggcagctcctgggactggtacttcgacgtgtggggacagggaacccttgtgaccgtgtccagcacgcgtgcctctacaaagggaccctccgtgtttcctctggctcccagcagcaagtctacaagcggaggaacagccgctctgggctgcctggtcaaggattactttcccgagcctgtgaccgtgtcctggaatagcggagcactgacaagcggcgtgcacacctttccagccgtgctgcaaagcagcggcctgtactctctgagcagcgtggtcacagtgcctagctctagcctgggcacccagacctacatctgcaatgtgaaccacaagcctagcaacaccaaggtggacaagagagtggaacccaagagctgtatccccgaggacacattcttcccaagcagcgacgtgccctgcgacgtgaagctggtggaaaagagcttcgagacagacaccaacctgaacttccagaacctgagcgtgatcggcttcagaatcctgctgctgaaagtggccggctttaacctgctgatgaccctgcggctgtggtccagc

SEQ ID NO: 34351 - DNA, 1887 bp, synthetic construct
  source 1..1887: mol_type = other DNA
atggccttaccagtgaccgccttgctcctgccgctggccttgctgctccacgccgccaggccgatccagatgacccagagccccagcagcctgtctgccagcgtgggcgacagagtgaccatcacctgtcggagcagccagagcatcgtgcactccgtgggcaacaccttcctggaatggtatcagcagaagcccggcaaggcccccaagctgctgatctacaaggtgtccaacagattcagcggcgtgcccagcaggtttagcggctctggcagcggcaccgacttcaccctgaccatctctagcctccagcccgaggacttcgccacctactactgttttcaaggcagccagttcccctacaccttcggccagggaacaaaggtggaaatcaagcggctcgagggacagcctaaggccaatcctaccgtgacactgttccctccaagcagcgaagaactccaggccaacaaggccacacttgtgtgcctgatctccgacttctaccctggggctgtgacagtggcttggaaggccgatggatctcctgtgaaagccggcgtggaaaccaccaagccatccaagcagagcaacaacaaatacgccgccagctcctacctgagcctgacacctgagcagtggaagtcccacagatcctacagctgccaagtgacccacgaaggcagcaccgtggaaaagacagtggcccctacagagtgcagcggcagagccgattgcggctttaccagcgagagctaccagcagggcgtgctgagcgccaccatcctgtacgagatcctgctgggcaaggccaccctgtacgccgtgctggtgtctgccctggtgctgatggctatggtcaagcggaaggacagccggggaagggccaagcgatctggatctggagcaacaaacttctcactactcaaacaagcaggtgacgtggaggagaatcccgggcctactagtatggactggatttggcgcatccttttccttgtcggcgctgctaccggcgcgcattccttcgaagaagtgcaactggtggaaagcggaggcggcctggtgcagcctggcggatctctgagactgagctgtgccgccagcggctacgagttcagccggtcctggatgaactgggtgcgccaggcccctggcaagggactggaatgggtgggaagaatctaccccggcgacggcgacaccaactacagcggcaagttcaagggccggttcaccatcagcgccgacaccagcaagaacaccgcctacctccagatgaacagcctgcgggccgaggataccgccgtgtactactgtgccagagatggcagctcctgggactggtacttcgacgtgtggggacagggaacccttgtgaccgtgtccagcacgcgtgcctctacaaagggaccctccgtgtttcctctggctcccagcagcaagtctacaagcggaggaacagccgctctgggctgcctggtcaaggattactttcccgagcctgtgaccgtgtcctggaatagcggagcactgacaagcggcgtgcacacctttccagccgtgctgcaaagcagcggcctgtactctctgagcagcgtggtcacagtgcctagctctagcctgggcacccagacctacatctgcaatgtgaaccacaagcctagcaacaccaaggtggacaagagagtggaacccaagagctgtatccccgaggacacattcttcccaagccccgagagcagctgcgacgtgaagctggtggaaaagagcttcgagacagacaccaacctgaacttccagaacctgagcgtgatcggcttcagaatcctgctgctgaaagtggccggctttaacctgctgatgaccctgcggctgtggtccagc

SEQ ID NO: 34352 - DNA, 1365 bp, synthetic construct
  source 1..1365: mol_type = other DNA
atggccttaccagtgaccgccttgctcctgccgctggccttgctgctccacgccgccaggccgatccagatgacccagagccccagcagcctgtctgccagcgtgggcgacagagtgaccatcacctgtcggagcagccagagcatcgtgcactccgtgggcaacaccttcctggaatggtatcagcagaagcccggcaaggcccccaagctgctgatctacaaggtgtccaacagattcagcggcgtgcccagcaggtttagcggctctggcagcggcaccgacttcaccctgaccatctctagcctccagcccgaggacttcgccacctactactgttttcaaggcagccagttcccctacaccttcggccagggaacaaaggtggaaatcaagcggggcggaggcggaagtggaggcggaggatctggcggcggaggctctgaagtgcaactggtggaaagcggaggcggcctggtgcagcctggcggatctctgagactgagctgtgccgccagcggctacgagttcagccggtcctggatgaactgggtgcgccaggcccctggcaagggactggaatgggtgggaagaatctaccccggcgacggcgacaccaactacagcggcaagttcaagggccggttcaccatcagcgccgacaccagcaagaacaccgcctacctccagatgaacagcctgcgggccgaggataccgccgtgtactactgtgccagagatggcagctcctgggactggtacttcgacgtgtggggacagggaacccttgtgaccgtgtccagcacgcgtgacggtaacgaggagatgggaggaatcactcaaaccccttacaaagtctcaatttcaggaacaactgttatccttacatgtccccagtatcctggcagcgagatcctttggcagcataacgacaagaatatagggggagatgaagacgataagaatatcggatctgacgaggatcacttgagcctgaaagagttctccgagcttgaacaaagcggatattatgtgtgctatccgcgcgggtcaaagccggaagacgctaacttttacctttatctccgagccagagtgtgcgaaaattgcatggaaatggacgttatgtccgttgctacaatagttatcgtagatatatgcatcacgggtggactgcttctgctggtttattattggtccaagaatagaaaggccaaagctaaacccgtgaccagaggcgctggcgcaggcggaaggcaaaggggacaaaacaaagaacggccaccaccagtgccaaatccagattatgagcctattcggaaaggacagagggacctgtactctggcctgaatcagagaagaatc

SEQ ID NO: 34353 - DNA, 1260 bp, synthetic construct
  source 1..1260: mol_type = other DNA
atggccttaccagtgaccgccttgctcctgccgctggccttgctgctccacgccgccaggccgatccagatgacccagagccccagcagcctgtctgccagcgtgggcgacagagtgaccatcacctgtcggagcagccagagcatcgtgcactccgtgggcaacaccttcctggaatggtatcagcagaagcccggcaaggcccccaagctgctgatctacaaggtgtccaacagattcagcggcgtgcccagcaggtttagcggctctggcagcggcaccgacttcaccctgaccatctctagcctccagcccgaggacttcgccacctactactgttttcaaggcagccagttcccctacaccttcggccagggaacaaaggtggaaatcaagcggggcggaggcggaagtggaggcggaggatctggcggcggaggctctgaagtgcaactggtggaaagcggaggcggcctggtgcagcctggcggatctctgagactgagctgtgccgccagcggctacgagttcagccggtcctggatgaactgggtgcgccaggcccctggcaagggactggaatgggtgggaagaatctaccccggcgacggcgacaccaactacagcggcaagttcaagggccggttcaccatcagcgccgacaccagcaagaacaccgcctacctccagatgaacagcctgcgggccgaggataccgccgtgtactactgtgccagagatggcagctcctgggactggtacttcgacgtgtggggacagggaacccttgtgaccgtgtccagcacgcgtttcaagatccccatcgaggaactggaagatcgggtgttcgtgaactgcaacacctctatcacctgggtggaaggcaccgtgggaacactgctgagcgacatcaccagactggacctcggcaagcggattctggaccctcggggcatctacagatgcaacggcaccgacatctacaaggacaaagaaagcaccgtgcaggtccactacagaatgtgccagtcctgcgtggaactggaccctgctacagtggccggcatcatcgtgaccgatgtgatcgctactctgctgctggctctgggagtgttctgcttcgccggacacgaaacaggcagactgtctggcgctgccgatacacaggccctgctgagaaacgaccaagtgtatcagcccctgcgcgacagagatgatgcccagtattctcacctcggcggcaactgggctagaaacaag

SEQ ID NO: 34354 - DNA, 1290 bp, synthetic construct
  source 1..1290: mol_type = other DNA
atggccttaccagtgaccgccttgctcctgccgctggccttgctgctccacgccgccaggccgatccagatgacccagagccccagcagcctgtctgccagcgtgggcgacagagtgaccatcacctgtcggagcagccagagcatcgtgcactccgtgggcaacaccttcctggaatggtatcagcagaagcccggcaaggcccccaagctgctgatctacaaggtgtccaacagattcagcggcgtgcccagcaggtttagcggctctggcagcggcaccgacttcaccctgaccatctctagcctccagcccgaggacttcgccacctactactgttttcaaggcagccagttcccctacaccttcggccagggaacaaaggtggaaatcaagcggggcggaggcggaagtggaggcggaggatctggcggcggaggctctgaagtgcaactggtggaaagcggaggcggcctggtgcagcctggcggatctctgagactgagctgtgccgccagcggctacgagttcagccggtcctggatgaactgggtgcgccaggcccctggcaagggactggaatgggtgggaagaatctaccccggcgacggcgacaccaactacagcggcaagttcaagggccggttcaccatcagcgccgacaccagcaagaacaccgcctacctccagatgaacagcctgcgggccgaggataccgccgtgtactactgtgccagagatggcagctcctgggactggtacttcgacgtgtggggacagggaacccttgtgaccgtgtccagcacgcgtcagagcatcaagggcaaccacctggtcaaggtgtacgactaccaagaggacggcagcgtgctgctgacatgtgatgccgaggccaagaacatcacctggtttaaggacggcaagatgatcggcttcctgaccgaggacaagaagaagtggaacctgggcagcaacgctaaggaccccagaggcatgtatcagtgcaagggcagccagaacaagagcaagcccctccaggtgtactaccggatgtgccagaactgcatcgagctgaacgccgctaccatcagcggctttctgttcgccgagatcgtgtccatcttcgtgctggccgtgggcgtgtactttatcgctggacaggatggcgtgcggcagagcagagcttccgataagcaaaccctgctgcctaacgaccagctgtaccagcctctgaaggacagagaggacgaccagtacagccacctccagggcaatcagctgagaagaaac

SEQ ID NO: 34355 - DNA, 1239 bp, synthetic construct
  source 1..1239: mol_type = other DNA
atggccttaccagtgaccgccttgctcctgccgctggccttgctgctccacgccgccaggccgatccagatgacccagagccccagcagcctgtctgccagcgtgggcgacagagtgaccatcacctgtcggagcagccagagcatcgtgcactccgtgggcaacaccttcctggaatggtatcagcagaagcccggcaaggcccccaagctgctgatctacaaggtgtccaacagattcagcggcgtgcccagcaggtttagcggctctggcagcggcaccgacttcaccctgaccatctctagcctccagcccgaggacttcgccacctactactgttttcaaggcagccagttcccctacaccttcggccagggaacaaaggtggaaatcaagcggggcggaggcggaagtggaggcggaggatctggcggcggaggctctgaagtgcaactggtggaaagcggaggcggcctggtgcagcctggcggatctctgagactgagctgtgccgccagcggctacgagttcagccggtcctggatgaactgggtgcgccaggcccctggcaagggactggaatgggtgggaagaatctaccccggcgacggcgacaccaactacagcggcaagttcaagggccggttcaccatcagcgccgacaccagcaagaacaccgcctacctccagatgaacagcctgcgggccgaggataccgccgtgtactactgtgccagagatggcagctcctgggactggtacttcgacgtgtggggacagggaacccttgtgaccgtgtccagcacgcgtcagagttttgggttgttggaccctaaattgtgctatctgttggacggaatcctgttcatttacggagtgatcctgaccgcattgttcctgcgggttaagttttccagatccgcagacgcacccgcttaccaacaagggcagaaccaactctacaatgaacttaatttggggcggagggaagagtacgacgttctggacaaaaggaggggacgagatcccgagatgggcggaaagcctcagcgaaggaagaatccgcaagaggggctttataacgaactccagaaagataaaatggcagaagcctatagtgagattgggatgaagggagaaaggaggaggggtaaaggtcacgatgggttgtaccaaggattgagcacagccactaaagatacctatgatgcgctccacatgcaggccctgccgccaaga

SEQ ID NO: 34356 - DNA, 1524 bp, synthetic construct
  source 1..1524: mol_type = other DNA
atggccttaccagtgaccgccttgctcctgccgctggccttgctgctccacgccgccaggccgatccagatgacccagagccccagcagcctgtctgccagcgtgggcgacagagtgaccatcacctgtcggagcagccagagcatcgtgcactccgtgggcaacaccttcctggaatggtatcagcagaagcccggcaaggcccccaagctgctgatctacaaggtgtccaacagattcagcggcgtgcccagcaggtttagcggctctggcagcggcaccgacttcaccctgaccatctctagcctccagcccgaggacttcgccacctactactgttttcaaggcagccagttcccctacaccttcggccagggaacaaaggtggaaatcaagcggggcggaggcggaagtggaggcggaggatctggcggcggaggctctgaagtgcaactggtggaaagcggaggcggcctggtgcagcctggcggatctctgagactgagctgtgccgccagcggctacgagttcagccggtcctggatgaactgggtgcgccaggcccctggcaagggactggaatgggtgggaagaatctaccccggcgacggcgacaccaactacagcggcaagttcaagggccggttcaccatcagcgccgacaccagcaagaacaccgcctacctccagatgaacagcctgcgggccgaggataccgccgtgtactactgtgccagagatggcagctcctgggactggtacttcgacgtgtggggacagggaacccttgtgaccgtgtccagcacgcgtggaatgaggactgaggatcttcccaaagctgtcgtctttctcgaaccccaatggtatcgggtgctcgaaaaagactctgtgacactgaaatgccaaggggcctactctcccgaggacaactccacacagtggtttcataatgagtccctcatcagctctcaggccagctcttatttcattgatgccgctacagtggacgactccggcgagtatcggtgtcagaccaatctgtctacactgtctgaccccgtgcagcttgaggtccacattggatggttgctcttgcaagccccacgctgggttttcaaagaggaagatccaatccatctgcggtgccacagctggaaaaacaccgctctccacaaagtcacatacctgcaaaatggcaaaggacgcaaatacttccatcacaattccgatttttacattccgaaggctaccctgaaagacagcggcagctatttctgccggggactcgtcggctccaagaatgtgtcctccgaaaccgtgaatatcacgattacccaaggactggctgtgcctacaatctctagcttctttccgcctggataccaagtctccttctgtcttgtgatggtcctcctgtttgctgtggacacaggactgtacttttccgtgaaaacgaacatccgcagctccacacgcgattggaaagatcacaagtttaaatggcgcaaagatccccaggacaag

SEQ ID NO: 34357 - DNA, 1449 bp, synthetic construct
  source 1..1449: mol_type = other DNA
atggccttaccagtgaccgccttgctcctgccgctggccttgctgctccacgccgccaggccgatccagatgacccagagccccagcagcctgtctgccagcgtgggcgacagagtgaccatcacctgtcggagcagccagagcatcgtgcactccgtgggcaacaccttcctggaatggtatcagcagaagcccggcaaggcccccaagctgctgatctacaaggtgtccaacagattcagcggcgtgcccagcaggtttagcggctctggcagcggcaccgacttcaccctgaccatctctagcctccagcccgaggacttcgccacctactactgttttcaaggcagccagttcccctacaccttcggccagggaacaaaggtggaaatcaagcggggcggaggcggaagtggaggcggaggatctggcggcggaggctctgaagtgcaactggtggaaagcggaggcggcctggtgcagcctggcggatctctgagactgagctgtgccgccagcggctacgagttcagccggtcctggatgaactgggtgcgccaggcccctggcaagggactggaatgggtgggaagaatctaccccggcgacggcgacaccaactacagcggcaagttcaagggccggttcaccatcagcgccgacaccagcaagaacaccgcctacctccagatgaacagcctgcgggccgaggataccgccgtgtactactgtgccagagatggcagctcctgggactggtacttcgacgtgtggggacagggaacccttgtgaccgtgtccagcacgcgtggaatgaggactgaggatcttcccaaagctgtcgtctttctcgaaccccaatggtatcgggtgctcgaaaaagactctgtgacactgaaatgccaaggggcctactctcccgaggacaactccacacagtggtttcataatgagtccctcatcagctctcaggccagctcttatttcattgatgccgctacagtggacgactccggcgagtatcggtgtcagaccaatctgtctacactgtctgaccccgtgcagcttgaggtccacattggatggttgctcttgcaagccccacgctgggttttcaaagaggaagatccaatccatctgcggtgccacagctggaaaaacaccgctctccacaaagtcacatacctgcaaaatggcaaaggacgcaaatacttccatcacaattccgatttttacattccgaaggctaccctgaaagacagcggcagctatttctgccggggactcgtcggctccaagaatgtgtcctccgaaaccgtgaatatcacgattacccaaggactggctgtgcctacaatctctagcttctttccgcctggataccaagtctccttctgtcttgtgatggtcctcctgtttgctgtggacacaggactgtacttttccgtg

SEQ ID NO: 34358 - DNA, 1452 bp, synthetic construct
  source 1..1452: mol_type = other DNA
atggccttaccagtgaccgccttgctcctgccgctggccttgctgctccacgccgccaggccgatccagatgacccagagccccagcagcctgtctgccagcgtgggcgacagagtgaccatcacctgtcggagcagccagagcatcgtgcactccgtgggcaacaccttcctggaatggtatcagcagaagcccggcaaggcccccaagctgctgatctacaaggtgtccaacagattcagcggcgtgcccagcaggtttagcggctctggcagcggcaccgacttcaccctgaccatctctagcctccagcccgaggacttcgccacctactactgttttcaaggcagccagttcccctacaccttcggccagggaacaaaggtggaaatcaagcggggcggaggcggaagtggaggcggaggatctggcggcggaggctctgaagtgcaactggtggaaagcggaggcggcctggtgcagcctggcggatctctgagactgagctgtgccgccagcggctacgagttcagccggtcctggatgaactgggtgcgccaggcccctggcaagggactggaatgggtgggaagaatctaccccggcgacggcgacaccaactacagcggcaagttcaagggccggttcaccatcagcgccgacaccagcaagaacaccgcctacctccagatgaacagcctgcgggccgaggataccgccgtgtactactgtgccagagatggcagctcctgggactggtacttcgacgtgtggggacagggaacccttgtgaccgtgtccagcacgcgtggaatgaggactgaggatcttcccaaagctgtcgtctttctcgaaccccaatggtatcgggtgctcgaaaaagactctgtgacactgaaatgccaaggggcctactctcccgaggacaactccacacagtggtttcataatgagtccctcatcagctctcaggccagctcttatttcattgatgccgctacagtggacgactccggcgagtatcggtgtcagaccaatctgtctacactgtctgaccccgtgcagcttgaggtccacattggatggttgctcttgcaagccccacgctgggttttcaaagaggaagatccaatccatctgcggtgccacagctggaaaaacaccgctctccacaaagtcacatacctgcaaaatggcaaaggacgcaaatacttccatcacaattccgatttttacattccgaaggctaccctgaaagacagcggcagctatttctgccggggactcgtcggctccaagaatgtgtcctccgaaaccgtgaatatcacgattacccaaggactggctgtgcctacaatctctagcttctttccgcctggataccaagtctccttctgtcttgtgatggtcctcctgtttgctgtggacacaggactgtacttttccgtgaaa

SEQ ID NO: 34359 - DNA, 2184 bp, synthetic construct
  source 1..2184: mol_type = other DNA
atggccttaccagtgaccgccttgctcctgccgctggccttgctgctccacgccgccaggccgatccagatgacccagagccccagcagcctgtctgccagcgtgggcgacagagtgaccatcacctgtcggagcagccagagcatcgtgcactccgtgggcaacaccttcctggaatggtatcagcagaagcccggcaaggcccccaagctgctgatctacaaggtgtccaacagattcagcggcgtgcccagcaggtttagcggctctggcagcggcaccgacttcaccctgaccatctctagcctccagcccgaggacttcgccacctactactgttttcaaggcagccagttcccctacaccttcggccagggaacaaaggtggaaatcaagcggctcgagggacagcctaaggccaatcctaccgtgacactgttccctccaagcagcgaagaactccaggccaacaaggccacacttgtgtgcctgatctccgacttctaccctggggctgtgacagtggcttggaaggccgatggatctcctgtgaaagccggcgtggaaaccaccaagccatccaagcagagcaacaacaaatacgccgccagctcctacctgagcctgacacctgagcagtggaagtcccacagatcctacagctgccaagtgacccacgaaggcagcaccgtggaaaagacagtggcccctacagagtgcagcggatcccagagcttcggcctgctggaccccaagctgtgctacctgctggatggcatcctgttcatctacggcgtgatcctgaccgccctgttcctgagagtgaagttcagcagaagcgccgacgcccctgcctaccagcagggacagaaccaactgtacaacgagctgaacctgggcagacgggaagagtacgacgtgctggacaagcggagaggcagggaccctgagatgggcggaaagccccagcggagaaagaacccccaggaaggactgtataacgaactccagaaagacaagatggccgaagcctacagcgagatcggcatgaagggcgagcggagaagaggcaagggccacgatggcctgtaccagggcctgagcaccgccaccaaggacacctatgacgccctgcacatgcaggccctgcctccaagaagggccaagcgatctggatctggagcaacaaacttctcactactcaaacaagcaggtgacgtggaggagaatcccgggcctactagtatggactggatttggcgcatccttttccttgtcggcgctgctaccggcgcgcattccttcgaagaagtgcaactggtggaaagcggaggcggcctggtgcagcctggcggatctctgagactgagctgtgccgccagcggctacgagttcagccggtcctggatgaactgggtgcgccaggcccctggcaagggactggaatgggtgggaagaatctaccccggcgacggcgacaccaactacagcggcaagttcaagggccggttcaccatcagcgccgacaccagcaagaacaccgcctacctccagatgaacagcctgcgggccgaggataccgccgtgtactactgtgccagagatggcagctcctgggactggtacttcgacgtgtggggacagggaacccttgtgaccgtgtccagcacgcgtgcctctacaaagggaccctccgtgtttcctctggctcccagcagcaagtctacaagcggaggaacagccgctctgggctgcctggtcaaggattactttcccgagcctgtgaccgtgtcctggaatagcggagcactgacaagcggcgtgcacacctttccagccgtgctgcaaagcagcggcctgtactctctgagcagcgtggtcacagtgcctagctctagcctgggcacccagacctacatctgcaatgtgaaccacaagcctagcaacaccaaggtggacaagagagtggaacccaagagctgtggtaccatcactcaaggtttggcagtgtcaaccatctcatcattctttccacctggctaccaagtgtccttctgcctggtcatggtgctgctgttcgccgtggataccggcctgtacttcagcgtcaagaccaacatccggtccagcaccagagactggaaggaccacaagttcaagtggcggaaggaccctcaggacaag

SEQ ID NO: 34360 - DNA, 2229 bp, synthetic construct
  source 1..2229: mol_type = other DNA
atggccttaccagtgaccgccttgctcctgccgctggccttgctgctccacgccgccaggccgatccagatgacccagagccccagcagcctgtctgccagcgtgggcgacagagtgaccatcacctgtcggagcagccagagcatcgtgcactccgtgggcaacaccttcctggaatggtatcagcagaagcccggcaaggcccccaagctgctgatctacaaggtgtccaacagattcagcggcgtgcccagcaggtttagcggctctggcagcggcaccgacttcaccctgaccatctctagcctccagcccgaggacttcgccacctactactgttttcaaggcagccagttcccctacaccttcggccagggaacaaaggtggaaatcaagcggctcgaggacctgaagaacgtgttcccacctgaggtggccgtgttcgagcctagcgaggccgagatcagccacacccagaaagccaccctcgtgtgcctggctaccggcttctaccccgaccatgtggaactgtcttggtgggtcaacggcaaagaggtgcacagcggcgtgtctaccgacccccagccactgaaagaacagcccgccctgaacgacagccggtactgcctgagcagcagactgagagtgtccgccaccttctggcagaacccccggaaccacttcagatgccaggtgcagttctacggcctgagcgagaacgacgagtggacccaggacagagccaagcccgtgacccagatcgtgtctgccgaagcctggggcagagccgattgcggatcccagagcttcggcctgctggaccccaagctgtgctacctgctggatggcatcctgttcatctacggcgtgatcctgaccgccctgttcctgagagtgaagttcagcagaagcgccgacgcccctgcctaccagcagggacagaaccaactgtacaacgagctgaacctgggcagacgggaagagtacgacgtgctggacaagcggagaggcagggaccctgagatgggcggaaagccccagcggagaaagaacccccaggaaggactgtataacgaactccagaaagacaagatggccgaagcctacagcgagatcggcatgaagggcgagcggagaagaggcaagggccacgatggcctgtaccagggcctgagcaccgccaccaaggacacctatgacgccctgcacatgcaggccctgcctccaagaagggccaagcgatctggatctggagcaacaaacttctcactactcaaacaagcaggtgacgtggaggagaatcccgggcctactagtatggactggatttggcgcatccttttccttgtcggcgctgctaccggcgcgcattccttcgaagaagtgcaactggtggaaagcggaggcggcctggtgcagcctggcggatctctgagactgagctgtgccgccagcggctacgagttcagccggtcctggatgaactgggtgcgccaggcccctggcaagggactggaatgggtgggaagaatctaccccggcgacggcgacaccaactacagcggcaagttcaagggccggttcaccatcagcgccgacaccagcaagaacaccgcctacctccagatgaacagcctgcgggccgaggataccgccgtgtactactgtgccagagatggcagctcctgggactggtacttcgacgtgtggggacagggaacccttgtgaccgtgtccagcacgcgtatccagaaccctgatcctgccgtgtaccagctgcgggatagcaagagcagcgacaagagcgtgtgtctgttcaccgacttcgacagccagaccaacgtgtcccagagcaaggactccgacgtgtacatcaccgataagaccgtgctggacatgcggagcatggacttcaagagcaactccgccgtggcctggtccaacaagtccgatttcgcctgcgccaacgccttcaacaacagcattatccccgaggacacattcttcccaagccccgagagcagctgcggtaccatcactcaaggtttggcagtgtcaaccatctcatcattctttccacctggctaccaagtgtccttctgcctggtcatggtgctgctgttcgccgtggataccggcctgtacttcagcgtcaagaccaacatccggtccagcaccagagactggaaggaccacaagttcaagtggcggaaggaccctcaggacaag

SEQ ID NO: 34361 - DNA, 2154 bp, synthetic construct
  source 1..2154: mol_type = other DNA
atggccttaccagtgaccgccttgctcctgccgctggccttgctgctccacgccgccaggccgatccagatgacccagagccccagcagcctgtctgccagcgtgggcgacagagtgaccatcacctgtcggagcagccagagcatcgtgcactccgtgggcaacaccttcctggaatggtatcagcagaagcccggcaaggcccccaagctgctgatctacaaggtgtccaacagattcagcggcgtgcccagcaggtttagcggctctggcagcggcaccgacttcaccctgaccatctctagcctccagcccgaggacttcgccacctactactgttttcaaggcagccagttcccctacaccttcggccagggaacaaaggtggaaatcaagcggctcgaggacctgaagaacgtgttcccacctgaggtggccgtgttcgagcctagcgaggccgagatcagccacacccagaaagccaccctcgtgtgcctggctaccggcttctaccccgaccatgtggaactgtcttggtgggtcaacggcaaagaggtgcacagcggcgtgtctaccgacccccagccactgaaagaacagcccgccctgaacgacagccggtactgcctgagcagcagactgagagtgtccgccaccttctggcagaacccccggaaccacttcagatgccaggtgcagttctacggcctgagcgagaacgacgagtggacccaggacagagccaagcccgtgacccagatcgtgtctgccgaagcctggggcagagccgattgcggatcccagagcttcggcctgctggaccccaagctgtgctacctgctggatggcatcctgttcatctacggcgtgatcctgaccgccctgttcctgagagtgaagttcagcagaagcgccgacgcccctgcctaccagcagggacagaaccaactgtacaacgagctgaacctgggcagacgggaagagtacgacgtgctggacaagcggagaggcagggaccctgagatgggcggaaagccccagcggagaaagaacccccaggaaggactgtataacgaactccagaaagacaagatggccgaagcctacagcgagatcggcatgaagggcgagcggagaagaggcaagggccacgatggcctgtaccagggcctgagcaccgccaccaaggacacctatgacgccctgcacatgcaggccctgcctccaagaagggccaagcgatctggatctggagcaacaaacttctcactactcaaacaagcaggtgacgtggaggagaatcccgggcctactagtatggactggatttggcgcatccttttccttgtcggcgctgctaccggcgcgcattccttcgaagaagtgcaactggtggaaagcggaggcggcctggtgcagcctggcggatctctgagactgagctgtgccgccagcggctacgagttcagccggtcctggatgaactgggtgcgccaggcccctggcaagggactggaatgggtgggaagaatctaccccggcgacggcgacaccaactacagcggcaagttcaagggccggttcaccatcagcgccgacaccagcaagaacaccgcctacctccagatgaacagcctgcgggccgaggataccgccgtgtactactgtgccagagatggcagctcctgggactggtacttcgacgtgtggggacagggaacccttgtgaccgtgtccagcacgcgtatccagaaccctgatcctgccgtgtaccagctgcgggatagcaagagcagcgacaagagcgtgtgtctgttcaccgacttcgacagccagaccaacgtgtcccagagcaaggactccgacgtgtacatcaccgataagaccgtgctggacatgcggagcatggacttcaagagcaactccgccgtggcctggtccaacaagtccgatttcgcctgcgccaacgccttcaacaacagcattatccccgaggacacattcttcccaagccccgagagcagctgcggtaccatcactcaaggtttggcagtgtcaaccatctcatcattctttccacctggctaccaagtgtccttctgcctggtcatggtgctgctgttcgccgtggataccggcctgtacttcagcgtc

SEQ ID NO: 34362 - DNA, 2157 bp, synthetic construct
  source 1..2157: mol_type = other DNA
atggccttaccagtgaccgccttgctcctgccgctggccttgctgctccacgccgccaggccgatccagatgacccagagccccagcagcctgtctgccagcgtgggcgacagagtgaccatcacctgtcggagcagccagagcatcgtgcactccgtgggcaacaccttcctggaatggtatcagcagaagcccggcaaggcccccaagctgctgatctacaaggtgtccaacagattcagcggcgtgcccagcaggtttagcggctctggcagcggcaccgacttcaccctgaccatctctagcctccagcccgaggacttcgccacctactactgttttcaaggcagccagttcccctacaccttcggccagggaacaaaggtggaaatcaagcggctcgaggacctgaagaacgtgttcccacctgaggtggccgtgttcgagcctagcgaggccgagatcagccacacccagaaagccaccctcgtgtgcctggctaccggcttctaccccgaccatgtggaactgtcttggtgggtcaacggcaaagaggtgcacagcggcgtgtctaccgacccccagccactgaaagaacagcccgccctgaacgacagccggtactgcctgagcagcagactgagagtgtccgccaccttctggcagaacccccggaaccacttcagatgccaggtgcagttctacggcctgagcgagaacgacgagtggacccaggacagagccaagcccgtgacccagatcgtgtctgccgaagcctggggcagagccgattgcggatcccagagcttcggcctgctggaccccaagctgtgctacctgctggatggcatcctgttcatctacggcgtgatcctgaccgccctgttcctgagagtgaagttcagcagaagcgccgacgcccctgcctaccagcagggacagaaccaactgtacaacgagctgaacctgggcagacgggaagagtacgacgtgctggacaagcggagaggcagggaccctgagatgggcggaaagccccagcggagaaagaacccccaggaaggactgtataacgaactccagaaagacaagatggccgaagcctacagcgagatcggcatgaagggcgagcggagaagaggcaagggccacgatggcctgtaccagggcctgagcaccgccaccaaggacacctatgacgccctgcacatgcaggccctgcctccaagaagggccaagcgatctggatctggagcaacaaacttctcactactcaaacaagcaggtgacgtggaggagaatcccgggcctactagtatggactggatttggcgcatccttttccttgtcggcgctgctaccggcgcgcattccttcgaagaagtgcaactggtggaaagcggaggcggcctggtgcagcctggcggatctctgagactgagctgtgccgccagcggctacgagttcagccggtcctggatgaactgggtgcgccaggcccctggcaagggactggaatgggtgggaagaatctaccccggcgacggcgacaccaactacagcggcaagttcaagggccggttcaccatcagcgccgacaccagcaagaacaccgcctacctccagatgaacagcctgcgggccgaggataccgccgtgtactactgtgccagagatggcagctcctgggactggtacttcgacgtgtggggacagggaacccttgtgaccgtgtccagcacgcgtatccagaaccctgatcctgccgtgtaccagctgcgggatagcaagagcagcgacaagagcgtgtgtctgttcaccgacttcgacagccagaccaacgtgtcccagagcaaggactccgacgtgtacatcaccgataagaccgtgctggacatgcggagcatggacttcaagagcaactccgccgtggcctggtccaacaagtccgatttcgcctgcgccaacgccttcaacaacagcattatccccgaggacacattcttcccaagccccgagagcagctgcggtaccatcactcaaggtttggcagtgtcaaccatctcatcattctttccacctggctaccaagtgtccttctgcctggtcatggtgctgctgttcgccgtggataccggcctgtacttcagcgtcaag

SEQ ID NO: 34363 - DNA, 2160 bp, synthetic construct
  source 1..2160: mol_type = other DNA
atggccttaccagtgaccgccttgctcctgccgctggccttgctgctccacgccgccaggccgatccagatgacccagagccccagcagcctgtctgccagcgtgggcgacagagtgaccatcacctgtcggagcagccagagcatcgtgcactccgtgggcaacaccttcctggaatggtatcagcagaagcccggcaaggcccccaagctgctgatctacaaggtgtccaacagattcagcggcgtgcccagcaggtttagcggctctggcagcggcaccgacttcaccctgaccatctctagcctccagcccgaggacttcgccacctactactgttttcaaggcagccagttcccctacaccttcggccagggaacaaaggtggaaatcaagcggctcgaggacctgaagaacgtgttcccacctgaggtggccgtgttcgagcctagcgaggccgagatcagccacacccagaaagccaccctcgtgtgcctggctaccggcttctaccccgaccatgtggaactgtcttggtgggtcaacggcaaagaggtgcacagcggcgtgtctaccgacccccagccactgaaagaacagcccgccctgaacgacagccggtactgcctgagcagcagactgagagtgtccgccaccttctggcagaacccccggaaccacttcagatgccaggtgcagttctacggcctgagcgagaacgacgagtggacccaggacagagccaagcccgtgacccagatcgtgtctgccgaagcctggggcagagccgattgcggatcccagagcttcggcctgctggaccccaagctgtgctacctgctggatggcatcctgttcatctacggcgtgatcctgaccgccctgttcctgagagtgaagttcagcagaagcgccgacgcccctgcctaccagcagggacagaaccaactgtacaacgagctgaacctgggcagacgggaagagtacgacgtgctggacaagcggagaggcagggaccctgagatgggcggaaagccccagcggagaaagaacccccaggaaggactgtataacgaactccagaaagacaagatggccgaagcctacagcgagatcggcatgaagggcgagcggagaagaggcaagggccacgatggcctgtaccagggcctgagcaccgccaccaaggacacctatgacgccctgcacatgcaggccctgcctccaagaagggccaagcgatctggatctggagcaacaaacttctcactactcaaacaagcaggtgacgtggaggagaatcccgggcctactagtatggactggatttggcgcatccttttccttgtcggcgctgctaccggcgcgcattccttcgaagaagtgcaactggtggaaagcggaggcggcctggtgcagcctggcggatctctgagactgagctgtgccgccagcggctacgagttcagccggtcctggatgaactgggtgcgccaggcccctggcaagggactggaatgggtgggaagaatctaccccggcgacggcgacaccaactacagcggcaagttcaagggccggttcaccatcagcgccgacaccagcaagaacaccgcctacctccagatgaacagcctgcgggccgaggataccgccgtgtactactgtgccagagatggcagctcctgggactggtacttcgacgtgtggggacagggaacccttgtgaccgtgtccagcacgcgtatccagaaccctgatcctgccgtgtaccagctgcgggatagcaagagcagcgacaagagcgtgtgtctgttcaccgacttcgacagccagaccaacgtgtcccagagcaaggactccgacgtgtacatcaccgataagaccgtgctggacatgcggagcatggacttcaagagcaactccgccgtggcctggtccaacaagtccgatttcgcctgcgccaacgccttcaacaacagcattatccccgaggacacattcttcccaagccccgagagcagctgcggtaccatcactcaaggtttggcagtgtcaaccatctcatcattctttccacctggctaccaagtgtccttctgcctggtcatggtgctgctgttcgccgtggataccggcctgtacttcagcgtcaagacc

SEQ ID NO: 34364 - DNA, 1971 bp, synthetic construct
  source 1..1971: mol_type = other DNA
atggccttaccagtgaccgccttgctcctgccgctggccttgctgctccacgccgccaggccgatccagatgacccagagccccagcagcctgtctgccagcgtgggcgacagagtgaccatcacctgtcggagcagccagagcatcgtgcactccgtgggcaacaccttcctggaatggtatcagcagaagcccggcaaggcccccaagctgctgatctacaaggtgtccaacagattcagcggcgtgcccagcaggtttagcggctctggcagcggcaccgacttcaccctgaccatctctagcctccagcccgaggacttcgccacctactactgttttcaaggcagccagttcccctacaccttcggccagggaacaaaggtggaaatcaagcggctcgagggacagcctaaggccaatcctaccgtgacactgttccctccaagcagcgaagaactccaggccaacaaggccacacttgtgtgcctgatctccgacttctaccctggggctgtgacagtggcttggaaggccgatggatctcctgtgaaagccggcgtggaaaccaccaagccatccaagcagagcaacaacaaatacgccgccagctcctacctgagcctgacacctgagcagtggaagtcccacagatcctacagctgccaagtgacccacgaaggcagcaccgtggaaaagacagtggcccctacagagtgcagcggatccctgggagagcctcagctgtgctatatcctggacgccatcctgtttctgtacggcatcgtgctgaccctgctgtactgccggctgaagatccaagtgcggaaggccgccatcaccagctacgagaaatccgacggcgtgtacaccggcctgagcaccagaaatcaagagacatacgagacactgaagcacgaaaagcctccacaaagggccaagcgatctggatctggagcaacaaacttctcactactcaaacaagcaggtgacgtggaggagaatcccgggcctactagtatggactggatttggcgcatccttttccttgtcggcgctgctaccggcgcgcattccttcgaagaagtgcaactggtggaaagcggaggcggcctggtgcagcctggcggatctctgagactgagctgtgccgccagcggctacgagttcagccggtcctggatgaactgggtgcgccaggcccctggcaagggactggaatgggtgggaagaatctaccccggcgacggcgacaccaactacagcggcaagttcaagggccggttcaccatcagcgccgacaccagcaagaacaccgcctacctccagatgaacagcctgcgggccgaggataccgccgtgtactactgtgccagagatggcagctcctgggactggtacttcgacgtgtggggacagggaacccttgtgaccgtgtccagcacgcgtgcctctacaaagggaccctccgtgtttcctctggctcccagcagcaagtctacaagcggaggaacagccgctctgggctgcctggtcaaggattactttcccgagcctgtgaccgtgtcctggaatagcggagcactgacaagcggcgtgcacacctttccagccgtgctgcaaagcagcggcctgtactctctgagcagcgtggtcacagtgcctagctctagcctgggcacccagacctacatctgcaatgtgaaccacaagcctagcaacaccaaggtggacaagagagtggaacccaagagctgtggtaccctcggagaaccacagctctgttacattctggatgctatcctgttcctctatgggatcgtcctgacactcctgtattgcagactcaaaattcaagttcgcaaagccgccattacctcttacgagaagagtgatggggtgtacacaggactgtctacccggaatcaagaaacctacgaaaccctcaaacatgagaagccacctcagtaa

SEQ ID NO: 34365 - DNA, 1878 bp, synthetic construct
  source 1..1878: mol_type = other DNA
atggccttaccagtgaccgccttgctcctgccgctggccttgctgctccacgccgccaggccgatccagatgacccagagccccagcagcctgtctgccagcgtgggcgacagagtgaccatcacctgtcggagcagccagagcatcgtgcactccgtgggcaacaccttcctggaatggtatcagcagaagcccggcaaggcccccaagctgctgatctacaaggtgtccaacagattcagcggcgtgcccagcaggtttagcggctctggcagcggcaccgacttcaccctgaccatctctagcctccagcccgaggacttcgccacctactactgttttcaaggcagccagttcccctacaccttcggccagggaacaaaggtggaaatcaagcggctcgaggacctgaagaacgtgttcccacctgaggtggccgtgttcgagcctagcgaggccgagatcagccacacccagaaagccaccctcgtgtgcctggctaccggcttctaccccgaccatgtggaactgtcttggtgggtcaacggcaaagaggtgcacagcggcgtgtgtaccgacccccagccactgaaagaacagcccgccctgaacgacagccggtactgcctgagcagcagactgagagtgtccgccaccttctggcagaacccccggaaccacttcagatgccaggtgcagttctacggcctgagcgagaacgacgagtggacccaggacagagccaagcccgtgacccagatcgtgtctgccgaagcctggggcagagccgattgcggctttaccagcgagagctaccagcagggcgtgctgagcgcctactacatgtacttgttgctgctgctgaagtccgtggtgtacttcgccatcatcacatgctgcctgctgcggagaaccgccttctgctgcaacggcgagaagtctagggccaagcgatctggatctggagcaacaaacttctcactactcaaacaagcaggtgacgtggaggagaatcccgggcctactagtatggactggatttggcgcatccttttccttgtcggcgctgctaccggcgcgcattccttcgaagaagtgcaactggtggaaagcggaggcggcctggtgcagcctggcggatctctgagactgagctgtgccgccagcggctacgagttcagccggtcctggatgaactgggtgcgccaggcccctggcaagggactggaatgggtgggaagaatctaccccggcgacggcgacaccaactacagcggcaagttcaagggccggttcaccatcagcgccgacaccagcaagaacaccgcctacctccagatgaacagcctgcgggccgaggataccgccgtgtactactgtgccagagatggcagctcctgggactggtacttcgacgtgtggggacagggaacccttgtgaccgtgtccagcacgcgtatccagaaccctgatcctgccgtgtaccagctgcgggatagcaagagcagcgacaagagcgtgtgtctgttcaccgacttcgacagccagaccaacgtgtcccagagcaaggactccgacgtgtacatcaccgataagtgcgtgctggacatgcggagcatggacttcaagagcaactccgccgtggcctggtccaacaagtccgatttcgcctgcgccaacgccttcaacaacagcattatccccgaggacacattcttcccaagccccgagagcagctgcgacgtgaagctggtggaaaagagcttcgagacagacaccaacctgaacttccagaacctgagcgtgatcggcttcagaatcctgctgctgaaagtggccggctttaacctgctgatgaccctgcggctgtggtccagc

SEQ ID NO: 34366 - DNA, 1899 bp, synthetic construct
  source 1..1899: mol_type = other DNA
atggccttaccagtgaccgccttgctcctgccgctggccttgctgctccacgccgccaggccgatccagatgacccagagccccagcagcctgtctgccagcgtgggcgacagagtgaccatcacctgtcggagcagccagagcatcgtgcactccgtgggcaacaccttcctggaatggtatcagcagaagcccggcaaggcccccaagctgctgatctacaaggtgtccaacagattcagcggcgtgcccagcaggtttagcggctctggcagcggcaccgacttcaccctgaccatctctagcctccagcccgaggacttcgccacctactactgttttcaaggcagccagttcccctacaccttcggccagggaacaaaggtggaaatcaagcggctcgaggacaagcagctggacgccgacgtgtcccccaagcctaccatcttcctgccctctatcgccgagacaaagctccagaaggccggcacctacctgtgcctgctggaaaagttcttcccagatgtgattaagatccactggcaggaaaagaagtccaacaccatcctgggcagccaggaaggcaacaccatgaagaccaacgacacctacatgaagttcagctggctgaccgtgcccgagaagtccctggacaaagaacacagatgcatcgtgcggcacgaaaacaacaagaacggcgtggaccaggaaatcatcttcccacccatcaagaccgatgtgattacaatggaccccaaggacaactgctccaaggacgccaacgataccctgctgctccagctgaccaacaccagcgcctactacatgtacgagatcctgctgggcaaggccaccctgtacgccgtgctggtgtctgccctggtgctgatggctatggtcaagcggaaggacagccggggaagggccaagcgatctggatctggagcaacaaacttctcactactcaaacaagcaggtgacgtggaggagaatcccgggcctactagtatggactggatttggcgcatccttttccttgtcggcgctgctaccggcgcgcattccttcgaagaagtgcaactggtggaaagcggaggcggcctggtgcagcctggcggatctctgagactgagctgtgccgccagcggctacgagttcagccggtcctggatgaactgggtgcgccaggcccctggcaagggactggaatgggtgggaagaatctaccccggcgacggcgacaccaactacagcggcaagttcaagggccggttcaccatcagcgccgacaccagcaagaacaccgcctacctccagatgaacagcctgcgggccgaggataccgccgtgtactactgtgccagagatggcagctcctgggactggtacttcgacgtgtggggacagggaacccttgtgaccgtgtccagcacgcgtagccagcctcacaccaagcccagcgtgttcgtgatgaagaacggcaccaacgtggcctgcctcgtgaaagagttctaccccaaggacatcaggatcaacctggtgtccagcaagaagatcaccgagttcgaccccgccatcgtgatctcccccagcggcaagtacaacgccgtgaagctggggaagtatgaggacagcaacagcgtgacctgctccgtgcagcacgacaacaagaccgtgcacagcaccgactttgaagtgaaaaccgactccaccgaccacgtgaagcccaaagagacagagaacaccaagcagcccagcaagagctgccacaagcccaaggccatcgtgcacaccgagaaagtgaacatgatgagcctgaccgtgatcggcttcagaatcctgctgctgaaagtggccggctttaacctgctgatgaccctgcggctgtggtccagctaa

SEQ ID NO: 34367 - DNA, 1899 bp, synthetic construct
  source 1..1899: mol_type = other DNA
atggccttaccagtgaccgccttgctcctgccgctggccttgctgctccacgccgccaggccgatccagatgacccagagccccagcagcctgtctgccagcgtgggcgacagagtgaccatcacctgtcggagcagccagagcatcgtgcactccgtgggcaacaccttcctggaatggtatcagcagaagcccggcaaggcccccaagctgctgatctacaaggtgtccaacagattcagcggcgtgcccagcaggtttagcggctctggcagcggcaccgacttcaccctgaccatctctagcctccagcccgaggacttcgccacctactactgttttcaaggcagccagttcccctacaccttcggccagggaacaaaggtggaaatcaagcggctcgaggacaagcagctggacgccgacgtgtcccccaagcctaccatcttcctgccctctatcgccgagacaaagctccagaaggccggcacctacctgtgcctgctggaaaagttcttcccagatgtgattaagatccactggcaggaaaagaagtccaacaccatcctgggcagccaggaaggcaacaccatgaagaccaacgacacctacatgaagttcagctggctgaccgtgcccgagaagtccctggacaaagaacacagatgcatcgtgcggcacgaaaacaacaagaacggcgtggaccaggaaatcatcttcccacccatcaagaccgatgtgattacaatggaccccaaggacaactgctccaaggacgccaacgataccctgctgctccagctgaccaacaccagcgccaccatcctgtacgagatcctgctgggcaaggccaccctgtacgccgtgctggtgtctgccctggtgctgatggctatggtcaagcggaaggacagccggggaagggccaagcgatctggatctggagcaacaaacttctcactactcaaacaagcaggtgacgtggaggagaatcccgggcctactagtatggactggatttggcgcatccttttccttgtcggcgctgctaccggcgcgcattccttcgaagaagtgcaactggtggaaagcggaggcggcctggtgcagcctggcggatctctgagactgagctgtgccgccagcggctacgagttcagccggtcctggatgaactgggtgcgccaggcccctggcaagggactggaatgggtgggaagaatctaccccggcgacggcgacaccaactacagcggcaagttcaagggccggttcaccatcagcgccgacaccagcaagaacaccgcctacctccagatgaacagcctgcgggccgaggataccgccgtgtactactgtgccagagatggcagctcctgggactggtacttcgacgtgtggggacagggaacccttgtgaccgtgtccagcacgcgtagccagcctcacaccaagcccagcgtgttcgtgatgaagaacggcaccaacgtggcctgcctcgtgaaagagttctaccccaaggacatcaggatcaacctggtgtccagcaagaagatcaccgagttcgaccccgccatcgtgatctcccccagcggcaagtacaacgccgtgaagctggggaagtatgaggacagcaacagcgtgacctgctccgtgcagcacgacaacaagaccgtgcacagcaccgactttgaagtgaaaaccgactccaccgaccacgtgaagcccaaagagacagagaacaccaagcagcccagcaagagctgccacaagcccaaggccatcgtgcacaccgagaaagtgaacatgatgagcctgaccgtgatcggcttcagaatcctgctgctgaaagtggccggctttaacctgctgatgaccctgcggctgtggtccagctaa

SEQ ID NO: 34368 - DNA, 1899 bp, synthetic construct
  source 1..1899: mol_type = other DNA
atggccttaccagtgaccgccttgctcctgccgctggccttgctgctccacgccgccaggccgatccagatgacccagagccccagcagcctgtctgccagcgtgggcgacagagtgaccatcacctgtcggagcagccagagcatcgtgcactccgtgggcaacaccttcctggaatggtatcagcagaagcccggcaaggcccccaagctgctgatctacaaggtgtccaacagattcagcggcgtgcccagcaggtttagcggctctggcagcggcaccgacttcaccctgaccatctctagcctccagcccgaggacttcgccacctactactgttttcaaggcagccagttcccctacaccttcggccagggaacaaaggtggaaatcaagcggctcgaggacaagcagctggacgccgacgtgtcccccaagcctaccatcttcctgccctctatcgccgagacaaagctccagaaggccggcacctacctgtgcctgctggaaaagttcttcccagatgtgattaagatccactggcaggaaaagaagtccaacaccatcctgggcagccaggaaggcaacaccatgaagaccaacgacacctacatgaagttcagctggctgaccgtgcccgagaagtccctggacaaagaacacagatgcatcgtgcggcacgaaaacaacaagaacggcgtggaccaggaaatcatcttcccacccatcaagaccgatgtgattacaatggaccccaaggacaactgctccaaggacgccaacgataccctgctgctccagctgaccaacaccagcgcctactacatgtacgagatcctgctgggcaaggccaccctgtacgccgtgctggtgtctgccctggtgctgatggctatggtcaagcggaaggacagccggggaagggccaagcgatctggatctggagcaacaaacttctcactactcaaacaagcaggtgacgtggaggagaatcccgggcctactagtatggactggatttggcgcatccttttccttgtcggcgctgctaccggcgcgcattccttcgaagaagtgcaactggtggaaagcggaggcggcctggtgcagcctggcggatctctgagactgagctgtgccgccagcggctacgagttcagccggtcctggatgaactgggtgcgccaggcccctggcaagggactggaatgggtgggaagaatctaccccggcgacggcgacaccaactacagcggcaagttcaagggccggttcaccatcagcgccgacaccagcaagaacaccgcctacctccagatgaacagcctgcgggccgaggataccgccgtgtactactgtgccagagatggcagctcctgggactggtacttcgacgtgtggggacagggaacccttgtgaccgtgtccagcacgcgtagccagcctcacaccaagcccagcgtgttcgtgatgaagaacggcaccaacgtggcctgcctcgtgaaagagttctaccccaaggacatcaggatcaacctggtgtccagcaagaagatcaccgagttcgaccccgccatcgtgatctcccccagcggcaagtacaacgccgtgaagctggggaagtacgaggacagcaacagcgtgacctgctccgtgcagcacgacaacaagaccgtgcacagcaccgactttgaagtgaaaaccgactccaccgaccacgtgaagcccaaagagacagagaacaccaagcagcccagcaagagctgccacaagcccaaggccatcgtgcacaccgagaaagtgaacatgatgagcctgaccgtgctgggcttcagaatcctgctgctgaaagtggccggctttaacctgctgatgaccctgcggctgtggtccagctaa

SEQ ID NO: 34369 - DNA, 1899 bp, synthetic construct
  source 1..1899: mol_type = other DNA
atggccttaccagtgaccgccttgctcctgccgctggccttgctgctccacgccgccaggccgatccagatgacccagagccccagcagcctgtctgccagcgtgggcgacagagtgaccatcacctgtcggagcagccagagcatcgtgcactccgtgggcaacaccttcctggaatggtatcagcagaagcccggcaaggcccccaagctgctgatctacaaggtgtccaacagattcagcggcgtgcccagcaggtttagcggctctggcagcggcaccgacttcaccctgaccatctctagcctccagcccgaggacttcgccacctactactgttttcaaggcagccagttcccctacaccttcggccagggaacaaaggtggaaatcaagcggctcgaggacaagcagctggacgccgacgtgtcccccaagcctaccatcttcctgccctctatcgccgagacaaagctccagaaggccggcacctacctgtgcctgctggaaaagttcttcccagatgtgattaagatccactggcaggaaaagaagtccaacaccatcctgggcagccaggaaggcaacaccatgaagaccaacgacacctacatgaagttcagctggctgaccgtgcccgagaagtccctggacaaagaacacagatgcatcgtgcggcacgaaaacaacaagaacggcgtggaccaggaaatcatcttcccacccatcaagaccgatgtgattacaatggaccccaaggacaactgctccaaggacgccaacgataccctgctgctccagctgaccaacaccagcgccaccatcctgtacgagatcctgctgggcaaggccaccctgtacgccgtgctggtgtctgccctggtgctgatggctatggtcaagcggaaggacagccggggaagggccaagcgatctggatctggagcaacaaacttctcactactcaaacaagcaggtgacgtggaggagaatcccgggcctactagtatggactggatttggcgcatccttttccttgtcggcgctgctaccggcgcgcattccttcgaagaagtgcaactggtggaaagcggaggcggcctggtgcagcctggcggatctctgagactgagctgtgccgccagcggctacgagttcagccggtcctggatgaactgggtgcgccaggcccctggcaagggactggaatgggtgggaagaatctaccccggcgacggcgacaccaactacagcggcaagttcaagggccggttcaccatcagcgccgacaccagcaagaacaccgcctacctccagatgaacagcctgcgggccgaggataccgccgtgtactactgtgccagagatggcagctcctgggactggtacttcgacgtgtggggacagggaacccttgtgaccgtgtccagcacgcgtagccagcctcacaccaagcccagcgtgttcgtgatgaagaacggcaccaacgtggcctgcctcgtgaaagagttctaccccaaggacatcaggatcaacctggtgtccagcaagaagatcaccgagttcgaccccgccatcgtgatctcccccagcggcaagtacaacgccgtgaagctggggaagtacgaggacagcaacagcgtgacctgctccgtgcagcacgacaacaagaccgtgcacagcaccgactttgaagtgaaaaccgactccaccgaccacgtgaagcccaaagagacagagaacaccaagcagcccagcaagagctgccacaagcccaaggccatcgtgcacaccgagaaagtgaacatgatgagcctgaccgtgctgggcttcagaatcctgctgctgaaagtggccggctttaacctgctgatgaccctgcggctgtggtccagctaa

SEQ ID NO: 34370 - DNA, 1881 bp, synthetic construct
  source 1..1881: mol_type = other DNA
atggccttaccagtgaccgccttgctcctgccgctggccttgctgctccacgccgccaggccgatccagatgacccagagccccagcagcctgtctgccagcgtgggcgacagagtgaccatcacctgtcggagcagccagagcatcgtgcactccgtgggcaacaccttcctggaatggtatcagcagaagcccggcaaggcccccaagctgctgatctacaaggtgtccaacagattcagcggcgtgcccagcaggtttagcggctctggcagcggcaccgacttcaccctgaccatctctagcctccagcccgaggacttcgccacctactactgttttcaaggcagccagttcccctacaccttcggccagggaacaaaggtggaaatcaagcggctcgaggacctgaagaacgtgttcccacctgaggtggccgtgttcgagcctagcgaggccgagatcagccacacccagaaagccaccctcgtgtgcctggctaccggcttctaccccgaccatgtggaactgtcttggtgggtcaacggcaaagaggtgcacagcggcgtgtgtaccgacccccagccactgaaagaacagcccgccctgaacgacagccggtactgcctgagcagcagactgagagtgtccgccaccttctggcagaacccccggaaccacttcagatgccaggtgcagttctacggcctgagcgagaacgacgagtggacccaggacagagccaagcccgtgacccagatcgtgtctgccgaagcctggggcagagccgattgcggctttaccagcgagagctaccagcagggcgtgctgagcgccaccatcctgtacttgttgctgctgctgaagtccgtggtgtacttcgccatcatcacatgctgcctgctgcggagaaccgccttctgctgcaacggcgagaagtctagggccaagcgatctggatctggagcaacaaacttctcactactcaaacaagcaggtgacgtggaggagaatcccgggcctactagtatggactggatttggcgcatccttttccttgtcggcgctgctaccggcgcgcattccttcgaagaagtgcaactggtggaaagcggaggcggcctggtgcagcctggcggatctctgagactgagctgtgccgccagcggctacgagttcagccggtcctggatgaactgggtgcgccaggcccctggcaagggactggaatgggtgggaagaatctaccccggcgacggcgacaccaactacagcggcaagttcaagggccggttcaccatcagcgccgacaccagcaagaacaccgcctacctccagatgaacagcctgcgggccgaggataccgccgtgtactactgtgccagagatggcagctcctgggactggtacttcgacgtgtggggacagggaacccttgtgaccgtgtccagcacgcgtatccagaaccctgatcctgccgtgtaccagctgcgggatagcaagagcagcgacaagagcgtgtgtctgttcaccgacttcgacagccagaccaacgtgtcccagagcaaggactccgacgtgtacatcaccgataagtgcgtgctggacatgcggagcatggacttcaagagcaactccgccgtggcctggtccaacaagtccgatttcgcctgcgccaacgccttcaacaacagcattatccccgaggacacattcttcccaagccccgagagcagctgcgacgtgaagctggtggaaaagagcttcgagacagacaccaacctgaacttccagaacctgagcgtgatcggcctgcggatgctgttcgccaaaaccgtggccgtgaacttcctgctgaccgccaagctgttcttcctctaa

SEQ ID NO: 34371 - DNA, 1968 bp, synthetic construct
  source 1..1968: mol_type = other DNA
atggccttaccagtgaccgccttgctcctgccgctggccttgctgctccacgccgccaggccgatccagatgacccagagccccagcagcctgtctgccagcgtgggcgacagagtgaccatcacctgtcggagcagccagagcatcgtgcactccgtgggcaacaccttcctggaatggtatcagcagaagcccggcaaggcccccaagctgctgatctacaaggtgtccaacagattcagcggcgtgcccagcaggtttagcggctctggcagcggcaccgacttcaccctgaccatctctagcctccagcccgaggacttcgccacctactactgttttcaaggcagccagttcccctacaccttcggccagggaacaaaggtggaaatcaagcggctcgaggacctgaagaacgtgttcccacctgaggtggccgtgttcgagcctagcgaggccgagatcagccacacccagaaagccaccctcgtgtgcctggctaccggcttctaccccgaccatgtggaactgtcttggtgggtcaacggcaaagaggtgcacagcggcgtgtctaccgacccccagccactgaaagaacagcccgccctgaacgacagccggtactgcctgagcagcagactgagagtgtccgccaccttctggcagaacccccggaaccacttcagatgccaggtgcagttctacggcctgagcgagaacgacgagtggacccaggacagagccaagcccgtgacccagatcgtgtctgccgaagcctggggcagagccgattgcggatcctccaaggacgccaacgataccctgctgctccagctgaccaacaccagcgcctactacatgtacttgttgctgctgctgaagtccgtggtgtacttcgccatcatcacatgctgcctgctgcggagaaccgccttctgctgcaacggcgagaagtctagggccaagcgatctggatctggagcaacaaacttctcactactcaaacaagcaggtgacgtggaggagaatcccgggcctactagtatggactggatttggcgcatccttttccttgtcggcgctgctaccggcgcgcattccttcgaagaagtgcaactggtggaaagcggaggcggcctggtgcagcctggcggatctctgagactgagctgtgccgccagcggctacgagttcagccggtcctggatgaactgggtgcgccaggcccctggcaagggactggaatgggtgggaagaatctaccccggcgacggcgacaccaactacagcggcaagttcaagggccggttcaccatcagcgccgacaccagcaagaacaccgcctacctccagatgaacagcctgcgggccgaggataccgccgtgtactactgtgccagagatggcagctcctgggactggtacttcgacgtgtggggacagggaacccttgtgaccgtgtccagcacgcgtatccagaaccctgatcctgccgtgtaccagctgcgggatagcaagagcagcgacaagagcgtgtgtctgttcaccgacttcgacagccagaccaacgtgtcccagagcaaggactccgacgtgtacatcaccgataagaccgtgctggacatgcggagcatggacttcaagagcaactccgccgtggcctggtccaacaagtccgatttcgcctgcgccaacgccttcaacaacagcattatccccgaggacacattcttcccaagccccgagagcagctgcggtaccgaagtgaaaaccgactccaccgaccacgtgaagcccaaagagacagagaacaccaagcagcccagcaagagctgccacaagcccaaggccatcgtgcacaccgagaaagtgaacatgatgagcctgaccgtgctgggcctgcggatgctgttcgccaaaaccgtggccgtgaacttcctgctgaccgccaagctgttcttcctctaa

SEQ ID NO: 34372 - DNA, 1878 bp, synthetic construct
  source 1..1878: mol_type = other DNA
atggccttaccagtgaccgccttgctcctgccgctggccttgctgctccacgccgccaggccgatccagatgacccagagccccagcagcctgtctgccagcgtgggcgacagagtgaccatcacctgtcggagcagccagagcatcgtgcactccgtgggcaacaccttcctggaatggtatcagcagaagcccggcaaggcccccaagctgctgatctacaaggtgtccaacagattcagcggcgtgcccagcaggtttagcggctctggcagcggcaccgacttcaccctgaccatctctagcctccagcccgaggacttcgccacctactactgttttcaaggcagccagttcccctacaccttcggccagggaacaaaggtggaaatcaagcggctcgaggacctgaagaacgtgttcccacctgaggtggccgtgttcgagcctagcgaggccgagatcagccacacccagaaagccaccctcgtgtgcctggctaccggcttctaccccgaccatgtggaactgtcttggtgggtcaacggcaaagaggtgcacagcggcgtgtgtaccgacccccagccactgaaagaacagcccgccctgaacgacagccggtactgcctgagcagcagactgagagtgtccgccaccttctggcagaacccccggaaccacttcagatgccaggtgcagttctacggcctgagcgagaacgacgagtggacccaggacagagccaagcccgtgacccagatcgtgtctgccgaagcctggggcagagccgattgcgacgtgaagctggtggaaaagagcttcgagacagacaccaacctgaacttccagaacctgagcgtgatcggcttcagaatcctgctgctgaaagtggccggctttaacctgctgatgaccctgcggctgtggtccagcagggccaagcgatctggatctggagcaacaaacttctcactactcaaacaagcaggtgacgtggaggagaatcccgggcctactagtatggactggatttggcgcatccttttccttgtcggcgctgctaccggcgcgcattccttcgaagaagtgcaactggtggaaagcggaggcggcctggtgcagcctggcggatctctgagactgagctgtgccgccagcggctacgagttcagccggtcctggatgaactgggtgcgccaggcccctggcaagggactggaatgggtgggaagaatctaccccggcgacggcgacaccaactacagcggcaagttcaagggccggttcaccatcagcgccgacaccagcaagaacaccgcctacctccagatgaacagcctgcgggccgaggataccgccgtgtactactgtgccagagatggcagctcctgggactggtacttcgacgtgtggggacagggaacccttgtgaccgtgtccagcacgcgtatccagaaccctgatcctgccgtgtaccagctgcgggatagcaagagcagcgacaagagcgtgtgtctgttcaccgacttcgacagccagaccaacgtgtcccagagcaaggactccgacgtgtacatcaccgataagtgcgtgctggacatgcggagcatggacttcaagagcaactccgccgtggcctggtccaacaagtccgatttcgcctgcgccaacgccttcaacaacagcattatccccgaggacacattcttcccaagccccgagagcagctgcggctttaccagcgagagctaccagcagggcgtgctgagcgccaccatcctgtacgagatcctgctgggcaaggccaccctgtacgccgtgctggtgtctgccctggtgctgatggctatggtcaagcggaaggacagccggggataa

SEQ ID NO: 34373 - DNA, 1878 bp, synthetic construct
  source 1..1878: mol_type = other DNA
atggccttaccagtgaccgccttgctcctgccgctggccttgctgctccacgccgccaggccgatccagatgacccagagccccagcagcctgtctgccagcgtgggcgacagagtgaccatcacctgtcggagcagccagagcatcgtgcactccgtgggcaacaccttcctggaatggtatcagcagaagcccggcaaggcccccaagctgctgatctacaaggtgtccaacagattcagcggcgtgcccagcaggtttagcggctctggcagcggcaccgacttcaccctgaccatctctagcctccagcccgaggacttcgccacctactactgttttcaaggcagccagttcccctacaccttcggccagggaacaaaggtggaaatcaagcggctcgaggacctgaagaacgtgttcccacctgaggtggccgtgttcgagcctagcgaggccgagatcagccacacccagaaagccaccctcgtgtgcctggctaccggcttctaccccgaccatgtggaactgtcttggtgggtcaacggcaaagaggtgcacagcggcgtgtgtaccgacccccagccactgaaagaacagcccgccctgaacgacagccggtactgcctgagcagcagactgagagtgtccgccaccttctggcagaacccccggaaccacttcagatgccaggtgcagttctacggcctgagcgagaacgacgagtggacccaggacagagccaagcccgtgacccagatcgtgtctgccgaagcctggggcagagccgattgcggctttaccagcgagagctaccagcagggcgtgctgagcgccaccaacctgagcgtgatcggcttcagaatcctgctgctgaaagtggccggctttaacctgctgatgaccctgcggctgtggtccagcagggccaagcgatctggatctggagcaacaaacttctcactactcaaacaagcaggtgacgtggaggagaatcccgggcctactagtatggactggatttggcgcatccttttccttgtcggcgctgctaccggcgcgcattccttcgaagaagtgcaactggtggaaagcggaggcggcctggtgcagcctggcggatctctgagactgagctgtgccgccagcggctacgagttcagccggtcctggatgaactgggtgcgccaggcccctggcaagggactggaatgggtgggaagaatctaccccggcgacggcgacaccaactacagcggcaagttcaagggccggttcaccatcagcgccgacaccagcaagaacaccgcctacctccagatgaacagcctgcgggccgaggataccgccgtgtactactgtgccagagatggcagctcctgggactggtacttcgacgtgtggggacagggaacccttgtgaccgtgtccagcacgcgtatccagaaccctgatcctgccgtgtaccagctgcgggatagcaagagcagcgacaagagcgtgtgtctgttcaccgacttcgacagccagaccaacgtgtcccagagcaaggactccgacgtgtacatcaccgataagtgcgtgctggacatgcggagcatggacttcaagagcaactccgccgtggcctggtccaacaagtccgatttcgcctgcgccaacgccttcaacaacagcattatccccgaggacacattcttcccaagccccgagagcagctgcgacgtgaagctggtggaaaagagcttcgagacagacaccaacctgaacttccagatcctgtacgagatcctgctgggcaaggccaccctgtacgccgtgctggtgtctgccctggtgctgatggctatggtcaagcggaaggacagccggggataa

SEQ ID NO: 34374 - DNA, 1878 bp, synthetic construct; identical to SEQ ID NO: 34372
  source 1..1878: mol_type = other DNA

SEQ ID NO: 34375 - DNA, 1878 bp, synthetic construct; identical to SEQ ID NO: 34373
  source 1..1878: mol_type = other DNA

SEQ ID NO: 34376 - DNA, 1875 bp, synthetic construct
  source 1..1875: mol_type = other DNA
atggccttaccagtgaccgccttgctcctgccgctggccttgctgctccacgccgccaggccgatccagatgacccagagccccagcagcctgtctgccagcgtgggcgacagagtgaccatcacctgtcggagcagccagagcatcgtgcactccgtgggcaacaccttcctggaatggtatcagcagaagcccggcaaggcccccaagctgctgatctacaaggtgtccaacagattcagcggcgtgcccagcaggtttagcggctctggcagcggcaccgacttcaccctgaccatctctagcctccagcccgaggacttcgccacctactactgttttcaaggcagccagttcccctacaccttcggccagggaacaaaggtggaaatcaagcggctcgaggacctgaagaacgtgttcccacctgaggtggccgtgttcgagcctagcgaggccgagatcagccacacccagaaagccaccctcgtgtgcctggctaccggcttctaccccgaccatgtggaactgtcttggtgggtcaacggcaaagaggtgcacagcggcgtgtgtaccgacccccagccactgaaagaacagcccgccctgaacgacagccggtactgcctgagcagcagactgagagtgtccgccaccttctggcagaacccccggaaccacttcagatgccaggtgcagttctacggcctgagcgagaacgacgagtggacccaggacagagccaagcccgtgacccagatcgtgtctgccgaagcctggggcagagccgattgcgacgtgaagctggtggaaaagagcttcgagacagacaccaacctgaacttccagaacctgagcgtgatcggcttcagaatcctgctgctgaaagtggccggctttaacctgctgatgaccctgcggctgtggtccagcagggccaagcgatctggatctggagcaacaaacttctcactactcaaacaagcaggtgacgtggaggagaatcccgggcctactagtatggactggatttggcgcatccttttccttgtcggcgctgctaccggcgcgcattccttcgaagaagtgcaactggtggaaagcggaggcggcctggtgcagcctggcggatctctgagactgagctgtgccgccagcggctacgagttcagccggtcctggatgaactgggtgcgccaggcccctggcaagggactggaatgggtgggaagaatctaccccggcgacggcgacaccaactacagcggcaagttcaagggccggttcaccatcagcgccgacaccagcaagaacaccgcctacctccagatgaacagcctgcgggccgaggataccgccgtgtactactgtgccagagatggcagctcctgggactggtacttcgacgtgtggggacagggaacccttgtgaccgtgtccagcacgcgtatccagaaccctgatcctgccgtgtaccagctgcgggatagcaagagcagcgacaagagcgtgtgtctgttcaccgacttcgacagccagaccaacgtgtcccagagcaaggactccgacgtgtacatcaccgataagtgcgtgctggacatgcggagcatggacttcaagagcaactccgccgtggcctggtccaacaagtccgatttcgcctgcgccaacgccttcaacaacagcattatccccgaggacacattcttcccaagccccgagagcagctgcggctttaccagcgagagctaccagcagggcgtgctgagcgccaccatcctgtacgagatcctgctgggcaaggccaccctgtacgccgtgctggtgtctgccctggtgctgatggctatggtcaagcggaaggacagccgggga

SEQ ID NO: 34377 - DNA, 1887 bp, synthetic construct
  source 1..1887: mol_type = other DNA
atggccttaccagtgaccgccttgctcctgccgctggccttgctgctccacgccgccaggccgatccagatgacccagagccccagcagcctgtctgccagcgtgggcgacagagtgaccatcacctgtcggagcagccagagcatcgtgcactccgtgggcaacaccttcctggaatggtatcagcagaagcccggcaaggcccccaagctgctgatctacaaggtgtccaacagattcagcggcgtgcccagcaggtttagcggctctggcagcggcaccgacttcaccctgaccatctctagcctccagcccgaggacttcgccacctactactgttttcaaggcagccagttcccctacaccttcggccagggaacaaaggtggaaatcaagcggctcgaggccgacgtgtcccccaagcctaccatcttcctgccctctatcgccgagacaaagctccagaaggccggcacctacctgtgcctgctggaaaagttcttcccagatgtgattaagatccactggcaggaaaagaagtccaacaccatcctgggcagccaggaaggcaacaccatgaagaccaacgacacctacatgaagttcagctggctgaccgtgcccgagaagtccctggacaaagaacacagatgcatcgtgcggcacgaaaacaacaagaacggcgtggaccaggaaatcatcttcccacccatcaagaccgatgtgattacaatggaccccaaggacaactgctccaaggacgccaacgataccctgctgctccagctgaccaacaccagcgcctactacatgtacttgttgctgctgctgaagtccgtggtgtacttcgccatcatcacatgctgcctgctgcggagaaccgccttctgctgcaacggcgagaagtctagggccaagcgatctggatctggagcaacaaacttctcactactcaaacaagcaggtgacgtggaggagaatcccgggcctactagtatggactggatttggcgcatccttttccttgtcggcgctgctaccggcgcgcattccttcgaagaagtgcaactggtggaaagcggaggcggcctggtgcagcctggcggatctctgagactgagctgtgccgccagcggctacgagttcagccggtcctggatgaactgggtgcgccaggcccctggcaagggactggaatgggtgggaagaatctaccccggcgacggcgacaccaactacagcggcaagttcaagggccggttcaccatcagcgccgacaccagcaagaacaccgcctacctccagatgaacagcctgcgggccgaggataccgccgtgtactactgtgccagagatggcagctcctgggactggtacttcgacgtgtggggacagggaacccttgtgaccgtgtccagcacgcgtagccagcctcacaccaagcccagcgtgttcgtgatgaagaacggcaccaacgtggcctgcctcgtgaaagagttctaccccaaggacatcaggatcaacctggtgtccagcaagaagatcaccgagttcgaccccgccatcgtgatctcccccagcggcaagtacaacgccgtgaagctggggaagtatgaggacagcaacagcgtgacctgctccgtgcagcacgacaacaagaccgtgcacagcaccgactttgaagtgaaaaccgactccaccgaccacgtgaagcccaaagagacagagaacaccaagcagcccagcaagagctgccacaagcccaaggccatcgtgcacaccgagaaagtgaacatgatgagcctgaccgtgatcggcttcagaatcctgctgctgaaagtggccggctttaacctgctgatgaccctgcggctgtggtccagctaa

SEQ ID NO: 34378 - DNA, 1887 bp, synthetic construct
  source 1..1887: mol_type = other DNA
atggccttaccagtgaccgccttgctcctgccgctggccttgctgctccacgccgccaggccgatccagatgacccagagccccagcagcctgtctgccagcgtgggcgacagagtgaccatcacctgtcggagcagccagagcatcgtgcactccgtgggcaacaccttcctggaatggtatcagcagaagcccggcaaggcccccaagctgctgatctacaaggtgtccaacagattcagcggcgtgcccagcaggtttagcggctctggcagcggcaccgacttcaccctgaccatctctagcctccagcccgaggacttcgccacctactactgttttcaaggcagccagttcccctacaccttcggccagggaacaaaggtggaaatcaagcggctcgaggccgacgtgtcccccaagcctaccatcttcctgccctctatcgccgagacaaagctccagaaggccggcacctacctgtgcctgctggaaaagttcttcccagatgtgattaagatccactggcaggaaaagaagtccaacaccatcctgggcagccaggaaggcaacaccatgaagaccaacgacacctacatgaagttcagctggctgaccgtgcccgagaagtccctggacaaagaacacagatgcatcgtgcggcacgaaaacaacaagaacggcgtggaccaggaaatcatcttcccacccatcaagaccgatgtgattacaatggaccccaaggacaactgctccaaggacgccaacgataccctgctgctccagctgaccaacaccagcgcctactacatgtacttgttgctgctgctgaagtccgtggtgtacttcgccatcatcacatgctgcctgctgcggagaaccgccttctgctgcaacggcgagaagtctagggccaagcgatctggatctggagcaacaaacttctcactactcaaacaagcaggtgacgtggaggagaatcccgggcctactagtatggactggatttggcgcatccttttccttgtcggcgctgctaccggcgcgcattccttcgaagaagtgcaactggtggaaagcggaggcggcctggtgcagcctggcggatctctgagactgagctgtgccgccagcggctacgagttcagccggtcctggatgaactgggtgcgccaggcccctggcaagggactggaatgggtgggaagaatctaccccggcgacggcgacaccaactacagcggcaagttcaagggccggttcaccatcagcgccgacaccagcaagaacaccgcctacctccagatgaacagcctgcgggccgaggataccgccgtgtactactgtgccagagatggcagctcctgggactggtacttcgacgtgtggggacagggaacccttgtgaccgtgtccagcacgcgtagccagcctcacaccaagcccagcgtgttcgtgatgaagaacggcaccaacgtggcctgcctcgtgaaagagttctaccccaaggacatcaggatcaacctggtgtccagcaagaagatcaccgagttcgaccccgccatcgtgatctcccccagcggcaagtacaacgccgtgaagctggggaagtacgaggacagcaacagcgtgacctgctccgtgcagcacgacaacaagaccgtgcacagcaccgactttgaagtgaaaaccgactccaccgaccacgtgaagcccaaagagacagagaacaccaagcagcccagcaagagctgccacaagcccaaggccatcgtgcacaccgagaaagtgaacatgatgagcctgaccgtgctgggcttcagaatcctgctgctgaaagtggccggctttaacctgctgatgaccctgcggctgtggtccagctaa

SEQ ID NO: 34379 - DNA, 1875 bp, synthetic construct; identical to SEQ ID NO: 34376
  source 1..1875: mol_type = other DNA

SEQ ID NO: 34380 - DNA, 1887 bp, synthetic construct
  source 1..1887: mol_type = other DNA
atggccttaccagtgaccgccttgctcctgccgctggccttgctgctccacgccgccaggccgatccagatgacccagagccccagcagcctgtctgccagcgtgggcgacagagtgaccatcacctgtcggagcagccagagcatcgtgcactccgtgggcaacaccttcctggaatggtatcagcagaagcccggcaaggcccccaagctgctgatctacaaggtgtccaacagattcagcggcgtgcccagcaggtttagcggctctggcagcggcaccgacttcaccctgaccatctctagcctccagcccgaggacttcgccacctactactgttttcaaggcagccagttcccctacaccttcggccagggaacaaaggtggaaatcaagcggctcgagatccagaaccctgatcctgccgtgtaccagctgcgggatagcaagagcagcgacaagagcgtgtgtctgttcaccgacttcgacagccagaccaacgtgtcccagagcaaggactccgacgtgtacatcaccgataagtgcgtgctggacatgcggagcatggacttcaagagcaactccgccgtggcctggtccaacaagtccgatttcgcctgcgccaacgccttcaacaacagcattatccccgaggacacattcttcccaagccccgagagcagctgcggctttaccagcgagagctaccagcagggcgtgctgagcgccaccatcctgtacgagatcctgctgggcaaggccaccctgtacgccgtgctggtgtctgccctggtgctgatggctatggtcaagcggaaggacagccggggacgcgccaagagaagcggatctggcgtgaagcagaccctgaatttcgacctgctgaagctggctggcgacgtggaatccaacccaggccctactagtatggactggatttggcgcatccttttccttgtcggcgctgctaccggcgcgcattccttcgaagaagtgcaactggtggaaagcggaggcggcctggtgcagcctggcggatctctgagactgagctgtgccgccagcggctacgagttcagccggtcctggatgaactgggtgcgccaggcccctggcaagggactggaatgggtgggaagaatctaccccggcgacggcgacaccaactacagcggcaagttcaagggccggttcaccatcagcgccgacaccagcaagaacaccgcctacctccagatgaacagcctgcgggccgaggataccgccgtgtactactgtgccagagatggcagctcctgggactggtacttcgacgtgtggggacagggaacccttgtgaccgtgtccagcacgcgtgaggacctgaagaacgtgttcccacctgaggtggccgtgttcgagcctagcgaggccgagatcagccacacccagaaagccaccctcgtgtgcctggctaccggcttctaccccgaccatgtggaactgtcttggtgggtcaacggcaaagaggtgcacagcggcgtgtgtaccgacccccagccactgaaagaacagcccgccctgaacgacagccggtactgcctgagcagcagactgagagtgtccgccaccttctggcagaacccccggaaccacttcagatgccaggtgcagttctacggcctgagcgagaacgacgagtggacccaggacagagccaagcccgtgacccagatcgtgtctgccgaagcctggggcagagccgattgcgacgtgaagctggtggaaaagagcttcgagacagacaccaacctgaacttccagaacctgagcgtgatcggcttcagaatcctgctgctgaaagtggccggctttaacctgctgatgaccctgcggctgtggtccagc

SEQ ID NO: 34381 - DNA, 2280 bp, synthetic construct
  source 1..2280: mol_type = other DNA
atggccttaccagtgaccgccttgctcctgccgctggccttgctgctccacgccgccaggccggaagtgcagctggttgaatctggcggaggactggttcagcctggcggatctctgagactgtcttgtgccgccagcggcttcagcttcagcgacttttggatgagctgggtccgacaggcccctggcaaaggacttgaatgggtcgccacaatcagccaggccggcagcgagaaggactacgtggactctgtgaagggcagattcaccatcagccgggacaacgccaagaagtccctgtacctccagatgaacagcctgagagccgaggacaccgccgtgtactattgtgcctctggcgtgtacagcttcgactacagaggccagggcaccctggtcacagtctcttctggtaccggcggaggcggatctggcggcggaggtagcggtggcggaggatctgaattcatccagatgacccagagccccagcagcctgtctgccagcgtgggcgacagagtgaccatcacctgtcggagcagccagagcatcgtgcactccgtgggcaacaccttcctggaatggtatcagcagaagcccggcaaggcccccaagctgctgatctacaaggtgtccaacagattcagcggcgtgcccagcaggtttagcggctctggcagcggcaccgacttcaccctgaccatctctagcctccagcccgaggacttcgccacctactactgttttcaaggcagccagttcccctacaccttcggccagggaacaaaggtggaaatcaagcggctcgaggacctgaagaacgtgttcccacctgaggtggccgtgttcgagcctagcgaggccgagatcagccacacccagaaagccaccctcgtgtgcctggctaccggcttctaccccgaccatgtggaactgtcttggtgggtcaacggcaaagaggtgcacagcggcgtgtgtaccgacccccagccactgaaagaacagcccgccctgaacgacagccggtactgcctgagcagcagactgagagtgtccgccaccttctggcagaacccccggaaccacttcagatgccaggtgcagttctacggcctgagcgagaacgacgagtggacccaggacagagccaagcccgtgacccagatcgtgtctgccgaagcctggggcagagccgattgcgacgtgaagctggtggaaaagagcttcgagacagacaccaacctgaacttccagaacctgagcgtgatcggcttcagaatcctgctgctgaaagtggccggctttaacctgctgatgaccctgcggctgtggtccagcagggccaagcgatctggatctggagcaacaaacttctcactactcaaacaagcaggtgacgtggaggagaatcccgggcctactagtatggactggatttggcgcatccttttccttgtcggcgctgctaccggcgcgcattccttcgaagaagtgcaactggtggaaagcggaggcggcctggtgcagcctggcggatctctgagactgagctgtgccgccagcggctacgagttcagccggtcctggatgaactgggtgcgccaggcccctggcaagggactggaatgggtgggaagaatctaccccggcgacggcgacaccaactacagcggcaagttcaagggccggttcaccatcagcgccgacaccagcaagaacaccgcctacctccagatgaacagcctgcgggccgaggataccgccgtgtactactgtgccagagatggcagctcctgggactggtacttcgacgtgtggggacagggaacccttgtgaccgtgtccagcacgcgtatccagaaccctgatcctgccgtgtaccagctgcgggatagcaagagcagcgacaagagcgtgtgtctgttcaccgacttcgacagccagaccaacgtgtcccagagcaaggactccgacgtgtacatcaccgataagtgcgtgctggacatgcggagcatggacttcaagagcaactccgccgtggcctggtccaacaagtccgatttcgcctgcgccaacgccttcaacaacagcattatccccgaggacacattcttcccaagccccgagagcagctgcggctttaccagcgagagctaccagcagggcgtgctgagcgccaccatcctgtacgagatcctgctgggcaaggccaccctgtacgccgtgctggtgtctgccctggtgctgatggctatggtcaagcggaaggacagccgggga

SEQ ID NO: 34382 - DNA, 2292 bp, synthetic construct
  source 1..2292: mol_type = other DNA
atggccttaccagtgaccgccttgctcctgccgctggccttgctgctccacgccgccaggccggaagtgcagctggttgaatctggcggaggactggttcagcctggcggatctctgagactgtcttgtgccgccagcggcttcagcttcagcgacttttggatgagctgggtccgacaggcccctggcaaaggacttgaatgggtcgccacaatcagccaggccggcagcgagaaggactacgtggactctgtgaagggcagattcaccatcagccgggacaacgccaagaagtccctgtacctccagatgaacagcctgagagccgaggacaccgccgtgtactattgtgcctctggcgtgtacagcttcgactacagaggccagggcaccctggtcacagtctcttctggtaccggcggaggcggatctggcggcggaggtagcggtggcggaggatctgaattcatccagatgacccagagccccagcagcctgtctgccagcgtgggcgacagagtgaccatcacctgtcggagcagccagagcatcgtgcactccgtgggcaacaccttcctggaatggtatcagcagaagcccggcaaggcccccaagctgctgatctacaaggtgtccaacagattcagcggcgtgcccagcaggtttagcggctctggcagcggcaccgacttcaccctgaccatctctagcctccagcccgaggacttcgccacctactactgttttcaaggcagccagttcccctacaccttcggccagggaacaaaggtggaaatcaagcggctcgagatccagaaccctgatcctgccgtgtaccagctgcgggatagcaagagcagcgacaagagcgtgtgtctgttcaccgacttcgacagccagaccaacgtgtcccagagcaaggactccgacgtgtacatcaccgataagtgcgtgctggacatgcggagcatggacttcaagagcaactccgccgtggcctggtccaacaagtccgatttcgcctgcgccaacgccttcaacaacagcattatccccgaggacacattcttcccaagccccgagagcagctgcggctttaccagcgagagctaccagcagggcgtgctgagcgccaccatcctgtacgagatcctgctgggcaaggccaccctgtacgccgtgctggtgtctgccctggtgctgatggctatggtcaagcggaaggacagccggggacgcgccaagagaagcggatctggcgtgaagcagaccctgaatttcgacctgctgaagctggctggcgacgtggaatccaacccaggccctactagtatggactggatttggcgcatccttttccttgtcggcgctgctaccggcgcgcattccttcgaagaagtgcaactggtggaaagcggaggcggcctggtgcagcctggcggatctctgagactgagctgtgccgccagcggctacgagttcagccggtcctggatgaactgggtgcgccaggcccctggcaagggactggaatgggtgggaagaatctaccccggcgacggcgacaccaactacagcggcaagttcaagggccggttcaccatcagcgccgacaccagcaagaacaccgcctacctccagatgaacagcctgcgggccgaggataccgccgtgtactactgtgccagagatggcagctcctgggactggtacttcgacgtgtggggacagggaacccttgtgaccgtgtccagcacgcgtgaggacctgaagaacgtgttcccacctgaggtggccgtgttcgagcctagcgaggccgagatcagccacacccagaaagccaccctcgtgtgcctggctaccggcttctaccccgaccatgtggaactgtcttggtgggtcaacggcaaagaggtgcacagcggcgtgtgtaccgacccccagccactgaaagaacagcccgccctgaacgacagccggtactgcctgagcagcagactgagagtgtccgccaccttctggcagaacccccggaaccacttcagatgccaggtgcagttctacggcctgagcgagaacgacgagtggacccaggacagagccaagcccgtgacccagatcgtgtctgccgaagcctggggcagagccgattgcgacgtgaagctggtggaaaagagcttcgagacagacaccaacctgaacttccagaacctgagcgtgatcggcttcagaatcctgctgctgaaagtggccggctttaacctgctgatgaccctgcggctgtggtccagc

SEQ ID NO: 34383 - DNA, 2691 bp, synthetic construct
  source 1..2691: mol_type = other DNA
atggccttaccagtgaccgccttgctcctgccgctggccttgctgctccacgccgccaggccggaagtgcagctggttgaatctggcggaggactggttcagcctggcggatctctgagactgtcttgtgccgccagcggcttcagcttcagcgacttttggatgagctgggtccgacaggcccctggcaaaggacttgaatgggtcgccacaatcagccaggccggcagcgagaaggactacgtggactctgtgaagggcagattcaccatcagccgggacaacgccaagaagtccctgtacctccagatgaacagcctgagagccgaggacaccgccgtgtactattgtgcctctggcgtgtacagcttcgactacagaggccagggcaccctggtcacagtctcttctggtaccggcggaggcggatctggcggcggaggtagcggtggcggaggatctgaattcatccagatgacccagagccccagcagcctgtctgccagcgtgggcgacagagtgaccatcacctgtcggagcagccagagcatcgtgcactccgtgggcaacaccttcctggaatggtatcagcagaagcccggcaaggcccccaagctgctgatctacaaggtgtccaacagattcagcggcgtgcccagcaggtttagcggctctggcagcggcaccgacttcaccctgaccatctctagcctccagcccgaggacttcgccacctactactgttttcaaggcagccagttcccctacaccttcggccagggaacaaaggtggaaatcaagcggctcgaggacctgaagaacgtgttcccacctgaggtggccgtgttcgagcctagcgaggccgagatcagccacacccagaaagccaccctcgtgtgcctggctaccggcttctaccccgaccatgtggaactgtcttggtgggtcaacggcaaagaggtgcacagcggcgtgtgtaccgacccccagccactgaaagaacagcccgccctgaacgacagccggtactgcctgagcagcagactgagagtgtccgccaccttctggcagaacccccggaaccacttcagatgccaggtgcagttctacggcctgagcgagaacgacgagtggacccaggacagagccaagcccgtgacccagatcgtgtctgccgaagcctggggcagagccgattgcgacgtgaagctggtggaaaagagcttcgagacagacaccaacctgaacttccagaacctgagcgtgatcggcttcagaatcctgctgctgaaagtggccggctttaacctgctgatgaccctgcggctgtggtccagcagggccaagcgatctggatctggagcaacaaacttctcactactcaaacaagcaggtgacgtggaggagaatcccgggcctactagtatggactggatttggcgcatccttttccttgtcggcgctgctaccggcgcgcattccgggccccagctccagctgcaagagtctggacctggcctggtcaagcctagcgagacactgagcctgacctgtaccgtgtccggcgatagcatcagcagcggcgattactactggggctggatcagacagcctcctggcaaaggactggaatggatcggccacatctactacagcggcgtgacctactacaaccccagcctgaagtccagagtgaccatcagcgtggacaccagccggaaccagttctccctgaagctgtctagcgtgacagccgccgataccgccgtgtactactgcaccagagaggacagcagcaactggcggagtagaggccagggaacactggtcacagttagctctggatccggcggaggcggaagtggaggcggaggatctggcggcggaggctctttcgaagaagtgcaactggtggaaagcggaggcggcctggtgcagcctggcggatctctgagactgagctgtgccgccagcggctacgagttcagccggtcctggatgaactgggtgcgccaggcccctggcaagggactggaatgggtgggaagaatctaccccggcgacggcgacaccaactacagcggcaagttcaagggccggttcaccatcagcgccgacaccagcaagaacaccgcctacctccagatgaacagcctgcgggccgaggataccgccgtgtactactgtgccagagatggcagctcctgggactggtacttcgacgtgtggggacagggaacccttgtgaccgtgtccagcacgcgtatccagaaccctgatcctgccgtgtaccagctgcgggatagcaagagcagcgacaagagcgtgtgtctgttcaccgacttcgacagccagaccaacgtgtcccagagcaaggactccgacgtgtacatcaccgataagtgcgtgctggacatgcggagcatggacttcaagagcaactccgccgtggcctggtccaacaagtccgatttcgcctgcgccaacgccttcaacaacagcattatccccgaggacacattcttcccaagccccgagagcagctgcggctttaccagcgagagctaccagcagggcgtgctgagcgccaccatcctgtacgagatcctgctgggcaaggccaccctgtacgccgtgctggtgtctgccctggtgctgatggctatggtcaagcggaaggacagccgggga

SEQ ID NO: 34384 - DNA, 2703 bp, synthetic construct
  source 1..2703: mol_type = other DNA
atggccttaccagtgaccgccttgctcctgccgctggccttgctgctccacgccgccaggccggaagtgcagctggttgaatctggcggaggactggttcagcctggcggatctctgagactgtcttgtgccgccagcggcttcagcttcagcgacttttggatgagctgggtccgacaggcccctggcaaaggacttgaatgggtcgccacaatcagccaggccggcagcgagaaggactacgtggactctgtgaagggcagattcaccatcagccgggacaacgccaagaagtccctgtacctccagatgaacagcctgagagccgaggacaccgccgtgtactattgtgcctctggcgtgtacagcttcgactacagaggccagggcaccctggtcacagtctcttctggtaccggcggaggcggatctggcggcggaggtagcggtggcggaggatctgaattcatccagatgacccagagccccagcagcctgtctgccagcgtgggcgacagagtgaccatcacctgtcggagcagccagagcatcgtgcactccgtgggcaacaccttcctggaatggtatcagcagaagcccggcaaggcccccaagctgctgatctacaaggtgtccaacagattcagcggcgtgcccagcaggtttagcggctctggcagcggcaccgacttcaccctgaccatctctagcctccagcccgaggacttcgccacctactactgttttcaaggcagccagttcccctacaccttcggccagggaacaaaggtggaaatcaagcggctcgagatccagaaccctgatcctgccgtgtaccagctgcgggatagcaagagcagcgacaagagcgtgtgtctgttcaccgacttcgacagccagaccaacgtgtcccagagcaaggactccgacgtgtacatcaccgataagtgcgtgctggacatgcggagcatggacttcaagagcaactccgccgtggcctggtccaacaagtccgatttcgcctgcgccaacgccttcaacaacagcattatccccgaggacacattcttcccaagccccgagagcagctgcggctttaccagcgagagctaccagcagggcgtgctgagcgccaccatcctgtacgagatcctgctgggcaaggccaccctgtacgccgtgctggtgtctgccctggtgctgatggctatggtcaagcggaaggacagccggggacgcgccaagagaagcggatctggcgtgaagcagaccctgaatttcgacctgctgaagctggctggcgacgtggaatccaacccaggccctactagtatggactggatttggcgcatccttttccttgtcggcgctgctaccggcgcgcattccgggccccagctccagctgcaagagtctggacctggcctggtcaagcctagcgagacactgagcctgacctgtaccgtgtccggcgatagcatcagcagcggcgattactactggggctggatcagacagcctcctggcaaaggactggaatggatcggccacatctactacagcggcgtgacctactacaaccccagcctgaagtccagagtgaccatcagcgtggacaccagccggaaccagttctccctgaagctgtctagcgtgacagccgccgataccgccgtgtactactgcaccagagaggacagcagcaactggcggagtagaggccagggaacactggtcacagttagctctggatccggcggaggcggaagtggaggcggaggatctggcggcggaggctctttcgaagaagtgcaactggtggaaagcggaggcggcctggtgcagcctggcggatctctgagactgagctgtgccgccagcggctacgagttcagccggtcctggatgaactgggtgcgccaggcccctggcaagggactggaatgggtgggaagaatctaccccggcgacggcgacaccaactacagcggcaagttcaagggccggttcaccatcagcgccgacaccagcaagaacaccgcctacctccagatgaacagcctgcgggccgaggataccgccgtgtactactgtgccagagatggcagctcctgggactggtacttcgacgtgtggggacagggaacccttgtgaccgtgtccagcacgcgtgaggacctgaagaacgtgttcccacctgaggtggccgtgttcgagcctagcgaggccgagatcagccacacccagaaagccaccctcgtgtgcctggctaccggcttctaccccgaccatgtggaactgtcttggtgggtcaacggcaaagaggtgcacagcggcgtgtgtaccgacccccagccactgaaagaacagcccgccctgaacgacagccggtactgcctgagcagcagactgagagtgtccgccaccttctggcagaacccccggaaccacttcagatgccaggtgcagttctacggcctgagcgagaacgacgagtggacccaggacagagccaagcccgtgacccagatcgtgtctgccgaagcctggggcagagccgattgcgacgtgaagctggtggaaaagagcttcgagacagacaccaacctgaacttccagaacctgagcgtgatcggcttcagaatcctgctgctgaaagtggccggctttaacctgctgatgaccctgcggctgtggtccagc

SEQ ID NO: 34385 - DNA, 2085 bp, synthetic construct
  source 1..2085: mol_type = other DNA
atggccttaccagtgaccgccttgctcctgccgctggccttgctgctccacgccgccaggccgatccagatgacccagagccccagcagcctgtctgccagcgtgggcgacagagtgaccatcacctgtcggagcagccagagcatcgtgcactccgtgggcaacaccttcctggaatggtatcagcagaagcccggcaaggcccccaagctgctgatctacaaggtgtccaacagattcagcggcgtgcccagcaggtttagcggctctggcagcggcaccgacttcaccctgaccatctctagcctccagcccgaggacttcgccacctactactgttttcaaggcagccagttcccctacaccttcggccagggaacaaaggtggaaatcaagcggctcgaggacctgaagaacgtgttcccacctgaggtggccgtgttcgagcctagcgaggccgagatcagccacacccagaaagccaccctcgtgtgcctggctaccggcttctaccccgaccatgtggaactgtcttggtgggtcaacggcaaagaggtgcacagcggcgtgtgtaccgacccccagccactgaaagaacagcccgccctgaacgacagccggtactgcctgagcagcagactgagagtgtccgccaccttctggcagaacccccggaaccacttcagatgccaggtgcagttctacggcctgagcgagaacgacgagtggacccaggacagagccaagcccgtgacccagatcgtgtctgccgaagcctggggcagagccgattgcgacgtgaagctggtggaaaagagcttcgagacagacaccaacctgaacttccagaacctgagcgtgatcggcttcagaatcctgctgctgaaagtggccggctttaacctgctgatgaccctgcggctgtggtccagcagggccaagcgatctggatctggagcaacaaacttctcactactcaaacaagcaggtgacgtggaggagaatcccgggcctactagtatggactggatttggcgcatccttttccttgtcggcgctgctaccggcgcccattccgggcccatggaccccgacctggaaatcagagccgccttcctgcggcagagaaacacagccctgagaacagaggtggccgagctggaacaagaggtgcagcggctggaaaacgaggtgtcccagtacgagacaagatacggccctctcggaggcggaaaaggatccggcggcggaggatctggcggaggcggatctgggggcggaggctctttcgaagaagtgcaactggtggaaagcggaggcggcctggtgcagcctggcggatctctgagactgagctgtgccgccagcggctacgagttcagccggtcctggatgaactgggtgcgccaggcccctggcaagggactggaatgggtgggaagaatctaccccggcgacggcgacaccaactacagcggcaagttcaagggccggttcaccatcagcgccgacaccagcaagaacaccgcctacctccagatgaacagcctgcgggccgaggataccgccgtgtactactgtgccagagatggcagctcctgggactggtacttcgacgtgtggggacagggaacccttgtgaccgtgtccagcacgcgtatccagaaccctgatcctgccgtgtaccagctgcgggatagcaagagcagcgacaagagcgtgtgtctgttcaccgacttcgacagccagaccaacgtgtcccagagcaaggactccgacgtgtacatcaccgataagtgcgtgctggacatgcggagcatggacttcaagagcaactccgccgtggcctggtccaacaagtccgatttcgcctgcgccaacgccttcaacaacagcattatccccgaggacacattcttcccaagccccgagagcagctgcggctttaccagcgagagctaccagcagggcgtgctgagcgccaccatcctgtacgagatcctgctgggcaaggccaccctgtacgccgtgctggtgtctgccctggtgctgatggctatggtcaagcggaaggacagccgggga

SEQ ID NO: 34386 - DNA, 2097 bp, synthetic construct
  source 1..2097: mol_type = other DNA
atggccttaccagtgaccgccttgctcctgccgctggccttgctgctccacgccgccaggccgatccagatgacccagagccccagcagcctgtctgccagcgtgggcgacagagtgaccatcacctgtcggagcagccagagcatcgtgcactccgtgggcaacaccttcctggaatggtatcagcagaagcccggcaaggcccccaagctgctgatctacaaggtgtccaacagattcagcggcgtgcccagcaggtttagcggctctggcagcggcaccgacttcaccctgaccatctctagcctccagcccgaggacttcgccacctactactgttttcaaggcagccagttcccctacaccttcggccagggaacaaaggtggaaatcaagcggctcgagatccagaaccctgatcctgccgtgtaccagctgcgggatagcaagagcagcgacaagagcgtgtgtctgttcaccgacttcgacagccagaccaacgtgtcccagagcaaggactccgacgtgtacatcaccgataagtgcgtgctggacatgcggagcatggacttcaagagcaactccgccgtggcctggtccaacaagtccgatttcgcctgcgccaacgccttcaacaacagcattatccccgaggacacattcttcccaagccccgagagcagctgcggctttaccagcgagagctaccagcagggcgtgctgagcgccaccatcctgtacgagatcctgctgggcaaggccaccctgtacgccgtgctggtgtctgccctggtgctgatggctatggtcaagcggaaggacagccggggacgcgccaagagaagcggatctggcgtgaagcagaccctgaatttcgacctgctgaagctggctggcgacgtggaatccaacccaggccctactagtatggactggatttggcgcatccttttccttgtcggcgctgctaccggcgcccattccgggcccatggaccccgacctggaaatcagagccgccttcctgcggcagagaaacacagccctgagaacagaggtggccgagctggaacaagaggtgcagcggctggaaaacgaggtgtcccagtacgagacaagatacggccctctcggaggcggaaaaggatccggcggcggaggatctggcggaggcggatctgggggcggaggctctttcgaagaagtgcaactggtggaaagcggaggcggcctggtgcagcctggcggatctctgagactgagctgtgccgccagcggctacgagttcagccggtcctggatgaactgggtgcgccaggcccctggcaagggactggaatgggtgggaagaatctaccccggcgacggcgacaccaactacagcggcaagttcaagggccggttcaccatcagcgccgacaccagcaagaacaccgcctacctccagatgaacagcctgcgggccgaggataccgccgtgtactactgtgccagagatggcagctcctgggactggtacttcgacgtgtggggacagggaacccttgtgaccgtgtccagcacgcgtgaggacctgaagaacgtgttcccacctgaggtggccgtgttcgagcctagcgaggccgagatcagccacacccagaaagccaccctcgtgtgcctggctaccggcttctaccccgaccatgtggaactgtcttggtgggtcaacggcaaagaggtgcacagcggcgtgtgtaccgacccccagccactgaaagaacagcccgccctgaacgacagccggtactgcctgagcagcagactgagagtgtccgccaccttctggcagaacccccggaaccacttcagatgccaggtgcagttctacggcctgagcgagaacgacgagtggacccaggacagagccaagcccgtgacccagatcgtgtctgccgaagcctggggcagagccgattgcgacgtgaagctggtggaaaagagcttcgagacagacaccaacctgaacttccagaacctgagcgtgatcggcttcagaatcctgctgctgaaagtggccggctttaacctgctgatgaccctgcggctgtggtccagc

SEQ ID NO: 34387 - DNA, 2016 bp, synthetic construct
  source 1..2016: mol_type = other DNA
atggccttaccagtgaccgccttgctcctgccgctggccttgctgctccacgccgccaggccgatccagatgacccagagccccagcagcctgtctgccagcgtgggcgacagagtgaccatcacctgtcggagcagccagagcatcgtgcactccgtgggcaacaccttcctggaatggtatcagcagaagcccggcaaggcccccaagctgctgatctacaaggtgtccaacagattcagcggcgtgcccagcaggtttagcggctctggcagcggcaccgacttcaccctgaccatctctagcctccagcccgaggacttcgccacctactactgttttcaaggcagccagttcccctacaccttcggccagggaacaaaggtggaaatcaagcggctcgaggacctgaagaacgtgttcccacctgaggtggccgtgttcgagcctagcgaggccgagatcagccacacccagaaagccaccctcgtgtgcctggctaccggcttctaccccgaccatgtggaactgtcttggtgggtcaacggcaaagaggtgcacagcggcgtgtgtaccgacccccagccactgaaagaacagcccgccctgaacgacagccggtactgcctgagcagcagactgagagtgtccgccaccttctggcagaacccccggaaccacttcagatgccaggtgcagttctacggcctgagcgagaacgacgagtggacccaggacagagccaagcccgtgacccagatcgtgtctgccgaagcctggggcagagccgattgcgacgtgaagctggtggaaaagagcttcgagacagacaccaacctgaacttccagaacctgagcgtgatcggcttcagaatcctgctgctgaaagtggccggctttaacctgctgatgaccctgcggctgtggtccagcagggccaagcgatctggatctggagcaacaaacttctcactactcaaacaagcaggtgacgtggaggagaatcccgggcctactagtatggactggatttggcgcatccttttccttgtcggcgctgctaccggcgcccattccgggcccgaagttgctgccctcgagaaggaggtagcagctttggaaaaagaagtcgcagcccttgagaaagaagttgcggctctggagaagggatccggcggcggaggatctggcggaggcggatctgggggcggaggctctttcgaagaagtgcaactggtggaaagcggaggcggcctggtgcagcctggcggatctctgagactgagctgtgccgccagcggctacgagttcagccggtcctggatgaactgggtgcgccaggcccctggcaagggactggaatgggtgggaagaatctaccccggcgacggcgacaccaactacagcggcaagttcaagggccggttcaccatcagcgccgacaccagcaagaacaccgcctacctccagatgaacagcctgcgggccgaggataccgccgtgtactactgtgccagagatggcagctcctgggactggtacttcgacgtgtggggacagggaacccttgtgaccgtgtccagcacgcgtatccagaaccctgatcctgccgtgtaccagctgcgggatagcaagagcagcgacaagagcgtgtgtctgttcaccgacttcgacagccagaccaacgtgtcccagagcaaggactccgacgtgtacatcaccgataagtgcgtgctggacatgcggagcatggacttcaagagcaactccgccgtggcctggtccaacaagtccgatttcgcctgcgccaacgccttcaacaacagcattatccccgaggacacattcttcccaagccccgagagcagctgcggctttaccagcgagagctaccagcagggcgtgctgagcgccaccatcctgtacgagatcctgctgggcaaggccaccctgtacgccgtgctggtgtctgccctggtgctgatggctatggtcaagcggaaggacagccgggga

SEQ ID NO: 34388 - DNA, 2028 bp, synthetic construct
  source 1..2028: mol_type = other DNA
atggccttaccagtgaccgccttgctcctgccgctggccttgctgctccacgccgccaggccgatccagatgacccagagccccagcagcctgtctgccagcgtgggcgacagagtgaccatcacctgtcggagcagccagagcatcgtgcactccgtgggcaacaccttcctggaatggtatcagcagaagcccggcaaggcccccaagctgctgatctacaaggtgtccaacagattcagcggcgtgcccagcaggtttagcggctctggcagcggcaccgacttcaccctgaccatctctagcctccagcccgaggacttcgccacctactactgttttcaaggcagccagttcccctacaccttcggccagggaacaaaggtggaaatcaagcggctcgagatccagaaccctgatcctgccgtgtaccagctgcgggatagcaagagcagcgacaagagcgtgtgtctgttcaccgacttcgacagccagaccaacgtgtcccagagcaaggactccgacgtgtacatcaccgataagtgcgtgctggacatgcggagcatggacttcaagagcaactccgccgtggcctggtccaacaagtccgatttcgcctgcgccaacgccttcaacaacagcattatccccgaggacacattcttcccaagccccgagagcagctgcggctttaccagcgagagctaccagcagggcgtgctgagcgccaccatcctgtacgagatcctgctgggcaaggccaccctgtacgccgtgctggtgtctgccctggtgctgatggctatggtcaagcggaaggacagccggggacgcgccaagagaagcggatctggcgtgaagcagaccctgaatttcgacctgctgaagctggctggcgacgtggaatccaacccaggccctactagtatggactggatttggcgcatccttttccttgtcggcgctgctaccggcgcccattccgggcccgaagttgctgccctcgagaaggaggtagcagctttggaaaaagaagtcgcagcccttgagaaagaagttgcggctctggagaagggatccggcggcggaggatctggcggaggcggatctgggggcggaggctctttcgaagaagtgcaactggtggaaagcggaggcggcctggtgcagcctggcggatctctgagactgagctgtgccgccagcggctacgagttcagccggtcctggatgaactgggtgcgccaggcccctggcaagggactggaatgggtgggaagaatctaccccggcgacggcgacaccaactacagcggcaagttcaagggccggttcaccatcagcgccgacaccagcaagaacaccgcctacctccagatgaacagcctgcgggccgaggataccgccgtgtactactgtgccagagatggcagctcctgggactggtacttcgacgtgtggggacagggaacccttgtgaccgtgtccagcacgcgtgaggacctgaagaacgtgttcccacctgaggtggccgtgttcgagcctagcgaggccgagatcagccacacccagaaagccaccctcgtgtgcctggctaccggcttctaccccgaccatgtggaactgtcttggtgggtcaacggcaaagaggtgcacagcggcgtgtgtaccgacccccagccactgaaagaacagcccgccctgaacgacagccggtactgcctgagcagcagactgagagtgtccgccaccttctggcagaacccccggaaccacttcagatgccaggtgcagttctacggcctgagcgagaacgacgagtggacccaggacagagccaagcccgtgacccagatcgtgtctgccgaagcctggggcagagccgattgcgacgtgaagctggtggaaaagagcttcgagacagacaccaacctgaacttccagaacctgagcgtgatcggcttcagaatcctgctgctgaaagtggccggctttaacctgctgatgaccctgcggctgtggtccagc

SEQ ID NO: 34389 - DNA, 2286 bp, synthetic construct
  source 1..2286: mol_type = other DNA
atggccttaccagtgaccgccttgctcctgccgctggccttgctgctccacgccgccaggccgatccagatgacccagagccccagcagcctgtctgccagcgtgggcgacagagtgaccatcacctgtcggagcagccagagcatcgtgcactccgtgggcaacaccttcctggaatggtatcagcagaagcccggcaaggcccccaagctgctgatctacaaggtgtccaacagattcagcggcgtgcccagcaggtttagcggctctggcagcggcaccgacttcaccctgaccatctctagcctccagcccgaggacttcgccacctactactgttttcaaggcagccagttcccctacaccttcggccagggaacaaaggtggaaatcaagcggctcgaggacctgaagaacgtgttcccacctgaggtggccgtgttcgagcctagcgaggccgagatcagccacacccagaaagccaccctcgtgtgcctggctaccggcttctaccccgaccatgtggaactgtcttggtgggtcaacggcaaagaggtgcacagcggcgtgtgtaccgacccccagccactgaaagaacagcccgccctgaacgacagccggtactgcctgagcagcagactgagagtgtccgccaccttctggcagaacccccggaaccacttcagatgccaggtgcagttctacggcctgagcgagaacgacgagtggacccaggacagagccaagcccgtgacccagatcgtgtctgccgaagcctggggcagagccgattgcgacgtgaagctggtggaaaagagcttcgagacagacaccaacctgaacttccagaacctgagcgtgatcggcttcagaatcctgctgctgaaagtggccggctttaacctgctgatgaccctgcggctgtggtccagcagggccaagcgatctggatctggagcaacaaacttctcactactcaaacaagcaggtgacgtggaggagaatcccgggcctactagtatggactggatttggcgcatccttttccttgtcggcgctgctaccggcgcccattccgggccccaggttcagctgcaagagtctggcggaggacttgctcaagctggcggaagcctgagactgtcttgtgccgcctctggcagaaccttcagcatgggctggtttagacaggcccctggcaaagagagagagttcgtcgccgccatcacatacagcggcggcagcccttactacgcctcttctgtcagaggccggttcaccatcagccgggacaacgccaagaacaccgtgtacctccagatgaacagcctgaagccagaggacaccgccgtgtactactgtgccgccaatccaacctacggcagcgactggaatgccgagaattggggccagggcacccaagtgacagtgtctagtggatccggcggcggaggatctggcggaggcggatctgggggcggaggctctttcgaagaagtgcaactggtggaaagcggaggcggcctggtgcagcctggcggatctctgagactgagctgtgccgccagcggctacgagttcagccggtcctggatgaactgggtgcgccaggcccctggcaagggactggaatgggtgggaagaatctaccccggcgacggcgacaccaactacagcggcaagttcaagggccggttcaccatcagcgccgacaccagcaagaacaccgcctacctccagatgaacagcctgcgggccgaggataccgccgtgtactactgtgccagagatggcagctcctgggactggtacttcgacgtgtggggacagggaacccttgtgaccgtgtccagcacgcgtatccagaaccctgatcctgccgtgtaccagctgcgggatagcaagagcagcgacaagagcgtgtgtctgttcaccgacttcgacagccagaccaacgtgtcccagagcaaggactccgacgtgtacatcaccgataagtgcgtgctggacatgcggagcatggacttcaagagcaactccgccgtggcctggtccaacaagtccgatttcgcctgcgccaacgccttcaacaacagcattatccccgaggacacattcttcccaagccccgagagcagctgcggctttaccagcgagagctaccagcagggcgtgctgagcgccaccatcctgtacgagatcctgctgggcaaggccaccctgtacgccgtgctggtgtctgccctggtgctgatggctatggtcaagcggaaggacagccgggga

SEQ ID NO: 34390 - DNA, 2298 bp, synthetic construct
  source 1..2298: mol_type = other DNA
atggccttaccagtgaccgccttgctcctgccgctggccttgctgctccacgccgccaggccgatccagatgacccagagccccagcagcctgtctgccagcgtgggcgacagagtgaccatcacctgtcggagcagccagagcatcgtgcactccgtgggcaacaccttcctggaatggtatcagcagaagcccggcaaggcccccaagctgctgatctacaaggtgtccaacagattcagcggcgtgcccagcaggtttagcggctctggcagcggcaccgacttcaccctgaccatctctagcctccagcccgaggacttcgccacctactactgttttcaaggcagccagttcccctacaccttcggccagggaacaaaggtggaaatcaagcggctcgagatccagaaccctgatcctgccgtgtaccagctgcgggatagcaagagcagcgacaagagcgtgtgtctgttcaccgacttcgacagccagaccaacgtgtcccagagcaaggactccgacgtgtacatcaccgataagtgcgtgctggacatgcggagcatggacttcaagagcaactccgccgtggcctggtccaacaagtccgatttcgcctgcgccaacgccttcaacaacagcattatccccgaggacacattcttcccaagccccgagagcagctgcggctttaccagcgagagctaccagcagggcgtgctgagcgccaccatcctgtacgagatcctgctgggcaaggccaccctgtacgccgtgctggtgtctgccctggtgctgatggctatggtcaagcggaaggacagccggggacgcgccaagagaagcggatctggcgtgaagcagaccctgaatttcgacctgctgaagctggctggcgacgtggaatccaacccaggccctactagtatggactggatttggcgcatccttttccttgtcggcgctgctaccggcgcccattccgggccccaggttcagctgcaagagtctggcggaggacttgctcaagctggcggaagcctgagactgtcttgtgccgcctctggcagaaccttcagcatgggctggtttagacaggcccctggcaaagagagagagttcgtcgccgccatcacatacagcggcggcagcccttactacgcctcttctgtcagaggccggttcaccatcagccgggacaacgccaagaacaccgtgtacctccagatgaacagcctgaagccagaggacaccgccgtgtactactgtgccgccaatccaacctacggcagcgactggaatgccgagaattggggccagggcacccaagtgacagtgtctagtggatccggcggcggaggatctggcggaggcggatctgggggcggaggctctttcgaagaagtgcaactggtggaaagcggaggcggcctggtgcagcctggcggatctctgagactgagctgtgccgccagcggctacgagttcagccggtcctggatgaactgggtgcgccaggcccctggcaagggactggaatgggtgggaagaatctaccccggcgacggcgacaccaactacagcggcaagttcaagggccggttcaccatcagcgccgacaccagcaagaacaccgcctacctccagatgaacagcctgcgggccgaggataccgccgtgtactactgtgccagagatggcagctcctgggactggtacttcgacgtgtggggacagggaacccttgtgaccgtgtccagcacgcgtgaggacctgaagaacgtgttcccacctgaggtggccgtgttcgagcctagcgaggccgagatcagccacacccagaaagccaccctcgtgtgcctggctaccggcttctaccccgaccatgtggaactgtcttggtgggtcaacggcaaagaggtgcacagcggcgtgtgtaccgacccccagccactgaaagaacagcccgccctgaacgacagccggtactgcctgagcagcagactgagagtgtccgccaccttctggcagaacccccggaaccacttcagatgccaggtgcagttctacggcctgagcgagaacgacgagtggacccaggacagagccaagcccgtgacccagatcgtgtctgccgaagcctggggcagagccgattgcgacgtgaagctggtggaaaagagcttcgagacagacaccaacctgaacttccagaacctgagcgtgatcggcttcagaatcctgctgctgaaagtggccggctttaacctgctgatgaccctgcggctgtggtccagc

SEQ ID NO: 34391 - DNA, 2304 bp, synthetic construct
  source 1..2304: mol_type = other DNA
atggccttaccagtgaccgccttgctcctgccgctggccttgctgctccacgccgccaggccggaagtgcaactggtggaatctggaggctctctggtgcagccagggggaagcctgagactgtcttgtgccgcttccggcttcaccttcgacgactacgccatgagctgggtgcgccaggtgccaggcaaaggcctggaatgggtgtccagcatcaactggagcggcacccacaccgattacgccgactccgtgaaaggcagattcacaatcagcagaaacaacgccaacaataccctgtacctgcagatgaactccctgaagtctgaggatacagcagtgtattattgcgccaagaactggcgggacgccggcaccacttggtttgagaaaagcggctctgccggacagggaacccaagtgacagtgtcctccggtaccggcggaggcggatctggcggcggaggtagcggtggcggaggatctgaattcatccagatgacccagagccccagcagcctgtctgccagcgtgggcgacagagtgaccatcacctgtcggagcagccagagcatcgtgcactccgtgggcaacaccttcctggaatggtatcagcagaagcccggcaaggcccccaagctgctgatctacaaggtgtccaacagattcagcggcgtgcccagcaggtttagcggctctggcagcggcaccgacttcaccctgaccatctctagcctccagcccgaggacttcgccacctactactgttttcaaggcagccagttcccctacaccttcggccagggaacaaaggtggaaatcaagcggctcgaggacctgaagaacgtgttcccacctgaggtggccgtgttcgagcctagcgaggccgagatcagccacacccagaaagccaccctcgtgtgcctggctaccggcttctaccccgaccatgtggaactgtcttggtgggtcaacggcaaagaggtgcacagcggcgtgtgtaccgacccccagccactgaaagaacagcccgccctgaacgacagccggtactgcctgagcagcagactgagagtgtccgccaccttctggcagaacccccggaaccacttcagatgccaggtgcagttctacggcctgagcgagaacgacgagtggacccaggacagagccaagcccgtgacccagatcgtgtctgccgaagcctggggcagagccgattgcgacgtgaagctggtggaaaagagcttcgagacagacaccaacctgaacttccagaacctgagcgtgatcggcttcagaatcctgctgctgaaagtggccggctttaacctgctgatgaccctgcggctgtggtccagcagggccaagcgatctggatctggagcaacaaacttctcactactcaaacaagcaggtgacgtggaggagaatcccgggcctactagtatggactggatttggcgcatccttttccttgtcggcgctgctaccggcgcgcattccttcgaagaagtgcaactggtggaaagcggaggcggcctggtgcagcctggcggatctctgagactgagctgtgccgccagcggctacgagttcagccggtcctggatgaactgggtgcgccaggcccctggcaagggactggaatgggtgggaagaatctaccccggcgacggcgacaccaactacagcggcaagttcaagggccggttcaccatcagcgccgacaccagcaagaacaccgcctacctccagatgaacagcctgcgggccgaggataccgccgtgtactactgtgccagagatggcagctcctgggactggtacttcgacgtgtggggacagggaacccttgtgaccgtgtccagcacgcgtatccagaaccctgatcctgccgtgtaccagctgcgggatagcaagagcagcgacaagagcgtgtgtctgttcaccgacttcgacagccagaccaacgtgtcccagagcaaggactccgacgtgtacatcaccgataagtgcgtgctggacatgcggagcatggacttcaagagcaactccgccgtggcctggtccaacaagtccgatttcgcctgcgccaacgccttcaacaacagcattatccccgaggacacattcttcccaagccccgagagcagctgcggctttaccagcgagagctaccagcagggcgtgctgagcgccaccatcctgtacgagatcctgctgggcaaggccaccctgtacgccgtgctggtgtctgccctggtgctgatggctatggtcaagcggaaggacagccgggga

SEQ ID NO: 34392 - DNA, 2316 bp, synthetic construct
  source 1..2316: mol_type = other DNA
atggccttaccagtgaccgccttgctcctgccgctggccttgctgctccacgccgccaggccggaagtgcaactggtggaatctggaggctctctggtgcagccagggggaagcctgagactgtcttgtgccgcttccggcttcaccttcgacgactacgccatgagctgggtgcgccaggtgccaggcaaaggcctggaatgggtgtccagcatcaactggagcggcacccacaccgattacgccgactccgtgaaaggcagattcacaatcagcagaaacaacgccaacaataccctgtacctgcagatgaactccctgaagtctgaggatacagcagtgtattattgcgccaagaactggcgggacgccggcaccacttggtttgagaaaagcggctctgccggacagggaacccaagtgacagtgtcctccggtaccggcggaggcggatctggcggcggaggtagcggtggcggaggatctgaattcatccagatgacccagagccccagcagcctgtctgccagcgtgggcgacagagtgaccatcacctgtcggagcagccagagcatcgtgcactccgtgggcaacaccttcctggaatggtatcagcagaagcccggcaaggcccccaagctgctgatctacaaggtgtccaacagattcagcggcgtgcccagcaggtttagcggctctggcagcggcaccgacttcaccctgaccatctctagcctccagcccgaggacttcgccacctactactgttttcaaggcagccagttcccctacaccttcggccagggaacaaaggtggaaatcaagcggctcgagatccagaaccctgatcctgccgtgtaccagctgcgggatagcaagagcagcgacaagagcgtgtgtctgttcaccgacttcgacagccagaccaacgtgtcccagagcaaggactccgacgtgtacatcaccgataagtgcgtgctggacatgcggagcatggacttcaagagcaactccgccgtggcctggtccaacaagtccgatttcgcctgcgccaacgccttcaacaacagcattatccccgaggacacattcttcccaagccccgagagcagctgcggctttaccagcgagagctaccagcagggcgtgctgagcgccaccatcctgtacgagatcctgctgggcaaggccaccctgtacgccgtgctggtgtctgccctggtgctgatggctatggtcaagcggaaggacagccggggacgcgccaagagaagcggatctggcgtgaagcagaccctgaatttcgacctgctgaagctggctggcgacgtggaatccaacccaggccctactagtatggactggatttggcgcatccttttccttgtcggcgctgctaccggcgcgcattccttcgaagaagtgcaactggtggaaagcggaggcggcctggtgcagcctggcggatctctgagactgagctgtgccgccagcggctacgagttcagccggtcctggatgaactgggtgcgccaggcccctggcaagggactggaatgggtgggaagaatctaccccggcgacggcgacaccaactacagcggcaagttcaagggccggttcaccatcagcgccgacaccagcaagaacaccgcctacctccagatgaacagcctgcgggccgaggataccgccgtgtactactgtgccagagatggcagctcctgggactggtacttcgacgtgtggggacagggaacccttgtgaccgtgtccagcacgcgtgaggacctgaagaacgtgttcccacctgaggtggccgtgttcgagcctagcgaggccgagatcagccacacccagaaagccaccctcgtgtgcctggctaccggcttctaccccgaccatgtggaactgtcttggtgggtcaacggcaaagaggtgcacagcggcgtgtgtaccgacccccagccactgaaagaacagcccgccctgaacgacagccggtactgcctgagcagcagactgagagtgtccgccaccttctggcagaacccccggaaccacttcagatgccaggtgcagttctacggcctgagcgagaacgacgagtggacccaggacagagccaagcccgtgacccagatcgtgtctgccgaagcctggggcagagccgattgcgacgtgaagctggtggaaaagagcttcgagacagacaccaacctgaacttccagaacctgagcgtgatcggcttcagaatcctgctgctgaaagtggccggctttaacctgctgatgaccctgcggctgtggtccagc

SEQ ID NO: 34393 - DNA, 2298 bp, synthetic construct
  source 1..2298: mol_type = other DNA
atggccttaccagtgaccgccttgctcctgccgctggccttgctgctccacgccgccaggccggaagttcagctgcttgagtctggcggaggactggttcaacctggcggaagcctgagactgtcttgtgccgccagcggcttcatcttcagcagctacgccatgagctgggtccgacaggctcctggaaagggccaagaatgggtttccggcgttagcggcacaggcgtgaacacctactacgccgatagcgtgaagggcagattcaccatcagccgggacaacagcaagaacaccctgtacctccagatgaacagcctgagagccgaggacaccgccgtgtactattgtgcctctggcaaaggctgggacagcggctcttggtacgaggactatagaggccagggcaccctggtcacagtttcttcaggtaccggcggaggcggatctggcggcggaggtagcggtggcggaggatctgaattcatccagatgacccagagccccagcagcctgtctgccagcgtgggcgacagagtgaccatcacctgtcggagcagccagagcatcgtgcactccgtgggcaacaccttcctggaatggtatcagcagaagcccggcaaggcccccaagctgctgatctacaaggtgtccaacagattcagcggcgtgcccagcaggtttagcggctctggcagcggcaccgacttcaccctgaccatctctagcctccagcccgaggacttcgccacctactactgttttcaaggcagccagttcccctacaccttcggccagggaacaaaggtggaaatcaagcggctcgaggacctgaagaacgtgttcccacctgaggtggccgtgttcgagcctagcgaggccgagatcagccacacccagaaagccaccctcgtgtgcctggctaccggcttctaccccgaccatgtggaactgtcttggtgggtcaacggcaaagaggtgcacagcggcgtgtgtaccgacccccagccactgaaagaacagcccgccctgaacgacagccggtactgcctgagcagcagactgagagtgtccgccaccttctggcagaacccccggaaccacttcagatgccaggtgcagttctacggcctgagcgagaacgacgagtggacccaggacagagccaagcccgtgacccagatcgtgtctgccgaagcctggggcagagccgattgcgacgtgaagctggtggaaaagagcttcgagacagacaccaacctgaacttccagaacctgagcgtgatcggcttcagaatcctgctgctgaaagtggccggctttaacctgctgatgaccctgcggctgtggtccagcagggccaagcgatctggatctggagcaacaaacttctcactactcaaacaagcaggtgacgtggaggagaatcccgggcctactagtatggactggatttggcgcatccttttccttgtcggcgctgctaccggcgcgcattccttcgaagaagtgcaactggtggaaagcggaggcggcctggtgcagcctggcggatctctgagactgagctgtgccgccagcggctacgagttcagccggtcctggatgaactgggtgcgccaggcccctggcaagggactggaatgggtgggaagaatctaccccggcgacggcgacaccaactacagcggcaagttcaagggccggttcaccatcagcgccgacaccagcaagaacaccgcctacctccagatgaacagcctgcgggccgaggataccgccgtgtactactgtgccagagatggcagctcctgggactggtacttcgacgtgtggggacagggaacccttgtgaccgtgtccagcacgcgtatccagaaccctgatcctgccgtgtaccagctgcgggatagcaagagcagcgacaagagcgtgtgtctgttcaccgacttcgacagccagaccaacgtgtcccagagcaaggactccgacgtgtacatcaccgataagtgcgtgctggacatgcggagcatggacttcaagagcaactccgccgtggcctggtccaacaagtccgatttcgcctgcgccaacgccttcaacaacagcattatccccgaggacacattcttcccaagccccgagagcagctgcggctttaccagcgagagctaccagcagggcgtgctgagcgccaccatcctgtacgagatcctgctgggcaaggccaccctgtacgccgtgctggtgtctgccctggtgctgatggctatggtcaagcggaaggacagccgggga

SEQ ID NO: 34394 - DNA, 2310 bp, synthetic construct
  source 1..2310: mol_type = other DNA
atggccttaccagtgaccgccttgctcctgccgctggccttgctgctccacgccgccaggccggaagttcagctgcttgagtctggcggaggactggttcaacctggcggaagcctgagactgtcttgtgccgccagcggcttcatcttcagcagctacgccatgagctgggtccgacaggctcctggaaagggccaagaatgggtttccggcgttagcggcacaggcgtgaacacctactacgccgatagcgtgaagggcagattcaccatcagccgggacaacagcaagaacaccctgtacctccagatgaacagcctgagagccgaggacaccgccgtgtactattgtgcctctggcaaaggctgggacagcggctcttggtacgaggactatagaggccagggcaccctggtcacagtttcttcaggtaccggcggaggcggatctggcggcggaggtagcggtggcggaggatctgaattcatccagatgacccagagccccagcagcctgtctgccagcgtgggcgacagagtgaccatcacctgtcggagcagccagagcatcgtgcactccgtgggcaacaccttcctggaatggtatcagcagaagcccggcaaggcccccaagctgctgatctacaaggtgtccaacagattcagcggcgtgcccagcaggtttagcggctctggcagcggcaccgacttcaccctgaccatctctagcctccagcccgaggacttcgccacctactactgttttcaaggcagccagttcccctacaccttcggccagggaacaaaggtggaaatcaagcggctcgagatccagaaccctgatcctgccgtgtaccagctgcgggatagcaagagcagcgacaagagcgtgtgtctgttcaccgacttcgacagccagaccaacgtgtcccagagcaaggactccgacgtgtacatcaccgataagtgcgtgctggacatgcggagcatggacttcaagagcaactccgccgtggcctggtccaacaagtccgatttcgcctgcgccaacgccttcaacaacagcattatccccgaggacacattcttcccaagccccgagagcagctgcggctttaccagcgagagctaccagcagggcgtgctgagcgccaccatcctgtacgagatcctgctgggcaaggccaccctgtacgccgtgctggtgtctgccctggtgctgatggctatggtcaagcggaaggacagccggggacgcgccaagagaagcggatctggcgtgaagcagaccctgaatttcgacctgctgaagctggctggcgacgtggaatccaacccaggccctactagtatggactggatttggcgcatccttttccttgtcggcgctgctaccggcgcgcattccttcgaagaagtgcaactggtggaaagcggaggcggcctggtgcagcctggcggatctctgagactgagctgtgccgccagcggctacgagttcagccggtcctggatgaactgggtgcgccaggcccctggcaagggactggaatgggtgggaagaatctaccccggcgacggcgacaccaactacagcggcaagttcaagggccggttcaccatcagcgccgacaccagcaagaacaccgcctacctccagatgaacagcctgcgggccgaggataccgccgtgtactactgtgccagagatggcagctcctgggactggtacttcgacgtgtggggacagggaacccttgtgaccgtgtccagcacgcgtgaggacctgaagaacgtgttcccacctgaggtggccgtgttcgagcctagcgaggccgagatcagccacacccagaaagccaccctcgtgtgcctggctaccggcttctaccccgaccatgtggaactgtcttggtgggtcaacggcaaagaggtgcacagcggcgtgtgtaccgacccccagccactgaaagaacagcccgccctgaacgacagccggtactgcctgagcagcagactgagagtgtccgccaccttctggcagaacccccggaaccacttcagatgccaggtgcagttctacggcctgagcgagaacgacgagtggacccaggacagagccaagcccgtgacccagatcgtgtctgccgaagcctggggcagagccgattgcgacgtgaagctggtggaaaagagcttcgagacagacaccaacctgaacttccagaacctgagcgtgatcggcttcagaatcctgctgctgaaagtggccggctttaacctgctgatgaccctgcggctgtggtccagc

SEQ ID NO: 34395 - DNA, 2202 bp, synthetic construct
  source 1..2202: mol_type = other DNA
atggccttaccagtgaccgccttgctcctgccgctggccttgctgctccacgccgccaggccgatgctgcccgctcctaagaatctggtggtgtccagaatcaccgaggacagcgccagactgtcttggacagctcctgatgccgccttcgacagcttccccatccggtacatcgagacactgatctggggcgaagccatctggctggatgtgcctggaagcgagagaagctacgacctgaccggactgaagcctggcacagagtatgccgtggtcatcaccggcgtgaaaggcggcagattctctagccctctggtggcctctttcaccaccggtaccggcggaggcggatctggcggcggaggtagcggtggcggaggatctgaattcatccagatgacccagagccccagcagcctgtctgccagcgtgggcgacagagtgaccatcacctgtcggagcagccagagcatcgtgcactccgtgggcaacaccttcctggaatggtatcagcagaagcccggcaaggcccccaagctgctgatctacaaggtgtccaacagattcagcggcgtgcccagcaggtttagcggctctggcagcggcaccgacttcaccctgaccatctctagcctccagcccgaggacttcgccacctactactgttttcaaggcagccagttcccctacaccttcggccagggaacaaaggtggaaatcaagcggctcgaggacctgaagaacgtgttcccacctgaggtggccgtgttcgagcctagcgaggccgagatcagccacacccagaaagccaccctcgtgtgcctggctaccggcttctaccccgaccatgtggaactgtcttggtgggtcaacggcaaagaggtgcacagcggcgtgtgtaccgacccccagccactgaaagaacagcccgccctgaacgacagccggtactgcctgagcagcagactgagagtgtccgccaccttctggcagaacccccggaaccacttcagatgccaggtgcagttctacggcctgagcgagaacgacgagtggacccaggacagagccaagcccgtgacccagatcgtgtctgccgaagcctggggcagagccgattgcgacgtgaagctggtggaaaagagcttcgagacagacaccaacctgaacttccagaacctgagcgtgatcggcttcagaatcctgctgctgaaagtggccggctttaacctgctgatgaccctgcggctgtggtccagcagggccaagcgatctggatctggagcaacaaacttctcactactcaaacaagcaggtgacgtggaggagaatcccgggcctactagtatggactggatttggcgcatccttttccttgtcggcgctgctaccggcgcgcattccttcgaagaagtgcaactggtggaaagcggaggcggcctggtgcagcctggcggatctctgagactgagctgtgccgccagcggctacgagttcagccggtcctggatgaactgggtgcgccaggcccctggcaagggactggaatgggtgggaagaatctaccccggcgacggcgacaccaactacagcggcaagttcaagggccggttcaccatcagcgccgacaccagcaagaacaccgcctacctccagatgaacagcctgcgggccgaggataccgccgtgtactactgtgccagagatggcagctcctgggactggtacttcgacgtgtggggacagggaacccttgtgaccgtgtccagcacgcgtatccagaaccctgatcctgccgtgtaccagctgcgggatagcaagagcagcgacaagagcgtgtgtctgttcaccgacttcgacagccagaccaacgtgtcccagagcaaggactccgacgtgtacatcaccgataagtgcgtgctggacatgcggagcatggacttcaagagcaactccgccgtggcctggtccaacaagtccgatttcgcctgcgccaacgccttcaacaacagcattatccccgaggacacattcttcccaagccccgagagcagctgcggctttaccagcgagagctaccagcagggcgtgctgagcgccaccatcctgtacgagatcctgctgggcaaggccaccctgtacgccgtgctggtgtctgccctggtgctgatggctatggtcaagcggaaggacagccgggga

SEQ ID NO: 34396 - DNA, 2214 bp, synthetic construct
  source 1..2214: mol_type = other DNA
atggccttaccagtgaccgccttgctcctgccgctggccttgctgctccacgccgccaggccgatgctgcccgctcctaagaatctggtggtgtccagaatcaccgaggacagcgccagactgtcttggacagctcctgatgccgccttcgacagcttccccatccggtacatcgagacactgatctggggcgaagccatctggctggatgtgcctggaagcgagagaagctacgacctgaccggactgaagcctggcacagagtatgccgtggtcatcaccggcgtgaaaggcggcagattctctagccctctggtggcctctttcaccaccggtaccggcggaggcggatctggcggcggaggtagcggtggcggaggatctgaattcatccagatgacccagagccccagcagcctgtctgccagcgtgggcgacagagtgaccatcacctgtcggagcagccagagcatcgtgcactccgtgggcaacaccttcctggaatggtatcagcagaagcccggcaaggcccccaagctgctgatctacaaggtgtccaacagattcagcggcgtgcccagcaggtttagcggctctggcagcggcaccgacttcaccctgaccatctctagcctccagcccgaggacttcgccacctactactgttttcaaggcagccagttcccctacaccttcggccagggaacaaaggtggaaatcaagcggctcgagatccagaaccctgatcctgccgtgtaccagctgcgggatagcaagagcagcgacaagagcgtgtgtctgttcaccgacttcgacagccagaccaacgtgtcccagagcaaggactccgacgtgtacatcaccgataagtgcgtgctggacatgcggagcatggacttcaagagcaactccgccgtggcctggtccaacaagtccgatttcgcctgcgccaacgccttcaacaacagcattatccccgaggacacattcttcccaagccccgagagcagctgcggctttaccagcgagagctaccagcagggcgtgctgagcgccaccatcctgtacgagatcctgctgggcaaggccaccctgtacgccgtgctggtgtctgccctggtgctgatggctatggtcaagcggaaggacagccggggacgcgccaagagaagcggatctggcgtgaagcagaccctgaatttcgacctgctgaagctggctggcgacgtggaatccaacccaggccctactagtatggactggatttggcgcatccttttccttgtcggcgctgctaccggcgcgcattccttcgaagaagtgcaactggtggaaagcggaggcggcctggtgcagcctggcggatctctgagactgagctgtgccgccagcggctacgagttcagccggtcctggatgaactgggtgcgccaggcccctggcaagggactggaatgggtgggaagaatctaccccggcgacggcgacaccaactacagcggcaagttcaagggccggttcaccatcagcgccgacaccagcaagaacaccgcctacctccagatgaacagcctgcgggccgaggataccgccgtgtactactgtgccagagatggcagctcctgggactggtacttcgacgtgtggggacagggaacccttgtgaccgtgtccagcacgcgtgaggacctgaagaacgtgttcccacctgaggtggccgtgttcgagcctagcgaggccgagatcagccacacccagaaagccaccctcgtgtgcctggctaccggcttctaccccgaccatgtggaactgtcttggtgggtcaacggcaaagaggtgcacagcggcgtgtgtaccgacccccagccactgaaagaacagcccgccctgaacgacagccggtactgcctgagcagcagactgagagtgtccgccaccttctggcagaacccccggaaccacttcagatgccaggtgcagttctacggcctgagcgagaacgacgagtggacccaggacagagccaagcccgtgacccagatcgtgtctgccgaagcctggggcagagccgattgcgacgtgaagctggtggaaaagagcttcgagacagacaccaacctgaacttccagaacctgagcgtgatcggcttcagaatcctgctgctgaaagtggccggctttaacctgctgatgaccctgcggctgtggtccagc

SEQ ID NO: 34397 - DNA, 2289 bp, synthetic construct
  source 1..2289: mol_type = other DNA
atggccttaccagtgaccgccttgctcctgccgctggccttgctgctccacgccgccaggccggaggtgcagctggttgaatctggcggaggactggttcagcctggcggatctctgagactgtcttgtgccgccagcggcttcaacatcaaggatacctgtatcggctgggttcgcagagcccctggcaaagaggaagaactggtcgccaaaatctgcaagtacagcggccacaccagatacgccgacagcgtgaagggcagattcaccatcagcgccgacaccagcaagaacaccgcctacctccagatgaacagcctgagagccgaggacaccgccgtgtactattgtgccgctgtgtccgtcagagatgggcactacaattactggggccagggcaccaccgtgaccgtttcttcaggtaccggcggaggcggatctggcggcggaggtagcggtggcggaggatctgaattcatccagatgacccagagccccagcagcctgtctgccagcgtgggcgacagagtgaccatcacctgtcggagcagccagagcatcgtgcactccgtgggcaacaccttcctggaatggtatcagcagaagcccggcaaggcccccaagctgctgatctacaaggtgtccaacagattcagcggcgtgcccagcaggtttagcggctctggcagcggcaccgacttcaccctgaccatctctagcctccagcccgaggacttcgccacctactactgttttcaaggcagccagttcccctacaccttcggccagggaacaaaggtggaaatcaagcggctcgaggacctgaagaacgtgttcccacctgaggtggccgtgttcgagcctagcgaggccgagatcagccacacccagaaagccaccctcgtgtgcctggctaccggcttctaccccgaccatgtggaactgtcttggtgggtcaacggcaaagaggtgcacagcggcgtgtgtaccgacccccagccactgaaagaacagcccgccctgaacgacagccggtactgcctgagcagcagactgagagtgtccgccaccttctggcagaacccccggaaccacttcagatgccaggtgcagttctacggcctgagcgagaacgacgagtggacccaggacagagccaagcccgtgacccagatcgtgtctgccgaagcctggggcagagccgattgcgacgtgaagctggtggaaaagagcttcgagacagacaccaacctgaacttccagaacctgagcgtgatcggcttcagaatcctgctgctgaaagtggccggctttaacctgctgatgaccctgcggctgtggtccagcagggccaagcgatctggatctggagcaacaaacttctcactactcaaacaagcaggtgacgtggaggagaatcccgggcctactagtatggactggatttggcgcatccttttccttgtcggcgctgctaccggcgcgcattccttcgaagaagtgcaactggtggaaagcggaggcggcctggtgcagcctggcggatctctgagactgagctgtgccgccagcggctacgagttcagccggtcctggatgaactgggtgcgccaggcccctggcaagggactggaatgggtgggaagaatctaccccggcgacggcgacaccaactacagcggcaagttcaagggccggttcaccatcagcgccgacaccagcaagaacaccgcctacctccagatgaacagcctgcgggccgaggataccgccgtgtactactgtgccagagatggcagctcctgggactggtacttcgacgtgtggggacagggaacccttgtgaccgtgtccagcacgcgtatccagaaccctgatcctgccgtgtaccagctgcgggatagcaagagcagcgacaagagcgtgtgtctgttcaccgacttcgacagccagaccaacgtgtcccagagcaaggactccgacgtgtacatcaccgataagtgcgtgctggacatgcggagcatggacttcaagagcaactccgccgtggcctggtccaacaagtccgatttcgcctgcgccaacgccttcaacaacagcattatccccgaggacacattcttcccaagccccgagagcagctgcggctttaccagcgagagctaccagcagggcgtgctgagcgccaccatcctgtacgagatcctgctgggcaaggccaccctgtacgccgtgctggtgtctgccctggtgctgatggctatggtcaagcggaaggacagccgggga

SEQ ID NO: 34398 - DNA, 2301 bp, synthetic construct
  source 1..2301: mol_type = other DNA
atggccttaccagtgaccgccttgctcctgccgctggccttgctgctccacgccgccaggccggaggtgcagctggttgaatctggcggaggactggttcagcctggcggatctctgagactgtcttgtgccgccagcggcttcaacatcaaggatacctgtatcggctgggttcgcagagcccctggcaaagaggaagaactggtcgccaaaatctgcaagtacagcggccacaccagatacgccgacagcgtgaagggcagattcaccatcagcgccgacaccagcaagaacaccgcctacctccagatgaacagcctgagagccgaggacaccgccgtgtactattgtgccgctgtgtccgtcagagatgggcactacaattactggggccagggcaccaccgtgaccgtttcttcaggtaccggcggaggcggatctggcggcggaggtagcggtggcggaggatctgaattcatccagatgacccagagccccagcagcctgtctgccagcgtgggcgacagagtgaccatcacctgtcggagcagccagagcatcgtgcactccgtgggcaacaccttcctggaatggtatcagcagaagcccggcaaggcccccaagctgctgatctacaaggtgtccaacagattcagcggcgtgcccagcaggtttagcggctctggcagcggcaccgacttcaccctgaccatctctagcctccagcccgaggacttcgccacctactactgttttcaaggcagccagttcccctacaccttcggccagggaacaaaggtggaaatcaagcggctcgagatccagaaccctgatcctgccgtgtaccagctgcgggatagcaagagcagcgacaagagcgtgtgtctgttcaccgacttcgacagccagaccaacgtgtcccagagcaaggactccgacgtgtacatcaccgataagtgcgtgctggacatgcggagcatggacttcaagagcaactccgccgtggcctggtccaacaagtccgatttcgcctgcgccaacgccttcaacaacagcattatccccgaggacacattcttcccaagccccgagagcagctgcggctttaccagcgagagctaccagcagggcgtgctgagcgccaccatcctgtacgagatcctgctgggcaaggccaccctgtacgccgtgctggtgtctgccctggtgctgatggctatggtcaagcggaaggacagccggggacgcgccaagagaagcggatctggcgtgaagcagaccctgaatttcgacctgctgaagctggctggcgacgtggaatccaacccaggccctactagtatggactggatttggcgcatccttttccttgtcggcgctgctaccggcgcgcattccttcgaagaagtgcaactggtggaaagcggaggcggcctggtgcagcctggcggatctctgagactgagctgtgccgccagcggctacgagttcagccggtcctggatgaactgggtgcgccaggcccctggcaagggactggaatgggtgggaagaatctaccccggcgacggcgacaccaactacagcggcaagttcaagggccggttcaccatcagcgccgacaccagcaagaacaccgcctacctccagatgaacagcctgcgggccgaggataccgccgtgtactactgtgccagagatggcagctcctgggactggtacttcgacgtgtggggacagggaacccttgtgaccgtgtccagcacgcgtgaggacctgaagaacgtgttcccacctgaggtggccgtgttcgagcctagcgaggccgagatcagccacacccagaaagccaccctcgtgtgcctggctaccggcttctaccccgaccatgtggaactgtcttggtgggtcaacggcaaagaggtgcacagcggcgtgtgtaccgacccccagccactgaaagaacagcccgccctgaacgacagccggtactgcctgagcagcagactgagagtgtccgccaccttctggcagaacccccggaaccacttcagatgccaggtgcagttctacggcctgagcgagaacgacgagtggacccaggacagagccaagcccgtgacccagatcgtgtctgccgaagcctggggcagagccgattgcgacgtgaagctggtggaaaagagcttcgagacagacaccaacctgaacttccagaacctgagcgtgatcggcttcagaatcctgctgctgaaagtggccggctttaacctgctgatgaccctgcggctgtggtccagc

SEQ ID NO: 34399 - DNA, 3405 bp, synthetic construct
  source 1..3405: mol_type = other DNA
atggccttaccagtgaccgccttgctcctgccgctggccttgctgctccacgccgccaggccggaagtgcagctggttgaatctggcggaggactggttcaggctggcggatctctgagactgtcttgtgccgccagcggcagaacctttagcatgggctggtttagacaggcccctggcaaagagagagagttcgtcgccgccatcacatactctggcggcagcccttactacgccgactctgtgaagggcagattcaccatcagccgggacaacgccaagaacaccgtgtacctccagatgaacagcctgaagcctgaggacaccgccgtgtactactgcgccgccaatccaacatacggcagcgactggaacgccgagaattggggccagggaacccaagtgacagtgtctagcggtaccggcggaggcggatctggcggcggaggtagcggtggcggaggatctgaattcatccagatgacccagagccccagcagcctgtctgccagcgtgggcgacagagtgaccatcacctgtcggagcagccagagcatcgtgcactccgtgggcaacaccttcctggaatggtatcagcagaagcccggcaaggcccccaagctgctgatctacaaggtgtccaacagattcagcggcgtgcccagcaggtttagcggctctggcagcggcaccgacttcaccctgaccatctctagcctccagcccgaggacttcgccacctactactgttttcaaggcagccagttcccctacaccttcggccagggaacaaaggtggaaatcaagcggctcgaggacctgaagaacgtgttcccacctgaggtggccgtgttcgagcctagcgaggccgagatcagccacacccagaaagccaccctcgtgtgcctggctaccggcttctaccccgaccatgtggaactgtcttggtgggtcaacggcaaagaggtgcacagcggcgtgtgtaccgacccccagccactgaaagaacagcccgccctgaacgacagccggtactgcctgagcagcagactgagagtgtccgccaccttctggcagaacccccggaaccacttcagatgccaggtgcagttctacggcctgagcgagaacgacgagtggacccaggacagagccaagcccgtgacccagatcgtgtctgccgaagcctggggcagagccgattgcgacgtgaagctggtggaaaagagcttcgagacagacaccaacctgaacttccagaacctgagcgtgatcggcttcagaatcctgctgctgaaagtggccggctttaacctgctgatgaccctgcggctgtggtccagcagggccaagcgatctggatctggagcaacaaacttctcactactcaaacaagcaggtgacgtggaggagaatcccgggcctactagtgccaccatggactggatttggcgcatccttttccttgtcggcgctgctaccggcgcccattccgggcccgaagtgcaactggttgaatccggtggcggcctggtgcaagcaggcggatctctcagacttagctgtgccgcctccggcagaaccttcacaatgggatggtttaggcaggctccagggaaagagagagagttcgtcgccgccatctctctgtctcccacactggcctactacgccgactctgtgaaaggccggttcaccatctccagagataatgccaagaacaccgtggtgctgcaaatgaactctctgaaacccgaggatacagccctgtactattgtgccgctgaccggaagtccgtgatgagcatcagacccgattactggggacagggcacacaagtcacagtgtcctctggatccggcggcggaggatctggcggaggcggatctgggggcggaggctctttcgaagaagtgcaactggtggaaagcggaggcggcctggtgcagcctggcggatctctgagactgagctgtgccgccagcggctacgagttcagccggtcctggatgaactgggtgcgccaggcccctggcaagggactggaatgggtgggaagaatctaccccggcgacggcgacaccaactacagcggcaagttcaagggccggttcaccatcagcgccgacaccagcaagaacaccgcctacctccagatgaacagcctgcgggccgaggataccgccgtgtactactgtgccagagatggcagctcctgggactggtacttcgacgtgtggggacagggaacccttgtgaccgtgtccagcacgcgtatccagaaccctgatcctgccgtgtaccagctgcgggatagcaagagcagcgacaagagcgtgtgtctgttcaccgacttcgacagccagaccaacgtgtcccagagcaaggactccgacgtgtacatcaccgataagtgcgtgctggacatgcggagcatggacttcaagagcaactccgccgtggcctggtccaacaagtccgatttcgcctgcgccaacgccttcaacaacagcattatccccgaggacacattcttcccaagccccgagagcagctgcggctttaccagcgagagctaccagcagggcgtgctgagcgccaccatcctgtacgagatcctgctgggcaaggccaccctgtacgccgtgctggtgtctgccctggtgctgatggctatggtcaagcggaaggacagccggggacgcgccaagagaagcggatctggcgtgaagcagaccctgaatttcgacctgctgaagctggctggcgacgtggaatccaacccaggcccttctagaggccatatgaccgagtacaagcccacggtgcgcctcgccacccgcgacgacgtccccagggccgtacgcaccctcgccgccgcgttcgccgactaccccgccacgcgccacaccgtcgatccggaccgccacatcgagcgggtcaccgagctgcaagaactcttcctcacgcgcgtcgggctcgacatcggcaaggtgtgggtcgcggacgacggcgccgcggtggcggtctggaccacgccggagagcgtcgaagcgggggcggtgttcgccgagatcggcccgcgcatggccgagttgagcggttcccggctggccgcgcagcaacagatggaaggcctcctggcgccgcaccggcccaaggagcccgcgtggttcctggccaccgtcggcgtctcgcccgaccaccagggcaagggtctgggcagcgccgtcgtgctccccggagtggaggcggccgagcgcgccggggtgcccgccttcctggagacctccgcgccccgcaacctccccttctacgagcggctcggcttcaccgtcaccgccgacgtcgaggtgcccgaaggaccgcgcacctggtgcatgacccgcaagcccggtgcctga

SEQ ID NO: 34400 - DNA, 2319 bp, synthetic construct
  source 1..2319: mol_type = other DNA
atggccttaccagtgaccgccttgctcctgccgctggccttgctgctccacgccgccaggccggaagtgcagctggttgaatctggcggaggactggttcagcctggcggatctctgagactgtcttgtgccgcctctggcttcgccagcgactactatatcatcggctggttcagacaggcccctggcaaagagagagagggcgtcagctgtatcagcagcagatacgccaacaccaactacgccgacagcgtgaagggcagattcaccatcagccgggacaacgccaagaacaccgtgtacctccagatgaacagcctgaagcctgaggacaccgccgtgtactactgtgccgccgacaccagaagatacacctgtcctgacattgccaccatgcaccggaacttcgattcttggggccagggcacactggtcaccgtttcttctggtaccggcggaggcggatctggcggcggaggtagcggtggcggaggatctgaattcatccagatgacccagagccccagcagcctgtctgccagcgtgggcgacagagtgaccatcacctgtcggagcagccagagcatcgtgcactccgtgggcaacaccttcctggaatggtatcagcagaagcccggcaaggcccccaagctgctgatctacaaggtgtccaacagattcagcggcgtgcccagcaggtttagcggctctggcagcggcaccgacttcaccctgaccatctctagcctccagcccgaggacttcgccacctactactgttttcaaggcagccagttcccctacaccttcggccagggaacaaaggtggaaatcaagcggctcgaggacctgaagaacgtgttcccacctgaggtggccgtgttcgagcctagcgaggccgagatcagccacacccagaaagccaccctcgtgtgcctggctaccggcttctaccccgaccatgtggaactgtcttggtgggtcaacggcaaagaggtgcacagcggcgtgtgtaccgacccccagccactgaaagaacagcccgccctgaacgacagccggtactgcctgagcagcagactgagagtgtccgccaccttctggcagaacccccggaaccacttcagatgccaggtgcagttctacggcctgagcgagaacgacgagtggacccaggacagagccaagcccgtgacccagatcgtgtctgccgaagcctggggcagagccgattgcgacgtgaagctggtggaaaagagcttcgagacagacaccaacctgaacttccagaacctgagcgtgatcggcttcagaatcctgctgctgaaagtggccggctttaacctgctgatgaccctgcggctgtggtccagcagggccaagcgatctggatctggagcaacaaacttctcactactcaaacaagcaggtgacgtggaggagaatcccgggcctactagtatggactggatttggcgcatccttttccttgtcggcgctgctaccggcgcgcattccttcgaagaagtgcaactggtggaaagcggaggcggcctggtgcagcctggcggatctctgagactgagctgtgccgccagcggctacgagttcagccggtcctggatgaactgggtgcgccaggcccctggcaagggactggaatgggtgggaagaatctaccccggcgacggcgacaccaactacagcggcaagttcaagggccggttcaccatcagcgccgacaccagcaagaacaccgcctacctccagatgaacagcctgcgggccgaggataccgccgtgtactactgtgccagagatggcagctcctgggactggtacttcgacgtgtggggacagggaacccttgtgaccgtgtccagcacgcgtatccagaaccctgatcctgccgtgtaccagctgcgggatagcaagagcagcgacaagagcgtgtgtctgttcaccgacttcgacagccagaccaacgtgtcccagagcaaggactccgacgtgtacatcaccgataagtgcgtgctggacatgcggagcatggacttcaagagcaactccgccgtggcctggtccaacaagtccgatttcgcctgcgccaacgccttcaacaacagcattatccccgaggacacattcttcccaagccccgagagcagctgcggctttaccagcgagagctaccagcagggcgtgctgagcgccaccatcctgtacgagatcctgctgggcaaggccaccctgtacgccgtgctggtgtctgccctggtgctgatggctatggtcaagcggaaggacagccggggataa

SEQ ID NO: 34401 - DNA, 2319 bp, synthetic construct
  source 1..2319: mol_type = other DNA
atggccttaccagtgaccgccttgctcctgccgctggccttgctgctccacgccgccaggccggaagtgcagctggttgaatctggcggaggactggttcagcctggcggatctctgagactgagctgtgaagccagcggcttcgccagcgacgattacatcatcggctggttcagacaggcccctggcaaagagagagagggcgtcagctgcatcagctctaagtacgccaacaccgtgtacaccgacagcgtgaagggcagattcagactgagcagaggcaccgccaagaataccgtgtacctccagatgagcgccctgaagcctgaggataccgccgtgtactactgcgctatggacagccgcagagtgacatgccctgagatcagcaccatgcaccggaacttcgattcttggggccagggcacactggtcacagtgtcatctggtaccggcggaggcggatctggcggcggaggtagcggtggcggaggatctgaattcatccagatgacccagagccccagcagcctgtctgccagcgtgggcgacagagtgaccatcacctgtcggagcagccagagcatcgtgcactccgtgggcaacaccttcctggaatggtatcagcagaagcccggcaaggcccccaagctgctgatctacaaggtgtccaacagattcagcggcgtgcccagcaggtttagcggctctggcagcggcaccgacttcaccctgaccatctctagcctccagcccgaggacttcgccacctactactgttttcaaggcagccagttcccctacaccttcggccagggaacaaaggtggaaatcaagcggctcgaggacctgaagaacgtgttcccacctgaggtggccgtgttcgagcctagcgaggccgagatcagccacacccagaaagccaccctcgtgtgcctggctaccggcttctaccccgaccatgtggaactgtcttggtgggtcaacggcaaagaggtgcacagcggcgtgtgtaccgacccccagccactgaaagaacagcccgccctgaacgacagccggtactgcctgagcagcagactgagagtgtccgccaccttctggcagaacccccggaaccacttcagatgccaggtgcagttctacggcctgagcgagaacgacgagtggacccaggacagagccaagcccgtgacccagatcgtgtctgccgaagcctggggcagagccgattgcgacgtgaagctggtggaaaagagcttcgagacagacaccaacctgaacttccagaacctgagcgtgatcggcttcagaatcctgctgctgaaagtggccggctttaacctgctgatgaccctgcggctgtggtccagcagggccaagcgatctggatctggagcaacaaacttctcactactcaaacaagcaggtgacgtggaggagaatcccgggcctactagtatggactggatttggcgcatccttttccttgtcggcgctgctaccggcgcgcattccttcgaagaagtgcaactggtggaaagcggaggcggcctggtgcagcctggcggatctctgagactgagctgtgccgccagcggctacgagttcagccggtcctggatgaactgggtgcgccaggcccctggcaagggactggaatgggtgggaagaatctaccccggcgacggcgacaccaactacagcggcaagttcaagggccggttcaccatcagcgccgacaccagcaagaacaccgcctacctccagatgaacagcctgcgggccgaggataccgccgtgtactactgtgccagagatggcagctcctgggactggtacttcgacgtgtggggacagggaacccttgtgaccgtgtccagcacgcgtatccagaaccctgatcctgccgtgtaccagctgcgggatagcaagagcagcgacaagagcgtgtgtctgttcaccgacttcgacagccagaccaacgtgtcccagagcaaggactccgacgtgtacatcaccgataagtgcgtgctggacatgcggagcatggacttcaagagcaactccgccgtggcctggtccaacaagtccgatttcgcctgcgccaacgccttcaacaacagcattatccccgaggacacattcttcccaagccccgagagcagctgcggctttaccagcgagagctaccagcagggcgtgctgagcgccaccatcctgtacgagatcctgctgggcaaggccaccctgtacgccgtgctggtgtctgccctggtgctgatggctatggtcaagcggaaggacagccggggataa

SEQ ID NO: 34402 - DNA, 2316 bp, synthetic construct
  source 1..2316: mol_type = other DNA
atggccttaccagtgaccgccttgctcctgccgctggccttgctgctccacgccgccaggccggaagtgcagctggttgaatctggcggaggactggttcagcctggcggatctctgagactgtcttgtgccgcctctggcttcgccagcgactactatatcatcggctggttcagacaggcccctggcaaagagagagagggcgtcagctgtatcagcagcagatacgccaacaccaactacgccgacagcgtgaagggcagattcaccatcagccgggacaacgccaagaacaccgtgtacctccagatgaacagcctgaagcctgaggacaccgccgtgtactactgtgccgccgacaccagaagatacacctgtcctgacattgccaccatgcaccggaacttcgattcttggggccagggcacactggtcaccgtttcttctggtaccggcggaggcggatctggcggcggaggtagcggtggcggaggatctgaattcatccagatgacccagagccccagcagcctgtctgccagcgtgggcgacagagtgaccatcacctgtcggagcagccagagcatcgtgcactccgtgggcaacaccttcctggaatggtatcagcagaagcccggcaaggcccccaagctgctgatctacaaggtgtccaacagattcagcggcgtgcccagcaggtttagcggctctggcagcggcaccgacttcaccctgaccatctctagcctccagcccgaggacttcgccacctactactgttttcaaggcagccagttcccctacaccttcggccagggaacaaaggtggaaatcaagcggctcgagatccagaaccctgatcctgccgtgtaccagctgcgggatagcaagagcagcgacaagagcgtgtgtctgttcaccgacttcgacagccagaccaacgtgtcccagagcaaggactccgacgtgtacatcaccgataagtgcgtgctggacatgcggagcatggacttcaagagcaactccgccgtggcctggtccaacaagtccgatttcgcctgcgccaacgccttcaacaacagcattatccccgaggacacattcttcccaagccccgagagcagctgcggctttaccagcgagagctaccagcagggcgtgctgagcgccaccatcctgtacgagatcctgctgggcaaggccaccctgtacgccgtgctggtgtctgccctggtgctgatggctatggtcaagcggaaggacagccggggaagggccaagcgatctggatctggagcaacaaacttctcactactcaaacaagcaggtgacgtggaggagaatcccgggcctactagtatggactggatttggcgcatccttttccttgtcggcgctgctaccggcgcgcattccttcgaagaagtgcaactggtggaaagcggaggcggcctggtgcagcctggcggatctctgagactgagctgtgccgccagcggctacgagttcagccggtcctggatgaactgggtgcgccaggcccctggcaagggactggaatgggtgggaagaatctaccccggcgacggcgacaccaactacagcggcaagttcaagggccggttcaccatcagcgccgacaccagcaagaacaccgcctacctccagatgaacagcctgcgggccgaggataccgccgtgtactactgtgccagagatggcagctcctgggactggtacttcgacgtgtggggacagggaacccttgtgaccgtgtccagcacgcgtgacctgaagaacgtgttcccacctgaggtggccgtgttcgagcctagcgaggccgagatcagccacacccagaaagccaccctcgtgtgcctggctaccggcttctaccccgaccatgtggaactgtcttggtgggtcaacggcaaagaggtgcacagcggcgtgtgtaccgacccccagccactgaaagaacagcccgccctgaacgacagccggtactgcctgagcagcagactgagagtgtccgccaccttctggcagaacccccggaaccacttcagatgccaggtgcagttctacggcctgagcgagaacgacgagtggacccaggacagagccaagcccgtgacccagatcgtgtctgccgaagcctggggcagagccgattgcgacgtgaagctggtggaaaagagcttcgagacagacaccaacctgaacttccagaacctgagcgtgatcggcttcagaatcctgctgctgaaagtggccggctttaacctgctgatgaccctgcggctgtggtccagc

SEQ ID NO: 34403 - DNA, 2316 bp, synthetic construct
  source 1..2316: mol_type = other DNA
atggccttaccagtgaccgccttgctcctgccgctggccttgctgctccacgccgccaggccggaagtgcagctggttgaatctggcggaggactggttcagcctggcggatctctgagactgagctgtgaagccagcggcttcgccagcgacgattacatcatcggctggttcagacaggcccctggcaaagagagagagggcgtcagctgcatcagctctaagtacgccaacaccgtgtacaccgacagcgtgaagggcagattcagactgagcagaggcaccgccaagaataccgtgtacctccagatgagcgccctgaagcctgaggataccgccgtgtactactgcgctatggacagccgcagagtgacatgccctgagatcagcaccatgcaccggaacttcgattcttggggccagggcacactggtcacagtgtcatctggtaccggcggaggcggatctggcggcggaggtagcggtggcggaggatctgaattcatccagatgacccagagccccagcagcctgtctgccagcgtgggcgacagagtgaccatcacctgtcggagcagccagagcatcgtgcactccgtgggcaacaccttcctggaatggtatcagcagaagcccggcaaggcccccaagctgctgatctacaaggtgtccaacagattcagcggcgtgcccagcaggtttagcggctctggcagcggcaccgacttcaccctgaccatctctagcctccagcccgaggacttcgccacctactactgttttcaaggcagccagttcccctacaccttcggccagggaacaaaggtggaaatcaagcggctcgagatccagaaccctgatcctgccgtgtaccagctgcgggatagcaagagcagcgacaagagcgtgtgtctgttcaccgacttcgacagccagaccaacgtgtcccagagcaaggactccgacgtgtacatcaccgataagtgcgtgctggacatgcggagcatggacttcaagagcaactccgccgtggcctggtccaacaagtccgatttcgcctgcgccaacgccttcaacaacagcattatccccgaggacacattcttcccaagccccgagagcagctgcggctttaccagcgagagctaccagcagggcgtgctgagcgccaccatcctgtacgagatcctgctgggcaaggccaccctgtacgccgtgctggtgtctgccctggtgctgatggctatggtcaagcggaaggacagccggggaagggccaagcgatctggatctggagcaacaaacttctcactactcaaacaagcaggtgacgtggaggagaatcccgggcctactagtatggactggatttggcgcatccttttccttgtcggcgctgctaccggcgcgcattccttcgaagaagtgcaactggtggaaagcggaggcggcctggtgcagcctggcggatctctgagactgagctgtgccgccagcggctacgagttcagccggtcctggatgaactgggtgcgccaggcccctggcaagggactggaatgggtgggaagaatctaccccggcgacggcgacaccaactacagcggcaagttcaagggccggttcaccatcagcgccgacaccagcaagaacaccgcctacctccagatgaacagcctgcgggccgaggataccgccgtgtactactgtgccagagatggcagctcctgggactggtacttcgacgtgtggggacagggaacccttgtgaccgtgtccagcacgcgtgacctgaagaacgtgttcccacctgaggtggccgtgttcgagcctagcgaggccgagatcagccacacccagaaagccaccctcgtgtgcctggctaccggcttctaccccgaccatgtggaactgtcttggtgggtcaacggcaaagaggtgcacagcggcgtgtgtaccgacccccagccactgaaagaacagcccgccctgaacgacagccggtactgcctgagcagcagactgagagtgtccgccaccttctggcagaacccccggaaccacttcagatgccaggtgcagttctacggcctgagcgagaacgacgagtggacccaggacagagccaagcccgtgacccagatcgtgtctgccgaagcctggggcagagccgattgcgacgtgaagctggtggaaaagagcttcgagacagacaccaacctgaacttccagaacctgagcgtgatcggcttcagaatcctgctgctgaaagtggccggctttaacctgctgatgaccctgcggctgtggtccagc

SEQ ID NO: 34404 - DNA, 2289 bp, synthetic construct
  source 1..2289: mol_type = other DNA
atggccttaccagtgaccgccttgctcctgccgctggccttgctgctccacgccgccaggccgcaagtcaaactggaagaaagcggtggcggcctggtgcaacctggcgaatctctgagactgagctgtagcgccagcggctccatcttcaaggtgttcagagtgttcgccatgagctggtacaggcaaggccctggcaagcagagagagctggtcgcctctatcagcagcggcgagacaaccacatacgccgaatctgtgaaaggccggttcaccatcagccgggataatgccaagaataccgcctatctccagatggactccctgaagcctgaagatacagctgtgtactactgcaacgccgaccataccttcaccggcgatttttggggccagggaacccaagtgaccgtgtctagtggtaccggcggaggcggatctggcggcggaggtagcggtggcggaggatctgaattcatccagatgacccagagccccagcagcctgtctgccagcgtgggcgacagagtgaccatcacctgtcggagcagccagagcatcgtgcactccgtgggcaacaccttcctggaatggtatcagcagaagcccggcaaggcccccaagctgctgatctacaaggtgtccaacagattcagcggcgtgcccagcaggtttagcggctctggcagcggcaccgacttcaccctgaccatctctagcctccagcccgaggacttcgccacctactactgttttcaaggcagccagttcccctacaccttcggccagggaacaaaggtggaaatcaagcggctcgagatccagaaccctgatcctgccgtgtaccagctgcgggatagcaagagcagcgacaagagcgtgtgtctgttcaccgacttcgacagccagaccaacgtgtcccagagcaaggactccgacgtgtacatcaccgataagtgcgtgctggacatgcggagcatggacttcaagagcaactccgccgtggcctggtccaacaagtccgatttcgcctgcgccaacgccttcaacaacagcattatccccgaggacacattcttcccaagccccgagagcagctgcggctttaccagcgagagctaccagcagggcgtgctgagcgccaccatcctgtacgagatcctgctgggcaaggccaccctgtacgccgtgctggtgtctgccctggtgctgatggctatggtcaagcggaaggacagccggggaagggccaagcgatctggatctggagcaacaaacttctcactactcaaacaagcaggtgacgtggaggagaatcccgggcctactagtatggactggatttggcgcatccttttccttgtcggcgctgctaccggcgcgcattccttcgaagaagtgcaactggtggaaagcggaggcggcctggtgcagcctggcggatctctgagactgagctgtgccgccagcggctacgagttcagccggtcctggatgaactgggtgcgccaggcccctggcaagggactggaatgggtgggaagaatctaccccggcgacggcgacaccaactacagcggcaagttcaagggccggttcaccatcagcgccgacaccagcaagaacaccgcctacctccagatgaacagcctgcgggccgaggataccgccgtgtactactgtgccagagatggcagctcctgggactggtacttcgacgtgtggggacagggaacccttgtgaccgtgtccagcacgcgtgacctgaagaacgtgttcccacctgaggtggccgtgttcgagcctagcgaggccgagatcagccacacccagaaagccaccctcgtgtgcctggctaccggcttctaccccgaccatgtggaactgtcttggtgggtcaacggcaaagaggtgcacagcggcgtgtgtaccgacccccagccactgaaagaacagcccgccctgaacgacagccggtactgcctgagcagcagactgagagtgtccgccaccttctggcagaacccccggaaccacttcagatgccaggtgcagttctacggcctgagcgagaacgacgagtggacccaggacagagccaagcccgtgacccagatcgtgtctgccgaagcctggggcagagccgattgcgacgtgaagctggtggaaaagagcttcgagacagacaccaacctgaacttccagaacctgagcgtgatcggcttcagaatcctgctgctgaaagtggccggctttaacctgctgatgaccctgcggctgtggtccagc

SEQ ID NO: 34405 - DNA, 2295 bp, synthetic construct
  source 1..2295: mol_type = other DNA
atggccttaccagtgaccgccttgctcctgccgctggccttgctgctccacgccgccaggccgatccagatgacccagagccccagcagcctgtctgccagcgtgggcgacagagtgaccatcacctgtcggagcagccagagcatcgtgcactccgtgggcaacaccttcctggaatggtatcagcagaagcccggcaaggcccccaagctgctgatctacaaggtgtccaacagattcagcggcgtgcccagcaggtttagcggctctggcagcggcaccgacttcaccctgaccatctctagcctccagcccgaggacttcgccacctactactgttttcaaggcagccagttcccctacaccttcggccagggaacaaaggtggaaatcaagcggctcgaggacctgaagaacgtgttcccacctgaggtggccgtgttcgagcctagcgaggccgagatcagccacacccagaaagccaccctcgtgtgcctggctaccggcttctaccccgaccatgtggaactgtcttggtgggtcaacggcaaagaggtgcacagcggcgtgtgtaccgacccccagccactgaaagaacagcccgccctgaacgacagccggtactgcctgagcagcagactgagagtgtccgccaccttctggcagaacccccggaaccacttcagatgccaggtgcagttctacggcctgagcgagaacgacgagtggacccaggacagagccaagcccgtgacccagatcgtgtctgccgaagcctggggcagagccgattgcgacgtgaagctggtggaaaagagcttcgagacagacaccaacctgaacttccagaacctgagcgtgatcggcttcagaatcctgctgctgaaagtggccggctttaacctgctgatgaccctgcggctgtggtccagcagggccaagcgatctggatctggagcaacaaacttctcactactcaaacaagcaggtgacgtggaggagaatcccgggcctactagtgccaccatggactggatttggcgcatccttttccttgtcggcgctgctaccggcgcccattccgggcccgaagtgcagctggttgaatctggcggaggactggttcaggctggcggatctctgagactgtcttgtgccgccagcggcagaacctttagcatgggctggtttagacaggcccctggcaaagagagagagttcgtcgccgccatcacatactctggcggcagcccttactacgccgactctgtgaagggcagattcaccatcagccgggacaacgccaagaacaccgtgtacctccagatgaacagcctgaagcctgaggacaccgccgtgtactactgcgccgccaatccaacatacggcagcgactggaacgccgagaattggggccagggaacccaagtgacagtgtctagcggatccggcggcggaggatctggcggaggcggatctgggggcggaggctctttcgaagaagtgcaactggtggaaagcggaggcggcctggtgcagcctggcggatctctgagactgagctgtgccgccagcggctacgagttcagccggtcctggatgaactgggtgcgccaggcccctggcaagggactggaatgggtgggaagaatctaccccggcgacggcgacaccaactacagcggcaagttcaagggccggttcaccatcagcgccgacaccagcaagaacaccgcctacctccagatgaacagcctgcgggccgaggataccgccgtgtactactgtgccagagatggcagctcctgggactggtacttcgacgtgtggggacagggaacccttgtgaccgtgtccagcacgcgtatccagaaccctgatcctgccgtgtaccagctgcgggatagcaagagcagcgacaagagcgtgtgtctgttcaccgacttcgacagccagaccaacgtgtcccagagcaaggactccgacgtgtacatcaccgataagtgcgtgctggacatgcggagcatggacttcaagagcaactccgccgtggcctggtccaacaagtccgatttcgcctgcgccaacgccttcaacaacagcattatccccgaggacacattcttcccaagccccgagagcagctgcggctttaccagcgagagctaccagcagggcgtgctgagcgccaccatcctgtacgagatcctgctgggcaaggccaccctgtacgccgtgctggtgtctgccctggtgctgatggctatggtcaagcggaaggacagccggggataa

SEQ ID NO: 34406 - DNA, 2298 bp, synthetic construct
  source 1..2298: mol_type = other DNA
atggccttaccagtgaccgccttgctcctgccgctggccttgctgctccacgccgccaggccgatccagatgacccagagccccagcagcctgtctgccagcgtgggcgacagagtgaccatcacctgtcggagcagccagagcatcgtgcactccgtgggcaacaccttcctggaatggtatcagcagaagcccggcaaggcccccaagctgctgatctacaaggtgtccaacagattcagcggcgtgcccagcaggtttagcggctctggcagcggcaccgacttcaccctgaccatctctagcctccagcccgaggacttcgccacctactactgttttcaaggcagccagttcccctacaccttcggccagggaacaaaggtggaaatcaagcggctcgaggacctgaagaacgtgttcccacctgaggtggccgtgttcgagcctagcgaggccgagatcagccacacccagaaagccaccctcgtgtgcctggctaccggcttctaccccgaccatgtggaactgtcttggtgggtcaacggcaaagaggtgcacagcggcgtgtgtaccgacccccagccactgaaagaacagcccgccctgaacgacagccggtactgcctgagcagcagactgagagtgtccgccaccttctggcagaacccccggaaccacttcagatgccaggtgcagttctacggcctgagcgagaacgacgagtggacccaggacagagccaagcccgtgacccagatcgtgtctgccgaagcctggggcagagccgattgcgacgtgaagctggtggaaaagagcttcgagacagacaccaacctgaacttccagaacctgagcgtgatcggcttcagaatcctgctgctgaaagtggccggctttaacctgctgatgaccctgcggctgtggtccagcagggccaagcgatctggatctggagcaacaaacttctcactactcaaacaagcaggtgacgtggaggagaatcccgggcctactagtgccaccatggactggatttggcgcatccttttccttgtcggcgctgctaccggcgcccattccgggcccgaagtgcaactggtggaatctgggggcggactggtgcagccaggcggaagtctgaggctgtcttgtgccgcctccggcagcatcttcggcttcaacgacatggcctggtatcggcaggctcccggaaaacagcgcgagctggtggctctgattagcagagtgggcgtgaccagcagcgccgactctgtgaagggcagattcacaatctccagagtgaacgccaaggatacagtgtacctccagatgaactctctgaaacctgaggatacagcagtgtactattgctacatggaccagcggctggacggcagcacactggcctactggggacagggaactcaagtgacagtgtctagcggatccggcggcggaggatctggcggaggcggatctgggggcggaggctctttcgaagaagtgcaactggtggaaagcggaggcggcctggtgcagcctggcggatctctgagactgagctgtgccgccagcggctacgagttcagccggtcctggatgaactgggtgcgccaggcccctggcaagggactggaatgggtgggaagaatctaccccggcgacggcgacaccaactacagcggcaagttcaagggccggttcaccatcagcgccgacaccagcaagaacaccgcctacctccagatgaacagcctgcgggccgaggataccgccgtgtactactgtgccagagatggcagctcctgggactggtacttcgacgtgtggggacagggaacccttgtgaccgtgtccagcacgcgtatccagaaccctgatcctgccgtgtaccagctgcgggatagcaagagcagcgacaagagcgtgtgtctgttcaccgacttcgacagccagaccaacgtgtcccagagcaaggactccgacgtgtacatcaccgataagtgcgtgctggacatgcggagcatggacttcaagagcaactccgccgtggcctggtccaacaagtccgatttcgcctgcgccaacgccttcaacaacagcattatccccgaggacacattcttcccaagccccgagagcagctgcggctttaccagcgagagctaccagcagggcgtgctgagcgccaccatcctgtacgagatcctgctgggcaaggccaccctgtacgccgtgctggtgtctgccctggtgctgatggctatggtcaagcggaaggacagccggggataa

SEQ ID NO: 34407 - DNA, 2286 bp, synthetic construct
  source 1..2286: mol_type = other DNA
atggccttaccagtgaccgccttgctcctgccgctggccttgctgctccacgccgccaggccgatccagatgacccagagccccagcagcctgtctgccagcgtgggcgacagagtgaccatcacctgtcggagcagccagagcatcgtgcactccgtgggcaacaccttcctggaatggtatcagcagaagcccggcaaggcccccaagctgctgatctacaaggtgtccaacagattcagcggcgtgcccagcaggtttagcggctctggcagcggcaccgacttcaccctgaccatctctagcctccagcccgaggacttcgccacctactactgttttcaaggcagccagttcccctacaccttcggccagggaacaaaggtggaaatcaagcggctcgaggacctgaagaacgtgttcccacctgaggtggccgtgttcgagcctagcgaggccgagatcagccacacccagaaagccaccctcgtgtgcctggctaccggcttctaccccgaccatgtggaactgtcttggtgggtcaacggcaaagaggtgcacagcggcgtgtgtaccgacccccagccactgaaagaacagcccgccctgaacgacagccggtactgcctgagcagcagactgagagtgtccgccaccttctggcagaacccccggaaccacttcagatgccaggtgcagttctacggcctgagcgagaacgacgagtggacccaggacagagccaagcccgtgacccagatcgtgtctgccgaagcctggggcagagccgattgcgacgtgaagctggtggaaaagagcttcgagacagacaccaacctgaacttccagaacctgagcgtgatcggcttcagaatcctgctgctgaaagtggccggctttaacctgctgatgaccctgcggctgtggtccagcagggccaagcgatctggatctggagcaacaaacttctcactactcaaacaagcaggtgacgtggaggagaatcccgggcctactagtgccaccatggactggatttggcgcatccttttccttgtcggcgctgctaccggcgcccattccgggcccgaggtgcagctggttgaatctggcggaggactggttcaggctggcggatctctgagactgtcttgtgccgccagcggctctgtgttcagcggcaatgtgatgggctggtacagacaggcccctggcaaagaaagagagtgggttgccgccattgccagcggcggcagcatctactacagagactctgtgaagggcagattcaccatcagccgggacaacgccaagaacaccgtgtacctccagatgaacagcctgaagcctgaggacaccgccgtgtactactgcaactctcaccctcctacactgccctattggggcctgggaacccaagtgacagtgtcctctggatccggcggcggaggatctggcggaggcggatctgggggcggaggctctttcgaagaagtgcaactggtggaaagcggaggcggcctggtgcagcctggcggatctctgagactgagctgtgccgccagcggctacgagttcagccggtcctggatgaactgggtgcgccaggcccctggcaagggactggaatgggtgggaagaatctaccccggcgacggcgacaccaactacagcggcaagttcaagggccggttcaccatcagcgccgacaccagcaagaacaccgcctacctccagatgaacagcctgcgggccgaggataccgccgtgtactactgtgccagagatggcagctcctgggactggtacttcgacgtgtggggacagggaacccttgtgaccgtgtccagcacgcgtatccagaaccctgatcctgccgtgtaccagctgcgggatagcaagagcagcgacaagagcgtgtgtctgttcaccgacttcgacagccagaccaacgtgtcccagagcaaggactccgacgtgtacatcaccgataagtgcgtgctggacatgcggagcatggacttcaagagcaactccgccgtggcctggtccaacaagtccgatttcgcctgcgccaacgccttcaacaacagcattatccccgaggacacattcttcccaagccccgagagcagctgcggctttaccagcgagagctaccagcagggcgtgctgagcgccaccatcctgtacgagatcctgctgggcaaggccaccctgtacgccgtgctggtgtctgccctggtgctgatggctatggtcaagcggaaggacagccggggataa

SEQ ID NO: 34408 - DNA, 2280 bp, synthetic construct
  source 1..2280: mol_type = other DNA
atggccttaccagtgaccgccttgctcctgccgctggccttgctgctccacgccgccaggccgatccagatgacccagagccccagcagcctgtctgccagcgtgggcgacagagtgaccatcacctgtcggagcagccagagcatcgtgcactccgtgggcaacaccttcctggaatggtatcagcagaagcccggcaaggcccccaagctgctgatctacaaggtgtccaacagattcagcggcgtgcccagcaggtttagcggctctggcagcggcaccgacttcaccctgaccatctctagcctccagcccgaggacttcgccacctactactgttttcaaggcagccagttcccctacaccttcggccagggaacaaaggtggaaatcaagcggctcgaggacctgaagaacgtgttcccacctgaggtggccgtgttcgagcctagcgaggccgagatcagccacacccagaaagccaccctcgtgtgcctggctaccggcttctaccccgaccatgtggaactgtcttggtgggtcaacggcaaagaggtgcacagcggcgtgtgtaccgacccccagccactgaaagaacagcccgccctgaacgacagccggtactgcctgagcagcagactgagagtgtccgccaccttctggcagaacccccggaaccacttcagatgccaggtgcagttctacggcctgagcgagaacgacgagtggacccaggacagagccaagcccgtgacccagatcgtgtctgccgaagcctggggcagagccgattgcgacgtgaagctggtggaaaagagcttcgagacagacaccaacctgaacttccagaacctgagcgtgatcggcttcagaatcctgctgctgaaagtggccggctttaacctgctgatgaccctgcggctgtggtccagcagggccaagcgatctggatctggagcaacaaacttctcactactcaaacaagcaggtgacgtggaggagaatcccgggcctactagtgccaccatggactggatttggcgcatccttttccttgtcggcgctgctaccggcgcccattccgggcccgaagttcagctgctggaatctggcggaggactcgttcaacctggcggctctctgagactgagctgtgccgcttctggcttcagcttctctagctacgccctgagctgggttcgacaagctcccggaaagggccttgaatgggtgtccagcatcggcgagaatgacggcaccacagactatgccgatgccgtgaaaggccggtttaccatcagcagagacaattccaagaacacgctctatctgcaaatgaactccctgcgcgtggaagatacagccgtgtattattgcgtgaaggacggcatccactggggacagggaaccctggttacagtgtctagcggatccggcggcggaggatctggcggaggcggatctgggggcggaggctctttcgaagaagtgcaactggtggaaagcggaggcggcctggtgcagcctggcggatctctgagactgagctgtgccgccagcggctacgagttcagccggtcctggatgaactgggtgcgccaggcccctggcaagggactggaatgggtgggaagaatctaccccggcgacggcgacaccaactacagcggcaagttcaagggccggttcaccatcagcgccgacaccagcaagaacaccgcctacctccagatgaacagcctgcgggccgaggataccgccgtgtactactgtgccagagatggcagctcctgggactggtacttcgacgtgtggggacagggaacccttgtgaccgtgtccagcacgcgtatccagaaccctgatcctgccgtgtaccagctgcgggatagcaagagcagcgacaagagcgtgtgtctgttcaccgacttcgacagccagaccaacgtgtcccagagcaaggactccgacgtgtacatcaccgataagtgcgtgctggacatgcggagcatggacttcaagagcaactccgccgtggcctggtccaacaagtccgatttcgcctgcgccaacgccttcaacaacagcattatccccgaggacacattcttcccaagccccgagagcagctgcggctttaccagcgagagctaccagcagggcgtgctgagcgccaccatcctgtacgagatcctgctgggcaaggccaccctgtacgccgtgctggtgtctgccctggtgctgatggctatggtcaagcggaaggacagccggggataa

SEQ ID NO: 34409 - DNA, 3387 bp, synthetic construct
  source 1..3387: mol_type = other DNA
atgggacccagactgctgttttgggctctgctgtgtctgctcggcacaggacctgttgaagctggcgtgacacagagccccacacacctgattaagaccagaggccagcaggccacactgagatgcagccctatcagcggccacaccagcgtgtactggtatcagcaggctctcggactgggcctccagttcctgctttggtacgacgagggcgaagagagaaaccggggcaacttccctcctcggttttccggcagacagttccccaactacagcagcgagctgaacgtgaacgccctggaactggaagatagcgccctgtacctgtgtgcctcttctcttggtggacctcgcggactggctggactgagaggggatgagcagtttttcggccctggcaccagactgaccgtgctggaaggtaccggcggaggcggatctggcggcggagaattcatccagatgacccagagccccagcagcctgtctgccagcgtgggcgacagagtgaccatcacctgtcggagcagccagagcatcgtgcactccgtgggcaacaccttcctggaatggtatcagcagaagcccggcaaggcccccaagctgctgatctacaaggtgtccaacagattcagcggcgtgcccagcaggtttagcggctctggcagcggcaccgacttcaccctgaccatctctagcctccagcccgaggacttcgccacctactactgttttcaaggcagccagttcccctacaccttcggccagggaacaaaggtggaaatcaagcggctcgaggacctgaagaacgtgttcccacctgaggtggccgtgttcgagcctagcgaggccgagatcagccacacccagaaagccaccctcgtgtgcctggctaccggcttctaccccgaccatgtggaactgtcttggtgggtcaacggcaaagaggtgcacagcggcgtgtgtaccgacccccagccactgaaagaacagcccgccctgaacgacagccggtactgcctgagcagcagactgagagtgtccgccaccttctggcagaacccccggaaccacttcagatgccaggtgcagttctacggcctgagcgagaacgacgagtggacccaggacagagccaagcccgtgacccagatcgtgtctgccgaagcctggggcagagccgattgcgacgtgaagctggtggaaaagagcttcgagacagacaccaacctgaacttccagaacctgagcgtgatcggcttcagaatcctgctgctgaaagtggccggctttaacctgctgatgaccctgcggctgtggtccagcagggccaagcgatctggatctggagcaacaaacttctcactactcaaacaagcaggtgacgtggaggagaatcccgggcctactagtgccaccatggactggatttggcgcatccttttccttgtcggcgctgctaccggcgcccattccgggcccgaagtgcagctggttgaatctggcggaggactggttcaggctggcggatctctgagactgtcttgtgccgccagcggcagaacctttagcatgggctggtttagacaggcccctggcaaagagagagagttcgtcgccgccatcacatactctggcggcagcccttactacgccgactctgtgaagggcagattcaccatcagccgggacaacgccaagaacaccgtgtacctccagatgaacagcctgaagcctgaggacaccgccgtgtactactgcgccgccaatccaacatacggcagcgactggaacgccgagaattggggccagggaacccaagtgacagtgtctagcggatccggcggcggaggatctggcggaggcggatctgggggcggaggctctttcgaagaagtgcaactggtggaaagcggaggcggcctggtgcagcctggcggatctctgagactgagctgtgccgccagcggctacgagttcagccggtcctggatgaactgggtgcgccaggcccctggcaagggactggaatgggtgggaagaatctaccccggcgacggcgacaccaactacagcggcaagttcaagggccggttcaccatcagcgccgacaccagcaagaacaccgcctacctccagatgaacagcctgcgggccgaggataccgccgtgtactactgtgccagagatggcagctcctgggactggtacttcgacgtgtggggacagggaacccttgtgaccgtgtccagcacgcgtatccagaaccctgatcctgccgtgtaccagctgcgggatagcaagagcagcgacaagagcgtgtgtctgttcaccgacttcgacagccagaccaacgtgtcccagagcaaggactccgacgtgtacatcaccgataagtgcgtgctggacatgcggagcatggacttcaagagcaactccgccgtggcctggtccaacaagtccgatttcgcctgcgccaacgccttcaacaacagcattatccccgaggacacattcttcccaagccccgagagcagctgcggctttaccagcgagagctaccagcagggcgtgctgagcgccaccatcctgtacgagatcctgctgggcaaggccaccctgtacgccgtgctggtgtctgccctggtgctgatggctatggtcaagcggaaggacagccggggacgcgccaagagaagcggatctggcgtgaagcagaccctgaatttcgacctgctgaagctggctggcgacgtggaatccaacccaggcccttctagaggccatatgaccgagtacaagcccacggtgcgcctcgccacccgcgacgacgtccccagggccgtacgcaccctcgccgccgcgttcgccgactaccccgccacgcgccacaccgtcgatccggaccgccacatcgagcgggtcaccgagctgcaagaactcttcctcacgcgcgtcgggctcgacatcggcaaggtgtgggtcgcggacgacggcgccgcggtggcggtctggaccacgccggagagcgtcgaagcgggggcggtgttcgccgagatcggcccgcgcatggccgagttgagcggttcccggctggccgcgcagcaacagatggaaggcctcctggcgccgcaccggcccaaggagcccgcgtggttcctggccaccgtcggcgtctcgcccgaccaccagggcaagggtctgggcagcgccgtcgtgctccccggagtggaggcggccgagcgcgccggggtgcccgccttcctggagacctccgcgccccgcaacctccccttctacgagcggctcggcttcaccgtcaccgccgacgtcgaggtgcccgaaggaccgcgcacctggtgcatgacccgcaagcccggtgcctga

SEQ ID NO: 34410 - DNA, 3384 bp, synthetic construct
  source 1..3384: mol_type = other DNA
atgggacccagactgctgttttgggctctgctgtgtctgctcggcacaggacctgttgaagctggcgtgacacagagccccacacacctgattaagaccagaggccagcaggccacactgagatgcagccctatcagcggccacaccagcgtgtactggtatcagcaggctctcggactgggcctccagttcctgctttggtacgacgagggcgaagagagaaaccggggcaacttccctcctcggttttccggcagacagttccccaactacagcagcgagctgaacgtgaacgccctggaactggaagatagcgccctgtacctgtgtgccagctctctcggcggagatgaactgggagccgatggcaacgagcagttctttggccctggcaccagactgaccgtgctggaaggtaccggcggaggcggatctggcggcggaagcgaattcatccagatgacccagagccccagcagcctgtctgccagcgtgggcgacagagtgaccatcacctgtcggagcagccagagcatcgtgcactccgtgggcaacaccttcctggaatggtatcagcagaagcccggcaaggcccccaagctgctgatctacaaggtgtccaacagattcagcggcgtgcccagcaggtttagcggctctggcagcggcaccgacttcaccctgaccatctctagcctccagcccgaggacttcgccacctactactgttttcaaggcagccagttcccctacaccttcggccagggaacaaaggtggaaatcaagcggctcgaggacctgaagaacgtgttcccacctgaggtggccgtgttcgagcctagcgaggccgagatcagccacacccagaaagccaccctcgtgtgcctggctaccggcttctaccccgaccatgtggaactgtcttggtgggtcaacggcaaagaggtgcacagcggcgtgtgtaccgacccccagccactgaaagaacagcccgccctgaacgacagccggtactgcctgagcagcagactgagagtgtccgccaccttctggcagaacccccggaaccacttcagatgccaggtgcagttctacggcctgagcgagaacgacgagtggacccaggacagagccaagcccgtgacccagatcgtgtctgccgaagcctggggcagagccgattgcgacgtgaagctggtggaaaagagcttcgagacagacaccaacctgaacttccagaacctgagcgtgatcggcttcagaatcctgctgctgaaagtggccggctttaacctgctgatgaccctgcggctgtggtccagcagggccaagcgatctggatctggagcaacaaacttctcactactcaaacaagcaggtgacgtggaggagaatcccgggcctactagtgccaccatggactggatttggcgcatccttttccttgtcggcgctgctaccggcgcccattccgggcccgaagtgcagctggttgaatctggcggaggactggttcaggctggcggatctctgagactgtcttgtgccgccagcggcagaacctttagcatgggctggtttagacaggcccctggcaaagagagagagttcgtcgccgccatcacatactctggcggcagcccttactacgccgactctgtgaagggcagattcaccatcagccgggacaacgccaagaacaccgtgtacctccagatgaacagcctgaagcctgaggacaccgccgtgtactactgcgccgccaatccaacatacggcagcgactggaacgccgagaattggggccagggaacccaagtgacagtgtctagcggatccggcggcggaggatctggcggaggcggatctgggggcggaggctctttcgaagaagtgcaactggtggaaagcggaggcggcctggtgcagcctggcggatctctgagactgagctgtgccgccagcggctacgagttcagccggtcctggatgaactgggtgcgccaggcccctggcaagggactggaatgggtgggaagaatctaccccggcgacggcgacaccaactacagcggcaagttcaagggccggttcaccatcagcgccgacaccagcaagaacaccgcctacctccagatgaacagcctgcgggccgaggataccgccgtgtactactgtgccagagatggcagctcctgggactggtacttcgacgtgtggggacagggaacccttgtgaccgtgtccagcacgcgtatccagaaccctgatcctgccgtgtaccagctgcgggatagcaagagcagcgacaagagcgtgtgtctgttcaccgacttcgacagccagaccaacgtgtcccagagcaaggactccgacgtgtacatcaccgataagtgcgtgctggacatgcggagcatggacttcaagagcaactccgccgtggcctggtccaacaagtccgatttcgcctgcgccaacgccttcaacaacagcattatccccgaggacacattcttcccaagccccgagagcagctgcggctttaccagcgagagctaccagcagggcgtgctgagcgccaccatcctgtacgagatcctgctgggcaaggccaccctgtacgccgtgctggtgtctgccctggtgctgatggctatggtcaagcggaaggacagccggggacgcgccaagagaagcggatctggcgtgaagcagaccctgaatttcgacctgctgaagctggctggcgacgtggaatccaacccaggcccttctagaggccatatgaccgagtacaagcccacggtgcgcctcgccacccgcgacgacgtccccagggccgtacgcaccctcgccgccgcgttcgccgactaccccgccacgcgccacaccgtcgatccggaccgccacatcgagcgggtcaccgagctgcaagaactcttcctcacgcgcgtcgggctcgacatcggcaaggtgtgggtcgcggacgacggcgccgcggtggcggtctggaccacgccggagagcgtcgaagcgggggcggtgttcgccgagatcggcccgcgcatggccgagttgagcggttcccggctggccgcgcagcaacagatggaaggcctcctggcgccgcaccggcccaaggagcccgcgtggttcctggccaccgtcggcgtctcgcccgaccaccagggcaagggtctgggcagcgccgtcgtgctccccggagtggaggcggccgagcgcgccggggtgcccgccttcctggagacctccgcgccccgcaacctccccttctacgagcggctcggcttcaccgtcaccgccgacgtcgaggtgcccgaaggaccgcgcacctggtgcatgacccgcaagcccggtgcctga

SEQ ID NO: 34411 - DNA, 2859 bp, synthetic construct
  source 1..2859: mol_type = other DNA
atggccttaccagtgaccgccttgctcctgccgctggccttgctgctccacgccgccaggccgatccagatgacccagagccccagcagcctgtctgccagcgtgggcgacagagtgaccatcacctgtcggagcagccagagcatcgtgcactccgtgggcaacaccttcctggaatggtatcagcagaagcccggcaaggcccccaagctgctgatctacaaggtgtccaacagattcagcggcgtgcccagcaggtttagcggctctggcagcggcaccgacttcaccctgaccatctctagcctccagcccgaggacttcgccacctactactgttttcaaggcagccagttcccctacaccttcggccagggaacaaaggtggaaatcaagcggctcgaggacctgaagaacgtgttcccacctgaggtggccgtgttcgagcctagcgaggccgagatcagccacacccagaaagccaccctcgtgtgcctggctaccggcttctaccccgaccatgtggaactgtcttggtgggtcaacggcaaagaggtgcacagcggcgtgtgtaccgacccccagccactgaaagaacagcccgccctgaacgacagccggtactgcctgagcagcagactgagagtgtccgccaccttctggcagaacccccggaaccacttcagatgccaggtgcagttctacggcctgagcgagaacgacgagtggacccaggacagagccaagcccgtgacccagatcgtgtctgccgaagcctggggcagagccgattgcgacgtgaagctggtggaaaagagcttcgagacagacaccaacctgaacttccagaacctgagcgtgatcggcttcagaatcctgctgctgaaagtggccggctttaacctgctgatgaccctgcggctgtggtccagcagggccaagcgatctggatctggagcaacaaacttctcactactcaaacaagcaggtgacgtggaggagaatcccgggcctactagtgccaccatggactggatttggcgcatccttttccttgtcggcgctgctaccggcgcccattccgggcccatgggaagctggcttgagttctaccacagactcaacgccattgacagcaggctgtgggcacttggcggaagcgaagctgaactcgccgcttttgaaaaagaaattgccgctttcgagtccgagcttcaggcttacaaaggcaaagggaatcctgaggtcgagagcctgagagatcacgctgcccacattagagagtggttgcaggcataccggcacaatggatccggcggcggaggatctggcggaggcggatctgggggcggaggctctttcgaagaagtgcaactggtggaaagcggaggcggcctggtgcagcctggcggatctctgagactgagctgtgccgccagcggctacgagttcagccggtcctggatgaactgggtgcgccaggcccctggcaagggactggaatgggtgggaagaatctaccccggcgacggcgacaccaactacagcggcaagttcaagggccggttcaccatcagcgccgacaccagcaagaacaccgcctacctccagatgaacagcctgcgggccgaggataccgccgtgtactactgtgccagagatggcagctcctgggactggtacttcgacgtgtggggacagggaacccttgtgaccgtgtccagcacgcgtatccagaaccctgatcctgccgtgtaccagctgcgggatagcaagagcagcgacaagagcgtgtgtctgttcaccgacttcgacagccagaccaacgtgtcccagagcaaggactccgacgtgtacatcaccgataagtgcgtgctggacatgcggagcatggacttcaagagcaactccgccgtggcctggtccaacaagtccgatttcgcctgcgccaacgccttcaacaacagcattatccccgaggacacattcttcccaagccccgagagcagctgcggctttaccagcgagagctaccagcagggcgtgctgagcgccaccatcctgtacgagatcctgctgggcaaggccaccctgtacgccgtgctggtgtctgccctggtgctgatggctatggtcaagcggaaggacagccggggacgcgccaagagaagcggatctggcgtgaagcagaccctgaatttcgacctgctgaagctggctggcgacgtggaatccaacccaggcccttctagaggccatatgaccgagtacaagcccacggtgcgcctcgccacccgcgacgacgtccccagggccgtacgcaccctcgccgccgcgttcgccgactaccccgccacgcgccacaccgtcgatccggaccgccacatcgagcgggtcaccgagctgcaagaactcttcctcacgcgcgtcgggctcgacatcggcaaggtgtgggtcgcggacgacggcgccgcggtggcggtctggaccacgccggagagcgtcgaagcgggggcggtgttcgccgagatcggcccgcgcatggccgagttgagcggttcccggctggccgcgcagcaacagatggaaggcctcctggcgccgcaccggcccaaggagcccgcgtggttcctggccaccgtcggcgtctcgcccgaccaccagggcaagggtctgggcagcgccgtcgtgctccccggagtggaggcggccgagcgcgccggggtgcccgccttcctggagacctccgcgccccgcaacctccccttctacgagcggctcggcttcaccgtcaccgccgacgtcgaggtgcccgaaggaccgcgcacctggtgcatgacccgcaagcccggtgcctga

SEQ ID NO: 34412 - DNA, 2859 bp, synthetic construct
  source 1..2859: mol_type = other DNA
atggccttaccagtgaccgccttgctcctgccgctggccttgctgctccacgccgccaggccggcatgcatgggcagttggttcgagttctacgaccggctgaatgccatcgacgccagactgtgggctctcggaggatctgaagctgagctggccgccttcgagaaagagatcgccgcctttgagagcgagctgcaagcctacaaaggcaagggcaaccccgaggtggaaaacctgagagtgcacgccgctgccatcagagaatggctccaggcttacagacacaacggtaccggcggaggcggatctggcggcggaggtagcggtggcggaggatctgaattcatccagatgacccagagccccagcagcctgtctgccagcgtgggcgacagagtgaccatcacctgtcggagcagccagagcatcgtgcactccgtgggcaacaccttcctggaatggtatcagcagaagcccggcaaggcccccaagctgctgatctacaaggtgtccaacagattcagcggcgtgcccagcaggtttagcggctctggcagcggcaccgacttcaccctgaccatctctagcctccagcccgaggacttcgccacctactactgttttcaaggcagccagttcccctacaccttcggccagggaacaaaggtggaaatcaagcggctcgaggacctgaagaacgtgttcccacctgaggtggccgtgttcgagcctagcgaggccgagatcagccacacccagaaagccaccctcgtgtgcctggctaccggcttctaccccgaccatgtggaactgtcttggtgggtcaacggcaaagaggtgcacagcggcgtgtgtaccgacccccagccactgaaagaacagcccgccctgaacgacagccggtactgcctgagcagcagactgagagtgtccgccaccttctggcagaacccccggaaccacttcagatgccaggtgcagttctacggcctgagcgagaacgacgagtggacccaggacagagccaagcccgtgacccagatcgtgtctgccgaagcctggggcagagccgattgcgacgtgaagctggtggaaaagagcttcgagacagacaccaacctgaacttccagaacctgagcgtgatcggcttcagaatcctgctgctgaaagtggccggctttaacctgctgatgaccctgcggctgtggtccagcagggccaagcgatctggatctggagcaacaaacttctcactactcaaacaagcaggtgacgtggaggagaatcccgggcctactagtatggactggatttggcgcatccttttccttgtcggcgctgctaccggcgcgcattccttcgaagaagtgcaactggtggaaagcggaggcggcctggtgcagcctggcggatctctgagactgagctgtgccgccagcggctacgagttcagccggtcctggatgaactgggtgcgccaggcccctggcaagggactggaatgggtgggaagaatctaccccggcgacggcgacaccaactacagcggcaagttcaagggccggttcaccatcagcgccgacaccagcaagaacaccgcctacctccagatgaacagcctgcgggccgaggataccgccgtgtactactgtgccagagatggcagctcctgggactggtacttcgacgtgtggggacagggaacccttgtgaccgtgtccagcacgcgtatccagaaccctgatcctgccgtgtaccagctgcgggatagcaagagcagcgacaagagcgtgtgtctgttcaccgacttcgacagccagaccaacgtgtcccagagcaaggactccgacgtgtacatcaccgataagtgcgtgctggacatgcggagcatggacttcaagagcaactccgccgtggcctggtccaacaagtccgatttcgcctgcgccaacgccttcaacaacagcattatccccgaggacacattcttcccaagccccgagagcagctgcggctttaccagcgagagctaccagcagggcgtgctgagcgccaccatcctgtacgagatcctgctgggcaaggccaccctgtacgccgtgctggtgtctgccctggtgctgatggctatggtcaagcggaaggacagccggggacgcgccaagagaagcggatctggcgtgaagcagaccctgaatttcgacctgctgaagctggctggcgacgtggaatccaacccaggcccttctagaggccatatgaccgagtacaagcccacggtgcgcctcgccacccgcgacgacgtccccagggccgtacgcaccctcgccgccgcgttcgccgactaccccgccacgcgccacaccgtcgatccggaccgccacatcgagcgggtcaccgagctgcaagaactcttcctcacgcgcgtcgggctcgacatcggcaaggtgtgggtcgcggacgacggcgccgcggtggcggtctggaccacgccggagagcgtcgaagcgggggcggtgttcgccgagatcggcccgcgcatggccgagttgagcggttcccggctggccgcgcagcaacagatggaaggcctcctggcgccgcaccggcccaaggagcccgcgtggttcctggccaccgtcggcgtctcgcccgaccaccagggcaagggtctgggcagcgccgtcgtgctccccggagtggaggcggccgagcgcgccggggtgcccgccttcctggagacctccgcgccccgcaacctccccttctacgagcggctcggcttcaccgtcaccgccgacgtcgaggtgcccgaaggaccgcgcacctggtgcatgacccgcaagcccggtgcctga

SEQ ID NO: 34413 - DNA, 3210 bp, synthetic construct
  source 1..3210: mol_type = other DNA
atggccttaccagtgaccgccttgctcctgccgctggccttgctgctccacgccgccaggccggcatgcatggaccccgacctggaaatcagagccgccttcctgcggcagagaaacacagccctgagaacagaggtggccgagctggaacaagaggtgcagcggctggaaaacgaggtgtcccagtacgagacaagatacggccctctcggaggcggaaaaggtaccggcggaggcggatctggcggcggaggtagcggtggcggaggatctgaattcatccagatgacccagagccccagcagcctgtctgccagcgtgggcgacagagtgaccatcacctgtcggagcagccagagcatcgtgcactccgtgggcaacaccttcctggaatggtatcagcagaagcccggcaaggcccccaagctgctgatctacaaggtgtccaacagattcagcggcgtgcccagcaggtttagcggctctggcagcggcaccgacttcaccctgaccatctctagcctccagcccgaggacttcgccacctactactgttttcaaggcagccagttcccctacaccttcggccagggaacaaaggtggaaatcaagcggctcgaggacctgaagaacgtgttcccacctgaggtggccgtgttcgagcctagcgaggccgagatcagccacacccagaaagccaccctcgtgtgcctggctaccggcttctaccccgaccatgtggaactgtcttggtgggtcaacggcaaagaggtgcacagcggcgtgtgtaccgacccccagccactgaaagaacagcccgccctgaacgacagccggtactgcctgagcagcagactgagagtgtccgccaccttctggcagaacccccggaaccacttcagatgccaggtgcagttctacggcctgagcgagaacgacgagtggacccaggacagagccaagcccgtgacccagatcgtgtctgccgaagcctggggcagagccgattgcgacgtgaagctggtggaaaagagcttcgagacagacaccaacctgaacttccagaacctgagcgtgatcggcttcagaatcctgctgctgaaagtggccggctttaacctgctgatgaccctgcggctgtggtccagcagggccaagcgatctggatctggagcaacaaacttctcactactcaaacaagcaggtgacgtggaggagaatcccgggcctactagtgccaccatggactggatttggcgcatccttttccttgtcggcgctgctaccggcgcccattccgggcccgaagtgcagctggttgaatctggcggaggactggttcaggctggcggatctctgagactgtcttgtgccgccagcggcagaacctttagcatgggctggtttagacaggcccctggcaaagagagagagttcgtcgccgccatcacatactctggcggcagcccttactacgccgactctgtgaagggcagattcaccatcagccgggacaacgccaagaacaccgtgtacctccagatgaacagcctgaagcctgaggacaccgccgtgtactactgcgccgccaatccaacatacggcagcgactggaacgccgagaattggggccagggaacccaagtgacagtgtctagcggatccggcggcggaggatctggcggaggcggatctgggggcggaggctctttcgaagaagtgcaactggtggaaagcggaggcggcctggtgcagcctggcggatctctgagactgagctgtgccgccagcggctacgagttcagccggtcctggatgaactgggtgcgccaggcccctggcaagggactggaatgggtgggaagaatctaccccggcgacggcgacaccaactacagcggcaagttcaagggccggttcaccatcagcgccgacaccagcaagaacaccgcctacctccagatgaacagcctgcgggccgaggataccgccgtgtactactgtgccagagatggcagctcctgggactggtacttcgacgtgtggggacagggaacccttgtgaccgtgtccagcacgcgtatccagaaccctgatcctgccgtgtaccagctgcgggatagcaagagcagcgacaagagcgtgtgtctgttcaccgacttcgacagccagaccaacgtgtcccagagcaaggactccgacgtgtacatcaccgataagtgcgtgctggacatgcggagcatggacttcaagagcaactccgccgtggcctggtccaacaagtccgatttcgcctgcgccaacgccttcaacaacagcattatccccgaggacacattcttcccaagccccgagagcagctgcggctttaccagcgagagctaccagcagggcgtgctgagcgccaccatcctgtacgagatcctgctgggcaaggccaccctgtacgccgtgctggtgtctgccctggtgctgatggctatggtcaagcggaaggacagccggggacgcgccaagagaagcggatctggcgtgaagcagaccctgaatttcgacctgctgaagctggctggcgacgtggaatccaacccaggcccttctagaggccatatgaccgagtacaagcccacggtgcgcctcgccacccgcgacgacgtccccagggccgtacgcaccctcgccgccgcgttcgccgactaccccgccacgcgccacaccgtcgatccggaccgccacatcgagcgggtcaccgagctgcaagaactcttcctcacgcgcgtcgggctcgacatcggcaaggtgtgggtcgcggacgacggcgccgcggtggcggtctggaccacgccggagagcgtcgaagcgggggcggtgttcgccgagatcggcccgcgcatggccgagttgagcggttcccggctggccgcgcagcaacagatggaaggcctcctggcgccgcaccggcccaaggagcccgcgtggttcctggccaccgtcggcgtctcgcccgaccaccagggcaagggtctgggcagcgccgtcgtgctccccggagtggaggcggccgagcgcgccggggtgcccgccttcctggagacctccgcgccccgcaacctccccttctacgagcggctcggcttcaccgtcaccgccgacgtcgaggtgcccgaaggaccgcgcacctggtgcatgacccgcaagcccggtgcctga

SEQ ID NO: 34414 - DNA, 2859 bp, synthetic construct
  source 1..2859: mol_type = other DNA
atggccttaccagtgaccgccttgctcctgccgctggccttgctgctccacgccgccaggccgatccagatgacccagagccccagcagcctgtctgccagcgtgggcgacagagtgaccatcacctgtcggagcagccagagcatcgtgcactccgtgggcaacaccttcctggaatggtatcagcagaagcccggcaaggcccccaagctgctgatctacaaggtgtccaacagattcagcggcgtgcccagcaggtttagcggctctggcagcggcaccgacttcaccctgaccatctctagcctccagcccgaggacttcgccacctactactgttttcaaggcagccagttcccctacaccttcggccagggaacaaaggtggaaatcaagcggctcgaggacctgaagaacgtgttcccacctgaggtggccgtgttcgagcctagcgaggccgagatcagccacacccagaaagccaccctcgtgtgcctggctaccggcttctaccccgaccatgtggaactgtcttggtgggtcaacggcaaagaggtgcacagcggcgtgtgtaccgacccccagccactgaaagaacagcccgccctgaacgacagccggtactgcctgagcagcagactgagagtgtccgccaccttctggcagaacccccggaaccacttcagatgccaggtgcagttctacggcctgagcgagaacgacgagtggacccaggacagagccaagcccgtgacccagatcgtgtctgccgaagcctggggcagagccgattgcgacgtgaagctggtggaaaagagcttcgagacagacaccaacctgaacttccagaacctgagcgtgatcggcttcagaatcctgctgctgaaagtggccggctttaacctgctgatgaccctgcggctgtggtccagcagggccaagcgatctggatctggagcaacaaacttctcactactcaaacaagcaggtgacgtggaggagaatcccgggcctactagtgccaccatggactggatttggcgcatccttttccttgtcggcgctgctaccggcgcccattccgggcccatgggatcttggagcgagttttacgatcggctgcacgccattcaccaccggctgtatgctctcggaggaagcgaagctgagctggccgcttttgaaaaagaaattgccgctttcgagtccgagcttcaggcttacaaaggcaaagggaatcctgaggtcgaggccctgagagataccgccgccttcatcagaacccggttgcaggcataccggcacaacggatccggcggcggaggatctggcggaggcggatctgggggcggaggctctttcgaagaagtgcaactggtggaaagcggaggcggcctggtgcagcctggcggatctctgagactgagctgtgccgccagcggctacgagttcagccggtcctggatgaactgggtgcgccaggcccctggcaagggactggaatgggtgggaagaatctaccccggcgacggcgacaccaactacagcggcaagttcaagggccggttcaccatcagcgccgacaccagcaagaacaccgcctacctccagatgaacagcctgcgggccgaggataccgccgtgtactactgtgccagagatggcagctcctgggactggtacttcgacgtgtggggacagggaacccttgtgaccgtgtccagcacgcgtatccagaaccctgatcctgccgtgtaccagctgcgggatagcaagagcagcgacaagagcgtgtgtctgttcaccgacttcgacagccagaccaacgtgtcccagagcaaggactccgacgtgtacatcaccgataagtgcgtgctggacatgcggagcatggacttcaagagcaactccgccgtggcctggtccaacaagtccgatttcgcctgcgccaacgccttcaacaacagcattatccccgaggacacattcttcccaagccccgagagcagctgcggctttaccagcgagagctaccagcagggcgtgctgagcgccaccatcctgtacgagatcctgctgggcaaggccaccctgtacgccgtgctggtgtctgccctggtgctgatggctatggtcaagcggaaggacagccggggacgcgccaagagaagcggatctggcgtgaagcagaccctgaatttcgacctgctgaagctggctggcgacgtggaatccaacccaggcccttctagaggccatatgaccgagtacaagcccacggtgcgcctcgccacccgcgacgacgtccccagggccgtacgcaccctcgccgccgcgttcgccgactaccccgccacgcgccacaccgtcgatccggaccgccacatcgagcgggtcaccgagctgcaagaactcttcctcacgcgcgtcgggctcgacatcggcaaggtgtgggtcgcggacgacggcgccgcggtggcggtctggaccacgccggagagcgtcgaagcgggggcggtgttcgccgagatcggcccgcgcatggccgagttgagcggttcccggctggccgcgcagcaacagatggaaggcctcctggcgccgcaccggcccaaggagcccgcgtggttcctggccaccgtcggcgtctcgcccgaccaccagggcaagggtctgggcagcgccgtcgtgctccccggagtggaggcggccgagcgcgccggggtgcccgccttcctggagacctccgcgccccgcaacctccccttctacgagcggctcggcttcaccgtcaccgccgacgtcgaggtgcccgaaggaccgcgcacctggtgcatgacccgcaagcccggtgcctga

SEQ ID NO: 34415 - DNA, 3489 bp, synthetic construct
  source 1..3489: mol_type = other DNA
atggccttaccagtgaccgccttgctcctgccgctggccttgctgctccacgccgccaggccgatccagatgacccagagccccagcagcctgtctgccagcgtgggcgacagagtgaccatcacctgtcggagcagccagagcatcgtgcactccgtgggcaacaccttcctggaatggtatcagcagaagcccggcaaggcccccaagctgctgatctacaaggtgtccaacagattcagcggcgtgcccagcaggtttagcggctctggcagcggcaccgacttcaccctgaccatctctagcctccagcccgaggacttcgccacctactactgttttcaaggcagccagttcccctacaccttcggccagggaacaaaggtggaaatcaagcggctcgaggacctgaagaacgtgttcccacctgaggtggccgtgttcgagcctagcgaggccgagatcagccacacccagaaagccaccctcgtgtgcctggctaccggcttctaccccgaccatgtggaactgtcttggtgggtcaacggcaaagaggtgcacagcggcgtgtgtaccgacccccagccactgaaagaacagcccgccctgaacgacagccggtactgcctgagcagcagactgagagtgtccgccaccttctggcagaacccccggaaccacttcagatgccaggtgcagttctacggcctgagcgagaacgacgagtggacccaggacagagccaagcccgtgacccagatcgtgtctgccgaagcctggggcagagccgattgcgacgtgaagctggtggaaaagagcttcgagacagacaccaacctgaacttccagaacctgagcgtgatcggcttcagaatcctgctgctgaaagtggccggctttaacctgctgatgaccctgcggctgtggtccagcagggccaagcgatctggatctggagcaacaaacttctcactactcaaacaagcaggtgacgtggaggagaatcccgggcctactagtaccatggactggatttggcgcatccttttccttgtcggcgctgctaccggcgcccattccctgttcaatcaagaggtgcagatccctctgaccgagagctactgtggcccctgtcctaagaactggatctgctacaagaacaactgctaccagttcttcgacgagagcaagaattggtacgagagccaggccagctgcatgagccagaatgccagcctgctgaaggtgtacagcaaagaggaccaggacctgctgaaactggtcaagagcgcccactggatgggccttgtgcacatccccaccaatggctcttggcagtgggaggacggcagcattctgagccctaacctgctgaccatcatcgagatgcagaagggcgactgcgccctgtacgccagcagctttaagggctacatcgagaattgcagcaccccgaacacctacatctgtatgcagagaaccgtttctggcggaggcggctctggaggaggcggaagtggcggcggaggcgacctctttaatcaagaagtccagattccactcaccgaatcctactgcggaccttgtccaaaaaattggatttgttataagaacaactgttatcaattctttgatgagtctaaaaattggtatgagtcccaggcttcctgcatgtctcagaacgcttctctgctgaaagtctactctaaagaagatcaggatctcctgaagctcgtcaagtctgcccattggatggggctcgtccacattcctaccaacggaagctggcaatgggaagatggctccatcctgtctccaaatctgctcacgattattgaaatgcagaaaggggattgtgctctctacgccagctccttcaagggatatattgagaactgtagcacgcccaatacttatatctgtatgcaacggaccgtgggatccggcggcggaggatctggcggaggcggatctgggggcggaggctctttcgaagaagtgcaactggtggaaagcggaggcggcctggtgcagcctggcggatctctgagactgagctgtgccgccagcggctacgagttcagccggtcctggatgaactgggtgcgccaggcccctggcaagggactggaatgggtgggaagaatctaccccggcgacggcgacaccaactacagcggcaagttcaagggccggttcaccatcagcgccgacaccagcaagaacaccgcctacctccagatgaacagcctgcgggccgaggataccgccgtgtactactgtgccagagatggcagctcctgggactggtacttcgacgtgtggggacagggaacccttgtgaccgtgtccagcacgcgtatccagaaccctgatcctgccgtgtaccagctgcgggatagcaagagcagcgacaagagcgtgtgtctgttcaccgacttcgacagccagaccaacgtgtcccagagcaaggactccgacgtgtacatcaccgataagtgcgtgctggacatgcggagcatggacttcaagagcaactccgccgtggcctggtccaacaagtccgatttcgcctgcgccaacgccttcaacaacagcattatccccgaggacacattcttcccaagccccgagagcagctgcggctttaccagcgagagctaccagcagggcgtgctgagcgccaccatcctgtacgagatcctgctgggcaaggccaccctgtacgccgtgctggtgtctgccctggtgctgatggctatggtcaagcggaaggacagccggggacgcgccaagagaagcggatctggcgtgaagcagaccctgaatttcgacctgctgaagctggctggcgacgtggaatccaacccaggcccttctagaggccatatgaccgagtacaagcccacggtgcgcctcgccacccgcgacgacgtccccagggccgtacgcaccctcgccgccgcgttcgccgactaccccgccacgcgccacaccgtcgatccggaccgccacatcgagcgggtcaccgagctgcaagaactcttcctcacgcgcgtcgggctcgacatcggcaaggtgtgggtcgcggacgacggcgccgcggtggcggtctggaccacgccggagagcgtcgaagcgggggcggtgttcgccgagatcggcccgcgcatggccgagttgagcggttcccggctggccgcgcagcaacagatggaaggcctcctggcgccgcaccggcccaaggagcccgcgtggttcctggccaccgtcggcgtctcgcccgaccaccagggcaagggtctgggcagcgccgtcgtgctccccggagtggaggcggccgagcgcgccggggtgcccgccttcctggagacctccgcgccccgcaacctccccttctacgagcggctcggcttcaccgtcaccgccgacgtcgaggtgcccgaaggaccgcgcacctggtgcatgacccgcaagcccggtgcctga

SEQ ID NO: 34416 - DNA, 1875 bp, synthetic construct
  source 1..1875: mol_type = other DNA
atggccttaccagtgaccgccttgctcctgccgctggccttgctgctccacgccgccaggccgatccagatgacccagagccccagcagcctgtctgccagcgtgggcgacagagtgaccatcacctgtcggagcagccagagcatcgtgcactccgtgggcaacaccttcctggaatggtatcagcagaagcccggcaaggcccccaagctgctgatctacaaggtgtccaacagattcagcggcgtgcccagcaggtttagcggctctggcagcggcaccgacttcaccctgaccatctctagcctccagcccgaggacttcgccacctactactgttttcaaggcagccagttcccctacaccttcggccagggaacaaaggtggaaatcaagcggctcgaggacctgaagaacgtgttcccacctgaggtggccgtgttcgagcctagcgaggccgagatcagccacacccagaaagccaccctcgtgtgcctggctaccggcttctaccccgaccatgtggaactgtcttggtgggtcaacggcaaagaggtgcacagcggcgtgtgtaccgacccccagccactgaaagaacagcccgccctgaacgacagccggtactgcctgagcagcagactgagagtgtccgccaccttctggcagaacccccggaaccacttcagatgccaggtgcagttctacggcctgagcgagaacgacgagtggacccaggacagagccaagcccgtgacccagatcgtgtctgccgaagcctggggcagagccgattgcggctttaccagcgagagctaccagcagggcgtgctgagcgccaccaacctgagcgtgatcggcttcagaatcctgctgctgaaagtggccggctttaacctgctgatgaccctgcggctgtggtccagcagggccaagcgatctggatctggagcaacaaacttctcactactcaaacaagcaggtgacgtggaggagaatcccgggcctactagtatggactggatttggcgcatccttttccttgtcggcgctgctaccggcgcgcattccttcgaagaagtgcaactggtggaaagcggaggcggcctggtgcagcctggcggatctctgagactgagctgtgccgccagcggctacgagttcagccggtcctggatgaactgggtgcgccaggcccctggcaagggactggaatgggtgggaagaatctaccccggcgacggcgacaccaactacagcggcaagttcaagggccggttcaccatcagcgccgacaccagcaagaacaccgcctacctccagatgaacagcctgcgggccgaggataccgccgtgtactactgtgccagagatggcagctcctgggactggtacttcgacgtgtggggacagggaacccttgtgaccgtgtccagcacgcgtatccagaaccctgatcctgccgtgtaccagctgcgggatagcaagagcagcgacaagagcgtgtgtctgttcaccgacttcgacagccagaccaacgtgtcccagagcaaggactccgacgtgtacatcaccgataagtgcgtgctggacatgcggagcatggacttcaagagcaactccgccgtggcctggtccaacaagtccgatttcgcctgcgccaacgccttcaacaacagcattatccccgaggacacattcttcccaagccccgagagcagctgcgacgtgaagctggtggaaaagagcttcgagacagacaccaacctgaacttccagatcctgtacgagatcctgctgggcaaggccaccctgtacgccgtgctggtgtctgccctggtgctgatggctatggtcaagcggaaggacagccgggga

SEQ ID NO: 34417 - DNA, 1887 bp, synthetic construct
  source 1..1887: mol_type = other DNA
atggccttaccagtgaccgccttgctcctgccgctggccttgctgctccacgccgccaggccgatccagatgacccagagccccagcagcctgtctgccagcgtgggcgacagagtgaccatcacctgtcggagcagccagagcatcgtgcactccgtgggcaacaccttcctggaatggtatcagcagaagcccggcaaggcccccaagctgctgatctacaaggtgtccaacagattcagcggcgtgcccagcaggtttagcggctctggcagcggcaccgacttcaccctgaccatctctagcctccagcccgaggacttcgccacctactactgttttcaaggcagccagttcccctacaccttcggccagggaacaaaggtggaaatcaagcggctcgagatccagaaccctgatcctgccgtgtaccagctgcgggatagcaagagcagcgacaagagcgtgtgtctgttcaccgacttcgacagccagaccaacgtgtcccagagcaaggactccgacgtgtacatcaccgataagtgcgtgctggacatgcggagcatggacttcaagagcaactccgccgtggcctggtccaacaagtccgatttcgcctgcgccaacgccttcaacaacagcattatccccgaggacacattcttcccaagccccgagagcagctgcgacgtgaagctggtggaaaagagcttcgagacagacaccaacctgaacttccagatcctgtacgagatcctgctgggcaaggccaccctgtacgccgtgctggtgtctgccctggtgctgatggctatggtcaagcggaaggacagccggggacgcgccaagagaagcggatctggcgtgaagcagaccctgaatttcgacctgctgaagctggctggcgacgtggaatccaacccaggccctactagtatggactggatttggcgcatccttttccttgtcggcgctgctaccggcgcgcattccttcgaagaagtgcaactggtggaaagcggaggcggcctggtgcagcctggcggatctctgagactgagctgtgccgccagcggctacgagttcagccggtcctggatgaactgggtgcgccaggcccctggcaagggactggaatgggtgggaagaatctaccccggcgacggcgacaccaactacagcggcaagttcaagggccggttcaccatcagcgccgacaccagcaagaacaccgcctacctccagatgaacagcctgcgggccgaggataccgccgtgtactactgtgccagagatggcagctcctgggactggtacttcgacgtgtggggacagggaacccttgtgaccgtgtccagcacgcgtgaggacctgaagaacgtgttcccacctgaggtggccgtgttcgagcctagcgaggccgagatcagccacacccagaaagccaccctcgtgtgcctggctaccggcttctaccccgaccatgtggaactgtcttggtgggtcaacggcaaagaggtgcacagcggcgtgtgtaccgacccccagccactgaaagaacagcccgccctgaacgacagccggtactgcctgagcagcagactgagagtgtccgccaccttctggcagaacccccggaaccacttcagatgccaggtgcagttctacggcctgagcgagaacgacgagtggacccaggacagagccaagcccgtgacccagatcgtgtctgccgaagcctggggcagagccgattgcggctttaccagcgagagctaccagcagggcgtgctgagcgccaccaacctgagcgtgatcggcttcagaatcctgctgctgaaagtggccggctttaacctgctgatgaccctgcggctgtggtccagc

SEQ ID NO: 34418 - DNA, 2280 bp, synthetic construct
  source 1..2280: mol_type = other DNA
atggccttaccagtgaccgccttgctcctgccgctggccttgctgctccacgccgccaggccggaagtgcagctggttgaatctggcggaggactggttcagcctggcggatctctgagactgtcttgtgccgccagcggcttcagcttcagcgacttttggatgagctgggtccgacaggcccctggcaaaggacttgaatgggtcgccacaatcagccaggccggcagcgagaaggactacgtggactctgtgaagggcagattcaccatcagccgggacaacgccaagaagtccctgtacctccagatgaacagcctgagagccgaggacaccgccgtgtactattgtgcctctggcgtgtacagcttcgactacagaggccagggcaccctggtcacagtctcttctggtaccggcggaggcggatctggcggcggaggtagcggtggcggaggatctgaattcatccagatgacccagagccccagcagcctgtctgccagcgtgggcgacagagtgaccatcacctgtcggagcagccagagcatcgtgcactccgtgggcaacaccttcctggaatggtatcagcagaagcccggcaaggcccccaagctgctgatctacaaggtgtccaacagattcagcggcgtgcccagcaggtttagcggctctggcagcggcaccgacttcaccctgaccatctctagcctccagcccgaggacttcgccacctactactgttttcaaggcagccagttcccctacaccttcggccagggaacaaaggtggaaatcaagcggctcgaggacctgaagaacgtgttcccacctgaggtggccgtgttcgagcctagcgaggccgagatcagccacacccagaaagccaccctcgtgtgcctggctaccggcttctaccccgaccatgtggaactgtcttggtgggtcaacggcaaagaggtgcacagcggcgtgtgtaccgacccccagccactgaaagaacagcccgccctgaacgacagccggtactgcctgagcagcagactgagagtgtccgccaccttctggcagaacccccggaaccacttcagatgccaggtgcagttctacggcctgagcgagaacgacgagtggacccaggacagagccaagcccgtgacccagatcgtgtctgccgaagcctggggcagagccgattgcggctttaccagcgagagctaccagcagggcgtgctgagcgccaccaacctgagcgtgatcggcttcagaatcctgctgctgaaagtggccggctttaacctgctgatgaccctgcggctgtggtccagcagggccaagcgatctggatctggagcaacaaacttctcactactcaaacaagcaggtgacgtggaggagaatcccgggcctactagtatggactggatttggcgcatccttttccttgtcggcgctgctaccggcgcgcattccttcgaagaagtgcaactggtggaaagcggaggcggcctggtgcagcctggcggatctctgagactgagctgtgccgccagcggctacgagttcagccggtcctggatgaactgggtgcgccaggcccctggcaagggactggaatgggtgggaagaatctaccccggcgacggcgacaccaactacagcggcaagttcaagggccggttcaccatcagcgccgacaccagcaagaacaccgcctacctccagatgaacagcctgcgggccgaggataccgccgtgtactactgtgccagagatggcagctcctgggactggtacttcgacgtgtggggacagggaacccttgtgaccgtgtccagcacgcgtatccagaaccctgatcctgccgtgtaccagctgcgggatagcaagagcagcgacaagagcgtgtgtctgttcaccgacttcgacagccagaccaacgtgtcccagagcaaggactccgacgtgtacatcaccgataagtgcgtgctggacatgcggagcatggacttcaagagcaactccgccgtggcctggtccaacaagtccgatttcgcctgcgccaacgccttcaacaacagcattatccccgaggacacattcttcccaagccccgagagcagctgcgacgtgaagctggtggaaaagagcttcgagacagacaccaacctgaacttccagatcctgtacgagatcctgctgggcaaggccaccctgtacgccgtgctggtgtctgccctggtgctgatggctatggtcaagcggaaggacagccgggga

SEQ ID NO: 34419 - DNA, 2292 bp, synthetic construct
  source 1..2292: mol_type = other DNA
atggccttaccagtgaccgccttgctcctgccgctggccttgctgctccacgccgccaggccggaagtgcagctggttgaatctggcggaggactggttcagcctggcggatctctgagactgtcttgtgccgccagcggcttcagcttcagcgacttttggatgagctgggtccgacaggcccctggcaaaggacttgaatgggtcgccacaatcagccaggccggcagcgagaaggactacgtggactctgtgaagggcagattcaccatcagccgggacaacgccaagaagtccctgtacctccagatgaacagcctgagagccgaggacaccgccgtgtactattgtgcctctggcgtgtacagcttcgactacagaggccagggcaccctggtcacagtctcttctggtaccggcggaggcggatctggcggcggaggtagcggtggcggaggatctgaattcatccagatgacccagagccccagcagcctgtctgccagcgtgggcgacagagtgaccatcacctgtcggagcagccagagcatcgtgcactccgtgggcaacaccttcctggaatggtatcagcagaagcccggcaaggcccccaagctgctgatctacaaggtgtccaacagattcagcggcgtgcccagcaggtttagcggctctggcagcggcaccgacttcaccctgaccatctctagcctccagcccgaggacttcgccacctactactgttttcaaggcagccagttcccctacaccttcggccagggaacaaaggtggaaatcaagcggctcgagatccagaaccctgatcctgccgtgtaccagctgcgggatagcaagagcagcgacaagagcgtgtgtctgttcaccgacttcgacagccagaccaacgtgtcccagagcaaggactccgacgtgtacatcaccgataagtgcgtgctggacatgcggagcatggacttcaagagcaactccgccgtggcctggtccaacaagtccgatttcgcctgcgccaacgccttcaacaacagcattatccccgaggacacattcttcccaagccccgagagcagctgcgacgtgaagctggtggaaaagagcttcgagacagacaccaacctgaacttccagatcctgtacgagatcctgctgggcaaggccaccctgtacgccgtgctggtgtctgccctggtgctgatggctatggtcaagcggaaggacagccggggacgcgccaagagaagcggatctggcgtgaagcagaccctgaatttcgacctgctgaagctggctggcgacgtggaatccaacccaggccctactagtatggactggatttggcgcatccttttccttgtcggcgctgctaccggcgcgcattccttcgaagaagtgcaactggtggaaagcggaggcggcctggtgcagcctggcggatctctgagactgagctgtgccgccagcggctacgagttcagccggtcctggatgaactgggtgcgccaggcccctggcaagggactggaatgggtgggaagaatctaccccggcgacggcgacaccaactacagcggcaagttcaagggccggttcaccatcagcgccgacaccagcaagaacaccgcctacctccagatgaacagcctgcgggccgaggataccgccgtgtactactgtgccagagatggcagctcctgggactggtacttcgacgtgtggggacagggaacccttgtgaccgtgtccagcacgcgtgaggacctgaagaacgtgttcccacctgaggtggccgtgttcgagcctagcgaggccgagatcagccacacccagaaagccaccctcgtgtgcctggctaccggcttctaccccgaccatgtggaactgtcttggtgggtcaacggcaaagaggtgcacagcggcgtgtgtaccgacccccagccactgaaagaacagcccgccctgaacgacagccggtactgcctgagcagcagactgagagtgtccgccaccttctggcagaacccccggaaccacttcagatgccaggtgcagttctacggcctgagcgagaacgacgagtggacccaggacagagccaagcccgtgacccagatcgtgtctgccgaagcctggggcagagccgattgcggctttaccagcgagagctaccagcagggcgtgctgagcgccaccaacctgagcgtgatcggcttcagaatcctgctgctgaaagtggccggctttaacctgctgatgaccctgcggctgtggtccagc

SEQ ID NO: 34420 - DNA, 2691 bp, synthetic construct
  source 1..2691: mol_type = other DNA
atggccttaccagtgaccgccttgctcctgccgctggccttgctgctccacgccgccaggccggaagtgcagctggttgaatctggcggaggactggttcagcctggcggatctctgagactgtcttgtgccgccagcggcttcagcttcagcgacttttggatgagctgggtccgacaggcccctggcaaaggacttgaatgggtcgccacaatcagccaggccggcagcgagaaggactacgtggactctgtgaagggcagattcaccatcagccgggacaacgccaagaagtccctgtacctccagatgaacagcctgagagccgaggacaccgccgtgtactattgtgcctctggcgtgtacagcttcgactacagaggccagggcaccctggtcacagtctcttctggtaccggcggaggcggatctggcggcggaggtagcggtggcggaggatctgaattcatccagatgacccagagccccagcagcctgtctgccagcgtgggcgacagagtgaccatcacctgtcggagcagccagagcatcgtgcactccgtgggcaacaccttcctggaatggtatcagcagaagcccggcaaggcccccaagctgctgatctacaaggtgtccaacagattcagcggcgtgcccagcaggtttagcggctctggcagcggcaccgacttcaccctgaccatctctagcctccagcccgaggacttcgccacctactactgttttcaaggcagccagttcccctacaccttcggccagggaacaaaggtggaaatcaagcggctcgaggacctgaagaacgtgttcccacctgaggtggccgtgttcgagcctagcgaggccgagatcagccacacccagaaagccaccctcgtgtgcctggctaccggcttctaccccgaccatgtggaactgtcttggtgggtcaacggcaaagaggtgcacagcggcgtgtgtaccgacccccagccactgaaagaacagcccgccctgaacgacagccggtactgcctgagcagcagactgagagtgtccgccaccttctggcagaacccccggaaccacttcagatgccaggtgcagttctacggcctgagcgagaacgacgagtggacccaggacagagccaagcccgtgacccagatcgtgtctgccgaagcctggggcagagccgattgcggctttaccagcgagagctaccagcagggcgtgctgagcgccaccaacctgagcgtgatcggcttcagaatcctgctgctgaaagtggccggctttaacctgctgatgaccctgcggctgtggtccagcagggccaagcgatctggatctggagcaacaaacttctcactactcaaacaagcaggtgacgtggaggagaatcccgggcctactagtatggactggatttggcgcatccttttccttgtcggcgctgctaccggcgcgcattccgggccccagctccagctgcaagagtctggacctggcctggtcaagcctagcgagacactgagcctgacctgtaccgtgtccggcgatagcatcagcagcggcgattactactggggctggatcagacagcctcctggcaaaggactggaatggatcggccacatctactacagcggcgtgacctactacaaccccagcctgaagtccagagtgaccatcagcgtggacaccagccggaaccagttctccctgaagctgtctagcgtgacagccgccgataccgccgtgtactactgcaccagagaggacagcagcaactggcggagtagaggccagggaacactggtcacagttagctctggatccggcggaggcggaagtggaggcggaggatctggcggcggaggctctttcgaagaagtgcaactggtggaaagcggaggcggcctggtgcagcctggcggatctctgagactgagctgtgccgccagcggctacgagttcagccggtcctggatgaactgggtgcgccaggcccctggcaagggactggaatgggtgggaagaatctaccccggcgacggcgacaccaactacagcggcaagttcaagggccggttcaccatcagcgccgacaccagcaagaacaccgcctacctccagatgaacagcctgcgggccgaggataccgccgtgtactactgtgccagagatggcagctcctgggactggtacttcgacgtgtggggacagggaacccttgtgaccgtgtccagcacgcgtatccagaaccctgatcctgccgtgtaccagctgcgggatagcaagagcagcgacaagagcgtgtgtctgttcaccgacttcgacagccagaccaacgtgtcccagagcaaggactccgacgtgtacatcaccgataagtgcgtgctggacatgcggagcatggacttcaagagcaactccgccgtggcctggtccaacaagtccgatttcgcctgcgccaacgccttcaacaacagcattatccccgaggacacattcttcccaagccccgagagcagctgcgacgtgaagctggtggaaaagagcttcgagacagacaccaacctgaacttccagatcctgtacgagatcctgctgggcaaggccaccctgtacgccgtgctggtgtctgccctggtgctgatggctatggtcaagcggaaggacagccgggga

SEQ ID NO: 34421 - DNA, 2703 bp, synthetic construct
  source 1..2703: mol_type = other DNA
atggccttaccagtgaccgccttgctcctgccgctggccttgctgctccacgccgccaggccggaagtgcagctggttgaatctggcggaggactggttcagcctggcggatctctgagactgtcttgtgccgccagcggcttcagcttcagcgacttttggatgagctgggtccgacaggcccctggcaaaggacttgaatgggtcgccacaatcagccaggccggcagcgagaaggactacgtggactctgtgaagggcagattcaccatcagccgggacaacgccaagaagtccctgtacctccagatgaacagcctgagagccgaggacaccgccgtgtactattgtgcctctggcgtgtacagcttcgactacagaggccagggcaccctggtcacagtctcttctggtaccggcggaggcggatctggcggcggaggtagcggtggcggaggatctgaattcatccagatgacccagagccccagcagcctgtctgccagcgtgggcgacagagtgaccatcacctgtcggagcagccagagcatcgtgcactccgtgggcaacaccttcctggaatggtatcagcagaagcccggcaaggcccccaagctgctgatctacaaggtgtccaacagattcagcggcgtgcccagcaggtttagcggctctggcagcggcaccgacttcaccctgaccatctctagcctccagcccgaggacttcgccacctactactgttttcaaggcagccagttcccctacaccttcggccagggaacaaaggtggaaatcaagcggctcgagatccagaaccctgatcctgccgtgtaccagctgcgggatagcaagagcagcgacaagagcgtgtgtctgttcaccgacttcgacagccagaccaacgtgtcccagagcaaggactccgacgtgtacatcaccgataagtgcgtgctggacatgcggagcatggacttcaagagcaactccgccgtggcctggtccaacaagtccgatttcgcctgcgccaacgccttcaacaacagcattatccccgaggacacattcttcccaagccccgagagcagctgcgacgtgaagctggtggaaaagagcttcgagacagacaccaacctgaacttccagatcctgtacgagatcctgctgggcaaggccaccctgtacgccgtgctggtgtctgccctggtgctgatggctatggtcaagcggaaggacagccggggacgcgccaagagaagcggatctggcgtgaagcagaccctgaatttcgacctgctgaagctggctggcgacgtggaatccaacccaggccctactagtatggactggatttggcgcatccttttccttgtcggcgctgctaccggcgcgcattccgggccccagctccagctgcaagagtctggacctggcctggtcaagcctagcgagacactgagcctgacctgtaccgtgtccggcgatagcatcagcagcggcgattactactggggctggatcagacagcctcctggcaaaggactggaatggatcggccacatctactacagcggcgtgacctactacaaccccagcctgaagtccagagtgaccatcagcgtggacaccagccggaaccagttctccctgaagctgtctagcgtgacagccgccgataccgccgtgtactactgcaccagagaggacagcagcaactggcggagtagaggccagggaacactggtcacagttagctctggatccggcggaggcggaagtggaggcggaggatctggcggcggaggctctttcgaagaagtgcaactggtggaaagcggaggcggcctggtgcagcctggcggatctctgagactgagctgtgccgccagcggctacgagttcagccggtcctggatgaactgggtgcgccaggcccctggcaagggactggaatgggtgggaagaatctaccccggcgacggcgacaccaactacagcggcaagttcaagggccggttcaccatcagcgccgacaccagcaagaacaccgcctacctccagatgaacagcctgcgggccgaggataccgccgtgtactactgtgccagagatggcagctcctgggactggtacttcgacgtgtggggacagggaacccttgtgaccgtgtccagcacgcgtgaggacctgaagaacgtgttcccacctgaggtggccgtgttcgagcctagcgaggccgagatcagccacacccagaaagccaccctcgtgtgcctggctaccggcttctaccccgaccatgtggaactgtcttggtgggtcaacggcaaagaggtgcacagcggcgtgtgtaccgacccccagccactgaaagaacagcccgccctgaacgacagccggtactgcctgagcagcagactgagagtgtccgccaccttctggcagaacccccggaaccacttcagatgccaggtgcagttctacggcctgagcgagaacgacgagtggacccaggacagagccaagcccgtgacccagatcgtgtctgccgaagcctggggcagagccgattgcggctttaccagcgagagctaccagcagggcgtgctgagcgccaccaacctgagcgtgatcggcttcagaatcctgctgctgaaagtggccggctttaacctgctgatgaccctgcggctgtggtccagc

SEQ ID NO: 34422 - DNA, 2187 bp, synthetic construct
  source 1..2187: mol_type = other DNA
atggccttaccagtgaccgccttgctcctgccgctggccttgctgctccacgccgccaggccgatccagatgacccagagccccagcagcctgtctgccagcgtgggcgacagagtgaccatcacctgtcggagcagccagagcatcgtgcactccgtgggcaacaccttcctggaatggtatcagcagaagcccggcaaggcccccaagctgctgatctacaaggtgtccaacagattcagcggcgtgcccagcaggtttagcggctctggcagcggcaccgacttcaccctgaccatctctagcctccagcccgaggacttcgccacctactactgttttcaaggcagccagttcccctacaccttcggccagggaacaaaggtggaaatcaagcggctcgaggacctgaagaacgtgttcccacctgaggtggccgtgttcgagcctagcgaggccgagatcagccacacccagaaagccaccctcgtgtgcctggctaccggcttctaccccgaccatgtggaactgtcttggtgggtcaacggcaaagaggtgcacagcggcgtgtgtaccgacccccagccactgaaagaacagcccgccctgaacgacagccggtactgcctgagcagcagactgagagtgtccgccaccttctggcagaacccccggaaccacttcagatgccaggtgcagttctacggcctgagcgagaacgacgagtggacccaggacagagccaagcccgtgacccagatcgtgtctgccgaagcctggggcagagccgatgatgtgattaagatccactggcaggaaaagaagtccaacaccatcctgggcagccaggaaggcaacaccatgaagaccaacgacacctacatgaagttcagctggctgaccgtgcccgagaagtccctggacaaagaacacagatgcatcgtgcggcacgaaaacaacaagaacggcgtggaccaggaaatcatcttcccacccatcaagaccgatgtgattacaatggaccccaaggacaactgctccaaggacgccaacgataccctgctgctccagctgaccaacaccagcgcctactacatgtacttgttgctgctgctgaagtccgtggtgtacttcgccatcatcacatgctgcctgctgatggctatggtcaagcggaaggacagccggggaagggccaagcgatctggatctggagcaacaaacttctcactactcaaacaagcaggtgacgtggaggagaatcccgggcctactagtatggactggatttggcgcatccttttccttgtcggcgctgctaccggcgcgcattccttcgaagaagtgcaactggtggaaagcggaggcggcctggtgcagcctggcggatctctgagactgagctgtgccgccagcggctacgagttcagccggtcctggatgaactgggtgcgccaggcccctggcaagggactggaatgggtgggaagaatctaccccggcgacggcgacaccaactacagcggcaagttcaagggccggttcaccatcagcgccgacaccagcaagaacaccgcctacctccagatgaacagcctgcgggccgaggataccgccgtgtactactgtgccagagatggcagctcctgggactggtacttcgacgtgtggggacagggaacccttgtgaccgtgtccagcacgcgtatccagaaccctgatcctgccgtgtaccagctgcgggatagcaagagcagcgacaagagcgtgtgtctgttcaccgacttcgacagccagaccaacgtgtcccagagcaaggactccgacgtgtacatcaccgataagtgcgtgctggacatgcggagcatggacttcaagagcaactccgccgtggcctggtccaacaagtccgatttcgcctgcgccaacgccttcaacaacagcattatccccgaggacacattcttcccaagccccgagagcagcgactccaccgaccacgtgaagcccaaagagacagagaacaccaagcagcccagcaagagctgccacaagcccaaggccatcgtgcacaccgagaaagtgaacatgatgagcctgaccgtgctgggcctgcggatgctgttcgccaaaaccgtggccgtgaacttcctgctgaccgccaagctgttcttcctcctcaccgcc

SEQ ID NO: 34423 - DNA, 2199 bp, synthetic construct
  source 1..2199: mol_type = other DNA
atggccttaccagtgaccgccttgctcctgccgctggccttgctgctccacgccgccaggccgatccagatgacccagagccccagcagcctgtctgccagcgtgggcgacagagtgaccatcacctgtcggagcagccagagcatcgtgcactccgtgggcaacaccttcctggaatggtatcagcagaagcccggcaaggcccccaagctgctgatctacaaggtgtccaacagattcagcggcgtgcccagcaggtttagcggctctggcagcggcaccgacttcaccctgaccatctctagcctccagcccgaggacttcgccacctactactgttttcaaggcagccagttcccctacaccttcggccagggaacaaaggtggaaatcaagcggctcgagatccagaaccctgatcctgccgtgtaccagctgcgggatagcaagagcagcgacaagagcgtgtgtctgttcaccgacttcgacagccagaccaacgtgtcccagagcaaggactccgacgtgtacatcaccgataagtgcgtgctggacatgcggagcatggacttcaagagcaactccgccgtggcctggtccaacaagtccgatttcgcctgcgccaacgccttcaacaacagcattatccccgaggacacattcttcccaagccccgagagcagcgactccaccgaccacgtgaagcccaaagagacagagaacaccaagcagcccagcaagagctgccacaagcccaaggccatcgtgcacaccgagaaagtgaacatgatgagcctgaccgtgctgggcctgcggatgctgttcgccaaaaccgtggccgtgaacttcctgctgaccgccaagctgttcttcctcctcaccgcccgcgccaagagaagcggatctggcgtgaagcagaccctgaatttcgacctgctgaagctggctggcgacgtggaatccaacccaggccctactagtatggactggatttggcgcatccttttccttgtcggcgctgctaccggcgcgcattccttcgaagaagtgcaactggtggaaagcggaggcggcctggtgcagcctggcggatctctgagactgagctgtgccgccagcggctacgagttcagccggtcctggatgaactgggtgcgccaggcccctggcaagggactggaatgggtgggaagaatctaccccggcgacggcgacaccaactacagcggcaagttcaagggccggttcaccatcagcgccgacaccagcaagaacaccgcctacctccagatgaacagcctgcgggccgaggataccgccgtgtactactgtgccagagatggcagctcctgggactggtacttcgacgtgtggggacagggaacccttgtgaccgtgtccagcacgcgtgaggacctgaagaacgtgttcccacctgaggtggccgtgttcgagcctagcgaggccgagatcagccacacccagaaagccaccctcgtgtgcctggctaccggcttctaccccgaccatgtggaactgtcttggtgggtcaacggcaaagaggtgcacagcggcgtgtgtaccgacccccagccactgaaagaacagcccgccctgaacgacagccggtactgcctgagcagcagactgagagtgtccgccaccttctggcagaacccccggaaccacttcagatgccaggtgcagttctacggcctgagcgagaacgacgagtggacccaggacagagccaagcccgtgacccagatcgtgtctgccgaagcctggggcagagccgatgatgtgattaagatccactggcaggaaaagaagtccaacaccatcctgggcagccaggaaggcaacaccatgaagaccaacgacacctacatgaagttcagctggctgaccgtgcccgagaagtccctggacaaagaacacagatgcatcgtgcggcacgaaaacaacaagaacggcgtggaccaggaaatcatcttcccacccatcaagaccgatgtgattacaatggaccccaaggacaactgctccaaggacgccaacgataccctgctgctccagctgaccaacaccagcgcctactacatgtacttgttgctgctgctgaagtccgtggtgtacttcgccatcatcacatgctgcctgctgatggctatggtcaagcggaaggacagccgggga

SEQ ID NO: 34424 - DNA, 2592 bp, synthetic construct
  source 1..2592: mol_type = other DNA
atggccttaccagtgaccgccttgctcctgccgctggccttgctgctccacgccgccaggccggaagtgcagctggttgaatctggcggaggactggttcagcctggcggatctctgagactgtcttgtgccgccagcggcttcagcttcagcgacttttggatgagctgggtccgacaggcccctggcaaaggacttgaatgggtcgccacaatcagccaggccggcagcgagaaggactacgtggactctgtgaagggcagattcaccatcagccgggacaacgccaagaagtccctgtacctccagatgaacagcctgagagccgaggacaccgccgtgtactattgtgcctctggcgtgtacagcttcgactacagaggccagggcaccctggtcacagtctcttctggtaccggcggaggcggatctggcggcggaggtagcggtggcggaggatctgaattcatccagatgacccagagccccagcagcctgtctgccagcgtgggcgacagagtgaccatcacctgtcggagcagccagagcatcgtgcactccgtgggcaacaccttcctggaatggtatcagcagaagcccggcaaggcccccaagctgctgatctacaaggtgtccaacagattcagcggcgtgcccagcaggtttagcggctctggcagcggcaccgacttcaccctgaccatctctagcctccagcccgaggacttcgccacctactactgttttcaaggcagccagttcccctacaccttcggccagggaacaaaggtggaaatcaagcggctcgaggacctgaagaacgtgttcccacctgaggtggccgtgttcgagcctagcgaggccgagatcagccacacccagaaagccaccctcgtgtgcctggctaccggcttctaccccgaccatgtggaactgtcttggtgggtcaacggcaaagaggtgcacagcggcgtgtgtaccgacccccagccactgaaagaacagcccgccctgaacgacagccggtactgcctgagcagcagactgagagtgtccgccaccttctggcagaacccccggaaccacttcagatgccaggtgcagttctacggcctgagcgagaacgacgagtggacccaggacagagccaagcccgtgacccagatcgtgtctgccgaagcctggggcagagccgatgatgtgattaagatccactggcaggaaaagaagtccaacaccatcctgggcagccaggaaggcaacaccatgaagaccaacgacacctacatgaagttcagctggctgaccgtgcccgagaagtccctggacaaagaacacagatgcatcgtgcggcacgaaaacaacaagaacggcgtggaccaggaaatcatcttcccacccatcaagaccgatgtgattacaatggaccccaaggacaactgctccaaggacgccaacgataccctgctgctccagctgaccaacaccagcgcctactacatgtacttgttgctgctgctgaagtccgtggtgtacttcgccatcatcacatgctgcctgctgatggctatggtcaagcggaaggacagccggggaagggccaagcgatctggatctggagcaacaaacttctcactactcaaacaagcaggtgacgtggaggagaatcccgggcctactagtatggactggatttggcgcatccttttccttgtcggcgctgctaccggcgcgcattccttcgaagaagtgcaactggtggaaagcggaggcggcctggtgcagcctggcggatctctgagactgagctgtgccgccagcggctacgagttcagccggtcctggatgaactgggtgcgccaggcccctggcaagggactggaatgggtgggaagaatctaccccggcgacggcgacaccaactacagcggcaagttcaagggccggttcaccatcagcgccgacaccagcaagaacaccgcctacctccagatgaacagcctgcgggccgaggataccgccgtgtactactgtgccagagatggcagctcctgggactggtacttcgacgtgtggggacagggaacccttgtgaccgtgtccagcacgcgtatccagaaccctgatcctgccgtgtaccagctgcgggatagcaagagcagcgacaagagcgtgtgtctgttcaccgacttcgacagccagaccaacgtgtcccagagcaaggactccgacgtgtacatcaccgataagtgcgtgctggacatgcggagcatggacttcaagagcaactccgccgtggcctggtccaacaagtccgatttcgcctgcgccaacgccttcaacaacagcattatccccgaggacacattcttcccaagccccgagagcagcgactccaccgaccacgtgaagcccaaagagacagagaacaccaagcagcccagcaagagctgccacaagcccaaggccatcgtgcacaccgagaaagtgaacatgatgagcctgaccgtgctgggcctgcggatgctgttcgccaaaaccgtggccgtgaacttcctgctgaccgccaagctgttcttcctcctcaccgcc

SEQ ID NO: 34425 - DNA, 2604 bp, synthetic construct
  source 1..2604: mol_type = other DNA
atggccttaccagtgaccgccttgctcctgccgctggccttgctgctccacgccgccaggccggaagtgcagctggttgaatctggcggaggactggttcagcctggcggatctctgagactgtcttgtgccgccagcggcttcagcttcagcgacttttggatgagctgggtccgacaggcccctggcaaaggacttgaatgggtcgccacaatcagccaggccggcagcgagaaggactacgtggactctgtgaagggcagattcaccatcagccgggacaacgccaagaagtccctgtacctccagatgaacagcctgagagccgaggacaccgccgtgtactattgtgcctctggcgtgtacagcttcgactacagaggccagggcaccctggtcacagtctcttctggtaccggcggaggcggatctggcggcggaggtagcggtggcggaggatctgaattcatccagatgacccagagccccagcagcctgtctgccagcgtgggcgacagagtgaccatcacctgtcggagcagccagagcatcgtgcactccgtgggcaacaccttcctggaatggtatcagcagaagcccggcaaggcccccaagctgctgatctacaaggtgtccaacagattcagcggcgtgcccagcaggtttagcggctctggcagcggcaccgacttcaccctgaccatctctagcctccagcccgaggacttcgccacctactactgttttcaaggcagccagttcccctacaccttcggccagggaacaaaggtggaaatcaagcggctcgagatccagaaccctgatcctgccgtgtaccagctgcgggatagcaagagcagcgacaagagcgtgtgtctgttcaccgacttcgacagccagaccaacgtgtcccagagcaaggactccgacgtgtacatcaccgataagtgcgtgctggacatgcggagcatggacttcaagagcaactccgccgtggcctggtccaacaagtccgatttcgcctgcgccaacgccttcaacaacagcattatccccgaggacacattcttcccaagccccgagagcagcgactccaccgaccacgtgaagcccaaagagacagagaacaccaagcagcccagcaagagctgccacaagcccaaggccatcgtgcacaccgagaaagtgaacatgatgagcctgaccgtgctgggcctgcggatgctgttcgccaaaaccgtggccgtgaacttcctgctgaccgccaagctgttcttcctcctcaccgcccgcgccaagagaagcggatctggcgtgaagcagaccctgaatttcgacctgctgaagctggctggcgacgtggaatccaacccaggccctactagtatggactggatttggcgcatccttttccttgtcggcgctgctaccggcgcgcattccttcgaagaagtgcaactggtggaaagcggaggcggcctggtgcagcctggcggatctctgagactgagctgtgccgccagcggctacgagttcagccggtcctggatgaactgggtgcgccaggcccctggcaagggactggaatgggtgggaagaatctaccccggcgacggcgacaccaactacagcggcaagttcaagggccggttcaccatcagcgccgacaccagcaagaacaccgcctacctccagatgaacagcctgcgggccgaggataccgccgtgtactactgtgccagagatggcagctcctgggactggtacttcgacgtgtggggacagggaacccttgtgaccgtgtccagcacgcgtgaggacctgaagaacgtgttcccacctgaggtggccgtgttcgagcctagcgaggccgagatcagccacacccagaaagccaccctcgtgtgcctggctaccggcttctaccccgaccatgtggaactgtcttggtgggtcaacggcaaagaggtgcacagcggcgtgtgtaccgacccccagccactgaaagaacagcccgccctgaacgacagccggtactgcctgagcagcagactgagagtgtccgccaccttctggcagaacccccggaaccacttcagatgccaggtgcagttctacggcctgagcgagaacgacgagtggacccaggacagagccaagcccgtgacccagatcgtgtctgccgaagcctggggcagagccgatgatgtgattaagatccactggcaggaaaagaagtccaacaccatcctgggcagccaggaaggcaacaccatgaagaccaacgacacctacatgaagttcagctggctgaccgtgcccgagaagtccctggacaaagaacacagatgcatcgtgcggcacgaaaacaacaagaacggcgtggaccaggaaatcatcttcccacccatcaagaccgatgtgattacaatggaccccaaggacaactgctccaaggacgccaacgataccctgctgctccagctgaccaacaccagcgcctactacatgtacttgttgctgctgctgaagtccgtggtgtacttcgccatcatcacatgctgcctgctgatggctatggtcaagcggaaggacagccgggga

SEQ ID NO: 34426 - DNA, 3003 bp, synthetic construct
  source 1..3003: mol_type = other DNA
atggccttaccagtgaccgccttgctcctgccgctggccttgctgctccacgccgccaggccggaagtgcagctggttgaatctggcggaggactggttcagcctggcggatctctgagactgtcttgtgccgccagcggcttcagcttcagcgacttttggatgagctgggtccgacaggcccctggcaaaggacttgaatgggtcgccacaatcagccaggccggcagcgagaaggactacgtggactctgtgaagggcagattcaccatcagccgggacaacgccaagaagtccctgtacctccagatgaacagcctgagagccgaggacaccgccgtgtactattgtgcctctggcgtgtacagcttcgactacagaggccagggcaccctggtcacagtctcttctggtaccggcggaggcggatctggcggcggaggtagcggtggcggaggatctgaattcatccagatgacccagagccccagcagcctgtctgccagcgtgggcgacagagtgaccatcacctgtcggagcagccagagcatcgtgcactccgtgggcaacaccttcctggaatggtatcagcagaagcccggcaaggcccccaagctgctgatctacaaggtgtccaacagattcagcggcgtgcccagcaggtttagcggctctggcagcggcaccgacttcaccctgaccatctctagcctccagcccgaggacttcgccacctactactgttttcaaggcagccagttcccctacaccttcggccagggaacaaaggtggaaatcaagcggctcgaggacctgaagaacgtgttcccacctgaggtggccgtgttcgagcctagcgaggccgagatcagccacacccagaaagccaccctcgtgtgcctggctaccggcttctaccccgaccatgtggaactgtcttggtgggtcaacggcaaagaggtgcacagcggcgtgtgtaccgacccccagccactgaaagaacagcccgccctgaacgacagccggtactgcctgagcagcagactgagagtgtccgccaccttctggcagaacccccggaaccacttcagatgccaggtgcagttctacggcctgagcgagaacgacgagtggacccaggacagagccaagcccgtgacccagatcgtgtctgccgaagcctggggcagagccgatgatgtgattaagatccactggcaggaaaagaagtccaacaccatcctgggcagccaggaaggcaacaccatgaagaccaacgacacctacatgaagttcagctggctgaccgtgcccgagaagtccctggacaaagaacacagatgcatcgtgcggcacgaaaacaacaagaacggcgtggaccaggaaatcatcttcccacccatcaagaccgatgtgattacaatggaccccaaggacaactgctccaaggacgccaacgataccctgctgctccagctgaccaacaccagcgcctactacatgtacttgttgctgctgctgaagtccgtggtgtacttcgccatcatcacatgctgcctgctgatggctatggtcaagcggaaggacagccggggaagggccaagcgatctggatctggagcaacaaacttctcactactcaaacaagcaggtgacgtggaggagaatcccgggcctactagtatggactggatttggcgcatccttttccttgtcggcgctgctaccggcgcgcattccgggccccagctccagctgcaagagtctggacctggcctggtcaagcctagcgagacactgagcctgacctgtaccgtgtccggcgatagcatcagcagcggcgattactactggggctggatcagacagcctcctggcaaaggactggaatggatcggccacatctactacagcggcgtgacctactacaaccccagcctgaagtccagagtgaccatcagcgtggacaccagccggaaccagttctccctgaagctgtctagcgtgacagccgccgataccgccgtgtactactgcaccagagaggacagcagcaactggcggagtagaggccagggaacactggtcacagttagctctggatccggcggaggcggaagtggaggcggaggatctggcggcggaggctctttcgaagaagtgcaactggtggaaagcggaggcggcctggtgcagcctggcggatctctgagactgagctgtgccgccagcggctacgagttcagccggtcctggatgaactgggtgcgccaggcccctggcaagggactggaatgggtgggaagaatctaccccggcgacggcgacaccaactacagcggcaagttcaagggccggttcaccatcagcgccgacaccagcaagaacaccgcctacctccagatgaacagcctgcgggccgaggataccgccgtgtactactgtgccagagatggcagctcctgggactggtacttcgacgtgtggggacagggaacccttgtgaccgtgtccagcacgcgtatccagaaccctgatcctgccgtgtaccagctgcgggatagcaagagcagcgacaagagcgtgtgtctgttcaccgacttcgacagccagaccaacgtgtcccagagcaaggactccgacgtgtacatcaccgataagtgcgtgctggacatgcggagcatggacttcaagagcaactccgccgtggcctggtccaacaagtccgatttcgcctgcgccaacgccttcaacaacagcattatccccgaggacacattcttcccaagccccgagagcagcgactccaccgaccacgtgaagcccaaagagacagagaacaccaagcagcccagcaagagctgccacaagcccaaggccatcgtgcacaccgagaaagtgaacatgatgagcctgaccgtgctgggcctgcggatgctgttcgccaaaaccgtggccgtgaacttcctgctgaccgccaagctgttcttcctcctcaccgcc

SEQ ID NO: 34427 - DNA, 3015 bp, synthetic construct
  source 1..3015: mol_type = other DNA
atggccttaccagtgaccgccttgctcctgccgctggccttgctgctccacgccgccaggccggaagtgcagctggttgaatctggcggaggactggttcagcctggcggatctctgagactgtcttgtgccgccagcggcttcagcttcagcgacttttggatgagctgggtccgacaggcccctggcaaaggacttgaatgggtcgccacaatcagccaggccggcagcgagaaggactacgtggactctgtgaagggcagattcaccatcagccgggacaacgccaagaagtccctgtacctccagatgaacagcctgagagccgaggacaccgccgtgtactattgtgcctctggcgtgtacagcttcgactacagaggccagggcaccctggtcacagtctcttctggtaccggcggaggcggatctggcggcggaggtagcggtggcggaggatctgaattcatccagatgacccagagccccagcagcctgtctgccagcgtgggcgacagagtgaccatcacctgtcggagcagccagagcatcgtgcactccgtgggcaacaccttcctggaatggtatcagcagaagcccggcaaggcccccaagctgctgatctacaaggtgtccaacagattcagcggcgtgcccagcaggtttagcggctctggcagcggcaccgacttcaccctgaccatctctagcctccagcccgaggacttcgccacctactactgttttcaaggcagccagttcccctacaccttcggccagggaacaaaggtggaaatcaagcggctcgagatccagaaccctgatcctgccgtgtaccagctgcgggatagcaagagcagcgacaagagcgtgtgtctgttcaccgacttcgacagccagaccaacgtgtcccagagcaaggactccgacgtgtacatcaccgataagtgcgtgctggacatgcggagcatggacttcaagagcaactccgccgtggcctggtccaacaagtccgatttcgcctgcgccaacgccttcaacaacagcattatccccgaggacacattcttcccaagccccgagagcagcgactccaccgaccacgtgaagcccaaagagacagagaacaccaagcagcccagcaagagctgccacaagcccaaggccatcgtgcacaccgagaaagtgaacatgatgagcctgaccgtgctgggcctgcggatgctgttcgccaaaaccgtggccgtgaacttcctgctgaccgccaagctgttcttcctcctcaccgcccgcgccaagagaagcggatctggcgtgaagcagaccctgaatttcgacctgctgaagctggctggcgacgtggaatccaacccaggccctactagtatggactggatttggcgcatccttttccttgtcggcgctgctaccggcgcgcattccgggccccagctccagctgcaagagtctggacctggcctggtcaagcctagcgagacactgagcctgacctgtaccgtgtccggcgatagcatcagcagcggcgattactactggggctggatcagacagcctcctggcaaaggactggaatggatcggccacatctactacagcggcgtgacctactacaaccccagcctgaagtccagagtgaccatcagcgtggacaccagccggaaccagttctccctgaagctgtctagcgtgacagccgccgataccgccgtgtactactgcaccagagaggacagcagcaactggcggagtagaggccagggaacactggtcacagttagctctggatccggcggaggcggaagtggaggcggaggatctggcggcggaggctctttcgaagaagtgcaactggtggaaagcggaggcggcctggtgcagcctggcggatctctgagactgagctgtgccgccagcggctacgagttcagccggtcctggatgaactgggtgcgccaggcccctggcaagggactggaatgggtgggaagaatctaccccggcgacggcgacaccaactacagcggcaagttcaagggccggttcaccatcagcgccgacaccagcaagaacaccgcctacctccagatgaacagcctgcgggccgaggataccgccgtgtactactgtgccagagatggcagctcctgggactggtacttcgacgtgtggggacagggaacccttgtgaccgtgtccagcacgcgtgaggacctgaagaacgtgttcccacctgaggtggccgtgttcgagcctagcgaggccgagatcagccacacccagaaagccaccctcgtgtgcctggctaccggcttctaccccgaccatgtggaactgtcttggtgggtcaacggcaaagaggtgcacagcggcgtgtgtaccgacccccagccactgaaagaacagcccgccctgaacgacagccggtactgcctgagcagcagactgagagtgtccgccaccttctggcagaacccccggaaccacttcagatgccaggtgcagttctacggcctgagcgagaacgacgagtggacccaggacagagccaagcccgtgacccagatcgtgtctgccgaagcctggggcagagccgatgatgtgattaagatccactggcaggaaaagaagtccaacaccatcctgggcagccaggaaggcaacaccatgaagaccaacgacacctacatgaagttcagctggctgaccgtgcccgagaagtccctggacaaagaacacagatgcatcgtgcggcacgaaaacaacaagaacggcgtggaccaggaaatcatcttcccacccatcaagaccgatgtgattacaatggaccccaaggacaactgctccaaggacgccaacgataccctgctgctccagctgaccaacaccagcgcctactacatgtacttgttgctgctgctgaagtccgtggtgtacttcgccatcatcacatgctgcctgctgatggctatggtcaagcggaaggacagccgggga

SEQ ID NO: 34428 - DNA, 2181 bp, synthetic construct
  source 1..2181: mol_type = other DNA
atggccttaccagtgaccgccttgctcctgccgctggccttgctgctccacgccgccaggccgatccagatgacccagagccccagcagcctgtctgccagcgtgggcgacagagtgaccatcacctgtcggagcagccagagcatcgtgcactccgtgggcaacaccttcctggaatggtatcagcagaagcccggcaaggcccccaagctgctgatctacaaggtgtccaacagattcagcggcgtgcccagcaggtttagcggctctggcagcggcaccgacttcaccctgaccatctctagcctccagcccgaggacttcgccacctactactgttttcaaggcagccagttcccctacaccttcggccagggaacaaaggtggaaatcaagcggctcgaggacctgaagaacgtgttcccacctgaggtggccgtgttcgagcctagcgaggccgagatcagccacacccagaaagccaccctcgtgtgcctggctaccggcttctaccccgaccatgtggaactgtcttggtgggtcaacggcaaagaggtgcacagcggcgtgtgtaccgacccccagccactgaaagaacagcccgccctgaacgacagccggtactgcctgagcagcagactgagagtgtccgccaccttctggcagaacccccggaaccacttcagatgccaggtgcagttctacggcctgagcgagaacgacgagtggacccaggacagagccaagcccgtgacccagatcgtgtctgccgaagcctggggcagagccgatgatgtgattaagatccactggcaggaaaagaagtccaacaccatcctgggcagccaggaaggcaacaccatgaagaccaacgacacctacatgaagttcagctggctgaccgtgcccgagaagtccctggacaaagaacacagatgcatcgtgcggcacgaaaacaacaagaacggcgtggaccaggaaatcatcttcccacccatcaagaccgatgtgattacaatggaccccaaggacaactgctccaaggacgccaacgataccctgctgctccagctgaccaacaccagcgcctactacatgtacttgttgctgctgctgaagtccgtggtgtacttcgccatcatcacatgctgcctgctgcggagaaccgccttctgctgcaacggcgagaagtctagggccaagcgatctggatctggagcaacaaacttctcactactcaaacaagcaggtgacgtggaggagaatcccgggcctactagtatggactggatttggcgcatccttttccttgtcggcgctgctaccggcgcgcattccttcgaagaagtgcaactggtggaaagcggaggcggcctggtgcagcctggcggatctctgagactgagctgtgccgccagcggctacgagttcagccggtcctggatgaactgggtgcgccaggcccctggcaagggactggaatgggtgggaagaatctaccccggcgacggcgacaccaactacagcggcaagttcaagggccggttcaccatcagcgccgacaccagcaagaacaccgcctacctccagatgaacagcctgcgggccgaggataccgccgtgtactactgtgccagagatggcagctcctgggactggtacttcgacgtgtggggacagggaacccttgtgaccgtgtccagcacgcgtatccagaaccctgatcctgccgtgtaccagctgcgggatagcaagagcagcgacaagagcgtgtgtctgttcaccgacttcgacagccagaccaacgtgtcccagagcaaggactccgacgtgtacatcaccgataagtgcgtgctggacatgcggagcatggacttcaagagcaactccgccgtggcctggtccaacaagtccgatttcgcctgcgccaacgccttcaacaacagcattatccccgaggacacattcttcccaagccccgagagcagcgactccaccgaccacgtgaagcccaaagagacagagaacaccaagcagcccagcaagagctgccacaagcccaaggccatcgtgcacaccgagaaagtgaacatgatgagcctgaccgtgctgggcctgcggatgctgttcgccaaaaccgtggccgtgaacttcctgctgaccgccaagctgttcttcctc

SEQ ID NO: 34429 - DNA, 2193 bp, synthetic construct
  source 1..2193: mol_type = other DNA
atggccttaccagtgaccgccttgctcctgccgctggccttgctgctccacgccgccaggccgatccagatgacccagagccccagcagcctgtctgccagcgtgggcgacagagtgaccatcacctgtcggagcagccagagcatcgtgcactccgtgggcaacaccttcctggaatggtatcagcagaagcccggcaaggcccccaagctgctgatctacaaggtgtccaacagattcagcggcgtgcccagcaggtttagcggctctggcagcggcaccgacttcaccctgaccatctctagcctccagcccgaggacttcgccacctactactgttttcaaggcagccagttcccctacaccttcggccagggaacaaaggtggaaatcaagcggctcgagatccagaaccctgatcctgccgtgtaccagctgcgggatagcaagagcagcgacaagagcgtgtgtctgttcaccgacttcgacagccagaccaacgtgtcccagagcaaggactccgacgtgtacatcaccgataagtgcgtgctggacatgcggagcatggacttcaagagcaactccgccgtggcctggtccaacaagtccgatttcgcctgcgccaacgccttcaacaacagcattatccccgaggacacattcttcccaagccccgagagcagcgactccaccgaccacgtgaagcccaaagagacagagaacaccaagcagcccagcaagagctgccacaagcccaaggccatcgtgcacaccgagaaagtgaacatgatgagcctgaccgtgctgggcctgcggatgctgttcgccaaaaccgtggccgtgaacttcctgctgaccgccaagctgttcttcctccgcgccaagagaagcggatctggcgtgaagcagaccctgaatttcgacctgctgaagctggctggcgacgtggaatccaacccaggccctactagtatggactggatttggcgcatccttttccttgtcggcgctgctaccggcgcgcattccttcgaagaagtgcaactggtggaaagcggaggcggcctggtgcagcctggcggatctctgagactgagctgtgccgccagcggctacgagttcagccggtcctggatgaactgggtgcgccaggcccctggcaagggactggaatgggtgggaagaatctaccccggcgacggcgacaccaactacagcggcaagttcaagggccggttcaccatcagcgccgacaccagcaagaacaccgcctacctccagatgaacagcctgcgggccgaggataccgccgtgtactactgtgccagagatggcagctcctgggactggtacttcgacgtgtggggacagggaacccttgtgaccgtgtccagcacgcgtgaggacctgaagaacgtgttcccacctgaggtggccgtgttcgagcctagcgaggccgagatcagccacacccagaaagccaccctcgtgtgcctggctaccggcttctaccccgaccatgtggaactgtcttggtgggtcaacggcaaagaggtgcacagcggcgtgtgtaccgacccccagccactgaaagaacagcccgccctgaacgacagccggtactgcctgagcagcagactgagagtgtccgccaccttctggcagaacccccggaaccacttcagatgccaggtgcagttctacggcctgagcgagaacgacgagtggacccaggacagagccaagcccgtgacccagatcgtgtctgccgaagcctggggcagagccgatgatgtgattaagatccactggcaggaaaagaagtccaacaccatcctgggcagccaggaaggcaacaccatgaagaccaacgacacctacatgaagttcagctggctgaccgtgcccgagaagtccctggacaaagaacacagatgcatcgtgcggcacgaaaacaacaagaacggcgtggaccaggaaatcatcttcccacccatcaagaccgatgtgattacaatggaccccaaggacaactgctccaaggacgccaacgataccctgctgctccagctgaccaacaccagcgcctactacatgtacttgttgctgctgctgaagtccgtggtgtacttcgccatcatcacatgctgcctgctgcggagaaccgccttctgctgcaacggcgagaagtct

SEQ ID NO: 34430 - DNA, 2586 bp, synthetic construct
  source 1..2586: mol_type = other DNA
atggccttaccagtgaccgccttgctcctgccgctggccttgctgctccacgccgccaggccggaagtgcagctggttgaatctggcggaggactggttcagcctggcggatctctgagactgtcttgtgccgccagcggcttcagcttcagcgacttttggatgagctgggtccgacaggcccctggcaaaggacttgaatgggtcgccacaatcagccaggccggcagcgagaaggactacgtggactctgtgaagggcagattcaccatcagccgggacaacgccaagaagtccctgtacctccagatgaacagcctgagagccgaggacaccgccgtgtactattgtgcctctggcgtgtacagcttcgactacagaggccagggcaccctggtcacagtctcttctggtaccggcggaggcggatctggcggcggaggtagcggtggcggaggatctgaattcatccagatgacccagagccccagcagcctgtctgccagcgtgggcgacagagtgaccatcacctgtcggagcagccagagcatcgtgcactccgtgggcaacaccttcctggaatggtatcagcagaagcccggcaaggcccccaagctgctgatctacaaggtgtccaacagattcagcggcgtgcccagcaggtttagcggctctggcagcggcaccgacttcaccctgaccatctctagcctccagcccgaggacttcgccacctactactgttttcaaggcagccagttcccctacaccttcggccagggaacaaaggtggaaatcaagcggctcgaggacctgaagaacgtgttcccacctgaggtggccgtgttcgagcctagcgaggccgagatcagccacacccagaaagccaccctcgtgtgcctggctaccggcttctaccccgaccatgtggaactgtcttggtgggtcaacggcaaagaggtgcacagcggcgtgtgtaccgacccccagccactgaaagaacagcccgccctgaacgacagccggtactgcctgagcagcagactgagagtgtccgccaccttctggcagaacccccggaaccacttcagatgccaggtgcagttctacggcctgagcgagaacgacgagtggacccaggacagagccaagcccgtgacccagatcgtgtctgccgaagcctggggcagagccgatgatgtgattaagatccactggcaggaaaagaagtccaacaccatcctgggcagccaggaaggcaacaccatgaagaccaacgacacctacatgaagttcagctggctgaccgtgcccgagaagtccctggacaaagaacacagatgcatcgtgcggcacgaaaacaacaagaacggcgtggaccaggaaatcatcttcccacccatcaagaccgatgtgattacaatggaccccaaggacaactgctccaaggacgccaacgataccctgctgctccagctgaccaacaccagcgcctactacatgtacttgttgctgctgctgaagtccgtggtgtacttcgccatcatcacatgctgcctgctgcggagaaccgccttctgctgcaacggcgagaagtctagggccaagcgatctggatctggagcaacaaacttctcactactcaaacaagcaggtgacgtggaggagaatcccgggcctactagtatggactggatttggcgcatccttttccttgtcggcgctgctaccggcgcgcattccttcgaagaagtgcaactggtggaaagcggaggcggcctggtgcagcctggcggatctctgagactgagctgtgccgccagcggctacgagttcagccggtcctggatgaactgggtgcgccaggcccctggcaagggactggaatgggtgggaagaatctaccccggcgacggcgacaccaactacagcggcaagttcaagggccggttcaccatcagcgccgacaccagcaagaacaccgcctacctccagatgaacagcctgcgggccgaggataccgccgtgtactactgtgccagagatggcagctcctgggactggtacttcgacgtgtggggacagggaacccttgtgaccgtgtccagcacgcgtatccagaaccctgatcctgccgtgtaccagctgcgggatagcaagagcagcgacaagagcgtgtgtctgttcaccgacttcgacagccagaccaacgtgtcccagagcaaggactccgacgtgtacatcaccgataagtgcgtgctggacatgcggagcatggacttcaagagcaactccgccgtggcctggtccaacaagtccgatttcgcctgcgccaacgccttcaacaacagcattatccccgaggacacattcttcccaagccccgagagcagcgactccaccgaccacgtgaagcccaaagagacagagaacaccaagcagcccagcaagagctgccacaagcccaaggccatcgtgcacaccgagaaagtgaacatgatgagcctgaccgtgctgggcctgcggatgctgttcgccaaaaccgtggccgtgaacttcctgctgaccgccaagctgttcttcctc

SEQ ID NO: 34431 - DNA, 2997 bp, synthetic construct
  source 1..2997: mol_type = other DNA
atggccttaccagtgaccgccttgctcctgccgctggccttgctgctccacgccgccaggccggaagtgcagctggttgaatctggcggaggactggttcagcctggcggatctctgagactgtcttgtgccgccagcggcttcagcttcagcgacttttggatgagctgggtccgacaggcccctggcaaaggacttgaatgggtcgccacaatcagccaggccggcagcgagaaggactacgtggactctgtgaagggcagattcaccatcagccgggacaacgccaagaagtccctgtacctccagatgaacagcctgagagccgaggacaccgccgtgtactattgtgcctctggcgtgtacagcttcgactacagaggccagggcaccctggtcacagtctcttctggtaccggcggaggcggatctggcggcggaggtagcggtggcggaggatctgaattcatccagatgacccagagccccagcagcctgtctgccagcgtgggcgacagagtgaccatcacctgtcggagcagccagagcatcgtgcactccgtgggcaacaccttcctggaatggtatcagcagaagcccggcaaggcccccaagctgctgatctacaaggtgtccaacagattcagcggcgtgcccagcaggtttagcggctctggcagcggcaccgacttcaccctgaccatctctagcctccagcccgaggacttcgccacctactactgttttcaaggcagccagttcccctacaccttcggccagggaacaaaggtggaaatcaagcggctcgaggacctgaagaacgtgttcccacctgaggtggccgtgttcgagcctagcgaggccgagatcagccacacccagaaagccaccctcgtgtgcctggctaccggcttctaccccgaccatgtggaactgtcttggtgggtcaacggcaaagaggtgcacagcggcgtgtgtaccgacccccagccactgaaagaacagcccgccctgaacgacagccggtactgcctgagcagcagactgagagtgtccgccaccttctggcagaacccccggaaccacttcagatgccaggtgcagttctacggcctgagcgagaacgacgagtggacccaggacagagccaagcccgtgacccagatcgtgtctgccgaagcctggggcagagccgatgatgtgattaagatccactggcaggaaaagaagtccaacaccatcctgggcagccaggaaggcaacaccatgaagaccaacgacacctacatgaagttcagctggctgaccgtgcccgagaagtccctggacaaagaacacagatgcatcgtgcggcacgaaaacaacaagaacggcgtggaccaggaaatcatcttcccacccatcaagaccgatgtgattacaatggaccccaaggacaactgctccaaggacgccaacgataccctgctgctccagctgaccaacaccagcgcctactacatgtacttgttgctgctgctgaagtccgtggtgtacttcgccatcatcacatgctgcctgctgcggagaaccgccttctgctgcaacggcgagaagtctagggccaagcgatctggatctggagcaacaaacttctcactactcaaacaagcaggtgacgtggaggagaatcccgggcctactagtatggactggatttggcgcatccttttccttgtcggcgctgctaccggcgcgcattccgggccccagctccagctgcaagagtctggacctggcctggtcaagcctagcgagacactgagcctgacctgtaccgtgtccggcgatagcatcagcagcggcgattactactggggctggatcagacagcctcctggcaaaggactggaatggatcggccacatctactacagcggcgtgacctactacaaccccagcctgaagtccagagtgaccatcagcgtggacaccagccggaaccagttctccctgaagctgtctagcgtgacagccgccgataccgccgtgtactactgcaccagagaggacagcagcaactggcggagtagaggccagggaacactggtcacagttagctctggatccggcggaggcggaagtggaggcggaggatctggcggcggaggctctttcgaagaagtgcaactggtggaaagcggaggcggcctggtgcagcctggcggatctctgagactgagctgtgccgccagcggctacgagttcagccggtcctggatgaactgggtgcgccaggcccctggcaagggactggaatgggtgggaagaatctaccccggcgacggcgacaccaactacagcggcaagttcaagggccggttcaccatcagcgccgacaccagcaagaacaccgcctacctccagatgaacagcctgcgggccgaggataccgccgtgtactactgtgccagagatggcagctcctgggactggtacttcgacgtgtggggacagggaacccttgtgaccgtgtccagcacgcgtatccagaaccctgatcctgccgtgtaccagctgcgggatagcaagagcagcgacaagagcgtgtgtctgttcaccgacttcgacagccagaccaacgtgtcccagagcaaggactccgacgtgtacatcaccgataagtgcgtgctggacatgcggagcatggacttcaagagcaactccgccgtggcctggtccaacaagtccgatttcgcctgcgccaacgccttcaacaacagcattatccccgaggacacattcttcccaagccccgagagcagcgactccaccgaccacgtgaagcccaaagagacagagaacaccaagcagcccagcaagagctgccacaagcccaaggccatcgtgcacaccgagaaagtgaacatgatgagcctgaccgtgctgggcctgcggatgctgttcgccaaaaccgtggccgtgaacttcctgctgaccgccaagctgttcttcctc

SEQ ID NO: 34432 - DNA, 1875 bp, synthetic construct
  source 1..1875: mol_type = other DNA
atggccttaccagtgaccgccttgctcctgccgctggccttgctgctccacgccgccaggccgatccagatgacccagagccccagcagcctgtctgccagcgtgggcgacagagtgaccatcacctgtcggagcagccagagcatcgtgcactccgtgggcaacaccttcctggaatggtatcagcagaagcccggcaaggcccccaagctgctgatctacaaggtgtccaacagattcagcggcgtgcccagcaggtttagcggctctggcagcggcaccgacttcaccctgaccatctctagcctccagcccgaggacttcgccacctactactgttttcaaggcagccagttcccctacaccttcggccagggaacaaaggtggaaatcaagcggctcgaggacctgaagaacgtgttcccacctgaggtggccgtgttcgagcctagcgaggccgagatcagccacacccagaaagccaccctcgtgtgcctggctaccggcttctaccccgaccatgtggaactgtcttggtgggtcaacggcaaagaggtgcacagcggcgtgtctaccgacccccagccactgaaagaacagcccgccctgaacgacagccggtactgcctgagcagcagactgagagtgtccgccaccttctggcagaacccccggaaccacttcagatgccaggtgcagttctacggcctgagcgagaacgacgagtggacccaggacagagccaagcccgtgacccagatcgtgtctgccgaagcctggggcagagccgattgcgacgtgaagctggtggaaaagagcttcgagacagacaccaacctgaacttccagaacctgagcgtgatcggcttcagaatcctgctgctgaaagtggccggctttaacctgctgatgaccctgcggctgtggtccagcagggccaagcgatctggatctggagcaacaaacttctcactactcaaacaagcaggtgacgtggaggagaatcccgggcctactagtatggactggatttggcgcatccttttccttgtcggcgctgctaccggcgcgcattccttcgaagaagtgcaactggtggaaagcggaggcggcctggtgcagcctggcggatctctgagactgagctgtgccgccagcggctacgagttcagccggtcctggatgaactgggtgcgccaggcccctggcaagggactggaatgggtgggaagaatctaccccggcgacggcgacaccaactacagcggcaagttcaagggccggttcaccatcagcgccgacaccagcaagaacaccgcctacctccagatgaacagcctgcgggccgaggataccgccgtgtactactgtgccagagatggcagctcctgggactggtacttcgacgtgtggggacagggaacccttgtgaccgtgtccagcacgcgtatccagaaccctgatcctgccgtgtaccagctgcgggatagcaagagcagcgacaagagcgtgtgtctgttcaccgacttcgacagccagaccaacgtgtcccagagcaaggactccgacgtgtacatcaccgataagaccgtgctggacatgcggagcatggacttcaagagcaactccgccgtggcctggtccaacaagtccgatttcgcctgcgccaacgccttcaacaacagcattatccccgaggacacattcttcccaagccccgagagcagctgcggctttaccagcgagagctaccagcagggcgtgctgagcgccaccatcctgtacgagatcctgctgggcaaggccaccctgtacgccgtgctggtgtctgccctggtgctgatggctatggtcaagcggaaggacagccgggga

SEQ ID NO: 34433 - DNA, 1875 bp, synthetic construct
  source 1..1875: mol_type = other DNA
atggccttaccagtgaccgccttgctcctgccgctggccttgctgctccacgccgccaggccgatccagatgacccagagccccagcagcctgtctgccagcgtgggcgacagagtgaccatcacctgtcggagcagccagagcatcgtgcactccgtgggcaacaccttcctggaatggtatcagcagaagcccggcaaggcccccaagctgctgatctacaaggtgtccaacagattcagcggcgtgcccagcaggtttagcggctctggcagcggcaccgacttcaccctgaccatctctagcctccagcccgaggacttcgccacctactactgttttcaaggcagccagttcccctacaccttcggccagggaacaaaggtggaaatcaagcggctcgaggacctgaagaacgtgttcccacctgaggtggccgtgttcgagcctagcgaggccgagatcagccacacccagaaagccaccctcgtgtgcctggctaccggcttctaccccgaccatgtggaactgtcttggtgggtcaacggcaaagaggtgcacagcggcgtgtctaccgacccccagccactgaaagaacagcccgccctgaacgacagccggtactgcctgagcagcagactgagagtgtccgccaccttctggcagaacccccggaaccacttcagatgccaggtgcagttctacggcctgagcgagaacgacgagtggacccaggacagagccaagcccgtgacccagatcgtgtctgccgaagcctggggcagagccgattgcggctttaccagcgagagctaccagcagggcgtgctgagcgccaccaacctgagcgtgatcggcttcagaatcctgctgctgaaagtggccggctttaacctgctgatgaccctgcggctgtggtccagcagggccaagcgatctggatctggagcaacaaacttctcactactcaaacaagcaggtgacgtggaggagaatcccgggcctactagtatggactggatttggcgcatccttttccttgtcggcgctgctaccggcgcgcattccttcgaagaagtgcaactggtggaaagcggaggcggcctggtgcagcctggcggatctctgagactgagctgtgccgccagcggctacgagttcagccggtcctggatgaactgggtgcgccaggcccctggcaagggactggaatgggtgggaagaatctaccccggcgacggcgacaccaactacagcggcaagttcaagggccggttcaccatcagcgccgacaccagcaagaacaccgcctacctccagatgaacagcctgcgggccgaggataccgccgtgtactactgtgccagagatggcagctcctgggactggtacttcgacgtgtggggacagggaacccttgtgaccgtgtccagcacgcgtatccagaaccctgatcctgccgtgtaccagctgcgggatagcaagagcagcgacaagagcgtgtgtctgttcaccgacttcgacagccagaccaacgtgtcccagagcaaggactccgacgtgtacatcaccgataagaccgtgctggacatgcggagcatggacttcaagagcaactccgccgtggcctggtccaacaagtccgatttcgcctgcgccaacgccttcaacaacagcattatccccgaggacacattcttcccaagccccgagagcagctgcgacgtgaagctggtggaaaagagcttcgagacagacaccaacctgaacttccagatcctgtacgagatcctgctgggcaaggccaccctgtacgccgtgctggtgtctgccctggtgctgatggctatggtcaagcggaaggacagccgggga

SEQ ID NO: 34434 - DNA, 2187 bp, synthetic construct
  source 1..2187: mol_type = other DNA
atggccttaccagtgaccgccttgctcctgccgctggccttgctgctccacgccgccaggccgatccagatgacccagagccccagcagcctgtctgccagcgtgggcgacagagtgaccatcacctgtcggagcagccagagcatcgtgcactccgtgggcaacaccttcctggaatggtatcagcagaagcccggcaaggcccccaagctgctgatctacaaggtgtccaacagattcagcggcgtgcccagcaggtttagcggctctggcagcggcaccgacttcaccctgaccatctctagcctccagcccgaggacttcgccacctactactgttttcaaggcagccagttcccctacaccttcggccagggaacaaaggtggaaatcaagcggctcgaggacctgaagaacgtgttcccacctgaggtggccgtgttcgagcctagcgaggccgagatcagccacacccagaaagccaccctcgtgtgcctggctaccggcttctaccccgaccatgtggaactgtcttggtgggtcaacggcaaagaggtgcacagcggcgtgtctaccgacccccagccactgaaagaacagcccgccctgaacgacagccggtactgcctgagcagcagactgagagtgtccgccaccttctggcagaacccccggaaccacttcagatgccaggtgcagttctacggcctgagcgagaacgacgagtggacccaggacagagccaagcccgtgacccagatcgtgtctgccgaagcctggggcagagccgatgatgtgattaagatccactggcaggaaaagaagtccaacaccatcctgggcagccaggaaggcaacaccatgaagaccaacgacacctacatgaagttcagctggctgaccgtgcccgagaagtccctggacaaagaacacagatgcatcgtgcggcacgaaaacaacaagaacggcgtggaccaggaaatcatcttcccacccatcaagaccgatgtgattacaatggaccccaaggacaactgctccaaggacgccaacgataccctgctgctccagctgaccaacaccagcgcctactacatgtacttgttgctgctgctgaagtccgtggtgtacttcgccatcatcacatgctgcctgctgatggctatggtcaagcggaaggacagccggggaagggccaagcgatctggatctggagcaacaaacttctcactactcaaacaagcaggtgacgtggaggagaatcccgggcctactagtatggactggatttggcgcatccttttccttgtcggcgctgctaccggcgcgcattccttcgaagaagtgcaactggtggaaagcggaggcggcctggtgcagcctggcggatctctgagactgagctgtgccgccagcggctacgagttcagccggtcctggatgaactgggtgcgccaggcccctggcaagggactggaatgggtgggaagaatctaccccggcgacggcgacaccaactacagcggcaagttcaagggccggttcaccatcagcgccgacaccagcaagaacaccgcctacctccagatgaacagcctgcgggccgaggataccgccgtgtactactgtgccagagatggcagctcctgggactggtacttcgacgtgtggggacagggaacccttgtgaccgtgtccagcacgcgtatccagaaccctgatcctgccgtgtaccagctgcgggatagcaagagcagcgacaagagcgtgtgtctgttcaccgacttcgacagccagaccaacgtgtcccagagcaaggactccgacgtgtacatcaccgataagaccgtgctggacatgcggagcatggacttcaagagcaactccgccgtggcctggtccaacaagtccgatttcgcctgcgccaacgccttcaacaacagcattatccccgaggacacattcttcccaagccccgagagcagcgactccaccgaccacgtgaagcccaaagagacagagaacaccaagcagcccagcaagagctgccacaagcccaaggccatcgtgcacaccgagaaagtgaacatgatgagcctgaccgtgctgggcctgcggatgctgttcgccaaaaccgtggccgtgaacttcctgctgaccgccaagctgttcttcctcctcaccgcc

SEQ ID NO: 34435 - DNA, 2181 bp, synthetic construct
  source 1..2181: mol_type = other DNA
atggccttaccagtgaccgccttgctcctgccgctggccttgctgctccacgccgccaggccgatccagatgacccagagccccagcagcctgtctgccagcgtgggcgacagagtgaccatcacctgtcggagcagccagagcatcgtgcactccgtgggcaacaccttcctggaatggtatcagcagaagcccggcaaggcccccaagctgctgatctacaaggtgtccaacagattcagcggcgtgcccagcaggtttagcggctctggcagcggcaccgacttcaccctgaccatctctagcctccagcccgaggacttcgccacctactactgttttcaaggcagccagttcccctacaccttcggccagggaacaaaggtggaaatcaagcggctcgaggacctgaagaacgtgttcccacctgaggtggccgtgttcgagcctagcgaggccgagatcagccacacccagaaagccaccctcgtgtgcctggctaccggcttctaccccgaccatgtggaactgtcttggtgggtcaacggcaaagaggtgcacagcggcgtgtctaccgacccccagccactgaaagaacagcccgccctgaacgacagccggtactgcctgagcagcagactgagagtgtccgccaccttctggcagaacccccggaaccacttcagatgccaggtgcagttctacggcctgagcgagaacgacgagtggacccaggacagagccaagcccgtgacccagatcgtgtctgccgaagcctggggcagagccgatgatgtgattaagatccactggcaggaaaagaagtccaacaccatcctgggcagccaggaaggcaacaccatgaagaccaacgacacctacatgaagttcagctggctgaccgtgcccgagaagtccctggacaaagaacacagatgcatcgtgcggcacgaaaacaacaagaacggcgtggaccaggaaatcatcttcccacccatcaagaccgatgtgattacaatggaccccaaggacaactgctccaaggacgccaacgataccctgctgctccagctgaccaacaccagcgcctactacatgtacttgttgctgctgctgaagtccgtggtgtacttcgccatcatcacatgctgcctgctgcggagaaccgccttctgctgcaacggcgagaagtctagggccaagcgatctggatctggagcaacaaacttctcactactcaaacaagcaggtgacgtggaggagaatcccgggcctactagtatggactggatttggcgcatccttttccttgtcggcgctgctaccggcgcgcattccttcgaagaagtgcaactggtggaaagcggaggcggcctggtgcagcctggcggatctctgagactgagctgtgccgccagcggctacgagttcagccggtcctggatgaactgggtgcgccaggcccctggcaagggactggaatgggtgggaagaatctaccccggcgacggcgacaccaactacagcggcaagttcaagggccggttcaccatcagcgccgacaccagcaagaacaccgcctacctccagatgaacagcctgcgggccgaggataccgccgtgtactactgtgccagagatggcagctcctgggactggtacttcgacgtgtggggacagggaacccttgtgaccgtgtccagcacgcgtatccagaaccctgatcctgccgtgtaccagctgcgggatagcaagagcagcgacaagagcgtgtgtctgttcaccgacttcgacagccagaccaacgtgtcccagagcaaggactccgacgtgtacatcaccgataagaccgtgctggacatgcggagcatggacttcaagagcaactccgccgtggcctggtccaacaagtccgatttcgcctgcgccaacgccttcaacaacagcattatccccgaggacacattcttcccaagccccgagagcagcgactccaccgaccacgtgaagcccaaagagacagagaacaccaagcagcccagcaagagctgccacaagcccaaggccatcgtgcacaccgagaaagtgaacatgatgagcctgaccgtgctgggcctgcggatgctgttcgccaaaaccgtggccgtgaacttcctgctgaccgccaagctgttcttcctc

SEQ ID NO: 34436 - DNA, 2613 bp, synthetic construct
  source 1..2613: mol_type = other DNA
atggccttaccagtgaccgccttgctcctgccgctggccttgctgctccacgccgccaggccgctcgaggaggacctgaagaacgtgttcccacctgaggtggccgtgttcgagcctagcgaggccgagatcagccacacccagaaagccaccctcgtgtgcctggctaccggcttctaccccgaccatgtggaactgtcttggtgggtcaacggcaaagaggtgcacagcggcgtgtgtaccgacccccagccactgaaagaacagcccgccctgaacgacagccggtactgcctgagcagcagactgagagtgtccgccaccttctggcagaacccccggaaccacttcagatgccaggtgcagttctacggcctgagcgagaacgacgagtggacccaggacagagccaagcccgtgacccagatcgtgtctgccgaagcctggggcagagccgattgcggctttaccagcgagagctaccagcagggcgtgctgagcgccaccaacctgagcgtgatcggcttcagaatcctgctgctgaaagtggccggctttaacctgctgatgaccctgcggctgtggtccagcagggccaagcgatctggatctggagcaacaaacttctcactactcaaacaagcaggtgacgtggaggagaatcccgggcctactagcatggccttaccagtgaccgccttgctcctgccgctggccttgctgctccacgccgccaggccgatccagatgacccagagccccagcagcctgtctgccagcgtgggcgacagagtgaccatcacctgtcggagcagccagagcatcgtgcactccgtgggcaacaccttcctggaatggtatcagcagaagcccggcaaggcccccaagctgctgatctacaaggtgtccaacagattcagcggcgtgcccagcaggtttagcggctctggcagcggcaccgacttcaccctgaccatctctagcctccagcccgaggacttcgccacctactactgttttcaaggcagccagttcccctacaccttcggccagggaacaaaggtggaaatcaagcggggcggaggcggaagtggaggcggaggatctggcggcggaggctctgaagtgcaactggtggaaagcggaggcggcctggtgcagcctggcggatctctgagactgagctgtgccgccagcggctacgagttcagccggtcctggatgaactgggtgcgccaggcccctggcaagggactggaatgggtgggaagaatctaccccggcgacggcgacaccaactacagcggcaagttcaagggccggttcaccatcagcgccgacaccagcaagaacaccgcctacctccagatgaacagcctgcgggccgaggataccgccgtgtactactgtgccagagatggcagctcctgggactggtacttcgacgtgtggggacagggaacccttgtgaccgtgtccagcacgcgtatccagaaccctgatcctgccgtgtaccagctgcgggatagcaagagcagcgacaagagcgtgtgtctgttcaccgacttcgacagccagaccaacgtgtcccagagcaaggactccgacgtgtacatcaccgataagtgcgtgctggacatgcggagcatggacttcaagagcaactccgccgtggcctggtccaacaagtccgatttcgcctgcgccaacgccttcaacaacagcattatccccgaggacacattcttcccaagccccgagagcagctgcgacgtgaagctggtggaaaagagcttcgagacagacaccaacctgaacttccagatcctgtacgaggtgatcggcttcagaatcctgctgctgaaagtggccggctttaacctgctgatgaccctgcggctgtggtccagccgcgccaagagaagcggatctggcgtgaagcagaccctgaatttcgacctgctgaagctggctggcgacgtggaatccaacccaggcccttctagaggccatatgaccgagtacaagcccacggtgcgcctcgccacccgcgacgacgtccccagggccgtacgcaccctcgccgccgcgttcgccgactaccccgccacgcgccacaccgtcgatccggaccgccacatcgagcgggtcaccgagctgcaagaactcttcctcacgcgcgtcgggctcgacatcggcaaggtgtgggtcgcggacgacggcgccgcggtggcggtctggaccacgccggagagcgtcgaagcgggggcggtgttcgccgagatcggcccgcgcatggccgagttgagcggttcccggctggccgcgcagcaacagatggaaggcctcctggcgccgcaccggcccaaggagcccgcgtggttcctggccaccgtcggcgtctcgcccgaccaccagggcaagggtctgggcagcgccgtcgtgctccccggagtggaggcggccgagcgcgccggggtgcccgccttcctggagacctccgcgccccgcaacctccccttctacgagcggctcggcttcaccgtcaccgccgacgtcgaggtgcccgaaggaccgcgcacctggtgcatgacccgcaagcccggtgcctga

SEQ ID NO: 34437 - DNA, 2613 bp, synthetic construct
  source 1..2613: mol_type = other DNA
atggccttaccagtgaccgccttgctcctgccgctggccttgctgctccacgccgccaggccgctcgagatccagaaccctgatcctgccgtgtaccagctgcgggatagcaagagcagcgacaagagcgtgtgtctgttcaccgacttcgacagccagaccaacgtgtcccagagcaaggactccgacgtgtacatcaccgataagtgcgtgctggacatgcggagcatggacttcaagagcaactccgccgtggcctggtccaacaagtccgatttcgcctgcgccaacgccttcaacaacagcattatccccgaggacacattcttcccaagccccgagagcagctgcgacgtgaagctggtggaaaagagcttcgagacagacaccaacctgaacttccagatcctgtacgaggtgatcggcttcagaatcctgctgctgaaagtggccggctttaacctgctgatgaccctgcggctgtggtccagcagggccaagcgatctggatctggagcaacaaacttctcactactcaaacaagcaggtgacgtggaggagaatcccgggcctactagcatggccttaccagtgaccgccttgctcctgccgctggccttgctgctccacgccgccaggccgatccagatgacccagagccccagcagcctgtctgccagcgtgggcgacagagtgaccatcacctgtcggagcagccagagcatcgtgcactccgtgggcaacaccttcctggaatggtatcagcagaagcccggcaaggcccccaagctgctgatctacaaggtgtccaacagattcagcggcgtgcccagcaggtttagcggctctggcagcggcaccgacttcaccctgaccatctctagcctccagcccgaggacttcgccacctactactgttttcaaggcagccagttcccctacaccttcggccagggaacaaaggtggaaatcaagcggggcggaggcggaagtggaggcggaggatctggcggcggaggctctgaagtgcaactggtggaaagcggaggcggcctggtgcagcctggcggatctctgagactgagctgtgccgccagcggctacgagttcagccggtcctggatgaactgggtgcgccaggcccctggcaagggactggaatgggtgggaagaatctaccccggcgacggcgacaccaactacagcggcaagttcaagggccggttcaccatcagcgccgacaccagcaagaacaccgcctacctccagatgaacagcctgcgggccgaggataccgccgtgtactactgtgccagagatggcagctcctgggactggtacttcgacgtgtggggacagggaacccttgtgaccgtgtccagcacgcgtgaggacctgaagaacgtgttcccacctgaggtggccgtgttcgagcctagcgaggccgagatcagccacacccagaaagccaccctcgtgtgcctggctaccggcttctaccccgaccatgtggaactgtcttggtgggtcaacggcaaagaggtgcacagcggcgtgtgtaccgacccccagccactgaaagaacagcccgccctgaacgacagccggtactgcctgagcagcagactgagagtgtccgccaccttctggcagaacccccggaaccacttcagatgccaggtgcagttctacggcctgagcgagaacgacgagtggacccaggacagagccaagcccgtgacccagatcgtgtctgccgaagcctggggcagagccgattgcggctttaccagcgagagctaccagcagggcgtgctgagcgccaccaacctgagcgtgatcggcttcagaatcctgctgctgaaagtggccggctttaacctgctgatgaccctgcggctgtggtccagccgcgccaagagaagcggatctggcgtgaagcagaccctgaatttcgacctgctgaagctggctggcgacgtggaatccaacccaggcccttctagaggccatatgaccgagtacaagcccacggtgcgcctcgccacccgcgacgacgtccccagggccgtacgcaccctcgccgccgcgttcgccgactaccccgccacgcgccacaccgtcgatccggaccgccacatcgagcgggtcaccgagctgcaagaactcttcctcacgcgcgtcgggctcgacatcggcaaggtgtgggtcgcggacgacggcgccgcggtggcggtctggaccacgccggagagcgtcgaagcgggggcggtgttcgccgagatcggcccgcgcatggccgagttgagcggttcccggctggccgcgcagcaacagatggaaggcctcctggcgccgcaccggcccaaggagcccgcgtggttcctggccaccgtcggcgtctcgcccgaccaccagggcaagggtctgggcagcgccgtcgtgctccccggagtggaggcggccgagcgcgccggggtgcccgccttcctggagacctccgcgccccgcaacctccccttctacgagcggctcggcttcaccgtcaccgccgacgtcgaggtgcccgaaggaccgcgcacctggtgcatgacccgcaagcccggtgcctga

SEQ ID NO: 34438 - DNA, 2613 bp, synthetic construct; identical to SEQ ID NO: 34436
  source 1..2613: mol_type = other DNA

SEQ ID NO: 34439 - DNA, 2937 bp, synthetic construct
  source 1..2937: mol_type = other DNA
atggccttaccagtgaccgccttgctcctgccgctggccttgctgctccacgccgccaggccgctcgaggaggacctgaagaacgtgttcccacctgaggtggccgtgttcgagcctagcgaggccgagatcagccacacccagaaagccaccctcgtgtgcctggctaccggcttctaccccgaccatgtggaactgtcttggtgggtcaacggcaaagaggtgcacagcggcgtgtctaccgacccccagccactgaaagaacagcccgccctgaacgacagccggtactgcctgagcagcagactgagagtgtccgccaccttctggcagaacccccggaaccacttcagatgccaggtgcagttctacggcctgagcgagaacgacgagtggacccaggacagagccaagcccgtgacccagatcgtgtctgccgaagcctggggcagagccgatgatgtgattaagatccactggcaggaaaagaagtccaacaccatcctgggcagccaggaaggcaacaccatgaagaccaacgacacctacatgaagttcagctggctgaccgtgcccgagaagtccctggacaaagaacacagatgcatcgtgcggcacgaaaacaacaagaacggcgtggaccaggaaatcatcttcccacccatcaagaccgatgtgattacaatggaccccaaggacaactgctccaaggacgccaacgataccctgctgctccagctgaccaacaccagcgcctactacatgtacttgttgctgctgctgaagtccgtggtgtacttcgccatcatcacatgctgcctgctgatggctatggtcaagcggaaggacagccggggaagggccaagcgatctggatctggagcaacaaacttctcactactcaaacaagcaggtgacgtggaggagaatcccgggcctactagcatggccttaccagtgaccgccttgctcctgccgctggccttgctgctccacgccgccaggccgatccagatgacccagagccccagcagcctgtctgccagcgtgggcgacagagtgaccatcacctgtcggagcagccagagcatcgtgcactccgtgggcaacaccttcctggaatggtatcagcagaagcccggcaaggcccccaagctgctgatctacaaggtgtccaacagattcagcggcgtgcccagcaggtttagcggctctggcagcggcaccgacttcaccctgaccatctctagcctccagcccgaggacttcgccacctactactgttttcaaggcagccagttcccctacaccttcggccagggaacaaaggtggaaatcaagcggggcggaggcggaagtggaggcggaggatctggcggcggaggctctgaagtgcaactggtggaaagcggaggcggcctggtgcagcctggcggatctctgagactgagctgtgccgccagcggctacgagttcagccggtcctggatgaactgggtgcgccaggcccctggcaagggactggaatgggtgggaagaatctaccccggcgacggcgacaccaactacagcggcaagttcaagggccggttcaccatcagcgccgacaccagcaagaacaccgcctacctccagatgaacagcctgcgggccgaggataccgccgtgtactactgtgccagagatggcagctcctgggactggtacttcgacgtgtggggacagggaacccttgtgaccgtgtccagcacgcgtatccagaaccctgatcctgccgtgtaccagctgcgggatagcaagagcagcgacaagagcgtgtgtctgttcaccgacttcgacagccagaccaacgtgtcccagagcaaggactccgacgtgtacatcaccgataagaccgtgctggacatgcggagcatggacttcaagagcaactccgccgtggcctggtccaacaagtccgatttcgcctgcgccaacgccttcaacaacagcattatccccgaggacacattcttcccaagccccgagagcagcgactccaccgaccacgtgaagcccaaagagacagagaacaccaagcagcccagcaagagctgccacaagcccaaggccatcgtgcacaccgagaaagtgaacatgatgagcctgaccgtgctgggcctgcggatgctgttcgccaaaaccgtggccgtgaacttcctgctgaccgccaagctgttcttcctcctcaccgcccgcgccaagagaagcggatctggcgtgaagcagaccctgaatttcgacctgctgaagctggctggcgacgtggaatccaacccaggcccttctagaggccatatgaccgagtacaagcccacggtgcgcctcgccacccgcgacgacgtccccagggccgtacgcaccctcgccgccgcgttcgccgactaccccgccacgcgccacaccgtcgatccggaccgccacatcgagcgggtcaccgagctgcaagaactcttcctcacgcgcgtcgggctcgacatcggcaaggtgtgggtcgcggacgacggcgccgcggtggcggtctggaccacgccggagagcgtcgaagcgggggcggtgttcgccgagatcggcccgcgcatggccgagttgagcggttcccggctggccgcgcagcaacagatggaaggcctcctggcgccgcaccggcccaaggagcccgcgtggttcctggccaccgtcggcgtctcgcccgaccaccagggcaagggtctgggcagcgccgtcgtgctccccggagtggaggcggccgagcgcgccggggtgcccgccttcctggagacctccgcgccccgcaacctccccttctacgagcggctcggcttcaccgtcaccgccgacgtcgaggtgcccgaaggaccgcgcacctggtgcatgacccgcaagcccggtgcctga

SEQ ID NO: 34440 - DNA, 2937 bp, synthetic construct
  source 1..2937: mol_type = other DNA
atggccttaccagtgaccgccttgctcctgccgctggccttgctgctccacgccgccaggccgctcgagatccagaaccctgatcctgccgtgtaccagctgcgggatagcaagagcagcgacaagagcgtgtgtctgttcaccgacttcgacagccagaccaacgtgtcccagagcaaggactccgacgtgtacatcaccgataagaccgtgctggacatgcggagcatggacttcaagagcaactccgccgtggcctggtccaacaagtccgatttcgcctgcgccaacgccttcaacaacagcattatccccgaggacacattcttcccaagccccgagagcagcgactccaccgaccacgtgaagcccaaagagacagagaacaccaagcagcccagcaagagctgccacaagcccaaggccatcgtgcacaccgagaaagtgaacatgatgagcctgaccgtgctgggcctgcggatgctgttcgccaaaaccgtggccgtgaacttcctgctgaccgccaagctgttcttcctcctcaccgccagggccaagcgatctggatctggagcaacaaacttctcactactcaaacaagcaggtgacgtggaggagaatcccgggcctactagcatggccttaccagtgaccgccttgctcctgccgctggccttgctgctccacgccgccaggccgatccagatgacccagagccccagcagcctgtctgccagcgtgggcgacagagtgaccatcacctgtcggagcagccagagcatcgtgcactccgtgggcaacaccttcctggaatggtatcagcagaagcccggcaaggcccccaagctgctgatctacaaggtgtccaacagattcagcggcgtgcccagcaggtttagcggctctggcagcggcaccgacttcaccctgaccatctctagcctccagcccgaggacttcgccacctactactgttttcaaggcagccagttcccctacaccttcggccagggaacaaaggtggaaatcaagcggggcggaggcggaagtggaggcggaggatctggcggcggaggctctgaagtgcaactggtggaaagcggaggcggcctggtgcagcctggcggatctctgagactgagctgtgccgccagcggctacgagttcagccggtcctggatgaactgggtgcgccaggcccctggcaagggactggaatgggtgggaagaatctaccccggcgacggcgacaccaactacagcggcaagttcaagggccggttcaccatcagcgccgacaccagcaagaacaccgcctacctccagatgaacagcctgcgggccgaggataccgccgtgtactactgtgccagagatggcagctcctgggactggtacttcgacgtgtggggacagggaacccttgtgaccgtgtccagcacgcgtgaggacctgaagaacgtgttcccacctgaggtggccgtgttcgagcctagcgaggccgagatcagccacacccagaaagccaccctcgtgtgcctggctaccggcttctaccccgaccatgtggaactgtcttggtgggtcaacggcaaagaggtgcacagcggcgtgtctaccgacccccagccactgaaagaacagcccgccctgaacgacagccggtactgcctgagcagcagactgagagtgtccgccaccttctggcagaacccccggaaccacttcagatgccaggtgcagttctacggcctgagcgagaacgacgagtggacccaggacagagccaagcccgtgacccagatcgtgtctgccgaagcctggggcagagccgatgatgtgattaagatccactggcaggaaaagaagtccaacaccatcctgggcagccaggaaggcaacaccatgaagaccaacgacacctacatgaagttcagctggctgaccgtgcccgagaagtccctggacaaagaacacagatgcatcgtgcggcacgaaaacaacaagaacggcgtggaccaggaaatcatcttcccacccatcaagaccgatgtgattacaatggaccccaaggacaactgctccaaggacgccaacgataccctgctgctccagctgaccaacaccagcgcctactacatgtacttgttgctgctgctgaagtccgtggtgtacttcgccatcatcacatgctgcctgctgatggctatggtcaagcggaaggacagccggggacgcgccaagagaagcggatctggcgtgaagcagaccctgaatttcgacctgctgaagctggctggcgacgtggaatccaacccaggcccttctagaggccatatgaccgagtacaagcccacggtgcgcctcgccacccgcgacgacgtccccagggccgtacgcaccctcgccgccgcgttcgccgactaccccgccacgcgccacaccgtcgatccggaccgccacatcgagcgggtcaccgagctgcaagaactcttcctcacgcgcgtcgggctcgacatcggcaaggtgtgggtcgcggacgacggcgccgcggtggcggtctggaccacgccggagagcgtcgaagcgggggcggtgttcgccgagatcggcccgcgcatggccgagttgagcggttcccggctggccgcgcagcaacagatggaaggcctcctggcgccgcaccggcccaaggagcccgcgtggttcctggccaccgtcggcgtctcgcccgaccaccagggcaagggtctgggcagcgccgtcgtgctccccggagtggaggcggccgagcgcgccggggtgcccgccttcctggagacctccgcgccccgcaacctccccttctacgagcggctcggcttcaccgtcaccgccgacgtcgaggtgcccgaaggaccgcgcacctggtgcatgacccgcaagcccggtgcctga

SEQ ID NO: 34441 - DNA, 2931 bp, synthetic construct
  source 1..2931: mol_type = other DNA
atggccttaccagtgaccgccttgctcctgccgctggccttgctgctccacgccgccaggccgctcgaggaggacctgaagaacgtgttcccacctgaggtggccgtgttcgagcctagcgaggccgagatcagccacacccagaaagccaccctcgtgtgcctggctaccggcttctaccccgaccatgtggaactgtcttggtgggtcaacggcaaagaggtgcacagcggcgtgtgtaccgacccccagccactgaaagaacagcccgccctgaacgacagccggtactgcctgagcagcagactgagagtgtccgccaccttctggcagaacccccggaaccacttcagatgccaggtgcagttctacggcctgagcgagaacgacgagtggacccaggacagagccaagcccgtgacccagatcgtgtctgccgaagcctggggcagagccgatgatgtgattaagatccactggcaggaaaagaagtccaacaccatcctgggcagccaggaaggcaacaccatgaagaccaacgacacctacatgaagttcagctggctgaccgtgcccgagaagtccctggacaaagaacacagatgcatcgtgcggcacgaaaacaacaagaacggcgtggaccaggaaatcatcttcccacccatcaagaccgatgtgattacaatggaccccaaggacaactgctccaaggacgccaacgataccctgctgctccagctgaccaacaccagcgcctactacatgtacttgttgctgctgctgaagtccgtggtgtacttcgccatcatcacatgctgcctgctgcggagaaccgccttctgctgcaacggcgagaagtctagggccaagcgatctggatctggagcaacaaacttctcactactcaaacaagcaggtgacgtggaggagaatcccgggcctactagcatggccttaccagtgaccgccttgctcctgccgctggccttgctgctccacgccgccaggccgatccagatgacccagagccccagcagcctgtctgccagcgtgggcgacagagtgaccatcacctgtcggagcagccagagcatcgtgcactccgtgggcaacaccttcctggaatggtatcagcagaagcccggcaaggcccccaagctgctgatctacaaggtgtccaacagattcagcggcgtgcccagcaggtttagcggctctggcagcggcaccgacttcaccctgaccatctctagcctccagcccgaggacttcgccacctactactgttttcaaggcagccagttcccctacaccttcggccagggaacaaaggtggaaatcaagcggggcggaggcggaagtggaggcggaggatctggcggcggaggctctgaagtgcaactggtggaaagcggaggcggcctggtgcagcctggcggatctctgagactgagctgtgccgccagcggctacgagttcagccggtcctggatgaactgggtgcgccaggcccctggcaagggactggaatgggtgggaagaatctaccccggcgacggcgacaccaactacagcggcaagttcaagggccggttcaccatcagcgccgacaccagcaagaacaccgcctacctccagatgaacagcctgcgggccgaggataccgccgtgtactactgtgccagagatggcagctcctgggactggtacttcgacgtgtggggacagggaacccttgtgaccgtgtccagcacgcgtatccagaaccctgatcctgccgtgtaccagctgcgggatagcaagagcagcgacaagagcgtgtgtctgttcaccgacttcgacagccagaccaacgtgtcccagagcaaggactccgacgtgtacatcaccgataagtgcgtgctggacatgcggagcatggacttcaagagcaactccgccgtggcctggtccaacaagtccgatttcgcctgcgccaacgccttcaacaacagcattatccccgaggacacattcttcccaagccccgagagcagcgactccaccgaccacgtgaagcccaaagagacagagaacaccaagcagcccagcaagagctgccacaagcccaaggccatcgtgcacaccgagaaagtgaacatgatgagcctgaccgtgctgggcctgcggatgctgttcgccaaaaccgtggccgtgaacttcctgctgaccgccaagctgttcttcctccgcgccaagagaagcggatctggcgtgaagcagaccctgaatttcgacctgctgaagctggctggcgacgtggaatccaacccaggcccttctagaggccatatgaccgagtacaagcccacggtgcgcctcgccacccgcgacgacgtccccagggccgtacgcaccctcgccgccgcgttcgccgactaccccgccacgcgccacaccgtcgatccggaccgccacatcgagcgggtcaccgagctgcaagaactcttcctcacgcgcgtcgggctcgacatcggcaaggtgtgggtcgcggacgacggcgccgcggtggcggtctggaccacgccggagagcgtcgaagcgggggcggtgttcgccgagatcggcccgcgcatggccgagttgagcggttcccggctggccgcgcagcaacagatggaaggcctcctggcgccgcaccggcccaaggagcccgcgtggttcctggccaccgtcggcgtctcgcccgaccaccagggcaagggtctgggcagcgccgtcgtgctccccggagtggaggcggccgagcgcgccggggtgcccgccttcctggagacctccgcgccccgcaacctccccttctacgagcggctcggcttcaccgtcaccgccgacgtcgaggtgcccgaaggaccgcgcacctggtgcatgacccgcaagcccggtgcctga

SEQ ID NO: 34442 - DNA, 2931 bp, synthetic construct
  source 1..2931: mol_type = other DNA
atggccttaccagtgaccgccttgctcctgccgctggccttgctgctccacgccgccaggccgctcgagatccagaaccctgatcctgccgtgtaccagctgcgggatagcaagagcagcgacaagagcgtgtgtctgttcaccgacttcgacagccagaccaacgtgtcccagagcaaggactccgacgtgtacatcaccgataagtgcgtgctggacatgcggagcatggacttcaagagcaactccgccgtggcctggtccaacaagtccgatttcgcctgcgccaacgccttcaacaacagcattatccccgaggacacattcttcccaagccccgagagcagcgactccaccgaccacgtgaagcccaaagagacagagaacaccaagcagcccagcaagagctgccacaagcccaaggccatcgtgcacaccgagaaagtgaacatgatgagcctgaccgtgctgggcctgcggatgctgttcgccaaaaccgtggccgtgaacttcctgctgaccgccaagctgttcttcctcagggccaagcgatctggatctggagcaacaaacttctcactactcaaacaagcaggtgacgtggaggagaatcccgggcctactagcatggccttaccagtgaccgccttgctcctgccgctggccttgctgctccacgccgccaggccgatccagatgacccagagccccagcagcctgtctgccagcgtgggcgacagagtgaccatcacctgtcggagcagccagagcatcgtgcactccgtgggcaacaccttcctggaatggtatcagcagaagcccggcaaggcccccaagctgctgatctacaaggtgtccaacagattcagcggcgtgcccagcaggtttagcggctctggcagcggcaccgacttcaccctgaccatctctagcctccagcccgaggacttcgccacctactactgttttcaaggcagccagttcccctacaccttcggccagggaacaaaggtggaaatcaagcggggcggaggcggaagtggaggcggaggatctggcggcggaggctctgaagtgcaactggtggaaagcggaggcggcctggtgcagcctggcggatctctgagactgagctgtgccgccagcggctacgagttcagccggtcctggatgaactgggtgcgccaggcccctggcaagggactggaatgggtgggaagaatctaccccggcgacggcgacaccaactacagcggcaagttcaagggccggttcaccatcagcgccgacaccagcaagaacaccgcctacctccagatgaacagcctgcgggccgaggataccgccgtgtactactgtgccagagatggcagctcctgggactggtacttcgacgtgtggggacagggaacccttgtgaccgtgtccagcacgcgtgaggacctgaagaacgtgttcccacctgaggtggccgtgttcgagcctagcgaggccgagatcagccacacccagaaagccaccctcgtgtgcctggctaccggcttctaccccgaccatgtggaactgtcttggtgggtcaacggcaaagaggtgcacagcggcgtgtgtaccgacccccagccactgaaagaacagcccgccctgaacgacagccggtactgcctgagcagcagactgagagtgtccgccaccttctggcagaacccccggaaccacttcagatgccaggtgcagttctacggcctgagcgagaacgacgagtggacccaggacagagccaagcccgtgacccagatcgtgtctgccgaagcctggggcagagccgatgatgtgattaagatccactggcaggaaaagaagtccaacaccatcctgggcagccaggaaggcaacaccatgaagaccaacgacacctacatgaagttcagctggctgaccgtgcccgagaagtccctggacaaagaacacagatgcatcgtgcggcacgaaaacaacaagaacggcgtggaccaggaaatcatcttcccacccatcaagaccgatgtgattacaatggaccccaaggacaactgctccaaggacgccaacgataccctgctgctccagctgaccaacaccagcgcctactacatgtacttgttgctgctgctgaagtccgtggtgtacttcgccatcatcacatgctgcctgctgcggagaaccgccttctgctgcaacggcgagaagtctcgcgccaagagaagcggatctggcgtgaagcagaccctgaatttcgacctgctgaagctggctggcgacgtggaatccaacccaggcccttctagaggccatatgaccgagtacaagcccacggtgcgcctcgccacccgcgacgacgtccccagggccgtacgcaccctcgccgccgcgttcgccgactaccccgccacgcgccacaccgtcgatccggaccgccacatcgagcgggtcaccgagctgcaagaactcttcctcacgcgcgtcgggctcgacatcggcaaggtgtgggtcgcggacgacggcgccgcggtggcggtctggaccacgccggagagcgtcgaagcgggggcggtgttcgccgagatcggcccgcgcatggccgagttgagcggttcccggctggccgcgcagcaacagatggaaggcctcctggcgccgcaccggcccaaggagcccgcgtggttcctggccaccgtcggcgtctcgcccgaccaccagggcaagggtctgggcagcgccgtcgtgctccccggagtggaggcggccgagcgcgccggggtgcccgccttcctggagacctccgcgccccgcaacctccccttctacgagcggctcggcttcaccgtcaccgccgacgtcgaggtgcccgaaggaccgcgcacctggtgcatgacccgcaagcccggtgcctga

SEQ ID NO: 34443 - DNA, 2931 bp, synthetic construct
  source 1..2931: mol_type = other DNA
atggccttaccagtgaccgccttgctcctgccgctggccttgctgctccacgccgccaggccgctcgaggaggacctgaagaacgtgttcccacctgaggtggccgtgttcgagcctagcgaggccgagatcagccacacccagaaagccaccctcgtgtgcctggctaccggcttctaccccgaccatgtggaactgtcttggtgggtcaacggcaaagaggtgcacagcggcgtgtctaccgacccccagccactgaaagaacagcccgccctgaacgacagccggtactgcctgagcagcagactgagagtgtccgccaccttctggcagaacccccggaaccacttcagatgccaggtgcagttctacggcctgagcgagaacgacgagtggacccaggacagagccaagcccgtgacccagatcgtgtctgccgaagcctggggcagagccgatgatgtgattaagatccactggcaggaaaagaagtccaacaccatcctgggcagccaggaaggcaacaccatgaagaccaacgacacctacatgaagttcagctggctgaccgtgcccgagaagtccctggacaaagaacacagatgcatcgtgcggcacgaaaacaacaagaacggcgtggaccaggaaatcatcttcccacccatcaagaccgatgtgattacaatggaccccaaggacaactgctccaaggacgccaacgataccctgctgctccagctgaccaacaccagcgcctactacatgtacttgttgctgctgctgaagtccgtggtgtacttcgccatcatcacatgctgcctgctgcggagaaccgccttctgctgcaacggcgagaagtctagggccaagcgatctggatctggagcaacaaacttctcactactcaaacaagcaggtgacgtggaggagaatcccgggcctactagcatggccttaccagtgaccgccttgctcctgccgctggccttgctgctccacgccgccaggccgatccagatgacccagagccccagcagcctgtctgccagcgtgggcgacagagtgaccatcacctgtcggagcagccagagcatcgtgcactccgtgggcaacaccttcctggaatggtatcagcagaagcccggcaaggcccccaagctgctgatctacaaggtgtccaacagattcagcggcgtgcccagcaggtttagcggctctggcagcggcaccgacttcaccctgaccatctctagcctccagcccgaggacttcgccacctactactgttttcaaggcagccagttcccctacaccttcggccagggaacaaaggtggaaatcaagcggggcggaggcggaagtggaggcggaggatctggcggcggaggctctgaagtgcaactggtggaaagcggaggcggcctggtgcagcctggcggatctctgagactgagctgtgccgccagcggctacgagttcagccggtcctggatgaactgggtgcgccaggcccctggcaagggactggaatgggtgggaagaatctaccccggcgacggcgacaccaactacagcggcaagttcaagggccggttcaccatcagcgccgacaccagcaagaacaccgcctacctccagatgaacagcctgcgggccgaggataccgccgtgtactactgtgccagagatggcagctcctgggactggtacttcgacgtgtggggacagggaacccttgtgaccgtgtccagcacgcgtatccagaaccctgatcctgccgtgtaccagctgcgggatagcaagagcagcgacaagagcgtgtgtctgttcaccgacttcgacagccagaccaacgtgtcccagagcaaggactccgacgtgtacatcaccgataagaccgtgctggacatgcggagcatggacttcaagagcaactccgccgtggcctggtccaacaagtccgatttcgcctgcgccaacgccttcaacaacagcattatccccgaggacacattcttcccaagccccgagagcagcgactccaccgaccacgtgaagcccaaagagacagagaacaccaagcagcccagcaagagctgccacaagcccaaggccatcgtgcacaccgagaaagtgaacatgatgagcctgaccgtgctgggcctgcggatgctgttcgccaaaaccgtggccgtgaacttcctgctgaccgccaagctgttcttcctccgcgccaagagaagcggatctggcgtgaagcagaccctgaatttcgacctgctgaagctggctggcgacgtggaatccaacccaggcccttctagaggccatatgaccgagtacaagcccacggtgcgcctcgccacccgcgacgacgtccccagggccgtacgcaccctcgccgccgcgttcgccgactaccccgccacgcgccacaccgtcgatccggaccgccacatcgagcgggtcaccgagctgcaagaactcttcctcacgcgcgtcgggctcgacatcggcaaggtgtgggtcgcggacgacggcgccgcggtggcggtctggaccacgccggagagcgtcgaagcgggggcggtgttcgccgagatcggcccgcgcatggccgagttgagcggttcccggctggccgcgcagcaacagatggaaggcctcctggcgccgcaccggcccaaggagcccgcgtggttcctggccaccgtcggcgtctcgcccgaccaccagggcaagggtctgggcagcgccgtcgtgctccccggagtggaggcggccgagcgcgccggggtgcccgccttcctggagacctccgcgccccgcaacctccccttctacgagcggctcggcttcaccgtcaccgccgacgtcgaggtgcccgaaggaccgcgcacctggtgcatgacccgcaagcccggtgcctga

SEQ ID NO: 34444 - DNA, 2931 bp, synthetic construct
  source 1..2931: mol_type = other DNA
atggccttaccagtgaccgccttgctcctgccgctggccttgctgctccacgccgccaggccgctcgagatccagaaccctgatcctgccgtgtaccagctgcgggatagcaagagcagcgacaagagcgtgtgtctgttcaccgacttcgacagccagaccaacgtgtcccagagcaaggactccgacgtgtacatcaccgataagaccgtgctggacatgcggagcatggacttcaagagcaactccgccgtggcctggtccaacaagtccgatttcgcctgcgccaacgccttcaacaacagcattatccccgaggacacattcttcccaagccccgagagcagcgactccaccgaccacgtgaagcccaaagagacagagaacaccaagcagcccagcaagagctgccacaagcccaaggccatcgtgcacaccgagaaagtgaacatgatgagcctgaccgtgctgggcctgcggatgctgttcgccaaaaccgtggccgtgaacttcctgctgaccgccaagctgttcttcctcagggccaagcgatctggatctggagcaacaaacttctcactactcaaacaagcaggtgacgtggaggagaatcccgggcctactagcatggccttaccagtgaccgccttgctcctgccgctggccttgctgctccacgccgccaggccgatccagatgacccagagccccagcagcctgtctgccagcgtgggcgacagagtgaccatcacctgtcggagcagccagagcatcgtgcactccgtgggcaacaccttcctggaatggtatcagcagaagcccggcaaggcccccaagctgctgatctacaaggtgtccaacagattcagcggcgtgcccagcaggtttagcggctctggcagcggcaccgacttcaccctgaccatctctagcctccagcccgaggacttcgccacctactactgttttcaaggcagccagttcccctacaccttcggccagggaacaaaggtggaaatcaagcggggcggaggcggaagtggaggcggaggatctggcggcggaggctctgaagtgcaactggtggaaagcggaggcggcctggtgcagcctggcggatctctgagactgagctgtgccgccagcggctacgagttcagccggtcctggatgaactgggtgcgccaggcccctggcaagggactggaatgggtgggaagaatctaccccggcgacggcgacaccaactacagcggcaagttcaagggccggttcaccatcagcgccgacaccagcaagaacaccgcctacctccagatgaacagcctgcgggccgaggataccgccgtgtactactgtgccagagatggcagctcctgggactggtacttcgacgtgtggggacagggaacccttgtgaccgtgtccagcacgcgtgaggacctgaagaacgtgttcccacctgaggtggccgtgttcgagcctagcgaggccgagatcagccacacccagaaagccaccctcgtgtgcctggctaccggcttctaccccgaccatgtggaactgtcttggtgggtcaacggcaaagaggtgcacagcggcgtgtctaccgacccccagccactgaaagaacagcccgccctgaacgacagccggtactgcctgagcagcagactgagagtgtccgccaccttctggcagaacccccggaaccacttcagatgccaggtgcagttctacggcctgagcgagaacgacgagtggacccaggacagagccaagcccgtgacccagatcgtgtctgccgaagcctggggcagagccgatgatgtgattaagatccactggcaggaaaagaagtccaacaccatcctgggcagccaggaaggcaacaccatgaagaccaacgacacctacatgaagttcagctggctgaccgtgcccgagaagtccctggacaaagaacacagatgcatcgtgcggcacgaaaacaacaagaacggcgtggaccaggaaatcatcttcccacccatcaagaccgatgtgattacaatggaccccaaggacaactgctccaaggacgccaacgataccctgctgctccagctgaccaacaccagcgcctactacatgtacttgttgctgctgctgaagtccgtggtgtacttcgccatcatcacatgctgcctgctgcggagaaccgccttctgctgcaacggcgagaagtctcgcgccaagagaagcggatctggcgtgaagcagaccctgaatttcgacctgctgaagctggctggcgacgtggaatccaacccaggcccttctagaggccatatgaccgagtacaagcccacggtgcgcctcgccacccgcgacgacgtccccagggccgtacgcaccctcgccgccgcgttcgccgactaccccgccacgcgccacaccgtcgatccggaccgccacatcgagcgggtcaccgagctgcaagaactcttcctcacgcgcgtcgggctcgacatcggcaaggtgtgggtcgcggacgacggcgccgcggtggcggtctggaccacgccggagagcgtcgaagcgggggcggtgttcgccgagatcggcccgcgcatggccgagttgagcggttcccggctggccgcgcagcaacagatggaaggcctcctggcgccgcaccggcccaaggagcccgcgtggttcctggccaccgtcggcgtctcgcccgaccaccagggcaagggtctgggcagcgccgtcgtgctccccggagtggaggcggccgagcgcgccggggtgcccgccttcctggagacctccgcgccccgcaacctccccttctacgagcggctcggcttcaccgtcaccgccgacgtcgaggtgcccgaaggaccgcgcacctggtgcatgacccgcaagcccggtgcctga

SEQ ID NO: 34445 - DNA, 2625 bp, synthetic construct
  source 1..2625: mol_type = other DNA
atggccttaccagtgaccgccttgctcctgccgctggccttgctgctccacgccgccaggccgctcgaggaggacctgaagaacgtgttcccacctgaggtggccgtgttcgagcctagcaaggccgagatcgcccacacccagaaagccaccctcgtgtgcctggctaccggcttctaccccgaccatgtggaactgtcttggtgggtcaacggcaaagaggtgcacagcggcgtgtgtaccgacccccagccactgaaagaacagcccgccctgaacgacagccggtactgcctgagcagcagactgagagtgtccgccaccttctggcagaacccccggaaccacttcagatgccaggtgcagttctacggcctgagcgagaacgacgagtggacccaggacagagccaagcccgtgacccagatcgtgtctgccgaagcctggggcagagccgattgcggcatcaccagcgccagctaccaccagggcgtgctgagcgccaccatcctgtacgagatcctgctgggcaaggccaccctgtacgccgtgctggtgtctgccctggtgctgatggctatggtcaagcggaaggacagccggggaagggccaagcgatctggatctggagcaacaaacttctcactactcaaacaagcaggtgacgtggaggagaatcccgggcctactagcatggccttaccagtgaccgccttgctcctgccgctggccttgctgctccacgccgccaggccgatccagatgacccagagccccagcagcctgtctgccagcgtgggcgacagagtgaccatcacctgtcggagcagccagagcatcgtgcactccgtgggcaacaccttcctggaatggtatcagcagaagcccggcaaggcccccaagctgctgatctacaaggtgtccaacagattcagcggcgtgcccagcaggtttagcggctctggcagcggcaccgacttcaccctgaccatctctagcctccagcccgaggacttcgccacctactactgttttcaaggcagccagttcccctacaccttcggccagggaacaaaggtggaaatcaagcggggcggaggcggaagtggaggcggaggatctggcggcggaggctctgaagtgcaactggtggaaagcggaggcggcctggtgcagcctggcggatctctgagactgagctgtgccgccagcggctacgagttcagccggtcctggatgaactgggtgcgccaggcccctggcaagggactggaatgggtgggaagaatctaccccggcgacggcgacaccaactacagcggcaagttcaagggccggttcaccatcagcgccgacaccagcaagaacaccgcctacctccagatgaacagcctgcgggccgaggataccgccgtgtactactgtgccagagatggcagctcctgggactggtacttcgacgtgtggggacagggaacccttgtgaccgtgtccagcacgcgtatccagaaccctgatcctgccgtgtaccagctgcgggatagcaagagcagcgacaagagcgtgtgtctgttcaccgacttcgacagccagaccaacgtgtcccagagcaaggactccgacgtgtacatcaccgataagtgcgtgctggacatgcggagcatggacttcaagagcaactccgccgtggcctggtccaacaagtccgatttcgcctgcgccaacgccttcaacaacagcattatccccgaggacacattcttcccaagcagcgacgtgccctgcgacgtgaagctggtggaaaagagcttcgagacagacaccaacctgaacttccagaacctgagcgtgatcggcttcagaatcctgctgctgaaagtggccggctttaacctgctgatgaccctgcggctgtggtccagccgcgccaagagaagcggatctggcgtgaagcagaccctgaatttcgacctgctgaagctggctggcgacgtggaatccaacccaggcccttctagaggccatatgaccgagtacaagcccacggtgcgcctcgccacccgcgacgacgtccccagggccgtacgcaccctcgccgccgcgttcgccgactaccccgccacgcgccacaccgtcgatccggaccgccacatcgagcgggtcaccgagctgcaagaactcttcctcacgcgcgtcgggctcgacatcggcaaggtgtgggtcgcggacgacggcgccgcggtggcggtctggaccacgccggagagcgtcgaagcgggggcggtgttcgccgagatcggcccgcgcatggccgagttgagcggttcccggctggccgcgcagcaacagatggaaggcctcctggcgccgcaccggcccaaggagcccgcgtggttcctggccaccgtcggcgtctcgcccgaccaccagggcaagggtctgggcagcgccgtcgtgctccccggagtggaggcggccgagcgcgccggggtgcccgccttcctggagacctccgcgccccgcaacctccccttctacgagcggctcggcttcaccgtcaccgccgacgtcgaggtgcccgaaggaccgcgcacctggtgcatgacccgcaagcccggtgcctga

SEQ ID NO: 34446 - DNA, 2625 bp, synthetic construct
  source 1..2625: mol_type = other DNA
atggccttaccagtgaccgccttgctcctgccgctggccttgctgctccacgccgccaggccgctcgagatccagaaccctgatcctgccgtgtaccagctgcgggatagcaagagcagcgacaagagcgtgtgtctgttcaccgacttcgacagccagaccaacgtgtcccagagcaaggactccgacgtgtacatcaccgataagtgcgtgctggacatgcggagcatggacttcaagagcaactccgccgtggcctggtccaacaagtccgatttcgcctgcgccaacgccttcaacaacagcattatccccgaggacacattcttcccaagcagcgacgtgccctgcgacgtgaagctggtggaaaagagcttcgagacagacaccaacctgaacttccagaacctgagcgtgatcggcttcagaatcctgctgctgaaagtggccggctttaacctgctgatgaccctgcggctgtggtccagcagggccaagcgatctggatctggagcaacaaacttctcactactcaaacaagcaggtgacgtggaggagaatcccgggcctactagcatggccttaccagtgaccgccttgctcctgccgctggccttgctgctccacgccgccaggccgatccagatgacccagagccccagcagcctgtctgccagcgtgggcgacagagtgaccatcacctgtcggagcagccagagcatcgtgcactccgtgggcaacaccttcctggaatggtatcagcagaagcccggcaaggcccccaagctgctgatctacaaggtgtccaacagattcagcggcgtgcccagcaggtttagcggctctggcagcggcaccgacttcaccctgaccatctctagcctccagcccgaggacttcgccacctactactgttttcaaggcagccagttcccctacaccttcggccagggaacaaaggtggaaatcaagcggggcggaggcggaagtggaggcggaggatctggcggcggaggctctgaagtgcaactggtggaaagcggaggcggcctggtgcagcctggcggatctctgagactgagctgtgccgccagcggctacgagttcagccggtcctggatgaactgggtgcgccaggcccctggcaagggactggaatgggtgggaagaatctaccccggcgacggcgacaccaactacagcggcaagttcaagggccggttcaccatcagcgccgacaccagcaagaacaccgcctacctccagatgaacagcctgcgggccgaggataccgccgtgtactactgtgccagagatggcagctcctgggactggtacttcgacgtgtggggacagggaacccttgtgaccgtgtccagcacgcgtgaggacctgaagaacgtgttcccacctgaggtggccgtgttcgagcctagcaaggccgagatcgcccacacccagaaagccaccctcgtgtgcctggctaccggcttctaccccgaccatgtggaactgtcttggtgggtcaacggcaaagaggtgcacagcggcgtgtgtaccgacccccagccactgaaagaacagcccgccctgaacgacagccggtactgcctgagcagcagactgagagtgtccgccaccttctggcagaacccccggaaccacttcagatgccaggtgcagttctacggcctgagcgagaacgacgagtggacccaggacagagccaagcccgtgacccagatcgtgtctgccgaagcctggggcagagccgattgcggcatcaccagcgccagctaccaccagggcgtgctgagcgccaccatcctgtacgagatcctgctgggcaaggccaccctgtacgccgtgctggtgtctgccctggtgctgatggctatggtcaagcggaaggacagccggggacgcgccaagagaagcggatctggcgtgaagcagaccctgaatttcgacctgctgaagctggctggcgacgtggaatccaacccaggcccttctagaggccatatgaccgagtacaagcccacggtgcgcctcgccacccgcgacgacgtccccagggccgtacgcaccctcgccgccgcgttcgccgactaccccgccacgcgccacaccgtcgatccggaccgccacatcgagcgggtcaccgagctgcaagaactcttcctcacgcgcgtcgggctcgacatcggcaaggtgtgggtcgcggacgacggcgccgcggtggcggtctggaccacgccggagagcgtcgaagcgggggcggtgttcgccgagatcggcccgcgcatggccgagttgagcggttcccggctggccgcgcagcaacagatggaaggcctcctggcgccgcaccggcccaaggagcccgcgtggttcctggccaccgtcggcgtctcgcccgaccaccagggcaagggtctgggcagcgccgtcgtgctccccggagtggaggcggccgagcgcgccggggtgcccgccttcctggagacctccgcgccccgcaacctccccttctacgagcggctcggcttcaccgtcaccgccgacgtcgaggtgcccgaaggaccgcgcacctggtgcatgacccgcaagcccggtgcctga

SEQ ID NO: 34447 - DNA, 2304 bp, synthetic construct
  source 1..2304: mol_type = other DNA
atggccttaccagtgaccgccttgctcctgccgctggccttgctgctccacgccgccaggccgctcgagcagagttttgggttgttggaccctaaattgtgctatctgttggacggaatcctgttcatttacggagtgatcctgaccgcattgttcctgcgggttaagttttccagatccgcagacgcacccgcttaccaacaagggcagaaccaactctacaatgaacttaatttggggcggagggaagagtacgacgttctggacaaaaggaggggacgagatcccgagatgggcggaaagcctcagcgaaggaagaatccgcaagaggggctttataacgaactccagaaagataaaatggcagaagcctatagtgagattgggatgaagggagaaaggaggaggggtaaaggtcacgatgggttgtaccaaggattgagcacagccactaaagatacctatgatgcgctccacatgcaggccctgccgccaagaagggccaagcgatctggatctggagcaacaaacttctcactactcaaacaagcaggtgacgtggaggagaatcccgggcctactagcatggccttaccagtgaccgccttgctcctgccgctggccttgctgctccacgccgccaggccgatccagatgacccagagccccagcagcctgtctgccagcgtgggcgacagagtgaccatcacctgtcggagcagccagagcatcgtgcactccgtgggcaacaccttcctggaatggtatcagcagaagcccggcaaggcccccaagctgctgatctacaaggtgtccaacagattcagcggcgtgcccagcaggtttagcggctctggcagcggcaccgacttcaccctgaccatctctagcctccagcccgaggacttcgccacctactactgttttcaaggcagccagttcccctacaccttcggccagggaacaaaggtggaaatcaagcggggcggaggcggaagtggaggcggaggatctggcggcggaggctctgaagtgcaactggtggaaagcggaggcggcctggtgcagcctggcggatctctgagactgagctgtgccgccagcggctacgagttcagccggtcctggatgaactgggtgcgccaggcccctggcaagggactggaatgggtgggaagaatctaccccggcgacggcgacaccaactacagcggcaagttcaagggccggttcaccatcagcgccgacaccagcaagaacaccgcctacctccagatgaacagcctgcgggccgaggataccgccgtgtactactgtgccagagatggcagctcctgggactggtacttcgacgtgtggggacagggaacccttgtgaccgtgtccagcacgcgtgagctgggagagcctcagctgtgctatatcctggacgccatcctgtttctgtacggcatcgtgctgaccctgctgtactgccggctgaagatccaagtgcggaaggccgccatcaccagctacgagaaatccgacggcgtgtacaccggcctgagcaccagaaatcaagagacatacgagacactgaagcacgaaaagcctccacaacgcgccaagagaagcggatctggcgtgaagcagaccctgaatttcgacctgctgaagctggctggcgacgtggaatccaacccaggcccttctagaggccatatgaccgagtacaagcccacggtgcgcctcgccacccgcgacgacgtccccagggccgtacgcaccctcgccgccgcgttcgccgactaccccgccacgcgccacaccgtcgatccggaccgccacatcgagcgggtcaccgagctgcaagaactcttcctcacgcgcgtcgggctcgacatcggcaaggtgtgggtcgcggacgacggcgccgcggtggcggtctggaccacgccggagagcgtcgaagcgggggcggtgttcgccgagatcggcccgcgcatggccgagttgagcggttcccggctggccgcgcagcaacagatggaaggcctcctggcgccgcaccggcccaaggagcccgcgtggttcctggccaccgtcggcgtctcgcccgaccaccagggcaagggtctgggcagcgccgtcgtgctccccggagtggaggcggccgagcgcgccggggtgcccgccttcctggagacctccgcgccccgcaacctccccttctacgagcggctcggcttcaccgtcaccgccgacgtcgaggtgcccgaaggaccgcgcacctggtgcatgacccgcaagcccggtgcctga

SEQ ID NO: 34448 - DNA, 2937 bp, synthetic construct; identical to SEQ ID NO: 34439
  source 1..2937: mol_type = other DNA

SEQ ID NO: 34449 - DNA, 2937 bp, synthetic construct; identical to SEQ ID NO: 34440
  source 1..2937: mol_type = other DNA

SEQ ID NO: 34450 - DNA, 2934 bp, synthetic construct
  source 1..2934: mol_type = other DNA
atggccttaccagtgaccgccttgctcctgccgctggccttgctgctccacgccgccaggccgctcgaggaggaggacctgaagaacgtgttcccacctgaggtggccgtgttcgagcctagcgaggccgagatcagccacacccagaaagccaccctcgtgtgcctggctaccggcttctaccccgaccatgtggaactgtcttggtgggtcaacggcaaagaggtgcacagcggcgtgtgtaccgacccccagccactgaaagaacagcccgccctgaacgacagccggtactgcctgagcagcagactgagagtgtccgccaccttctggcagaacccccggaaccacttcagatgccaggtgcagttctacggcctgagcgagaacgacgagtggacccaggacagagccaagcccgtgacccagatcgtgtctgccgaagcctggggcagagccgatgatgtgattaagatccactggcaggaaaagaagtccaacaccatcctgggcagccaggaaggcaacaccatgaagaccaacgacacctacatgaagttcagctggctgaccgtgcccgagaagtccctggacaaagaacacagatgcatcgtgcggcacgaaaacaacaagaacggcgtggaccaggaaatcatcttcccacccatcaagaccgatgtgattacaatggaccccaaggacaactgctccaaggacgccaacgataccctgctgctccagctgaccaacaccagcgcctactacatgtacttgttgctgctgctgaagtccgtggtgtacttcgccatcatcacatgctgcctgctgcggagaaccgccttctgctgcaacggcgagaagtctagggccaagcgatctggatctggagcaacaaacttctcactactcaaacaagcaggtgacgtggaggagaatcccgggcctactagcatggccttaccagtgaccgccttgctcctgccgctggccttgctgctccacgccgccaggccgatccagatgacccagagccccagcagcctgtctgccagcgtgggcgacagagtgaccatcacctgtcggagcagccagagcatcgtgcactccgtgggcaacaccttcctggaatggtatcagcagaagcccggcaaggcccccaagctgctgatctacaaggtgtccaacagattcagcggcgtgcccagcaggtttagcggctctggcagcggcaccgacttcaccctgaccatctctagcctccagcccgaggacttcgccacctactactgttttcaaggcagccagttcccctacaccttcggccagggaacaaaggtggaaatcaagcggggcggaggcggaagtggaggcggaggatctggcggcggaggctctgaagtgcaactggtggaaagcggaggcggcctggtgcagcctggcggatctctgagactgagctgtgccgccagcggctacgagttcagccggtcctggatgaactgggtgcgccaggcccctggcaagggactggaatgggtgggaagaatctaccccggcgacggcgacaccaactacagcggcaagttcaagggccggttcaccatcagcgccgacaccagcaagaacaccgcctacctccagatgaacagcctgcgggccgaggataccgccgtgtactactgtgccagagatggcagctcctgggactggtacttcgacgtgtggggacagggaacccttgtgaccgtgtccagcacgcgtatccagaaccctgatcctgccgtgtaccagctgcgggatagcaagagcagcgacaagagcgtgtgtctgttcaccgacttcgacagccagaccaacgtgtcccagagcaaggactccgacgtgtacatcaccgataagtgcgtgctggacatgcggagcatggacttcaagagcaactccgccgtggcctggtccaacaagtccgatttcgcctgcgccaacgccttcaacaacagcattatccccgaggacacattcttcccaagccccgagagcagcgactccaccgaccacgtgaagcccaaagagacagagaacaccaagcagcccagcaagagctgccacaagcccaaggccatcgtgcacaccgagaaagtgaacatgatgagcctgaccgtgctgggcctgcggatgctgttcgccaaaaccgtggccgtgaacttcctgctgaccgccaagctgttcttcctccgcgccaagagaagcggatctggcgtgaagcagaccctgaatttcgacctgctgaagctggctggcgacgtggaatccaacccaggcccttctagaggccatatgaccgagtacaagcccacggtgcgcctcgccacccgcgacgacgtccccagggccgtacgcaccctcgccgccgcgttcgccgactaccccgccacgcgccacaccgtcgatccggaccgccacatcgagcgggtcaccgagctgcaagaactcttcctcacgcgcgtcgggctcgacatcggcaaggtgtgggtcgcggacgacggcgccgcggtggcggtctggaccacgccggagagcgtcgaagcgggggcggtgttcgccgagatcggcccgcgcatggccgagttgagcggttcccggctggccgcgcagcaacagatggaaggcctcctggcgccgcaccggcccaaggagcccgcgtggttcctggccaccgtcggcgtctcgcccgaccaccagggcaagggtctgggcagcgccgtcgtgctccccggagtggaggcggccgagcgcgccggggtgcccgccttcctggagacctccgcgccccgcaacctccccttctacgagcggctcggcttcaccgtcaccgccgacgtcgaggtgcccgaaggaccgcgcacctggtgcatgacccgcaagcccggtgcctga

SEQ ID NO: 34451 - DNA, 2934 bp, synthetic construct
  source 1..2934: mol_type = other DNA
atggccttaccagtgaccgccttgctcctgccgctggccttgctgctccacgccgccaggccgctcgagatccagaaccctgatcctgccgtgtaccagctgcgggatagcaagagcagcgacaagagcgtgtgtctgttcaccgacttcgacagccagaccaacgtgtcccagagcaaggactccgacgtgtacatcaccgataagtgcgtgctggacatgcggagcatggacttcaagagcaactccgccgtggcctggtccaacaagtccgatttcgcctgcgccaacgccttcaacaacagcattatccccgaggacacattcttcccaagccccgagagcagcgactccaccgaccacgtgaagcccaaagagacagagaacaccaagcagcccagcaagagctgccacaagcccaaggccatcgtgcacaccgagaaagtgaacatgatgagcctgaccgtgctgggcctgcggatgctgttcgccaaaaccgtggccgtgaacttcctgctgaccgccaagctgttcttcctcagggccaagcgatctggatctggagcaacaaacttctcactactcaaacaagcaggtgacgtggaggagaatcccgggcctactagcatggccttaccagtgaccgccttgctcctgccgctggccttgctgctccacgccgccaggccgatccagatgacccagagccccagcagcctgtctgccagcgtgggcgacagagtgaccatcacctgtcggagcagccagagcatcgtgcactccgtgggcaacaccttcctggaatggtatcagcagaagcccggcaaggcccccaagctgctgatctacaaggtgtccaacagattcagcggcgtgcccagcaggtttagcggctctggcagcggcaccgacttcaccctgaccatctctagcctccagcccgaggacttcgccacctactactgttttcaaggcagccagttcccctacaccttcggccagggaacaaaggtggaaatcaagcggggcggaggcggaagtggaggcggaggatctggcggcggaggctctgaagtgcaactggtggaaagcggaggcggcctggtgcagcctggcggatctctgagactgagctgtgccgccagcggctacgagttcagccggtcctggatgaactgggtgcgccaggcccctggcaagggactggaatgggtgggaagaatctaccccggcgacggcgacaccaactacagcggcaagttcaagggccggttcaccatcagcgccgacaccagcaagaacaccgcctacctccagatgaacagcctgcgggccgaggataccgccgtgtactactgtgccagagatggcagctcctgggactggtacttcgacgtgtggggacagggaacccttgtgaccgtgtccagcacgcgtgaggaggacctgaagaacgtgttcccacctgaggtggccgtgttcgagcctagcgaggccgagatcagccacacccagaaagccaccctcgtgtgcctggctaccggcttctaccccgaccatgtggaactgtcttggtgggtcaacggcaaagaggtgcacagcggcgtgtgtaccgacccccagccactgaaagaacagcccgccctgaacgacagccggtactgcctgagcagcagactgagagtgtccgccaccttctggcagaacccccggaaccacttcagatgccaggtgcagttctacggcctgagcgagaacgacgagtggacccaggacagagccaagcccgtgacccagatcgtgtctgccgaagcctggggcagagccgatgatgtgattaagatccactggcaggaaaagaagtccaacaccatcctgggcagccaggaaggcaacaccatgaagaccaacgacacctacatgaagttcagctggctgaccgtgcccgagaagtccctggacaaagaacacagatgcatcgtgcggcacgaaaacaacaagaacggcgtggaccaggaaatcatcttcccacccatcaagaccgatgtgattacaatggaccccaaggacaactgctccaaggacgccaacgataccctgctgctccagctgaccaacaccagcgcctactacatgtacttgttgctgctgctgaagtccgtggtgtacttcgccatcatcacatgctgcctgctgcggagaaccgccttctgctgcaacggcgagaagtctcgcgccaagagaagcggatctggcgtgaagcagaccctgaatttcgacctgctgaagctggctggcgacgtggaatccaacccaggcccttctagaggccatatgaccgagtacaagcccacggtgcgcctcgccacccgcgacgacgtccccagggccgtacgcaccctcgccgccgcgttcgccgactaccccgccacgcgccacaccgtcgatccggaccgccacatcgagcgggtcaccgagctgcaagaactcttcctcacgcgcgtcgggctcgacatcggcaaggtgtgggtcgcggacgacggcgccgcggtggcggtctggaccacgccggagagcgtcgaagcgggggcggtgttcgccgagatcggcccgcgcatggccgagttgagcggttcccggctggccgcgcagcaacagatggaaggcctcctggcgccgcaccggcccaaggagcccgcgtggttcctggccaccgtcggcgtctcgcccgaccaccagggcaagggtctgggcagcgccgtcgtgctccccggagtggaggcggccgagcgcgccggggtgcccgccttcctggagacctccgcgccccgcaacctccccttctacgagcggctcggcttcaccgtcaccgccgacgtcgaggtgcccgaaggaccgcgcacctggtgcatgacccgcaagcccggtgcctga

SEQ ID NO: 34452 - DNA, 2625 bp, synthetic construct
  source 1..2625: mol_type = other DNA
atggccttaccagtgaccgccttgctcctgccgctggccttgctgctccacgccgccaggccgctcgaggaggacctgaagaacgtgttcccacctgaggtggccgtgttcgagcctagcgaggccgagatcagccacacccagaaagccaccctcgtgtgcctggctaccggcttctaccccgaccatgtggaactgtcttggtgggtcaacggcaaagaggtgcacagcggcgtgtctaccgacccccagccactgaaagaacagcccgccctgaacgacagccggtactgcctgagcagcagactgagagtgtccgccaccttctggcagaacccccggaaccacttcagatgccaggtgcagttctacggcctgagcgagaacgacgagtggacccaggacagagccaagcccgtgacccagatcgtgtctgccgaagcctggggcagagccgattgcggctttaccagcgagagctaccagcagggcgtgctgagcgccaccaacctgagcgtgatcggcttcagaatcctgctgctgaaagtggccggctttaacctgctgatgaccctgcggctgtggtccagcagggccaagcgatctggatctggagcaacaaacttctcactactcaaacaagcaggtgacgtggaggagaatcccgggcctactagcatggccttaccagtgaccgccttgctcctgccgctggccttgctgctccacgccgccaggccgatccagatgacccagagccccagcagcctgtctgccagcgtgggcgacagagtgaccatcacctgtcggagcagccagagcatcgtgcactccgtgggcaacaccttcctggaatggtatcagcagaagcccggcaaggcccccaagctgctgatctacaaggtgtccaacagattcagcggcgtgcccagcaggtttagcggctctggcagcggcaccgacttcaccctgaccatctctagcctccagcccgaggacttcgccacctactactgttttcaaggcagccagttcccctacaccttcggccagggaacaaaggtggaaatcaagcggggcggaggcggaagtggaggcggaggatctggcggcggaggctctgaagtgcaactggtggaaagcggaggcggcctggtgcagcctggcggatctctgagactgagctgtgccgccagcggctacgagttcagccggtcctggatgaactgggtgcgccaggcccctggcaagggactggaatgggtgggaagaatctaccccggcgacggcgacaccaactacagcggcaagttcaagggccggttcaccatcagcgccgacaccagcaagaacaccgcctacctccagatgaacagcctgcgggccgaggataccgccgtgtactactgtgccagagatggcagctcctgggactggtacttcgacgtgtggggacagggaacccttgtgaccgtgtccagcacgcgtatccagaaccctgatcctgccgtgtaccagctgcgggatagcaagagcagcgacaagagcgtgtgtctgttcaccgacttcgacagccagaccaacgtgtcccagagcaaggactccgacgtgtacatcaccgataagaccgtgctggacatgcggagcatggacttcaagagcaactccgccgtggcctggtccaacaagtccgatttcgcctgcgccaacgccttcaacaacagcattatccccgaggacacattcttcccaagccccgagagcagctgcgacgtgaagctggtggaaaagagcttcgagacagacaccaacctgaacttccagatcctgtacgagatcctgctgggcaaggccaccctgtacgccgtgctggtgtctgccctggtgctgatggctatggtcaagcggaaggacagccggggacgcgccaagagaagcggatctggcgtgaagcagaccctgaatttcgacctgctgaagctggctggcgacgtggaatccaacccaggcccttctagaggccatatgaccgagtacaagcccacggtgcgcctcgccacccgcgacgacgtccccagggccgtacgcaccctcgccgccgcgttcgccgactaccccgccacgcgccacaccgtcgatccggaccgccacatcgagcgggtcaccgagctgcaagaactcttcctcacgcgcgtcgggctcgacatcggcaaggtgtgggtcgcggacgacggcgccgcggtggcggtctggaccacgccggagagcgtcgaagcgggggcggtgttcgccgagatcggcccgcgcatggccgagttgagcggttcccggctggccgcgcagcaacagatggaaggcctcctggcgccgcaccggcccaaggagcccgcgtggttcctggccaccgtcggcgtctcgcccgaccaccagggcaagggtctgggcagcgccgtcgtgctccccggagtggaggcggccgagcgcgccggggtgcccgccttcctggagacctccgcgccccgcaacctccccttctacgagcggctcggcttcaccgtcaccgccgacgtcgaggtgcccgaaggaccgcgcacctggtgcatgacccgcaagcccggtgcctga

SEQ ID NO: 34453 - DNA, 2625 bp, synthetic construct
  source 1..2625: mol_type = other DNA
atggccttaccagtgaccgccttgctcctgccgctggccttgctgctccacgccgccaggccgctcgagatccagaaccctgatcctgccgtgtaccagctgcgggatagcaagagcagcgacaagagcgtgtgtctgttcaccgacttcgacagccagaccaacgtgtcccagagcaaggactccgacgtgtacatcaccgataagaccgtgctggacatgcggagcatggacttcaagagcaactccgccgtggcctggtccaacaagtccgatttcgcctgcgccaacgccttcaacaacagcattatccccgaggacacattcttcccaagccccgagagcagctgcgacgtgaagctggtggaaaagagcttcgagacagacaccaacctgaacttccagatcctgtacgagatcctgctgggcaaggccaccctgtacgccgtgctggtgtctgccctggtgctgatggctatggtcaagcggaaggacagccggggaagggccaagcgatctggatctggagcaacaaacttctcactactcaaacaagcaggtgacgtggaggagaatcccgggcctactagcatggccttaccagtgaccgccttgctcctgccgctggccttgctgctccacgccgccaggccgatccagatgacccagagccccagcagcctgtctgccagcgtgggcgacagagtgaccatcacctgtcggagcagccagagcatcgtgcactccgtgggcaacaccttcctggaatggtatcagcagaagcccggcaaggcccccaagctgctgatctacaaggtgtccaacagattcagcggcgtgcccagcaggtttagcggctctggcagcggcaccgacttcaccctgaccatctctagcctccagcccgaggacttcgccacctactactgttttcaaggcagccagttcccctacaccttcggccagggaacaaaggtggaaatcaagcggggcggaggcggaagtggaggcggaggatctggcggcggaggctctgaagtgcaactggtggaaagcggaggcggcctggtgcagcctggcggatctctgagactgagctgtgccgccagcggctacgagttcagccggtcctggatgaactgggtgcgccaggcccctggcaagggactggaatgggtgggaagaatctaccccggcgacggcgacaccaactacagcggcaagttcaagggccggttcaccatcagcgccgacaccagcaagaacaccgcctacctccagatgaacagcctgcgggccgaggataccgccgtgtactactgtgccagagatggcagctcctgggactggtacttcgacgtgtggggacagggaacccttgtgaccgtgtccagcacgcgtgaggacctgaagaacgtgttcccacctgaggtggccgtgttcgagcctagcgaggccgagatcagccacacccagaaagccaccctcgtgtgcctggctaccggcttctaccccgaccatgtggaactgtcttggtgggtcaacggcaaagaggtgcacagcggcgtgtctaccgacccccagccactgaaagaacagcccgccctgaacgacagccggtactgcctgagcagcagactgagagtgtccgccaccttctggcagaacccccggaaccacttcagatgccaggtgcagttctacggcctgagcgagaacgacgagtggacccaggacagagccaagcccgtgacccagatcgtgtctgccgaagcctggggcagagccgattgcggctttaccagcgagagctaccagcagggcgtgctgagcgccaccaacctgagcgtgatcggcttcagaatcctgctgctgaaagtggccggctttaacctgctgatgaccctgcggctgtggtccagccgcgccaagagaagcggatctggcgtgaagcagaccctgaatttcgacctgctgaagctggctggcgacgtggaatccaacccaggcccttctagaggccatatgaccgagtacaagcccacggtgcgcctcgccacccgcgacgacgtccccagggccgtacgcaccctcgccgccgcgttcgccgactaccccgccacgcgccacaccgtcgatccggaccgccacatcgagcgggtcaccgagctgcaagaactcttcctcacgcgcgtcgggctcgacatcggcaaggtgtgggtcgcggacgacggcgccgcggtggcggtctggaccacgccggagagcgtcgaagcgggggcggtgttcgccgagatcggcccgcgcatggccgagttgagcggttcccggctggccgcgcagcaacagatggaaggcctcctggcgccgcaccggcccaaggagcccgcgtggttcctggccaccgtcggcgtctcgcccgaccaccagggcaagggtctgggcagcgccgtcgtgctccccggagtggaggcggccgagcgcgccggggtgcccgccttcctggagacctccgcgccccgcaacctccccttctacgagcggctcggcttcaccgtcaccgccgacgtcgaggtgcccgaaggaccgcgcacctggtgcatgacccgcaagcccggtgcctga

SEQ ID NO: 34454 - DNA, 2625 bp, synthetic construct
  source 1..2625: mol_type = other DNA
atggccttaccagtgaccgccttgctcctgccgctggccttgctgctccacgccgccaggccgctcgaggaggacctgaagaacgtgttcccacctgaggtggccgtgttcgagcctagcgaggccgagatcagccacacccagaaagccaccctcgtgtgcctggctaccggcttctaccccgaccatgtggaactgtcttggtgggtcaacggcaaagaggtgcacagcggcgtgtgtaccgacccccagccactgaaagaacagcccgccctgaacgacagccggtactgcctgagcagcagactgagagtgtccgccaccttctggcagaacccccggaaccacttcagatgccaggtgcagttctacggcctgagcgagaacgacgagtggacccaggacagagccaagcccgtgacccagatcgtgtctgccgaagcctggggcagagccgattgcgacgtgaagctggtggaaaagagcttcgagacagacaccaacctgaacttccagaacctgagcgtgatcggcttcagaatcctgctgctgaaagtggccggctttaacctgctgatgaccctgcggctgtggtccagcagggccaagcgatctggatctggagcaacaaacttctcactactcaaacaagcaggtgacgtggaggagaatcccgggcctactagcatggccttaccagtgaccgccttgctcctgccgctggccttgctgctccacgccgccaggccgatccagatgacccagagccccagcagcctgtctgccagcgtgggcgacagagtgaccatcacctgtcggagcagccagagcatcgtgcactccgtgggcaacaccttcctggaatggtatcagcagaagcccggcaaggcccccaagctgctgatctacaaggtgtccaacagattcagcggcgtgcccagcaggtttagcggctctggcagcggcaccgacttcaccctgaccatctctagcctccagcccgaggacttcgccacctactactgttttcaaggcagccagttcccctacaccttcggccagggaacaaaggtggaaatcaagcggggcggaggcggaagtggaggcggaggatctggcggcggaggctctgaagtgcaactggtggaaagcggaggcggcctggtgcagcctggcggatctctgagactgagctgtgccgccagcggctacgagttcagccggtcctggatgaactgggtgcgccaggcccctggcaagggactggaatgggtgggaagaatctaccccggcgacggcgacaccaactacagcggcaagttcaagggccggttcaccatcagcgccgacaccagcaagaacaccgcctacctccagatgaacagcctgcgggccgaggataccgccgtgtactactgtgccagagatggcagctcctgggactggtacttcgacgtgtggggacagggaacccttgtgaccgtgtccagcacgcgtatccagaaccctgatcctgccgtgtaccagctgcgggatagcaagagcagcgacaagagcgtgtgtctgttcaccgacttcgacagccagaccaacgtgtcccagagcaaggactccgacgtgtacatcaccgataagtgcgtgctggacatgcggagcatggacttcaagagcaactccgccgtggcctggtccaacaagtccgatttcgcctgcgccaacgccttcaacaacagcattatccccgaggacacattcttcccaagccccgagagcagctgcggctttaccagcgagagctaccagcagggcgtgctgagcgccaccatcctgtacgagatcctgctgggcaaggccaccctgtacgccgtgctggtgtctgccctggtgctgatggctatggtcaagcggaaggacagccggggacgcgccaagagaagcggatctggcgtgaagcagaccctgaatttcgacctgctgaagctggctggcgacgtggaatccaacccaggcccttctagaggccatatgaccgagtacaagcccacggtgcgcctcgccacccgcgacgacgtccccagggccgtacgcaccctcgccgccgcgttcgccgactaccccgccacgcgccacaccgtcgatccggaccgccacatcgagcgggtcaccgagctgcaagaactcttcctcacgcgcgtcgggctcgacatcggcaaggtgtgggtcgcggacgacggcgccgcggtggcggtctggaccacgccggagagcgtcgaagcgggggcggtgttcgccgagatcggcccgcgcatggccgagttgagcggttcccggctggccgcgcagcaacagatggaaggcctcctggcgccgcaccggcccaaggagcccgcgtggttcctggccaccgtcggcgtctcgcccgaccaccagggcaagggtctgggcagcgccgtcgtgctccccggagtggaggcggccgagcgcgccggggtgcccgccttcctggagacctccgcgccccgcaacctccccttctacgagcggctcggcttcaccgtcaccgccgacgtcgaggtgcccgaaggaccgcgcacctggtgcatgacccgcaagcccggtgcctga

SEQ ID NO: 34455 - DNA, 2625 bp, synthetic construct
  source 1..2625: mol_type = other DNA
atggccttaccagtgaccgccttgctcctgccgctggccttgctgctccacgccgccaggccgctcgaggaggacctgaagaacgtgttcccacctgaggtggccgtgttcgagcctagcgaggccgagatcagccacacccagaaagccaccctcgtgtgcctggctaccggcttctaccccgaccatgtggaactgtcttggtgggtcaacggcaaagaggtgcacagcggcgtgtctaccgacccccagccactgaaagaacagcccgccctgaacgacagccggtactgcctgagcagcagactgagagtgtccgccaccttctggcagaacccccggaaccacttcagatgccaggtgcagttctacggcctgagcgagaacgacgagtggacccaggacagagccaagcccgtgacccagatcgtgtctgccgaagcctggggcagagccgattgcgacgtgaagctggtggaaaagagcttcgagacagacaccaacctgaacttccagaacctgagcgtgatcggcttcagaatcctgctgctgaaagtggccggctttaacctgctgatgaccctgcggctgtggtccagcagggccaagcgatctggatctggagcaacaaacttctcactactcaaacaagcaggtgacgtggaggagaatcccgggcctactagcatggccttaccagtgaccgccttgctcctgccgctggccttgctgctccacgccgccaggccgatccagatgacccagagccccagcagcctgtctgccagcgtgggcgacagagtgaccatcacctgtcggagcagccagagcatcgtgcactccgtgggcaacaccttcctggaatggtatcagcagaagcccggcaaggcccccaagctgctgatctacaaggtgtccaacagattcagcggcgtgcccagcaggtttagcggctctggcagcggcaccgacttcaccctgaccatctctagcctccagcccgaggacttcgccacctactactgttttcaaggcagccagttcccctacaccttcggccagggaacaaaggtggaaatcaagcggggcggaggcggaagtggaggcggaggatctggcggcggaggctctgaagtgcaactggtggaaagcggaggcggcctggtgcagcctggcggatctctgagactgagctgtgccgccagcggctacgagttcagccggtcctggatgaactgggtgcgccaggcccctggcaagggactggaatgggtgggaagaatctaccccggcgacggcgacaccaactacagcggcaagttcaagggccggttcaccatcagcgccgacaccagcaagaacaccgcctacctccagatgaacagcctgcgggccgaggataccgccgtgtactactgtgccagagatggcagctcctgggactggtacttcgacgtgtggggacagggaacccttgtgaccgtgtccagcacgcgtatccagaaccctgatcctgccgtgtaccagctgcgggatagcaagagcagcgacaagagcgtgtgtctgttcaccgacttcgacagccagaccaacgtgtcccagagcaaggactccgacgtgtacatcaccgataagaccgtgctggacatgcggagcatggacttcaagagcaactccgccgtggcctggtccaacaagtccgatttcgcctgcgccaacgccttcaacaacagcattatccccgaggacacattcttcccaagccccgagagcagctgcggctttaccagcgagagctaccagcagggcgtgctgagcgccaccatcctgtacgagatcctgctgggcaaggccaccctgtacgccgtgctggtgtctgccctggtgctgatggctatggtcaagcggaaggacagccggggacgcgccaagagaagcggatctggcgtgaagcagaccctgaatttcgacctgctgaagctggctggcgacgtggaatccaacccaggcccttctagaggccatatgaccgagtacaagcccacggtgcgcctcgccacccgcgacgacgtccccagggccgtacgcaccctcgccgccgcgttcgccgactaccccgccacgcgccacaccgtcgatccggaccgccacatcgagcgggtcaccgagctgcaagaactcttcctcacgcgcgtcgggctcgacatcggcaaggtgtgggtcgcggacgacggcgccgcggtggcggtctggaccacgccggagagcgtcgaagcgggggcggtgttcgccgagatcggcccgcgcatggccgagttgagcggttcccggctggccgcgcagcaacagatggaaggcctcctggcgccgcaccggcccaaggagcccgcgtggttcctggccaccgtcggcgtctcgcccgaccaccagggcaagggtctgggcagcgccgtcgtgctccccggagtggaggcggccgagcgcgccggggtgcccgccttcctggagacctccgcgccccgcaacctccccttctacgagcggctcggcttcaccgtcaccgccgacgtcgaggtgcccgaaggaccgcgcacctggtgcatgacccgcaagcccggtgcctga

SEQ ID NO: 34456 - DNA, 2934 bp, synthetic construct
  source 1..2934: mol_type = other DNA
atggccttaccagtgaccgccttgctcctgccgctggccttgctgctccacgccgccaggccgctcgaggaggaggacctgaagaacgtgttcccacctgaggtggccgtgttcgagcctagcgaggccgagatcagccacacccagaaagccaccctcgtgtgcctggctaccggcttctaccccgaccatgtggaactgtcttggtgggtcaacggcaaagaggtgcacagcggcgtgtctaccgacccccagccactgaaagaacagcccgccctgaacgacagccggtactgcctgagcagcagactgagagtgtccgccaccttctggcagaacccccggaaccacttcagatgccaggtgcagttctacggcctgagcgagaacgacgagtggacccaggacagagccaagcccgtgacccagatcgtgtctgccgaagcctggggcagagccgatgatgtgattaagatccactggcaggaaaagaagtccaacaccatcctgggcagccaggaaggcaacaccatgaagaccaacgacacctacatgaagttcagctggctgaccgtgcccgagaagtccctggacaaagaacacagatgcatcgtgcggcacgaaaacaacaagaacggcgtggaccaggaaatcatcttcccacccatcaagaccgatgtgattacaatggaccccaaggacaactgctccaaggacgccaacgataccctgctgctccagctgaccaacaccagcgcctactacatgtacttgttgctgctgctgaagtccgtggtgtacttcgccatcatcacatgctgcctgctgcggagaaccgccttctgctgcaacggcgagaagtctagggccaagcgatctggatctggagcaacaaacttctcactactcaaacaagcaggtgacgtggaggagaatcccgggcctactagcatggccttaccagtgaccgccttgctcctgccgctggccttgctgctccacgccgccaggccgatccagatgacccagagccccagcagcctgtctgccagcgtgggcgacagagtgaccatcacctgtcggagcagccagagcatcgtgcactccgtgggcaacaccttcctggaatggtatcagcagaagcccggcaaggcccccaagctgctgatctacaaggtgtccaacagattcagcggcgtgcccagcaggtttagcggctctggcagcggcaccgacttcaccctgaccatctctagcctccagcccgaggacttcgccacctactactgttttcaaggcagccagttcccctacaccttcggccagggaacaaaggtggaaatcaagcggggcggaggcggaagtggaggcggaggatctggcggcggaggctctgaagtgcaactggtggaaagcggaggcggcctggtgcagcctggcggatctctgagactgagctgtgccgccagcggctacgagttcagccggtcctggatgaactgggtgcgccaggcccctggcaagggactggaatgggtgggaagaatctaccccggcgacggcgacaccaactacagcggcaagttcaagggccggttcaccatcagcgccgacaccagcaagaacaccgcctacctccagatgaacagcctgcgggccgaggataccgccgtgtactactgtgccagagatggcagctcctgggactggtacttcgacgtgtggggacagggaacccttgtgaccgtgtccagcacgcgtatccagaaccctgatcctgccgtgtaccagctgcgggatagcaagagcagcgacaagagcgtgtgtctgttcaccgacttcgacagccagaccaacgtgtcccagagcaaggactccgacgtgtacatcaccgataagaccgtgctggacatgcggagcatggacttcaagagcaactccgccgtggcctggtccaacaagtccgatttcgcctgcgccaacgccttcaacaacagcattatccccgaggacacattcttcccaagccccgagagcagcgactccaccgaccacgtgaagcccaaagagacagagaacaccaagcagcccagcaagagctgccacaagcccaaggccatcgtgcacaccgagaaagtgaacatgatgagcctgaccgtgctgggcctgcggatgctgttcgccaaaaccgtggccgtgaacttcctgctgaccgccaagctgttcttcctccgcgccaagagaagcggatctggcgtgaagcagaccctgaatttcgacctgctgaagctggctggcgacgtggaatccaacccaggcccttctagaggccatatgaccgagtacaagcccacggtgcgcctcgccacccgcgacgacgtccccagggccgtacgcaccctcgccgccgcgttcgccgactaccccgccacgcgccacaccgtcgatccggaccgccacatcgagcgggtcaccgagctgcaagaactcttcctcacgcgcgtcgggctcgacatcggcaaggtgtgggtcgcggacgacggcgccgcggtggcggtctggaccacgccggagagcgtcgaagcgggggcggtgttcgccgagatcggcccgcgcatggccgagttgagcggttcccggctggccgcgcagcaacagatggaaggcctcctggcgccgcaccggcccaaggagcccgcgtggttcctggccaccgtcggcgtctcgcccgaccaccagggcaagggtctgggcagcgccgtcgtgctccccggagtggaggcggccgagcgcgccggggtgcccgccttcctggagacctccgcgccccgcaacctccccttctacgagcggctcggcttcaccgtcaccgccgacgtcgaggtgcccgaaggaccgcgcacctggtgcatgacccgcaagcccggtgcctga

SEQ ID NO: 34457 - DNA, 2625 bp, synthetic construct
  source 1..2625: mol_type = other DNA
atggccttaccagtgaccgccttgctcctgccgctggccttgctgctccacgccgccaggccgctcgaggaggacctgaagaacgtgttcccacctgaggtggccgtgttcgagcctagcgaggccgagatcagccacacccagaaagccaccctcgtgtgcctggctaccggcttctaccccgaccatgtggaactgtcttggtgggtcaacggcaaagaggtgcacagcggcgtgtgtaccgacccccagccactgaaagaacagcccgccctgaacgacagccggtactgcctgagcagcagactgagagtgtccgccaccttctggcagaacccccggaaccacttcagatgccaggtgcagttctacggcctgagcgagaacgacgagtggacccaggacagagccaagcccgtgacccagatcgtgtctgccgaagcctggggcagagccgattgcggctttaccagcgagagctaccagcagggcgtgctgagcgccaccaacctgagcgtgatcggcttcagaatcctgctgctgaaagtggccggctttaacctgctgatgaccctgcggctgtggtccagcagggccaagcgatctggatctggagcaacaaacttctcactactcaaacaagcaggtgacgtggaggagaatcccgggcctactagcatggccttaccagtgaccgccttgctcctgccgctggccttgctgctccacgccgccaggccgatccagatgacccagagccccagcagcctgtctgccagcgtgggcgacagagtgaccatcacctgtcggagcagccagagcatcgtgcactccgtgggcaacaccttcctggaatggtatcagcagaagcccggcaaggcccccaagctgctgatctacaaggtgtccaacagattcagcggcgtgcccagcaggtttagcggctctggcagcggcaccgacttcaccctgaccatctctagcctccagcccgaggacttcgccacctactactgttttcaaggcagccagttcccctacaccttcggccagggaacaaaggtggaaatcaagcggggcggaggcggaagtggaggcggaggatctggcggcggaggctctgaagtgcaactggtggaaagcggaggcggcctggtgcagcctggcggatctctgagactgagctgtgccgccagcggctacgagttcagccggtcctggatgaactgggtgcgccaggcccctggcaagggactggaatgggtgggaagaatctaccccggcgacggcgacaccaactacagcggcaagttcaagggccggttcaccatcagcgccgacaccagcaagaacaccgcctacctccagatgaacagcctgcgggccgaggataccgccgtgtactactgtgccagagatggcagctcctgggactggtacttcgacgtgtggggacagggaacccttgtgaccgtgtccagcacgcgtatccagaaccctgatcctgccgtgtaccagctgcgggatagcaagagcagcgacaagagcgtgtgtctgttcaccgacttcgacagccagaccaacgtgtcccagagcaaggactccgacgtgtacatcaccgataagtgcgtgctggacatgcggagcatggacttcaagagcaactccgccgtggcctggtccaacaagtccgatttcgcctgcgccaacgccttcaacaacagcattatccccgaggacacattcttcccaagccccgagagcagctgcgacgtgaagctggtggaaaagagcttcgagacagacaccaacctgaacttccagatcctgtacgagatcctgctgggcaaggccaccctgtacgccgtgctggtgtctgccctggtgctgatggctatggtcaagcggaaggacagccggggacgcgccaagagaagcggatctggcgtgaagcagaccctgaatttcgacctgctgaagctggctggcgacgtggaatccaacccaggcccttctagaggccatatgaccgagtacaagcccacggtgcgcctcgccacccgcgacgacgtccccagggccgtacgcaccctcgccgccgcgttcgccgactaccccgccacgcgccacaccgtcgatccggaccgccacatcgagcgggtcaccgagctgcaagaactcttcctcacgcgcgtcgggctcgacatcggcaaggtgtgggtcgcggacgacggcgccgcggtggcggtctggaccacgccggagagcgtcgaagcgggggcggtgttcgccgagatcggcccgcgcatggccgagttgagcggttcccggctggccgcgcagcaacagatggaaggcctcctggcgccgcaccggcccaaggagcccgcgtggttcctggccaccgtcggcgtctcgcccgaccaccagggcaagggtctgggcagcgccgtcgtgctccccggagtggaggcggccgagcgcgccggggtgcccgccttcctggagacctccgcgccccgcaacctccccttctacgagcggctcggcttcaccgtcaccgccgacgtcgaggtgcccgaaggaccgcgcacctggtgcatgacccgcaagcccggtgcctga

SEQ ID NO: 34458 - DNA, 2712 bp, synthetic construct
  source 1..2712: mol_type = other DNA
atggccttaccagtgaccgccttgctcctgccgctggccttgctgctccacgccgccaggccgctcgaggaggaggacctgaagaacgtgttcccacctgaggtggccgtgttcgagcctagcgaggccgagatcagccacacccagaaagccaccctcgtgtgcctggctaccggcttctaccccgaccatgtggaactgtcttggtgggtcaacggcaaagaggtgcacagcggcgtgtgtaccgacccccagccactgaaagaacagcccgccctgaacgacagccggtactgcctgagcagcagactgagagtgtccgccaccttctggcagaacccccggaaccacttcagatgccaggtgcagttctacggcctgagcgagaacgacgagtggacccaggacagagccaagcccgtgacccagatcgtgtctgccgaagcctggggcagagccgattgcggctttaccagcgagagctaccagcagggcgtgctgagcgccaccaacctgagcgtgatcggcttcagaatcctgctgctgaaagtggccggctttaacctgctgatgaccctgcggctgtggtccagcagggccaagcgatctggatctggagcaacaaacttctcactactcaaacaagcaggtgacgtggaggagaatcccgggcctactagcatggccttaccagtgaccgccttgctcctgccgctggccttgctgctccacgccgccaggccgatccagatgacccagagccccagcagcctgtctgccagcgtgggcgacagagtgaccatcacctgtcggagcagccagagcatcgtgcactccgtgggcaacaccttcctggaatggtatcagcagaagcccggcaaggcccccaagctgctgatctacaaggtgtccaacagattcagcggcgtgcccagcaggtttagcggctctggcagcggcaccgacttcaccctgaccatctctagcctccagcccgaggacttcgccacctactactgttttcaaggcagccagttcccctacaccttcggccagggaacaaaggtggaaatcaagcggggcggaggcggaagtggaggcggaggatctggcggcggaggctctgaagtgcaactggtggaaagcggaggcggcctggtgcagcctggcggatctctgagactgagctgtgccgccagcggctacgagttcagccggtcctggatgaactgggtgcgccaggcccctggcaagggactggaatgggtgggaagaatctaccccggcgacggcgacaccaactacagcggcaagttcaagggccggttcaccatcagcgccgacaccagcaagaacaccgcctacctccagatgaacagcctgcgggccgaggataccgccgtgtactactgtgccagagatggcagctcctgggactggtacttcgacgtgtggggacagggaacccttgtgaccgtgtccagcacgcgtggacagcctaaggccaatcctaccgtgacactgttccctccaagcagcgaagaactccaggccaacaaggccacacttgtgtgcctgatctccgacttctaccctggggctgtgacagtggcttggaaggccgatggatctcctgtgaaagccggcgtggaaaccaccaagccatccaagcagagcaacaacaaatacgccgccagctcctacctgagcctgacacctgagcagtggaagtcccacagatcctacagctgccaagtgacccacgaaggcagcaccgtggaaaagacagtggcccctacagagtgcagccccatcaagaccgatgtgattacaatggaccccaaggacaactgctccaaggacgccaacgataccctgctgctccagctgaccaacaccagcgcctactacatgtacttgttgctgctgctgaagtccgtggtgtacttcgccatcatcacatgctgcctgctgcggagaaccgccttctgctgcaacggcgagaagtctcgcgccaagagaagcggatctggcgtgaagcagaccctgaatttcgacctgctgaagctggctggcgacgtggaatccaacccaggcccttctagaggccatatgaccgagtacaagcccacggtgcgcctcgccacccgcgacgacgtccccagggccgtacgcaccctcgccgccgcgttcgccgactaccccgccacgcgccacaccgtcgatccggaccgccacatcgagcgggtcaccgagctgcaagaactcttcctcacgcgcgtcgggctcgacatcggcaaggtgtgggtcgcggacgacggcgccgcggtggcggtctggaccacgccggagagcgtcgaagcgggggcggtgttcgccgagatcggcccgcgcatggccgagttgagcggttcccggctggccgcgcagcaacagatggaaggcctcctggcgccgcaccggcccaaggagcccgcgtggttcctggccaccgtcggcgtctcgcccgaccaccagggcaagggtctgggcagcgccgtcgtgctccccggagtggaggcggccgagcgcgccggggtgcccgccttcctggagacctccgcgccccgcaacctccccttctacgagcggctcggcttcaccgtcaccgccgacgtcgaggtgcccgaaggaccgcgcacctggtgcatgacccgcaagcccggtgcctga

SEQ ID NO: 34459 - DNA, 2712 bp, synthetic construct
  source 1..2712: mol_type = other DNA
atggccttaccagtgaccgccttgctcctgccgctggccttgctgctccacgccgccaggccgctcgagggacagcctaaggccaatcctaccgtgacactgttccctccaagcagcgaagaactccaggccaacaaggccacacttgtgtgcctgatctccgacttctaccctggggctgtgacagtggcttggaaggccgatggatctcctgtgaaagccggcgtggaaaccaccaagccatccaagcagagcaacaacaaatacgccgccagctcctacctgagcctgacacctgagcagtggaagtcccacagatcctacagctgccaagtgacccacgaaggcagcaccgtggaaaagacagtggcccctacagagtgcagccccatcaagaccgatgtgattacaatggaccccaaggacaactgctccaaggacgccaacgataccctgctgctccagctgaccaacaccagcgcctactacatgtacttgttgctgctgctgaagtccgtggtgtacttcgccatcatcacatgctgcctgctgcggagaaccgccttctgctgcaacggcgagaagtctagggccaagcgatctggatctggagcaacaaacttctcactactcaaacaagcaggtgacgtggaggagaatcccgggcctactagcatggccttaccagtgaccgccttgctcctgccgctggccttgctgctccacgccgccaggccgatccagatgacccagagccccagcagcctgtctgccagcgtgggcgacagagtgaccatcacctgtcggagcagccagagcatcgtgcactccgtgggcaacaccttcctggaatggtatcagcagaagcccggcaaggcccccaagctgctgatctacaaggtgtccaacagattcagcggcgtgcccagcaggtttagcggctctggcagcggcaccgacttcaccctgaccatctctagcctccagcccgaggacttcgccacctactactgttttcaaggcagccagttcccctacaccttcggccagggaacaaaggtggaaatcaagcggggcggaggcggaagtggaggcggaggatctggcggcggaggctctgaagtgcaactggtggaaagcggaggcggcctggtgcagcctggcggatctctgagactgagctgtgccgccagcggctacgagttcagccggtcctggatgaactgggtgcgccaggcccctggcaagggactggaatgggtgggaagaatctaccccggcgacggcgacaccaactacagcggcaagttcaagggccggttcaccatcagcgccgacaccagcaagaacaccgcctacctccagatgaacagcctgcgggccgaggataccgccgtgtactactgtgccagagatggcagctcctgggactggtacttcgacgtgtggggacagggaacccttgtgaccgtgtccagcacgcgtgaggaggacctgaagaacgtgttcccacctgaggtggccgtgttcgagcctagcgaggccgagatcagccacacccagaaagccaccctcgtgtgcctggctaccggcttctaccccgaccatgtggaactgtcttggtgggtcaacggcaaagaggtgcacagcggcgtgtgtaccgacccccagccactgaaagaacagcccgccctgaacgacagccggtactgcctgagcagcagactgagagtgtccgccaccttctggcagaacccccggaaccacttcagatgccaggtgcagttctacggcctgagcgagaacgacgagtggacccaggacagagccaagcccgtgacccagatcgtgtctgccgaagcctggggcagagccgattgcggctttaccagcgagagctaccagcagggcgtgctgagcgccaccaacctgagcgtgatcggcttcagaatcctgctgctgaaagtggccggctttaacctgctgatgaccctgcggctgtggtccagccgcgccaagagaagcggatctggcgtgaagcagaccctgaatttcgacctgctgaagctggctggcgacgtggaatccaacccaggcccttctagaggccatatgaccgagtacaagcccacggtgcgcctcgccacccgcgacgacgtccccagggccgtacgcaccctcgccgccgcgttcgccgactaccccgccacgcgccacaccgtcgatccggaccgccacatcgagcgggtcaccgagctgcaagaactcttcctcacgcgcgtcgggctcgacatcggcaaggtgtgggtcgcggacgacggcgccgcggtggcggtctggaccacgccggagagcgtcgaagcgggggcggtgttcgccgagatcggcccgcgcatggccgagttgagcggttcccggctggccgcgcagcaacagatggaaggcctcctggcgccgcaccggcccaaggagcccgcgtggttcctggccaccgtcggcgtctcgcccgaccaccagggcaagggtctgggcagcgccgtcgtgctccccggagtggaggcggccgagcgcgccggggtgcccgccttcctggagacctccgcgccccgcaacctccccttctacgagcggctcggcttcaccgtcaccgccgacgtcgaggtgcccgaaggaccgcgcacctggtgcatgacccgcaagcccggtgcctga

SEQ ID NO: 34460 - DNA, 2703 bp, synthetic construct
  source 1..2703: mol_type = other DNA
atggccttaccagtgaccgccttgctcctgccgctggccttgctgctccacgccgccaggccgctcgaggaggcctctacaaagggaccctccgtgtttcctctggctcccagcagcaagtctacaagcggaggaacagccgctctgggctgcctggtcaaggattactttcccgagcctgtgaccgtgtcctggaatagcggagcactgacaagcggcgtgcacacctttccagccgtgctgcaaagcagcggcctgtactctctgagcagcgtggtcacagtgcctagctctagcctgggcacccagacctacatctgcaatgtgaaccacaagcctagcaacaccaaggtggacaagagagtggaacccaagagctgtcccatcaagaccgatgtgattacaatggaccccaaggacaactgctccaaggacgccaacgataccctgctgctccagctgaccaacaccagcgcctactacatgtacttgttgctgctgctgaagtccgtggtgtacttcgccatcatcacatgctgcctgctgcggagaaccgccttctgctgcaacggcgagaagtctagggccaagcgatctggatctggagcaacaaacttctcactactcaaacaagcaggtgacgtggaggagaatcccgggcctactagcatggccttaccagtgaccgccttgctcctgccgctggccttgctgctccacgccgccaggccgatccagatgacccagagccccagcagcctgtctgccagcgtgggcgacagagtgaccatcacctgtcggagcagccagagcatcgtgcactccgtgggcaacaccttcctggaatggtatcagcagaagcccggcaaggcccccaagctgctgatctacaaggtgtccaacagattcagcggcgtgcccagcaggtttagcggctctggcagcggcaccgacttcaccctgaccatctctagcctccagcccgaggacttcgccacctactactgttttcaaggcagccagttcccctacaccttcggccagggaacaaaggtggaaatcaagcggggcggaggcggaagtggaggcggaggatctggcggcggaggctctgaagtgcaactggtggaaagcggaggcggcctggtgcagcctggcggatctctgagactgagctgtgccgccagcggctacgagttcagccggtcctggatgaactgggtgcgccaggcccctggcaagggactggaatgggtgggaagaatctaccccggcgacggcgacaccaactacagcggcaagttcaagggccggttcaccatcagcgccgacaccagcaagaacaccgcctacctccagatgaacagcctgcgggccgaggataccgccgtgtactactgtgccagagatggcagctcctgggactggtacttcgacgtgtggggacagggaacccttgtgaccgtgtccagcacgcgtggacagcctaaggccaatcctaccgtgacactgttccctccaagcagcgaagaactccaggccaacaaggccacacttgtgtgcctgatctccgacttctaccctggggctgtgacagtggcttggaaggccgatggatctcctgtgaaagccggcgtggaaaccaccaagccatccaagcagagcaacaacaaatacgccgccagctcctacctgagcctgacacctgagcagtggaagtcccacagatcctacagctgccaagtgacccacgaaggcagcaccgtggaaaagacagtggcccctacagagtgcagcgaagtgaaaaccgactccaccgaccacgtgaagcccaaagagacagagaacaccaagcagcccagcaagagctgccacaagcccaaggccatcgtgcacaccgagaaagtgaacatgatgagcctgaccgtgctgggcctgcggatgctgttcgccaaaaccgtggccgtgaacttcctgctgaccgccaagctgttcttcctccgcgccaagagaagcggatctggcgtgaagcagaccctgaatttcgacctgctgaagctggctggcgacgtggaatccaacccaggcccttctagaggccatatgaccgagtacaagcccacggtgcgcctcgccacccgcgacgacgtccccagggccgtacgcaccctcgccgccgcgttcgccgactaccccgccacgcgccacaccgtcgatccggaccgccacatcgagcgggtcaccgagctgcaagaactcttcctcacgcgcgtcgggctcgacatcggcaaggtgtgggtcgcggacgacggcgccgcggtggcggtctggaccacgccggagagcgtcgaagcgggggcggtgttcgccgagatcggcccgcgcatggccgagttgagcggttcccggctggccgcgcagcaacagatggaaggcctcctggcgccgcaccggcccaaggagcccgcgtggttcctggccaccgtcggcgtctcgcccgaccaccagggcaagggtctgggcagcgccgtcgtgctccccggagtggaggcggccgagcgcgccggggtgcccgccttcctggagacctccgcgccccgcaacctccccttctacgagcggctcggcttcaccgtcaccgccgacgtcgaggtgcccgaaggaccgcgcacctggtgcatgacccgcaagcccggtgcctga

SEQ ID NO: 34461 - DNA, 2637 bp, synthetic construct
  source 1..2637: mol_type = other DNA
atggccttaccagtgaccgccttgctcctgccgctggccttgctgctccacgccgccaggccgctcgaggaggcctctacaaagggaccctccgtgtttcctctggctcccagcagcaagtctacaagcggaggaacagccgctctgggctgcctggtcaaggattactttcccgagcctgtgaccgtgtcctggaatagcggagcactgacaagcggcgtgcacacctttccagccgtgctgcaaagcagcggcctgtactctctgagcagcgtggtcacagtgcctagctctagcctgggcacccagacctacatctgcaatgtgaaccacaagcctagcaacaccaaggtggacaagagagtggaacccaagagctgtggcagagccgattgcggctttaccagcgagagctaccagcagggcgtgctgagcgccaccatcctgtacgagatcctgctgggcaaggccaccctgtacgccgtgctggtgtctgccctggtgctgatggctatggtcaagcggaaggacagccggggaagggccaagcgatctggatctggagcaacaaacttctcactactcaaacaagcaggtgacgtggaggagaatcccgggcctactagcatggccttaccagtgaccgccttgctcctgccgctggccttgctgctccacgccgccaggccgatccagatgacccagagccccagcagcctgtctgccagcgtgggcgacagagtgaccatcacctgtcggagcagccagagcatcgtgcactccgtgggcaacaccttcctggaatggtatcagcagaagcccggcaaggcccccaagctgctgatctacaaggtgtccaacagattcagcggcgtgcccagcaggtttagcggctctggcagcggcaccgacttcaccctgaccatctctagcctccagcccgaggacttcgccacctactactgttttcaaggcagccagttcccctacaccttcggccagggaacaaaggtggaaatcaagcggggcggaggcggaagtggaggcggaggatctggcggcggaggctctgaagtgcaactggtggaaagcggaggcggcctggtgcagcctggcggatctctgagactgagctgtgccgccagcggctacgagttcagccggtcctggatgaactgggtgcgccaggcccctggcaagggactggaatgggtgggaagaatctaccccggcgacggcgacaccaactacagcggcaagttcaagggccggttcaccatcagcgccgacaccagcaagaacaccgcctacctccagatgaacagcctgcgggccgaggataccgccgtgtactactgtgccagagatggcagctcctgggactggtacttcgacgtgtggggacagggaacccttgtgaccgtgtccagcacgcgtggacagcctaaggccaatcctaccgtgacactgttccctccaagcagcgaagaactccaggccaacaaggccacacttgtgtgcctgatctccgacttctaccctggggctgtgacagtggcttggaaggccgatggatctcctgtgaaagccggcgtggaaaccaccaagccatccaagcagagcaacaacaaatacgccgccagctcctacctgagcctgacacctgagcagtggaagtcccacagatcctacagctgccaagtgacccacgaaggcagcaccgtggaaaagacagtggcccctacagagtgcagcatccccgaggacacattcttcccaagccccgagagcagctgcgacgtgaagctggtggaaaagagcttcgagacagacaccaacctgaacttccagaacctgagcgtgatcggcttcagaatcctgctgctgaaagtggccggctttaacctgctgatgaccctgcggctgtggtccagccgcgccaagagaagcggatctggcgtgaagcagaccctgaatttcgacctgctgaagctggctggcgacgtggaatccaacccaggcccttctagaggccatatgaccgagtacaagcccacggtgcgcctcgccacccgcgacgacgtccccagggccgtacgcaccctcgccgccgcgttcgccgactaccccgccacgcgccacaccgtcgatccggaccgccacatcgagcgggtcaccgagctgcaagaactcttcctcacgcgcgtcgggctcgacatcggcaaggtgtgggtcgcggacgacggcgccgcggtggcggtctggaccacgccggagagcgtcgaagcgggggcggtgttcgccgagatcggcccgcgcatggccgagttgagcggttcccggctggccgcgcagcaacagatggaaggcctcctggcgccgcaccggcccaaggagcccgcgtggttcctggccaccgtcggcgtctcgcccgaccaccagggcaagggtctgggcagcgccgtcgtgctccccggagtggaggcggccgagcgcgccggggtgcccgccttcctggagacctccgcgccccgcaacctccccttctacgagcggctcggcttcaccgtcaccgccgacgtcgaggtgcccgaaggaccgcgcacctggtgcatgacccgcaagcccggtgcctga

SEQ ID NO: 34462 - DNA, 2637 bp, synthetic construct
  source 1..2637: mol_type = other DNA
atggccttaccagtgaccgccttgctcctgccgctggccttgctgctccacgccgccaggccgctcgaggaggcctctacaaagggaccctccgtgtttcctctggctcccagcagcaagtctacaagcggaggaacagccgctctgggctgcctggtcaaggattactttcccgagcctgtgaccgtgtcctggaatagcggagcactgacaagcggcgtgcacacctttccagccgtgctgcaaagcagcggcctgtactctctgagcagcgtggtcacagtgcctagctctagcctgggcacccagacctacatctgcaatgtgaaccacaagcctagcaacaccaaggtggacaagagagtggaacccaagagctgtatccccgaggacacattcttcccaagccccgagagcagctgcgacgtgaagctggtggaaaagagcttcgagacagacaccaacctgaacttccagaacctgagcgtgatcggcttcagaatcctgctgctgaaagtggccggctttaacctgctgatgaccctgcggctgtggtccagcagggccaagcgatctggatctggagcaacaaacttctcactactcaaacaagcaggtgacgtggaggagaatcccgggcctactagcatggccttaccagtgaccgccttgctcctgccgctggccttgctgctccacgccgccaggccgatccagatgacccagagccccagcagcctgtctgccagcgtgggcgacagagtgaccatcacctgtcggagcagccagagcatcgtgcactccgtgggcaacaccttcctggaatggtatcagcagaagcccggcaaggcccccaagctgctgatctacaaggtgtccaacagattcagcggcgtgcccagcaggtttagcggctctggcagcggcaccgacttcaccctgaccatctctagcctccagcccgaggacttcgccacctactactgttttcaaggcagccagttcccctacaccttcggccagggaacaaaggtggaaatcaagcggggcggaggcggaagtggaggcggaggatctggcggcggaggctctgaagtgcaactggtggaaagcggaggcggcctggtgcagcctggcggatctctgagactgagctgtgccgccagcggctacgagttcagccggtcctggatgaactgggtgcgccaggcccctggcaagggactggaatgggtgggaagaatctaccccggcgacggcgacaccaactacagcggcaagttcaagggccggttcaccatcagcgccgacaccagcaagaacaccgcctacctccagatgaacagcctgcgggccgaggataccgccgtgtactactgtgccagagatggcagctcctgggactggtacttcgacgtgtggggacagggaacccttgtgaccgtgtccagcacgcgtggacagcctaaggccaatcctaccgtgacactgttccctccaagcagcgaagaactccaggccaacaaggccacacttgtgtgcctgatctccgacttctaccctggggctgtgacagtggcttggaaggccgatggatctcctgtgaaagccggcgtggaaaccaccaagccatccaagcagagcaacaacaaatacgccgccagctcctacctgagcctgacacctgagcagtggaagtcccacagatcctacagctgccaagtgacccacgaaggcagcaccgtggaaaagacagtggcccctacagagtgcagcggcagagccgattgcggctttaccagcgagagctaccagcagggcgtgctgagcgccaccatcctgtacgagatcctgctgggcaaggccaccctgtacgccgtgctggtgtctgccctggtgctgatggctatggtcaagcggaaggacagccggggacgcgccaagagaagcggatctggcgtgaagcagaccctgaatttcgacctgctgaagctggctggcgacgtggaatccaacccaggcccttctagaggccatatgaccgagtacaagcccacggtgcgcctcgccacccgcgacgacgtccccagggccgtacgcaccctcgccgccgcgttcgccgactaccccgccacgcgccacaccgtcgatccggaccgccacatcgagcgggtcaccgagctgcaagaactcttcctcacgcgcgtcgggctcgacatcggcaaggtgtgggtcgcggacgacggcgccgcggtggcggtctggaccacgccggagagcgtcgaagcgggggcggtgttcgccgagatcggcccgcgcatggccgagttgagcggttcccggctggccgcgcagcaacagatggaaggcctcctggcgccgcaccggcccaaggagcccgcgtggttcctggccaccgtcggcgtctcgcccgaccaccagggcaagggtctgggcagcgccgtcgtgctccccggagtggaggcggccgagcgcgccggggtgcccgccttcctggagacctccgcgccccgcaacctccccttctacgagcggctcggcttcaccgtcaccgccgacgtcgaggtgcccgaaggaccgcgcacctggtgcatgacccgcaagcccggtgcctga

SEQ ID NO: 34463 - DNA, 1875 bp, synthetic construct
  source 1..1875: mol_type = other DNA
atggccttaccagtgaccgccttgctcctgccgctggccttgctgctccacgccgccaggccgatccagatgacccagagccccagcagcctgtctgccagcgtgggcgacagagtgaccatcacctgtcggagcagccagagcatcgtgcactccgtgggcaacaccttcctggaatggtatcagcagaagcccggcaaggcccccaagctgctgatctacaaggtgtccaacagattcagcggcgtgcccagcaggtttagcggctctggcagcggcaccgacttcaccctgaccatctctagcctccagcccgaggacttcgccacctactactgttttcaaggcagccagttcccctacaccttcggccagggaacaaaggtggaaatcaagcggctcgaggacctgaagaacgtgttcccacctgaggtggccgtgttcgagcctagcgaggccgagatcagccacacccagaaagccaccctcgtgtgcctggctaccggcttctaccccgaccatgtggaactgtcttggtgggtcaacggcaaagaggtgcacagcggcgtgtgtaccgacccccagccactgaaagaacagcccgccctgaacgacagccggtactgcctgagcagcagactgagagtgtccgccaccttctggcagaacccccggaaccacttcagatgccaggtgcagttctacggcctgagcgagaacgacgagtggacccaggacagagccaagcccgtgacccagatcgtgtctgccgaagcctggggcagagccgatagcggctttaccagcgagagctaccagcagggcgtgctgagcgccaccatcctgtacgagatcctgctgggcaaggccaccctgtacgccgtgctggtgtctgccctggtgctgatggctatggtcaagcggaaggacagccggggaagggccaagcgatctggatctggagcaacaaacttctcactactcaaacaagcaggtgacgtggaggagaatcccgggcctactagtatggactggatttggcgcatccttttccttgtcggcgctgctaccggcgcgcattccttcgaagaagtgcaactggtggaaagcggaggcggcctggtgcagcctggcggatctctgagactgagctgtgccgccagcggctacgagttcagccggtcctggatgaactgggtgcgccaggcccctggcaagggactggaatgggtgggaagaatctaccccggcgacggcgacaccaactacagcggcaagttcaagggccggttcaccatcagcgccgacaccagcaagaacaccgcctacctccagatgaacagcctgcgggccgaggataccgccgtgtactactgtgccagagatggcagctcctgggactggtacttcgacgtgtggggacagggaacccttgtgaccgtgtccagcacgcgtatccagaaccctgatcctgccgtgtaccagctgcgggatagcaagagcagcgacaagagcgtgtgtctgttcaccgacttcgacagccagaccaacgtgtcccagagcaaggactccgacgtgtacatcaccgataagtgcgtgctggacatgcggagcatggacttcaagagcaactccgccgtggcctggtccaacaagtccgatttcgcctgcgccaacgccttcaacaacagcattatccccgaggacacattcttcccaagccccgagagcagcagcgacgtgaagctggtggaaaagagcttcgagacagacaccaacctgaacttccagaacctgagcgtgatcggcttcagaatcctgctgctgaaagtggccggctttaacctgctgatgaccctgcggctgtggtccagc

SEQ ID NO: 34464 - DNA, 2715 bp, synthetic construct
  source 1..2715: mol_type = other DNA
atggccttaccagtgaccgccttgctcctgccgctggccttgctgctccacgccgccaggccggaggttcagctgcttgagtctggcggaggactggttcaacctggcggaagcctgagactgtcttgtgccgcctctggcagaaccttcagcatgggctggtatagacaggcccctggcaagggcctcgaatttgtgtctgccatcacatacagcggcggcagcccttactacgccgattctgtgaagggcagattcaccatcagccgggacaacagcaagaacaccgtgtacctccagatgaacagcctgagagccgaggacaccgccgtgtactactgtgccgccaatccaacctacggcagcgactggaatgccgagaattggggccagggcacactggtcacagtgtctagtggtaccggcggaggcggatctggcggcggaggtagcggtggcggaggatctgaattcatccagatgacccagagccccagcagcctgtctgccagcgtgggcgacagagtgaccatcacctgtcggagcagccagagcatcgtgcactccgtgggcaacaccttcctggaatggtatcagcagaagcccggcaaggcccccaagctgctgatctacaaggtgtccaacagattcagcggcgtgcccagcaggtttagcggctctggcagcggcaccgacttcaccctgaccatctctagcctccagcccgaggacttcgccacctactactgttttcaaggcagccagttcccctacaccttcggccagggaacaaaggtggaaatcaagcggctcgagatccagaaccctgatcctgccgtgtaccagctgcgggatagcaagagcagcgacaagagcgtgtgtctgttcaccgacttcgacagccagaccaacgtgtcccagagcaaggactccgacgtgtacatcaccgataagtgcgtgctggacatgcggagcatggacttcaagagcaactccgccgtggcctggtccaacaagtccgatttcgcctgcgccaacgccttcaacaacagcattatccccgaggacacattcttcccaagcagcgacgtgccctgcgacgtgaagctggtggaaaagagcttcgagacagacaccaacctgaacttccagaacctgagcgtgatcggcttcagaatcctgctgctgaaagtggccggctttaacctgctgatgaccctgcggctgtggtccagccgcgccaagagaagcggatctggcgtgaagcagaccctgaatttcgacctgctgaagctggctggcgacgtggaatccaacccaggccctactagtaccatggactggatttggcgcatccttttccttgtcggcgctgctaccggcacccattccgggcccgaagtgcaactggttgaatccggtggcggcctggtgcaacccggcggatctctcagacttagctgtgccgcctccggcagaaccttcacaatgggatggtacaggcaggctccagggaaagagagagagttcgtcgccgccatctctctgtctcccacactggcctactacgccgactctgtgaaaggccggttcaccatctccagagataatagcaagaacaccgtggtgctgcaaatgaactctctgagagccgaggatacagccctgtactattgtgccgctgaccggaagtccgtgatgagcatcagacccgattactggggacagggcacactggtcacagtgtctagtggatccggcggcggaggatctggcggaggcggatctgggggcggaggctctttcgaagaagtgcaactggtggaaagcggaggcggcctggtgcagcctggcggatctctgagactgagctgtgccgccagcggctacgagttcagccggtcctggatgaactgggtgcgccaggcccctggcaagggactggaatgggtgggaagaatctaccccggcgacggcgacaccaactacagcggcaagttcaagggccggttcaccatcagcgccgacaccagcaagaacaccgcctacctccagatgaacagcctgcgggccgaggataccgccgtgtactactgtgccagagatggcagctcctgggactggtacttcgacgtgtggggacagggaacccttgtgaccgtgtccagcacgcgtgaggacctgaagaacgtgttcccacctgaggtggccgtgttcgagcctagcaaggccgagatcgcccacacccagaaagccaccctcgtgtgcctggctaccggcttctaccccgaccatgtggaactgtcttggtgggtcaacggcaaagaggtgcacagcggcgtgtgtaccgacccccagccactgaaagaacagcccgccctgaacgacagccggtactgcctgagcagcagactgagagtgtccgccaccttctggcagaacccccggaaccacttcagatgccaggtgcagttctacggcctgagcgagaacgacgagtggacccaggacagagccaagcccgtgacccagatcgtgtctgccgaagcctggggcagagccgattgcggcatcaccagcgccagctaccaccagggcgtgctgagcgccaccatcctgtacgagatcctgctgggcaaggccaccctgtacgccgtgctggtgtctgccctggtgctgatggctatggtcaagcggaaggacagccggggataa

SEQ ID NO: 34465 - DNA, 2715 bp, synthetic construct
  source 1..2715: mol_type = other DNA
atggccttaccagtgaccgccttgctcctgccgctggccttgctgctccacgccgccaggccggaagtgcagctggttgaatctggcggaggactggttcaggctggcggatctctgagactgtcttgtgccgccagcggcagaacctttagcatgggctggtttagacaggcccctggcaaagagagagagttcgtcgccgccatcacatactctggcggcagcccttactacgccgactctgtgaagggcagattcaccatcagccgggacaacgccaagaacaccgtgtacctccagatgaacagcctgaagcctgaggacaccgccgtgtactactgcgccgccaatccaacatacggcagcgactggaacgccgagaattggggccagggaacccaagtgacagtgtctagcggtaccggcggaggcggatctggcggcggaggtagcggtggcggaggatctgaattcatccagatgacccagagccccagcagcctgtctgccagcgtgggcgacagagtgaccatcacctgtcggagcagccagagcatcgtgcactccgtgggcaacaccttcctggaatggtatcagcagaagcccggcaaggcccccaagctgctgatctacaaggtgtccaacagattcagcggcgtgcccagcaggtttagcggctctggcagcggcaccgacttcaccctgaccatctctagcctccagcccgaggacttcgccacctactactgttttcaaggcagccagttcccctacaccttcggccagggaacaaaggtggaaatcaagcggctcgagatccagaaccctgatcctgccgtgtaccagctgcgggatagcaagagcagcgacaagagcgtgtgtctgttcaccgacttcgacagccagaccaacgtgtcccagagcaaggactccgacgtgtacatcaccgataagtgcgtgctggacatgcggagcatggacttcaagagcaactccgccgtggcctggtccaacaagtccgatttcgcctgcgccaacgccttcaacaacagcattatccccgaggacacattcttcccaagcagcgacgtgccctgcgacgtgaagctggtggaaaagagcttcgagacagacaccaacctgaacttccagaacctgagcgtgatcggcttcagaatcctgctgctgaaagtggccggctttaacctgctgatgaccctgcggctgtggtccagccgcgccaagagaagcggatctggcgtgaagcagaccctgaatttcgacctgctgaagctggctggcgacgtggaatccaacccaggccctactagtaccatggactggatttggcgcatccttttccttgtcggcgctgctaccggcgcccattccgggcccgaagtgcaactggttgaatccggtggcggcctggtgcaacccggcggatctctcagacttagctgtgccgcctccggcagaaccttcacaatgggatggtacaggcaggctccagggaaagagagagagttcgtcgccgccatctctctgtctcccacactggcctactacgccgactctgtgaaaggccggttcaccatctccagagataatagcaagaacaccgtggtgctgcaaatgaactctctgagagccgaggatacagccctgtactattgtgccgctgaccggaagtccgtgatgagcatcagacccgattactggggacagggcacactggtcacagtgtctagtggatccggcggcggaggatctggcggaggcggatctgggggcggaggctctttcgaagaagtgcaactggtggaaagcggaggcggcctggtgcagcctggcggatctctgagactgagctgtgccgccagcggctacgagttcagccggtcctggatgaactgggtgcgccaggcccctggcaagggactggaatgggtgggaagaatctaccccggcgacggcgacaccaactacagcggcaagttcaagggccggttcaccatcagcgccgacaccagcaagaacaccgcctacctccagatgaacagcctgcgggccgaggataccgccgtgtactactgtgccagagatggcagctcctgggactggtacttcgacgtgtggggacagggaacccttgtgaccgtgtccagcacgcgtgaggacctgaagaacgtgttcccacctgaggtggccgtgttcgagcctagcaaggccgagatcgcccacacccagaaagccaccctcgtgtgcctggctaccggcttctaccccgaccatgtggaactgtcttggtgggtcaacggcaaagaggtgcacagcggcgtgtgtaccgacccccagccactgaaagaacagcccgccctgaacgacagccggtactgcctgagcagcagactgagagtgtccgccaccttctggcagaacccccggaaccacttcagatgccaggtgcagttctacggcctgagcgagaacgacgagtggacccaggacagagccaagcccgtgacccagatcgtgtctgccgaagcctggggcagagccgattgcggcatcaccagcgccagctaccaccagggcgtgctgagcgccaccatcctgtacgagatcctgctgggcaaggccaccctgtacgccgtgctggtgtctgccctggtgctgatggctatggtcaagcggaaggacagccggggataa

SEQ ID NO: 34466 - DNA, 2706 bp, synthetic construct
  source 1..2706: mol_type = other DNA
atggccttaccagtgaccgccttgctcctgccgctggccttgctgctccacgccgccaggccggaagtgcagctggttgaatctggcggaggactggttcaggctggcggatctctgagactgtcttgtgccgccagcggcagaacctttagcatgggctggtttagacaggcccctggcaaagagagagagttcgtcgccgccatcacatactctggcggcagcccttactacgccgactctgtgaagggcagattcaccatcagccgggacaacgccaagaacaccgtgtacctccagatgaacagcctgaagcctgaggacaccgccgtgtactactgcgccgccaatccaacatacggcagcgactggaacgccgagaattggggccagggaacccaagtgacagtgtctagcggtaccggcggaggcggatctggcggcggaggtagcggtggcggaggatctgaattcatccagatgacccagagccccagcagcctgtctgccagcgtgggcgacagagtgaccatcacctgtcggagcagccagagcatcgtgcactccgtgggcaacaccttcctggaatggtatcagcagaagcccggcaaggcccccaagctgctgatctacaaggtgtccaacagattcagcggcgtgcccagcaggtttagcggctctggcagcggcaccgacttcaccctgaccatctctagcctccagcccgaggacttcgccacctactactgttttcaaggcagccagttcccctacaccttcggccagggaacaaaggtggaaatcaagcggctcgaggacctgaagaacgtgttcccacctgaggtggccgtgttcgagcctagcgaggccgagatcagccacacccagaaagccaccctcgtgtgcctggctaccggcttctaccccgaccatgtggaactgtcttggtgggtcaacggcaaagaggtgcacagcggcgtgtgtaccgacccccagccactgaaagaacagcccgccctgaacgacagccggtactgcctgagcagcagactgagagtgtccgccaccttctggcagaacccccggaaccacttcagatgccaggtgcagttctacggcctgagcgagaacgacgagtggacccaggacagagccaagcccgtgacccagatcgtgtctgccgaagcctggggcagagccgattgcggctttaccagcgagagctaccagcagggcgtgctgagcgccaccatcctgtacgagatcctgctgggcaaggccaccctgtacgccgtgctggtgtctgccctggtgctgatggctatggtcaagcggaaggacagccggggaagggccaagcgatctggatctggagcaacaaacttctcactactcaaacaagcaggtgacgtggaggagaatcccgggcctactagtgccaccatggactggatttggcgcatccttttccttgtcggcgctgctaccggcgcccattccgggcccgaagtgcaactggttgaatccggtggcggcctggtgcaagcaggcggatctctcagacttagctgtgccgcctccggcagaaccttcacaatgggatggtttaggcaggctccagggaaagagagagagttcgtcgccgccatctctctgtctcccacactggcctactacgccgactctgtgaaaggccggttcaccatctccagagataatgccaagaacaccgtggtgctgcaaatgaactctctgaaacccgaggatacagccctgtactattgtgccgctgaccggaagtccgtgatgagcatcagacccgattactggggacagggcacacaagtcacagtgtcctctggatccggcggcggaggatctggcggaggcggatctgggggcggaggctctttcgaagaagtgcaactggtggaaagcggaggcggcctggtgcagcctggcggatctctgagactgagctgtgccgccagcggctacgagttcagccggtcctggatgaactgggtgcgccaggcccctggcaagggactggaatgggtgggaagaatctaccccggcgacggcgacaccaactacagcggcaagttcaagggccggttcaccatcagcgccgacaccagcaagaacaccgcctacctccagatgaacagcctgcgggccgaggataccgccgtgtactactgtgccagagatggcagctcctgggactggtacttcgacgtgtggggacagggaacccttgtgaccgtgtccagcacgcgtatccagaaccctgatcctgccgtgtaccagctgcgggatagcaagagcagcgacaagagcgtgtgtctgttcaccgacttcgacagccagaccaacgtgtcccagagcaaggactccgacgtgtacatcaccgataagtgcgtgctggacatgcggagcatggacttcaagagcaactccgccgtggcctggtccaacaagtccgatttcgcctgcgccaacgccttcaacaacagcattatccccgaggacacattcttcccaagccccgagagcagctgcgacgtgaagctggtggaaaagagcttcgagacagacaccaacctgaacttccagaacctgagcgtgatcggcttcagaatcctgctgctgaaagtggccggctttaacctgctgatgaccctgcggctgtggtccagctaa

SEQ ID NO: 34467 - DNA, 2319 bp, synthetic construct
  source 1..2319: mol_type = other DNA
atggccttaccagtgaccgccttgctcctgccgctggccttgctgctccacgccgccaggccggaagtgcagctggttgaatctggcggaggactggttcagcctggcggatctctgagactgagctgtgaagccagcggcttcgccagcgacgattacatcatcggctggttcagacaggcccctggcaaagagagagagggcgtcagctgcatcagctctaagtacgccaacaccgtgtacaccgacagcgtgaagggcagattcagactgagcagaggcaccgccaagaataccgtgtacctccagatgagcgccctgaagcctgaggataccgccgtgtactactgcgctatggacagccgcagagtgacatgccctgagatcagcaccatgcaccggaacttcgattcttggggccagggcacactggtcacagtgtcatctggtaccggcggaggcggatctggcggcggaggtagcggtggcggaggatctgaattcatccagatgacccagagccccagcagcctgtctgccagcgtgggcgacagagtgaccatcacctgtcggagcagccagagcatcgtgcactccgtgggcaacaccttcctggaatggtatcagcagaagcccggcaaggcccccaagctgctgatctacaaggtgtccaacagattcagcggcgtgcccagcaggtttagcggctctggcagcggcaccgacttcaccctgaccatctctagcctccagcccgaggacttcgccacctactactgttttcaaggcagccagttcccctacaccttcggccagggaacaaaggtggaaatcaagcggctcgaggacctgaagaacgtgttcccacctgaggtggccgtgttcgagcctagcaaggccgagatcgcccacacccagaaagccaccctcgtgtgcctggctaccggcttctaccccgaccatgtggaactgtcttggtgggtcaacggcaaagaggtgcacagcggcgtgtgtaccgacccccagccactgaaagaacagcccgccctgaacgacagccggtactgcctgagcagcagactgagagtgtccgccaccttctggcagaacccccggaaccacttcagatgccaggtgcagttctacggcctgagcgagaacgacgagtggacccaggacagagccaagcccgtgacccagatcgtgtctgccgaagcctggggcagagccgattgcggcatcaccagcgccagctaccaccagggcgtgctgagcgccaccatcctgtacgagatcctgctgggcaaggccaccctgtacgccgtgctggtgtctgccctggtgctgatggctatggtcaagcggaaggacagccggggaagggccaagcgatctggatctggagcaacaaacttctcactactcaaacaagcaggtgacgtggaggagaatcccgggcctactagtatggactggatttggcgcatccttttccttgtcggcgctgctaccggcgcgcattccttcgaagaagtgcaactggtggaaagcggaggcggcctggtgcagcctggcggatctctgagactgagctgtgccgccagcggctacgagttcagccggtcctggatgaactgggtgcgccaggcccctggcaagggactggaatgggtgggaagaatctaccccggcgacggcgacaccaactacagcggcaagttcaagggccggttcaccatcagcgccgacaccagcaagaacaccgcctacctccagatgaacagcctgcgggccgaggataccgccgtgtactactgtgccagagatggcagctcctgggactggtacttcgacgtgtggggacagggaacccttgtgaccgtgtccagcacgcgtatccagaaccctgatcctgccgtgtaccagctgcgggatagcaagagcagcgacaagagcgtgtgtctgttcaccgacttcgacagccagaccaacgtgtcccagagcaaggactccgacgtgtacatcaccgataagtgcgtgctggacatgcggagcatggacttcaagagcaactccgccgtggcctggtccaacaagtccgatttcgcctgcgccaacgccttcaacaacagcattatccccgaggacacattcttcccaagcagcgacgtgccctgcgacgtgaagctggtggaaaagagcttcgagacagacaccaacctgaacttccagaacctgagcgtgatcggcttcagaatcctgctgctgaaagtggccggctttaacctgctgatgaccctgcggctgtggtccagctaa

SEQ ID NO: 34468 - DNA, 2292 bp, synthetic construct
  source 1..2292: mol_type = other DNA
atggccttaccagtgaccgccttgctcctgccgctggccttgctgctccacgccgccaggccgatccagatgacccagagccccagcagcctgtctgccagcgtgggcgacagagtgaccatcacctgtcggagcagccagagcatcgtgcactccgtgggcaacaccttcctggaatggtatcagcagaagcccggcaaggcccccaagctgctgatctacaaggtgtccaacagattcagcggcgtgcccagcaggtttagcggctctggcagcggcaccgacttcaccctgaccatctctagcctccagcccgaggacttcgccacctactactgttttcaaggcagccagttcccctacaccttcggccagggaacaaaggtggaaatcaagcggctcgaggacctgaagaacgtgttcccacctgaggtggccgtgttcgagcctagcgaggccgagatcagccacacccagaaagccaccctcgtgtgcctggctaccggcttctaccccgaccatgtggaactgtcttggtgggtcaacggcaaagaggtgcacagcggcgtgtgtaccgacccccagccactgaaagaacagcccgccctgaacgacagccggtactgcctgagcagcagactgagagtgtccgccaccttctggcagaacccccggaaccacttcagatgccaggtgcagttctacggcctgagcgagaacgacgagtggacccaggacagagccaagcccgtgacccagatcgtgtctgccgaagcctggggcagagccgattgcggctttaccagcgagagctaccagcagggcgtgctgagcgccaccatcctgtacgagatcctgctgggcaaggccaccctgtacgccgtgctggtgtctgccctggtgctgatggctatggtcaagcggaaggacagccggggaagggccaagcgatctggatctggagcaacaaacttctcactactcaaacaagcaggtgacgtggaggagaatcccgggcctactagtaccatggactggatttggcgcatccttttccttgtcggcgctgctaccggcgcccattccgggcccgaagtgcaactggttgaatccggtggcggcctggtgcaacccggcggatctctcagacttagctgtgccgcctccggcagaaccttcacaatgggatggtacaggcaggctccagggaaagagagagagttcgtcgccgccatctctctgtctcccacactggcctactacgccgactctgtgaaaggccggttcaccatctccagagataatagcaagaacaccgtggtgctgcaaatgaactctctgagagccgaggatacagccctgtactattgtgccgctgaccggaagtccgtgatgagcatcagacccgattactggggacagggcacactggtcacagtgtctagtggatccggcggcggaggatctggcggaggcggatctgggggcggaggctctttcgaagaagtgcaactggtggaaagcggaggcggcctggtgcagcctggcggatctctgagactgagctgtgccgccagcggctacgagttcagccggtcctggatgaactgggtgcgccaggcccctggcaagggactggaatgggtgggaagaatctaccccggcgacggcgacaccaactacagcggcaagttcaagggccggttcaccatcagcgccgacaccagcaagaacaccgcctacctccagatgaacagcctgcgggccgaggataccgccgtgtactactgtgccagagatggcagctcctgggactggtacttcgacgtgtggggacagggaacccttgtgaccgtgtccagcacgcgtatccagaaccctgatcctgccgtgtaccagctgcgggatagcaagagcagcgacaagagcgtgtgtctgttcaccgacttcgacagccagaccaacgtgtcccagagcaaggactccgacgtgtacatcaccgataagtgcgtgctggacatgcggagcatggacttcaagagcaactccgccgtggcctggtccaacaagtccgatttcgcctgcgccaacgccttcaacaacagcattatccccgaggacacattcttcccaagccccgagagcagctgcgacgtgaagctggtggaaaagagcttcgagacagacaccaacctgaacttccagaacctgagcgtgatcggcttcagaatcctgctgctgaaagtggccggctttaacctgctgatgaccctgcggctgtggtccagctaa

SEQ ID NO: 34469 - DNA, 2310 bp, synthetic construct
  source 1..2310: mol_type = other DNA
atggccttaccagtgaccgccttgctcctgccgctggccttgctgctccacgccgccaggccgatccagatgacccagagccccagcagcctgtctgccagcgtgggcgacagagtgaccatcacctgtcggagcagccagagcatcgtgcactccgtgggcaacaccttcctggaatggtatcagcagaagcccggcaaggcccccaagctgctgatctacaaggtgtccaacagattcagcggcgtgcccagcaggtttagcggctctggcagcggcaccgacttcaccctgaccatctctagcctccagcccgaggacttcgccacctactactgttttcaaggcagccagttcccctacaccttcggccagggaacaaaggtggaaatcaagcggctcgaggacctgaagaacgtgttcccacctgaggtggccgtgttcgagcctagcgaggccgagatcagccacacccagaaagccaccctcgtgtgcctggctaccggcttctaccccgaccatgtggaactgtcttggtgggtcaacggcaaagaggtgcacagcggcgtgtgtaccgacccccagccactgaaagaacagcccgccctgaacgacagccggtactgcctgagcagcagactgagagtgtccgccaccttctggcagaacccccggaaccacttcagatgccaggtgcagttctacggcctgagcgagaacgacgagtggacccaggacagagccaagcccgtgacccagatcgtgtctgccgaagcctggggcagagccgattgcggctttaccagcgagagctaccagcagggcgtgctgagcgccaccatcctgtacgagatcctgctgggcaaggccaccctgtacgccgtgctggtgtctgccctggtgctgatggctatggtcaagcggaaggacagccggggaagggccaagcgatctggatctggagcaacaaacttctcactactcaaacaagcaggtgacgtggaggagaatcccgggcctactagtaccatggactggatttggcgcatccttttccttgtcggcgctgctaccggcgcccattccgggccccaggtgcagctggttgaatctggcggaggactggttcagcctggcggatctctgagactgtcttgtgccgccagcggcaacatcaacagcagaaactgcatgggctggttcagacaggcccctggcaagggaagagaaggcgtggcagctatcggccaagtgaccggcagaacctactacgtggacagcgtgaagggcagattcaccatcagcctggacaacagcaagaacaccctgtacctccagatgaacagcctgagagccgaggacaccgccgtgtactattgtgctgctgcccctggctgtctgctgtctgcacttagaagcgccgactacagaaactggggccagggcacactggtcaccgtttcttctggatccggcggcggaggatctggcggaggcggatctgggggcggaggctctttcgaagaagtgcaactggtggaaagcggaggcggcctggtgcagcctggcggatctctgagactgagctgtgccgccagcggctacgagttcagccggtcctggatgaactgggtgcgccaggcccctggcaagggactggaatgggtgggaagaatctaccccggcgacggcgacaccaactacagcggcaagttcaagggccggttcaccatcagcgccgacaccagcaagaacaccgcctacctccagatgaacagcctgcgggccgaggataccgccgtgtactactgtgccagagatggcagctcctgggactggtacttcgacgtgtggggacagggaacccttgtgaccgtgtccagcacgcgtatccagaaccctgatcctgccgtgtaccagctgcgggatagcaagagcagcgacaagagcgtgtgtctgttcaccgacttcgacagccagaccaacgtgtcccagagcaaggactccgacgtgtacatcaccgataagtgcgtgctggacatgcggagcatggacttcaagagcaactccgccgtggcctggtccaacaagtccgatttcgcctgcgccaacgccttcaacaacagcattatccccgaggacacattcttcccaagccccgagagcagctgcgacgtgaagctggtggaaaagagcttcgagacagacaccaacctgaacttccagaacctgagcgtgatcggcttcagaatcctgctgctgaaagtggccggctttaacctgctgatgaccctgcggctgtggtccagc

SEQ ID NO: 34470 - DNA, 2313 bp, synthetic construct
  source 1..2313: mol_type = other DNA
atggccttaccagtgaccgccttgctcctgccgctggccttgctgctccacgccgccaggccgatccagatgacccagagccccagcagcctgtctgccagcgtgggcgacagagtgaccatcacctgtcggagcagccagagcatcgtgcactccgtgggcaacaccttcctggaatggtatcagcagaagcccggcaaggcccccaagctgctgatctacaaggtgtccaacagattcagcggcgtgcccagcaggtttagcggctctggcagcggcaccgacttcaccctgaccatctctagcctccagcccgaggacttcgccacctactactgttttcaaggcagccagttcccctacaccttcggccagggaacaaaggtggaaatcaagcggctcgaggacctgaagaacgtgttcccacctgaggtggccgtgttcgagcctagcgaggccgagatcagccacacccagaaagccaccctcgtgtgcctggctaccggcttctaccccgaccatgtggaactgtcttggtgggtcaacggcaaagaggtgcacagcggcgtgtgtaccgacccccagccactgaaagaacagcccgccctgaacgacagccggtactgcctgagcagcagactgagagtgtccgccaccttctggcagaacccccggaaccacttcagatgccaggtgcagttctacggcctgagcgagaacgacgagtggacccaggacagagccaagcccgtgacccagatcgtgtctgccgaagcctggggcagagccgattgcggctttaccagcgagagctaccagcagggcgtgctgagcgccaccatcctgtacgagatcctgctgggcaaggccaccctgtacgccgtgctggtgtctgccctggtgctgatggctatggtcaagcggaaggacagccggggaagggccaagcgatctggatctggagcaacaaacttctcactactcaaacaagcaggtgacgtggaggagaatcccgggcctactagtaccatggactggatttggcgcatccttttccttgtcggcgctgctaccggcgcccattccgggccccaggtgcagctggttgaatctggcggaggatctgttcaggctggcggctctctgagactgtcttgtggcgcttccggcaacatcagcagcagaaactgcatgggctggttcagacaggcccctggcaaagagagagaaggcgttgccgccatcggacaagtgaccggcagatcctactacgtggacagcgtgaagggcagattcaccatcagcctggacaacgccaagaacaccctgtacctccagatgaacacactgaagcccgaggacaccgccatgtactactgtgctgctgcccctggctgtctgctgtctgcacttagaagcgccgactacagaaactggggccagggaacccaagtgacagtgtctagtggatccggcggcggaggatctggcggaggcggatctgggggcggaggctctttcgaagaagtgcaactggtggaaagcggaggcggcctggtgcagcctggcggatctctgagactgagctgtgccgccagcggctacgagttcagccggtcctggatgaactgggtgcgccaggcccctggcaagggactggaatgggtgggaagaatctaccccggcgacggcgacaccaactacagcggcaagttcaagggccggttcaccatcagcgccgacaccagcaagaacaccgcctacctccagatgaacagcctgcgggccgaggataccgccgtgtactactgtgccagagatggcagctcctgggactggtacttcgacgtgtggggacagggaacccttgtgaccgtgtccagcacgcgtatccagaaccctgatcctgccgtgtaccagctgcgggatagcaagagcagcgacaagagcgtgtgtctgttcaccgacttcgacagccagaccaacgtgtcccagagcaaggactccgacgtgtacatcaccgataagtgcgtgctggacatgcggagcatggacttcaagagcaactccgccgtggcctggtccaacaagtccgatttcgcctgcgccaacgccttcaacaacagcattatccccgaggacacattcttcccaagccccgagagcagctgcgacgtgaagctggtggaaaagagcttcgagacagacaccaacctgaacttccagaacctgagcgtgatcggcttcagaatcctgctgctgaaagtggccggctttaacctgctgatgaccctgcggctgtggtccagctaa

SEQ ID NO: 34471 - DNA, 2736 bp, synthetic construct
  source 1..2736: mol_type = other DNA
atggccttaccagtgaccgccttgctcctgccgctggccttgctgctccacgccgccaggccggaagtgcagctggttgaatctggcggaggactggttcaggctggcggatctctgagactgtcttgtgccgccagcggcagaacctttagcatgggctggtttagacaggcccctggcaaagagagagagttcgtcgccgccatcacatactctggcggcagcccttactacgccgactctgtgaagggcagattcaccatcagccgggacaacgccaagaacaccgtgtacctccagatgaacagcctgaagcctgaggacaccgccgtgtactactgcgccgccaatccaacatacggcagcgactggaacgccgagaattggggccagggaacccaagtgacagtgtctagcggtaccggcggaggcggatctggcggcggaggtagcggtggcggaggatctgaattcatccagatgacccagagccccagcagcctgtctgccagcgtgggcgacagagtgaccatcacctgtcggagcagccagagcatcgtgcactccgtgggcaacaccttcctggaatggtatcagcagaagcccggcaaggcccccaagctgctgatctacaaggtgtccaacagattcagcggcgtgcccagcaggtttagcggctctggcagcggcaccgacttcaccctgaccatctctagcctccagcccgaggacttcgccacctactactgttttcaaggcagccagttcccctacaccttcggccagggaacaaaggtggaaatcaagcggctcgagatccagaaccctgatcctgccgtgtaccagctgcgggatagcaagagcagcgacaagagcgtgtgtctgttcaccgacttcgacagccagaccaacgtgtcccagagcaaggactccgacgtgtacatcaccgataagtgcgtgctggacatgcggagcatggacttcaagagcaactccgccgtggcctggtccaacaagtccgatttcgcctgcgccaacgccttcaacaacagcattatccccgaggacacattcttcccaagcagcgacgtgccctgcgacgtgaagctggtggaaaagagcttcgagacagacaccaacctgaacttccagaacctgagcgtgatcggcttcagaatcctgctgctgaaagtggccggctttaacctgctgatgaccctgcggctgtggtccagccgcgccaagagaagcggatctggcgtgaagcagaccctgaatttcgacctgctgaagctggctggcgacgtggaatccaacccaggccctactagtaccatggactggatttggcgcatccttttccttgtcggcgctgctaccggcgcccattccgggccccaggtgcagctggttgaatctggcggaggatctgttcaggctggcggctctctgagactgtcttgtggcgcttccggcaacatcagcagcagaaactgcatgggctggttcagacaggcccctggcaaagagagagaaggcgttgccgccatcggacaagtgaccggcagatcctactacgtggacagcgtgaagggcagattcaccatcagcctggacaacgccaagaacaccctgtacctccagatgaacacactgaagcccgaggacaccgccatgtactactgtgctgctgcccctggctgtctgctgtctgcacttagaagcgccgactacagaaactggggccagggaacccaagtgacagtgtctagtggatccggcggcggaggatctggcggaggcggatctgggggcggaggctctttcgaagaagtgcaactggtggaaagcggaggcggcctggtgcagcctggcggatctctgagactgagctgtgccgccagcggctacgagttcagccggtcctggatgaactgggtgcgccaggcccctggcaagggactggaatgggtgggaagaatctaccccggcgacggcgacaccaactacagcggcaagttcaagggccggttcaccatcagcgccgacaccagcaagaacaccgcctacctccagatgaacagcctgcgggccgaggataccgccgtgtactactgtgccagagatggcagctcctgggactggtacttcgacgtgtggggacagggaacccttgtgaccgtgtccagcacgcgtgaggacctgaagaacgtgttcccacctgaggtggccgtgttcgagcctagcaaggccgagatcgcccacacccagaaagccaccctcgtgtgcctggctaccggcttctaccccgaccatgtggaactgtcttggtgggtcaacggcaaagaggtgcacagcggcgtgtgtaccgacccccagccactgaaagaacagcccgccctgaacgacagccggtactgcctgagcagcagactgagagtgtccgccaccttctggcagaacccccggaaccacttcagatgccaggtgcagttctacggcctgagcgagaacgacgagtggacccaggacagagccaagcccgtgacccagatcgtgtctgccgaagcctggggcagagccgattgcggcatcaccagcgccagctaccaccagggcgtgctgagcgccaccatcctgtacgagatcctgctgggcaaggccaccctgtacgccgtgctggtgtctgccctggtgctgatggctatggtcaagcggaaggacagccggggataa

SEQ ID NO: 34472 - DNA, 2727 bp, synthetic construct
  source 1..2727: mol_type = other DNA
atggccttaccagtgaccgccttgctcctgccgctggccttgctgctccacgccgccaggccgcaggtgcagctggttgaatctggcggaggatctgttcaggctggcggctctctgagactgtcttgtggcgcttccggcaacatcagcagcagaaactgcatgggctggttcagacaggcccctggcaaagagagagaaggcgttgccgccatcggacaagtgaccggcagatcctactacgtggacagcgtgaagggcagattcaccatcagcctggacaacgccaagaacaccctgtacctccagatgaacacactgaagcccgaggacaccgccatgtactactgtgctgctgcccctggctgtctgctgtctgcacttagaagcgccgactacagaaactggggccagggaacccaagtgacagtgtctagtggtaccggcggaggcggatctggcggcggaggtagcggtggcggaggatctgaattcatccagatgacccagagccccagcagcctgtctgccagcgtgggcgacagagtgaccatcacctgtcggagcagccagagcatcgtgcactccgtgggcaacaccttcctggaatggtatcagcagaagcccggcaaggcccccaagctgctgatctacaaggtgtccaacagattcagcggcgtgcccagcaggtttagcggctctggcagcggcaccgacttcaccctgaccatctctagcctccagcccgaggacttcgccacctactactgttttcaaggcagccagttcccctacaccttcggccagggaacaaaggtggaaatcaagcggctcgaggacctgaagaacgtgttcccacctgaggtggccgtgttcgagcctagcgaggccgagatcagccacacccagaaagccaccctcgtgtgcctggctaccggcttctaccccgaccatgtggaactgtcttggtgggtcaacggcaaagaggtgcacagcggcgtgtgtaccgacccccagccactgaaagaacagcccgccctgaacgacagccggtactgcctgagcagcagactgagagtgtccgccaccttctggcagaacccccggaaccacttcagatgccaggtgcagttctacggcctgagcgagaacgacgagtggacccaggacagagccaagcccgtgacccagatcgtgtctgccgaagcctggggcagagccgattgcggctttaccagcgagagctaccagcagggcgtgctgagcgccaccatcctgtacgagatcctgctgggcaaggccaccctgtacgccgtgctggtgtctgccctggtgctgatggctatggtcaagcggaaggacagccggggaagggccaagcgatctggatctggagcaacaaacttctcactactcaaacaagcaggtgacgtggaggagaatcccgggcctactagtgccaccatggactggatttggcgcatccttttccttgtcggcgctgctaccggcgcccattccgggcccgaagtgcaactggttgaatccggtggcggcctggtgcaagcaggcggatctctcagacttagctgtgccgcctccggcagaaccttcacaatgggatggtttaggcaggctccagggaaagagagagagttcgtcgccgccatctctctgtctcccacactggcctactacgccgactctgtgaaaggccggttcaccatctccagagataatgccaagaacaccgtggtgctgcaaatgaactctctgaaacccgaggatacagccctgtactattgtgccgctgaccggaagtccgtgatgagcatcagacccgattactggggacagggcacacaagtcacagtgtcctctggatccggcggcggaggatctggcggaggcggatctgggggcggaggctctttcgaagaagtgcaactggtggaaagcggaggcggcctggtgcagcctggcggatctctgagactgagctgtgccgccagcggctacgagttcagccggtcctggatgaactgggtgcgccaggcccctggcaagggactggaatgggtgggaagaatctaccccggcgacggcgacaccaactacagcggcaagttcaagggccggttcaccatcagcgccgacaccagcaagaacaccgcctacctccagatgaacagcctgcgggccgaggataccgccgtgtactactgtgccagagatggcagctcctgggactggtacttcgacgtgtggggacagggaacccttgtgaccgtgtccagcacgcgtatccagaaccctgatcctgccgtgtaccagctgcgggatagcaagagcagcgacaagagcgtgtgtctgttcaccgacttcgacagccagaccaacgtgtcccagagcaaggactccgacgtgtacatcaccgataagtgcgtgctggacatgcggagcatggacttcaagagcaactccgccgtggcctggtccaacaagtccgatttcgcctgcgccaacgccttcaacaacagcattatccccgaggacacattcttcccaagccccgagagcagctgcgacgtgaagctggtggaaaagagcttcgagacagacaccaacctgaacttccagaacctgagcgtgatcggcttcagaatcctgctgctgaaagtggccggctttaacctgctgatgaccctgcggctgtggtccagctaa

SEQ ID NO: 34473 - DNA, 2316 bp, synthetic construct
  source 1..2316: mol_type = other DNA
atggccttaccagtgaccgccttgctcctgccgctggccttgctgctccacgccgccaggccgcaggtgcagctggttgaatctggcggaggatctgttcaggctggcggctctctgagactgtcttgtggcgcttccggcaacatcagcagcagaaactgcatgggctggttcagacaggcccctggcaaagagagagaaggcgttgccgccatcggacaagtgaccggcagatcctactacgtggacagcgtgaagggcagattcaccatcagcctggacaacgccaagaacaccctgtacctccagatgaacacactgaagcccgaggacaccgccatgtactactgtgctgctgcccctggctgtctgctgtctgcacttagaagcgccgactacagaaactggggccagggaacccaagtgacagtgtctagtggtaccggcggaggcggatctggcggcggaggtagcggtggcggaggatctgaattcatccagatgacccagagccccagcagcctgtctgccagcgtgggcgacagagtgaccatcacctgtcggagcagccagagcatcgtgcactccgtgggcaacaccttcctggaatggtatcagcagaagcccggcaaggcccccaagctgctgatctacaaggtgtccaacagattcagcggcgtgcccagcaggtttagcggctctggcagcggcaccgacttcaccctgaccatctctagcctccagcccgaggacttcgccacctactactgttttcaaggcagccagttcccctacaccttcggccagggaacaaaggtggaaatcaagcggctcgaggacctgaagaacgtgttcccacctgaggtggccgtgttcgagcctagcgaggccgagatcagccacacccagaaagccaccctcgtgtgcctggctaccggcttctaccccgaccatgtggaactgtcttggtgggtcaacggcaaagaggtgcacagcggcgtgtgtaccgacccccagccactgaaagaacagcccgccctgaacgacagccggtactgcctgagcagcagactgagagtgtccgccaccttctggcagaacccccggaaccacttcagatgccaggtgcagttctacggcctgagcgagaacgacgagtggacccaggacagagccaagcccgtgacccagatcgtgtctgccgaagcctggggcagagccgattgcggctttaccagcgagagctaccagcagggcgtgctgagcgccaccatcctgtacgagatcctgctgggcaaggccaccctgtacgccgtgctggtgtctgccctggtgctgatggctatggtcaagcggaaggacagccggggaagggccaagcgatctggatctggagcaacaaacttctcactactcaaacaagcaggtgacgtggaggagaatcccgggcctactagtgccaccatggactggatttggcgcatccttttccttgtcggcgctgctaccggcgcccattccttcgaagaagtgcaactggtggaaagcggaggcggcctggtgcagcctggcggatctctgagactgagctgtgccgccagcggctacgagttcagccggtcctggatgaactgggtgcgccaggcccctggcaagggactggaatgggtgggaagaatctaccccggcgacggcgacaccaactacagcggcaagttcaagggccggttcaccatcagcgccgacaccagcaagaacaccgcctacctccagatgaacagcctgcgggccgaggataccgccgtgtactactgtgccagagatggcagctcctgggactggtacttcgacgtgtggggacagggaacccttgtgaccgtgtccagcacgcgtatccagaaccctgatcctgccgtgtaccagctgcgggatagcaagagcagcgacaagagcgtgtgtctgttcaccgacttcgacagccagaccaacgtgtcccagagcaaggactccgacgtgtacatcaccgataagtgcgtgctggacatgcggagcatggacttcaagagcaactccgccgtggcctggtccaacaagtccgatttcgcctgcgccaacgccttcaacaacagcattatccccgaggacacattcttcccaagccccgagagcagctgcgacgtgaagctggtggaaaagagcttcgagacagacaccaacctgaacttccagaacctgagcgtgatcggcttcagaatcctgctgctgaaagtggccggctttaacctgctgatgaccctgcggctgtggtccagctaa

SEQ ID NO: 34474 - DNA, 2316 bp, synthetic construct
  source 1..2316: mol_type = other DNA
atggccttaccagtgaccgccttgctcctgccgctggccttgctgctccacgccgccaggccgcaagttcagctggtggaaagcggtggtggcgttgtgcaacctggtggaagtctgaggctgagctgtgccgcttctggcctgagctttagcacctacactgtggcctggttcaggcaggctcccggaaagggtcttgaaggcgtggccgccattccttacaccagccagcacatggtgtacacagacagcgtcagaggccggttcaccatcagcagagacaactccaagaatacgctctatctccagatgaactctctgcgcgccgaagatacagccgtgtattactgcgccaccgacagacggcctggcacctctatgctggctatcaacggctacaacagatggggacagggaaccaccgtgaccgtgtcatctggtaccggcggaggcggatctggcggcggaggtagcggtggcggaggatctgaattcatccagatgacccagagccccagcagcctgtctgccagcgtgggcgacagagtgaccatcacctgtcggagcagccagagcatcgtgcactccgtgggcaacaccttcctggaatggtatcagcagaagcccggcaaggcccccaagctgctgatctacaaggtgtccaacagattcagcggcgtgcccagcaggtttagcggctctggcagcggcaccgacttcaccctgaccatctctagcctccagcccgaggacttcgccacctactactgttttcaaggcagccagttcccctacaccttcggccagggaacaaaggtggaaatcaagcggctcgaggacctgaagaacgtgttcccacctgaggtggccgtgttcgagcctagcgaggccgagatcagccacacccagaaagccaccctcgtgtgcctggctaccggcttctaccccgaccatgtggaactgtcttggtgggtcaacggcaaagaggtgcacagcggcgtgtgtaccgacccccagccactgaaagaacagcccgccctgaacgacagccggtactgcctgagcagcagactgagagtgtccgccaccttctggcagaacccccggaaccacttcagatgccaggtgcagttctacggcctgagcgagaacgacgagtggacccaggacagagccaagcccgtgacccagatcgtgtctgccgaagcctggggcagagccgattgcggctttaccagcgagagctaccagcagggcgtgctgagcgccaccatcctgtacgagatcctgctgggcaaggccaccctgtacgccgtgctggtgtctgccctggtgctgatggctatggtcaagcggaaggacagccggggaagggccaagcgatctggatctggagcaacaaacttctcactactcaaacaagcaggtgacgtggaggagaatcccgggcctactagtgccaccatggactggatttggcgcatccttttccttgtcggcgctgctaccggcgcccattccttcgaagaagtgcaactggtggaaagcggaggcggcctggtgcagcctggcggatctctgagactgagctgtgccgccagcggctacgagttcagccggtcctggatgaactgggtgcgccaggcccctggcaagggactggaatgggtgggaagaatctaccccggcgacggcgacaccaactacagcggcaagttcaagggccggttcaccatcagcgccgacaccagcaagaacaccgcctacctccagatgaacagcctgcgggccgaggataccgccgtgtactactgtgccagagatggcagctcctgggactggtacttcgacgtgtggggacagggaacccttgtgaccgtgtccagcacgcgtatccagaaccctgatcctgccgtgtaccagctgcgggatagcaagagcagcgacaagagcgtgtgtctgttcaccgacttcgacagccagaccaacgtgtcccagagcaaggactccgacgtgtacatcaccgataagtgcgtgctggacatgcggagcatggacttcaagagcaactccgccgtggcctggtccaacaagtccgatttcgcctgcgccaacgccttcaacaacagcattatccccgaggacacattcttcccaagccccgagagcagctgcgacgtgaagctggtggaaaagagcttcgagacagacaccaacctgaacttccagaacctgagcgtgatcggcttcagaatcctgctgctgaaagtggccggctttaacctgctgatgaccctgcggctgtggtccagctaa

SEQ ID NO: 34475 - DNA, 2313 bp, synthetic construct
  source 1..2313: mol_type = other DNA
atggccttaccagtgaccgccttgctcctgccgctggccttgctgctccacgccgccaggccgatccagatgacccagagccccagcagcctgtctgccagcgtgggcgacagagtgaccatcacctgtcggagcagccagagcatcgtgcactccgtgggcaacaccttcctggaatggtatcagcagaagcccggcaaggcccccaagctgctgatctacaaggtgtccaacagattcagcggcgtgcccagcaggtttagcggctctggcagcggcaccgacttcaccctgaccatctctagcctccagcccgaggacttcgccacctactactgttttcaaggcagccagttcccctacaccttcggccagggaacaaaggtggaaatcaagcggctcgaggacctgaagaacgtgttcccacctgaggtggccgtgttcgagcctagcgaggccgagatcagccacacccagaaagccaccctcgtgtgcctggctaccggcttctaccccgaccatgtggaactgtcttggtgggtcaacggcaaagaggtgcacagcggcgtgtgtaccgacccccagccactgaaagaacagcccgccctgaacgacagccggtactgcctgagcagcagactgagagtgtccgccaccttctggcagaacccccggaaccacttcagatgccaggtgcagttctacggcctgagcgagaacgacgagtggacccaggacagagccaagcccgtgacccagatcgtgtctgccgaagcctggggcagagccgattgcggctttaccagcgagagctaccagcagggcgtgctgagcgccaccatcctgtacgagatcctgctgggcaaggccaccctgtacgccgtgctggtgtctgccctggtgctgatggctatggtcaagcggaaggacagccggggaagggccaagcgatctggatctggagcaacaaacttctcactactcaaacaagcaggtgacgtggaggagaatcccgggcctactagtaccatggactggatttggcgcatccttttccttgtcggcgctgctaccggcgcccattccgggccccaagttcagctggtggaaagcggtggtggcgttgtgcaacctggtggaagtctgaggctgagctgtgccgcttctggcctgagctttagcacctacactgtggcctggttcaggcaggctcccggaaagggtcttgaaggcgtggccgccattccttacaccagccagcacatggtgtacacagacagcgtcagaggccggttcaccatcagcagagacaactccaagaatacgctctatctccagatgaactctctgcgcgccgaagatacagccgtgtattactgcgccaccgacagacggcctggcacctctatgctggctatcaacggctacaacagatggggacagggaaccaccgtgaccgtgtcatctggatccggcggcggaggatctggcggaggcggatctgggggcggaggctctttcgaagaagtgcaactggtggaaagcggaggcggcctggtgcagcctggcggatctctgagactgagctgtgccgccagcggctacgagttcagccggtcctggatgaactgggtgcgccaggcccctggcaagggactggaatgggtgggaagaatctaccccggcgacggcgacaccaactacagcggcaagttcaagggccggttcaccatcagcgccgacaccagcaagaacaccgcctacctccagatgaacagcctgcgggccgaggataccgccgtgtactactgtgccagagatggcagctcctgggactggtacttcgacgtgtggggacagggaacccttgtgaccgtgtccagcacgcgtatccagaaccctgatcctgccgtgtaccagctgcgggatagcaagagcagcgacaagagcgtgtgtctgttcaccgacttcgacagccagaccaacgtgtcccagagcaaggactccgacgtgtacatcaccgataagtgcgtgctggacatgcggagcatggacttcaagagcaactccgccgtggcctggtccaacaagtccgatttcgcctgcgccaacgccttcaacaacagcattatccccgaggacacattcttcccaagccccgagagcagctgcgacgtgaagctggtggaaaagagcttcgagacagacaccaacctgaacttccagaacctgagcgtgatcggcttcagaatcctgctgctgaaagtggccggctttaacctgctgatgaccctgcggctgtggtccagctaa

SEQ ID NO: 34476 - DNA, 2319 bp, synthetic construct
  source 1..2319: mol_type = other DNA
atggccttaccagtgaccgccttgctcctgccgctggccttgctgctccacgccgccaggccgatccagatgacccagagccccagcagcctgtctgccagcgtgggcgacagagtgaccatcacctgtcggagcagccagagcatcgtgcactccgtgggcaacaccttcctggaatggtatcagcagaagcccggcaaggcccccaagctgctgatctacaaggtgtccaacagattcagcggcgtgcccagcaggtttagcggctctggcagcggcaccgacttcaccctgaccatctctagcctccagcccgaggacttcgccacctactactgttttcaaggcagccagttcccctacaccttcggccagggaacaaaggtggaaatcaagcggctcgaggacctgaagaacgtgttcccacctgaggtggccgtgttcgagcctagcgaggccgagatcagccacacccagaaagccaccctcgtgtgcctggctaccggcttctaccccgaccatgtggaactgtcttggtgggtcaacggcaaagaggtgcacagcggcgtgtgtaccgacccccagccactgaaagaacagcccgccctgaacgacagccggtactgcctgagcagcagactgagagtgtccgccaccttctggcagaacccccggaaccacttcagatgccaggtgcagttctacggcctgagcgagaacgacgagtggacccaggacagagccaagcccgtgacccagatcgtgtctgccgaagcctggggcagagccgattgcggctttaccagcgagagctaccagcagggcgtgctgagcgccaccatcctgtacgagatcctgctgggcaaggccaccctgtacgccgtgctggtgtctgccctggtgctgatggctatggtcaagcggaaggacagccggggaagggccaagcgatctggatctggagcaacaaacttctcactactcaaacaagcaggtgacgtggaggagaatcccgggcctactagtaccatggactggatttggcgcatccttttccttgtcggcgctgctaccggcgcccattccgggcccgaggtgcagctggttgaatctggcggaggatctgttcaggctggcggctctctgagactgtcttgtgccgccagcggctacacctacagcatcaactgcatgggctggttcagacaggcccctggcaaagagagagaaggcgttgccgccatctctaccggcggaggcagaaccgattaccgggattctgtgaagggcagattcaccatcagccaggacaacgccaagaacaccgtgtacctccagatgaacagcctgaagcctgaggacaccgccatgtactactgtgccggcaagaccacctatcctggctacggatgtggcctgggcagaagcgcctacaattattggggccagggcacccaagtgaccgtgtcatctggatccggcggcggaggatctggcggaggcggatctgggggcggaggctctttcgaagaagtgcaactggtggaaagcggaggcggcctggtgcagcctggcggatctctgagactgagctgtgccgccagcggctacgagttcagccggtcctggatgaactgggtgcgccaggcccctggcaagggactggaatgggtgggaagaatctaccccggcgacggcgacaccaactacagcggcaagttcaagggccggttcaccatcagcgccgacaccagcaagaacaccgcctacctccagatgaacagcctgcgggccgaggataccgccgtgtactactgtgccagagatggcagctcctgggactggtacttcgacgtgtggggacagggaacccttgtgaccgtgtccagcacgcgtatccagaaccctgatcctgccgtgtaccagctgcgggatagcaagagcagcgacaagagcgtgtgtctgttcaccgacttcgacagccagaccaacgtgtcccagagcaaggactccgacgtgtacatcaccgataagtgcgtgctggacatgcggagcatggacttcaagagcaactccgccgtggcctggtccaacaagtccgatttcgcctgcgccaacgccttcaacaacagcattatccccgaggacacattcttcccaagccccgagagcagctgcgacgtgaagctggtggaaaagagcttcgagacagacaccaacctgaacttccagaacctgagcgtgatcggcttcagaatcctgctgctgaaagtggccggctttaacctgctgatgaccctgcggctgtggtccagctaa

SEQ ID NO: 34477 - DNA, 1875 bp, synthetic construct
  source 1..1875: mol_type = other DNA
atggccttaccagtgaccgccttgctcctgccgctggccttgctgctccacgccgccaggccgatccagatgacccagagccccagcagcctgtctgccagcgtgggcgacagagtgaccatcacctgtcggagcagccagagcatcgtgcactccgtgggcaacaccttcctggaatggtatcagcagaagcccggcaaggcccccaagctgctgatctacaaggtgtccaacagattcagcggcgtgcccagcaggtttagcggctctggcagcggcaccgacttcaccctgaccatctctagcctccagcccgaggacttcgccacctactactgttttcaaggcagccagttcccctacaccttcggccagggaacaaaggtggaaatcaagcggctcgaggacctgaagcacgtgttcccacctgaggtggccgtgttcgagcctagcgacgccgagatctggcacacccagaaagccaccctcgtgtgcctggctaccggcttctaccccgaccatgtggaactgtcttggtgggtcaacggcaaagaggtgcacagcggcgtgtctaccgacccccagccactgaaagaacagcccgccctgaacgacagccggtactgcctgagcagcagactgagagtgtccgccaccttctggcagaacccccggaaccacttcagatgccaggtgcagttctacggcctgagcgagaacgacgagtggacccaggacagagccaagcccgtgacccagatcgtgtctgccgaagcctggggcagagccgattgcggctttaccagcgagagctaccagcagggcgtgctgagcgccaccatcctgtacgagatcctgctgggcaaggccaccctgtacgccgtgctggtgtctgccctggtgctgatggctatggtcaagcggaaggacagccggggaagggccaagcgatctggatctggagcaacaaacttctcactactcaaacaagcaggtgacgtggaggagaatcccgggcctactagtatggactggatttggcgcatccttttccttgtcggcgctgctaccggcgcgcattccttcgaagaagtgcaactggtggaaagcggaggcggcctggtgcagcctggcggatctctgagactgagctgtgccgccagcggctacgagttcagccggtcctggatgaactgggtgcgccaggcccctggcaagggactggaatgggtgggaagaatctaccccggcgacggcgacaccaactacagcggcaagttcaagggccggttcaccatcagcgccgacaccagcaagaacaccgcctacctccagatgaacagcctgcgggccgaggataccgccgtgtactactgtgccagagatggcagctcctgggactggtacttcgacgtgtggggacagggaacccttgtgaccgtgtccagcacgcgtatccagaaccctgatcctgccgtgtaccagctgcgggatagcaagagcagcgacaagagcgtgtgtctgttcaccgacttcgacagccagaccaacgtgtcccagagcaaggactccgacgtgtacatcaccgataagaccgtgctggacatgcggagcatggacttcaagagcaactccgccgtggcctggtccagcaagtccgatttcgcctgcgccaacgccttcaacaacagcattatccccgaggacacattcttcccaagccccgagatggcctgcgacgtgaagctggtggaaaagagcttcgagacagacaccaacctgaacttccagaacctgctcgtgatctggctgagaatcctgctgctgaaagtggccggctttaacctgctgatgaccctgcggctgtggtccagc

SEQ ID NO: 34478 - DNA, 1875 bp, synthetic construct
  source 1..1875: mol_type = other DNA
atggccttaccagtgaccgccttgctcctgccgctggccttgctgctccacgccgccaggccgatccagatgacccagagccccagcagcctgtctgccagcgtgggcgacagagtgaccatcacctgtcggagcagccagagcatcgtgcactccgtgggcaacaccttcctggaatggtatcagcagaagcccggcaaggcccccaagctgctgatctacaaggtgtccaacagattcagcggcgtgcccagcaggtttagcggctctggcagcggcaccgacttcaccctgaccatctctagcctccagcccgaggacttcgccacctactactgttttcaaggcagccagttcccctacaccttcggccagggaacaaaggtggaaatcaagcggctcgaggacctgaagcacgtgttcccacctgaggtggccgtgttcgagcctagcgacgccgagatctggcacacccagaaagccaccctcgtgtgcctggctaccggcttctaccccgaccatgtggaactgtcttggtgggtcaacggcaaagaggtgcacagcggcgtgtctaccgacccccagccactgaaagaacagcccgccctgaacgacagccggtactgcctgagcagcagactgagagtgtccgccaccttctggcagaacccccggaaccacttcagatgccaggtgcagttctacggcctgagcgagaacgacgagtggacccaggacagagccaagcccgtgacccagatcgtgtctgccgaagcctggggcagagccgattgcggctttaccagcgagagctaccagcagggcgtgctgagcgccaccatcctgtacgagatcctgctgggcaaggccaccctgtacgccgtgctggtgtctgccctggtgctgatggctatggtcaagcggaaggacagccggggaagggccaagcgatctggatctggagcaacaaacttctcactactcaaacaagcaggtgacgtggaggagaatcccgggcctactagtatggactggatttggcgcatccttttccttgtcggcgctgctaccggcgcgcattccttcgaagaagtgcaactggtggaaagcggaggcggcctggtgcagcctggcggatctctgagactgagctgtgccgccagcggctacgagttcagccggtcctggatgaactgggtgcgccaggcccctggcaagggactggaatgggtgggaagaatctaccccggcgacggcgacaccaactacagcggcaagttcaagggccggttcaccatcagcgccgacaccagcaagaacaccgcctacctccagatgaacagcctgcgggccgaggataccgccgtgtactactgtgccagagatggcagctcctgggactggtacttcgacgtgtggggacagggaacccttgtgaccgtgtccagcacgcgtatccagaaccctgatcctgccgtgtaccagctgcgggatagcaagagcagcgacaagagcgtgtgtctgttcaccgacttcgacagccagaccaacgtgtcccagagcaaggactccgacgtgtacatcaccgataagaccgtgctggacatgcggagcatggacttcaagagcaactccgccgtggcctggtccaccaagtccgatttcgcctgcgccaacgccttcaacaacagcattatccccgaggacacattcttcccaagccccgaggtggtgtgcgacgtgaagctggtggaaaagagcttcgagacagacaccaacctgaacttccagaacctggtggtgatcggcgccagaatcctgctgctgaaagtggccggctttaacctgctgatgaccctgcggctgtggtccagc

SEQ ID NO: 34479 - DNA, 1875 bp, synthetic construct
  source 1..1875: mol_type = other DNA
atggccttaccagtgaccgccttgctcctgccgctggccttgctgctccacgccgccaggccgatccagatgacccagagccccagcagcctgtctgccagcgtgggcgacagagtgaccatcacctgtcggagcagccagagcatcgtgcactccgtgggcaacaccttcctggaatggtatcagcagaagcccggcaaggcccccaagctgctgatctacaaggtgtccaacagattcagcggcgtgcccagcaggtttagcggctctggcagcggcaccgacttcaccctgaccatctctagcctccagcccgaggacttcgccacctactactgttttcaaggcagccagttcccctacaccttcggccagggaacaaaggtggaaatcaagcggctcgaggacctgaagaacgtgttcccacctgaggtggccgtgttcgagcctagcaaggccgagatcagcagaacccagaaagccaccctcgtgtgcctggctaccggcttctaccctcctcatgtggaactgtcttggtgggtcaacggcaaagaggtgcacgacggcgtgtgtaccgacccccagccactgaaagaacagcccgccctgaacgacagccggtactgcctgagcagcagactgagagtgtccgccaccttctggcagaacccccggaaccacttcagatgccaggtgcagttctacggcctgagcgagaacgacgagtggacccaggacagagccaagcccgtgacccagatcgtgtctgccgaagcctggggcagagccgattgcggctttaccagcgagagctaccagcagggcgtgctgagcgccaccatcctgtacgagatcctgctgggcaaggccaccctgtacgccgtgctggtgtctgccctggtgctgatggctatggtcaagcggaaggacagccggggaagggccaagcgatctggatctggagcaacaaacttctcactactcaaacaagcaggtgacgtggaggagaatcccgggcctactagtatggactggatttggcgcatccttttccttgtcggcgctgctaccggcgcgcattccttcgaagaagtgcaactggtggaaagcggaggcggcctggtgcagcctggcggatctctgagactgagctgtgccgccagcggctacgagttcagccggtcctggatgaactgggtgcgccaggcccctggcaagggactggaatgggtgggaagaatctaccccggcgacggcgacaccaactacagcggcaagttcaagggccggttcaccatcagcgccgacaccagcaagaacaccgcctacctccagatgaacagcctgcgggccgaggataccgccgtgtactactgtgccagagatggcagctcctgggactggtacttcgacgtgtggggacagggaacccttgtgaccgtgtccagcacgcgtatccagaaccctgatcctgccgtgtaccagctgcgggatagcaagagcagcgacaagttcgtgtgtctgttcaccgacttcgacagccagatcaacgtgtcccagagcaaggactccgacgtgtacatcaccgataagtgcgtgctggacatgcggagcatggacttcaagagcaactccgccgtggcctggtccaacaagtccgatttcacctgcgccaacgccttcaacaacagcattatccccgaggacacattcttcccaagccccgagagcagctgcgacgtgaagctggtggaaaagagcttcgagacagacaccaacctgaacttccagaacctgagcgtgatcggcttcagaatcctgctgctgaaagtggccggctttaacctgctgatgaccctgcggctgtggtccagc

SEQ ID NO: 34480 - DNA, 2301 bp, synthetic construct
  source 1..2301: mol_type = other DNA
atggccttaccagtgaccgccttgctcctgccgctggccttgctgctccacgccgccaggccgatccagatgacccagagccccagcagcctgtctgccagcgtgggcgacagagtgaccatcacctgtcggagcagccagagcatcgtgcactccgtgggcaacaccttcctggaatggtatcagcagaagcccggcaaggcccccaagctgctgatctacaaggtgtccaacagattcagcggcgtgcccagcaggtttagcggctctggcagcggcaccgacttcaccctgaccatctctagcctccagcccgaggacttcgccacctactactgttttcaaggcagccagttcccctacaccttcggccagggaacaaaggtggaaatcaagcggctcgaggacctgaagaacgtgttcccacctgaggtggccgtgttcgagcctagcgaggccgagatcagccacacccagaaagccaccctcgtgtgcctggctaccggcttctaccccgaccatgtggaactgtcttggtgggtcaacggcaaagaggtgcacagcggcgtgtgtaccgacccccagccactgaaagaacagcccgccctgaacgacagccggtactgcctgagcagcagactgagagtgtccgccaccttctggcagaacccccggaaccacttcagatgccaggtgcagttctacggcctgagcgagaacgacgagtggacccaggacagagccaagcccgtgacccagatcgtgtctgccgaagcctggggcagagccgattgcggctttaccagcgagagctaccagcagggcgtgctgagcgccaccatcctgtacgagatcctgctgggcaaggccaccctgtacgccgtgctggtgtctgccctggtgctgatggctatggtcaagcggaaggacagccggggaagggccaagcgatctggatctggagcaacaaacttctcactactcaaacaagcaggtgacgtggaggagaatcccgggcctactagtaccatggactggatttggcgcatccttttccttgtcggcgctgctaccggcgcccattccgggccccaggtgcagctccaagaaagcggacccggactggttaagccctctcagaccctgtctctgacctgcacagttagcggagccagcattaccacaggcgagtattattggaattggtttcggcagccaccaggcaaggggcttgagtggatgggtgctattgctgcctctggcagcaccacctactctcccagctttgagagcagaacctccatcagccgggacacctccaaaaaccagttctctctgaagctgtcctccgtgaccgctgctgacaccgccgtctattattgtggccggtctttcggcgtggcagctgtgaccacaggacagaacagaggccagggaacacttgtgaccgtgtcctctggatccggcggcggaggatctggcggaggcggatctgggggcggaggctctttcgaagaagtgcaactggtggaaagcggaggcggcctggtgcagcctggcggatctctgagactgagctgtgccgccagcggctacgagttcagccggtcctggatgaactgggtgcgccaggcccctggcaagggactggaatgggtgggaagaatctaccccggcgacggcgacaccaactacagcggcaagttcaagggccggttcaccatcagcgccgacaccagcaagaacaccgcctacctccagatgaacagcctgcgggccgaggataccgccgtgtactactgtgccagagatggcagctcctgggactggtacttcgacgtgtggggacagggaacccttgtgaccgtgtccagcacgcgtatccagaaccctgatcctgccgtgtaccagctgcgggatagcaagagcagcgacaagagcgtgtgtctgttcaccgacttcgacagccagaccaacgtgtcccagagcaaggactccgacgtgtacatcaccgataagtgcgtgctggacatgcggagcatggacttcaagagcaactccgccgtggcctggtccaacaagtccgatttcgcctgcgccaacgccttcaacaacagcattatccccgaggacacattcttcccaagccccgagagcagctgcgacgtgaagctggtggaaaagagcttcgagacagacaccaacctgaacttccagaacctgagcgtgatcggcttcagaatcctgctgctgaaagtggccggctttaacctgctgatgaccctgcggctgtggtccagc

SEQ ID NO: 34481 - DNA, 2724 bp, synthetic construct
  source 1..2724: mol_type = other DNA
atggccttaccagtgaccgccttgctcctgccgctggccttgctgctccacgccgccaggccgcaggttcagctgcaagagtctggccctggcctggtcaagcctagccaaacactgagcctgacctgtaccgtgtctggcggctctatcaccaccggcgagttctactggaactggttcagacagcctcctggcaaaggactggaatggatgggagccattgccgccagcggcagcacaacatacagccctagcttcgagagccggaccagcatcagcagagacaccagcaagaatcagttcagcctgaagctgagcagcgtgacagccgccgatacagccgtgtattactgcggcagatcctttggagtggccgccgtgacaaccggccagaatagaggacagggcaccctggtcacagtgtctagcggtaccggcggaggcggatctggcggcggaggtagcggtggcggaggatctgaattcatccagatgacccagagccccagcagcctgtctgccagcgtgggcgacagagtgaccatcacctgtcggagcagccagagcatcgtgcactccgtgggcaacaccttcctggaatggtatcagcagaagcccggcaaggcccccaagctgctgatctacaaggtgtccaacagattcagcggcgtgcccagcaggtttagcggctctggcagcggcaccgacttcaccctgaccatctctagcctccagcccgaggacttcgccacctactactgttttcaaggcagccagttcccctacaccttcggccagggaacaaaggtggaaatcaagcggctcgagatccagaaccctgatcctgccgtgtaccagctgcgggatagcaagagcagcgacaagagcgtgtgtctgttcaccgacttcgacagccagaccaacgtgtcccagagcaaggactccgacgtgtacatcaccgataagtgcgtgctggacatgcggagcatggacttcaagagcaactccgccgtggcctggtccaacaagtccgatttcgcctgcgccaacgccttcaacaacagcattatccccgaggacacattcttcccaagcagcgacgtgccctgcgacgtgaagctggtggaaaagagcttcgagacagacaccaacctgaacttccagaacctgagcgtgatcggcttcagaatcctgctgctgaaagtggccggctttaacctgctgatgaccctgcggctgtggtccagccgcgccaagagaagcggatctggcgtgaagcagaccctgaatttcgacctgctgaagctggctggcgacgtggaatccaacccaggccctactagtaccatggactggatttggcgcatccttttccttgtcggcgctgctaccggcgcccattccgggcccgaagtgcaactggttgaatccggtggcggcctggtgcaacccggcggatctctcagacttagctgtgccgcctccggcagaaccttcacaatgggatggtacaggcaggctccagggaaagagagagagttcgtcgccgccatctctctgtctcccacactggcctactacgccgactctgtgaaaggccggttcaccatctccagagataatagcaagaacaccgtggtgctgcaaatgaactctctgagagccgaggatacagccctgtactattgtgccgctgaccggaagtccgtgatgagcatcagacccgattactggggacagggcacactggtcacagtgtctagtggatccggcggcggaggatctggcggaggcggatctgggggcggaggctctttcgaagaagtgcaactggtggaaagcggaggcggcctggtgcagcctggcggatctctgagactgagctgtgccgccagcggctacgagttcagccggtcctggatgaactgggtgcgccaggcccctggcaagggactggaatgggtgggaagaatctaccccggcgacggcgacaccaactacagcggcaagttcaagggccggttcaccatcagcgccgacaccagcaagaacaccgcctacctccagatgaacagcctgcgggccgaggataccgccgtgtactactgtgccagagatggcagctcctgggactggtacttcgacgtgtggggacagggaacccttgtgaccgtgtccagcacgcgtgaggacctgaagaacgtgttcccacctgaggtggccgtgttcgagcctagcaaggccgagatcgcccacacccagaaagccaccctcgtgtgcctggctaccggcttctaccccgaccatgtggaactgtcttggtgggtcaacggcaaagaggtgcacagcggcgtgtgtaccgacccccagccactgaaagaacagcccgccctgaacgacagccggtactgcctgagcagcagactgagagtgtccgccaccttctggcagaacccccggaaccacttcagatgccaggtgcagttctacggcctgagcgagaacgacgagtggacccaggacagagccaagcccgtgacccagatcgtgtctgccgaagcctggggcagagccgattgcggcatcaccagcgccagctaccaccagggcgtgctgagcgccaccatcctgtacgagatcctgctgggcaaggccaccctgtacgccgtgctggtgtctgccctggtgctgatggctatggtcaagcggaaggacagccgggga

SEQ ID NO: 34482 - DNA, 2313 bp, synthetic construct
  source 1..2313: mol_type = other DNA
atggccttaccagtgaccgccttgctcctgccgctggccttgctgctccacgccgccaggccgcaggttcagctgcaagagtctggccctggcctggtcaagcctagccaaacactgagcctgacctgtaccgtgtctggcggctctatcaccaccggcgagttctactggaactggttcagacagcctcctggcaaaggactggaatggatgggagccattgccgccagcggcagcacaacatacagccctagcttcgagagccggaccagcatcagcagagacaccagcaagaatcagttcagcctgaagctgagcagcgtgacagccgccgatacagccgtgtattactgcggcagatcctttggagtggccgccgtgacaaccggccagaatagaggacagggcaccctggtcacagtgtctagcggtaccggcggaggcggatctggcggcggaggtagcggtggcggaggatctgaattcatccagatgacccagagccccagcagcctgtctgccagcgtgggcgacagagtgaccatcacctgtcggagcagccagagcatcgtgcactccgtgggcaacaccttcctggaatggtatcagcagaagcccggcaaggcccccaagctgctgatctacaaggtgtccaacagattcagcggcgtgcccagcaggtttagcggctctggcagcggcaccgacttcaccctgaccatctctagcctccagcccgaggacttcgccacctactactgttttcaaggcagccagttcccctacaccttcggccagggaacaaaggtggaaatcaagcggctcgagatccagaaccctgatcctgccgtgtaccagctgcgggatagcaagagcagcgacaagagcgtgtgtctgttcaccgacttcgacagccagaccaacgtgtcccagagcaaggactccgacgtgtacatcaccgataagtgcgtgctggacatgcggagcatggacttcaagagcaactccgccgtggcctggtccaacaagtccgatttcgcctgcgccaacgccttcaacaacagcattatccccgaggacacattcttcccaagcagcgacgtgccctgcgacgtgaagctggtggaaaagagcttcgagacagacaccaacctgaacttccagaacctgagcgtgatcggcttcagaatcctgctgctgaaagtggccggctttaacctgctgatgaccctgcggctgtggtccagccgcgccaagagaagcggatctggcgtgaagcagaccctgaatttcgacctgctgaagctggctggcgacgtggaatccaacccaggccctactagtaccatggactggatttggcgcatccttttccttgtcggcgctgctaccggcgcccattccttcgaagaagtgcaactggtggaaagcggaggcggcctggtgcagcctggcggatctctgagactgagctgtgccgccagcggctacgagttcagccggtcctggatgaactgggtgcgccaggcccctggcaagggactggaatgggtgggaagaatctaccccggcgacggcgacaccaactacagcggcaagttcaagggccggttcaccatcagcgccgacaccagcaagaacaccgcctacctccagatgaacagcctgcgggccgaggataccgccgtgtactactgtgccagagatggcagctcctgggactggtacttcgacgtgtggggacagggaacccttgtgaccgtgtccagcacgcgtgaggacctgaagaacgtgttcccacctgaggtggccgtgttcgagcctagcaaggccgagatcgcccacacccagaaagccaccctcgtgtgcctggctaccggcttctaccccgaccatgtggaactgtcttggtgggtcaacggcaaagaggtgcacagcggcgtgtgtaccgacccccagccactgaaagaacagcccgccctgaacgacagccggtactgcctgagcagcagactgagagtgtccgccaccttctggcagaacccccggaaccacttcagatgccaggtgcagttctacggcctgagcgagaacgacgagtggacccaggacagagccaagcccgtgacccagatcgtgtctgccgaagcctggggcagagccgattgcggcatcaccagcgccagctaccaccagggcgtgctgagcgccaccatcctgtacgagatcctgctgggcaaggccaccctgtacgccgtgctggtgtctgccctggtgctgatggctatggtcaagcggaaggacagccgggga

SEQ ID NO: 34483 - DNA, 2712 bp, synthetic construct
  source 1..2712: mol_type = other DNA
atggccttaccagtgaccgccttgctcctgccgctggccttgctgctccacgccgccaggccggaagtgcagctggttgaatctggcggaggactggttcaggctggcggatctctgagactgtcttgtgccgccagcggcagaacctttagcatgggctggtttagacaggcccctggcaaagagagagagttcgtcgccgccatcacatactctggcggcagcccttactacgccgactctgtgaagggcagattcaccatcagccgggacaacgccaagaacaccgtgtacctccagatgaacagcctgaagcctgaggacaccgccgtgtactactgcgccgccaatccaacatacggcagcgactggaacgccgagaattggggccagggaacccaagtgacagtgtctagcggtaccggcggaggcggatctggcggcggaggtagcggtggcggaggatctgaattcatccagatgacccagagccccagcagcctgtctgccagcgtgggcgacagagtgaccatcacctgtcggagcagccagagcatcgtgcactccgtgggcaacaccttcctggaatggtatcagcagaagcccggcaaggcccccaagctgctgatctacaaggtgtccaacagattcagcggcgtgcccagcaggtttagcggctctggcagcggcaccgacttcaccctgaccatctctagcctccagcccgaggacttcgccacctactactgttttcaaggcagccagttcccctacaccttcggccagggaacaaaggtggaaatcaagcggctcgaggacctgaagaacgtgttcccacctgaggtggccgtgttcgagcctagcgaggccgagatcagccacacccagaaagccaccctcgtgtgcctggctaccggcttctaccccgaccatgtggaactgtcttggtgggtcaacggcaaagaggtgcacagcggcgtgtgtaccgacccccagccactgaaagaacagcccgccctgaacgacagccggtactgcctgagcagcagactgagagtgtccgccaccttctggcagaacccccggaaccacttcagatgccaggtgcagttctacggcctgagcgagaacgacgagtggacccaggacagagccaagcccgtgacccagatcgtgtctgccgaagcctggggcagagccgattgcggctttaccagcgagagctaccagcagggcgtgctgagcgccaccatcctgtacgagatcctgctgggcaaggccaccctgtacgccgtgctggtgtctgccctggtgctgatggctatggtcaagcggaaggacagccggggaagggccaagcgatctggatctggagcaacaaacttctcactactcaaacaagcaggtgacgtggaggagaatcccgggcctactagtaccatggactggatttggcgcatccttttccttgtcggcgctgctaccggcgcccattccgggccccaggtgcagctccaagaaagcggacccggactggttaagccctctcagaccctgtctctgacctgcacagttagcggagccagcattaccacaggcgagtattattggaattggtttcggcagccaccaggcaaggggcttgagtggatgggtgctattgctgcctctggcagcaccacctactctcccagctttgagagcagaacctccatcagccgggacacctccaaaaaccagttctctctgaagctgtcctccgtgaccgctgctgacaccgccgtctattattgtggccggtctttcggcgtggcagctgtgaccacaggacagaacagaggccagggaacacttgtgaccgtgtcctctggatccggcggcggaggatctggcggaggcggatctgggggcggaggctctttcgaagaagtgcaactggtggaaagcggaggcggcctggtgcagcctggcggatctctgagactgagctgtgccgccagcggctacgagttcagccggtcctggatgaactgggtgcgccaggcccctggcaagggactggaatgggtgggaagaatctaccccggcgacggcgacaccaactacagcggcaagttcaagggccggttcaccatcagcgccgacaccagcaagaacaccgcctacctccagatgaacagcctgcgggccgaggataccgccgtgtactactgtgccagagatggcagctcctgggactggtacttcgacgtgtggggacagggaacccttgtgaccgtgtccagcacgcgtatccagaaccctgatcctgccgtgtaccagctgcgggatagcaagagcagcgacaagagcgtgtgtctgttcaccgacttcgacagccagaccaacgtgtcccagagcaaggactccgacgtgtacatcaccgataagtgcgtgctggacatgcggagcatggacttcaagagcaactccgccgtggcctggtccaacaagtccgatttcgcctgcgccaacgccttcaacaacagcattatccccgaggacacattcttcccaagccccgagagcagctgcgacgtgaagctggtggaaaagagcttcgagacagacaccaacctgaacttccagaacctgagcgtgatcggcttcagaatcctgctgctgaaagtggccggctttaacctgctgatgaccctgcggctgtggtccagc

SEQ ID NO: 34484 - DNA, 2733 bp, synthetic construct
  source 1..2733: mol_type = other DNA
atggccttaccagtgaccgccttgctcctgccgctggccttgctgctccacgccgccaggccggaagtgcagctggttgaatctggcggaggactggttcaggctggcggatctctgagactgtcttgtgccgccagcggcagaacctttagcatgggctggtttagacaggcccctggcaaagagagagagttcgtcgccgccatcacatactctggcggcagcccttactacgccgactctgtgaagggcagattcaccatcagccgggacaacgccaagaacaccgtgtacctccagatgaacagcctgaagcctgaggacaccgccgtgtactactgcgccgccaatccaacatacggcagcgactggaacgccgagaattggggccagggaacccaagtgacagtgtctagcggtaccggcggaggcggatctggcggcggaggtagcggtggcggaggatctgaattcatccagatgacccagagccccagcagcctgtctgccagcgtgggcgacagagtgaccatcacctgtcggagcagccagagcatcgtgcactccgtgggcaacaccttcctggaatggtatcagcagaagcccggcaaggcccccaagctgctgatctacaaggtgtccaacagattcagcggcgtgcccagcaggtttagcggctctggcagcggcaccgacttcaccctgaccatctctagcctccagcccgaggacttcgccacctactactgttttcaaggcagccagttcccctacaccttcggccagggaacaaaggtggaaatcaagcggctcgagatccagaaccctgatcctgccgtgtaccagctgcgggatagcaagagcagcgacaagagcgtgtgtctgttcaccgacttcgacagccagaccaacgtgtcccagagcaaggactccgacgtgtacatcaccgataagtgcgtgctggacatgcggagcatggacttcaagagcaactccgccgtggcctggtccaacaagtccgatttcgcctgcgccaacgccttcaacaacagcattatccccgaggacacattcttcccaagcagcgacgtgccctgcgacgtgaagctggtggaaaagagcttcgagacagacaccaacctgaacttccagaacctgagcgtgatcggcttcagaatcctgctgctgaaagtggccggctttaacctgctgatgaccctgcggctgtggtccagccgcgccaagagaagcggatctggcgtgaagcagaccctgaatttcgacctgctgaagctggctggcgacgtggaatccaacccaggccctactagtaccatggactggatttggcgcatccttttccttgtcggcgctgctaccggcgcccattccgggccccaggtgcagctggttgaatctggcggaggactggttcagcctggcggatctctgagactgtcttgtgccgccagcggcaacatcaacagcagaaactgcatgggctggttcagacaggcccctggcaagggaagagaaggcgtggcagctatcggccaagtgaccggcagaacctactacgtggacagcgtgaagggcagattcaccatcagcctggacaacagcaagaacaccctgtacctccagatgaacagcctgagagccgaggacaccgccgtgtactattgtgctgctgcccctggctgtctgctgtctgcacttagaagcgccgactacagaaactggggccagggcacactggtcaccgtttcttctggatccggcggcggaggatctggcggaggcggatctgggggcggaggctctttcgaagaagtgcaactggtggaaagcggaggcggcctggtgcagcctggcggatctctgagactgagctgtgccgccagcggctacgagttcagccggtcctggatgaactgggtgcgccaggcccctggcaagggactggaatgggtgggaagaatctaccccggcgacggcgacaccaactacagcggcaagttcaagggccggttcaccatcagcgccgacaccagcaagaacaccgcctacctccagatgaacagcctgcgggccgaggataccgccgtgtactactgtgccagagatggcagctcctgggactggtacttcgacgtgtggggacagggaacccttgtgaccgtgtccagcacgcgtgaggacctgaagaacgtgttcccacctgaggtggccgtgttcgagcctagcaaggccgagatcgcccacacccagaaagccaccctcgtgtgcctggctaccggcttctaccccgaccatgtggaactgtcttggtgggtcaacggcaaagaggtgcacagcggcgtgtgtaccgacccccagccactgaaagaacagcccgccctgaacgacagccggtactgcctgagcagcagactgagagtgtccgccaccttctggcagaacccccggaaccacttcagatgccaggtgcagttctacggcctgagcgagaacgacgagtggacccaggacagagccaagcccgtgacccagatcgtgtctgccgaagcctggggcagagccgattgcggcatcaccagcgccagctaccaccagggcgtgctgagcgccaccatcctgtacgagatcctgctgggcaaggccaccctgtacgccgtgctggtgtctgccctggtgctgatggctatggtcaagcggaaggacagccgggga

SEQ ID NO: 34485 - DNA, 2721 bp, synthetic construct
  source 1..2721: mol_type = other DNA
atggccttaccagtgaccgccttgctcctgccgctggccttgctgctccacgccgccaggccggaagtgcagctggttgaatctggcggaggactggttcaggctggcggatctctgagactgtcttgtgccgccagcggcagaacctttagcatgggctggtttagacaggcccctggcaaagagagagagttcgtcgccgccatcacatactctggcggcagcccttactacgccgactctgtgaagggcagattcaccatcagccgggacaacgccaagaacaccgtgtacctccagatgaacagcctgaagcctgaggacaccgccgtgtactactgcgccgccaatccaacatacggcagcgactggaacgccgagaattggggccagggaacccaagtgacagtgtctagcggtaccggcggaggcggatctggcggcggaggtagcggtggcggaggatctgaattcatccagatgacccagagccccagcagcctgtctgccagcgtgggcgacagagtgaccatcacctgtcggagcagccagagcatcgtgcactccgtgggcaacaccttcctggaatggtatcagcagaagcccggcaaggcccccaagctgctgatctacaaggtgtccaacagattcagcggcgtgcccagcaggtttagcggctctggcagcggcaccgacttcaccctgaccatctctagcctccagcccgaggacttcgccacctactactgttttcaaggcagccagttcccctacaccttcggccagggaacaaaggtggaaatcaagcggctcgaggacctgaagaacgtgttcccacctgaggtggccgtgttcgagcctagcgaggccgagatcagccacacccagaaagccaccctcgtgtgcctggctaccggcttctaccccgaccatgtggaactgtcttggtgggtcaacggcaaagaggtgcacagcggcgtgtgtaccgacccccagccactgaaagaacagcccgccctgaacgacagccggtactgcctgagcagcagactgagagtgtccgccaccttctggcagaacccccggaaccacttcagatgccaggtgcagttctacggcctgagcgagaacgacgagtggacccaggacagagccaagcccgtgacccagatcgtgtctgccgaagcctggggcagagccgattgcggctttaccagcgagagctaccagcagggcgtgctgagcgccaccatcctgtacgagatcctgctgggcaaggccaccctgtacgccgtgctggtgtctgccctggtgctgatggctatggtcaagcggaaggacagccggggaagggccaagcgatctggatctggagcaacaaacttctcactactcaaacaagcaggtgacgtggaggagaatcccgggcctactagtaccatggactggatttggcgcatccttttccttgtcggcgctgctaccggcgcccattccgggccccaggtgcagctggttgaatctggcggaggactggttcagcctggcggatctctgagactgtcttgtgccgccagcggcaacatcaacagcagaaactgcatgggctggttcagacaggcccctggcaagggaagagaaggcgtggcagctatcggccaagtgaccggcagaacctactacgtggacagcgtgaagggcagattcaccatcagcctggacaacagcaagaacaccctgtacctccagatgaacagcctgagagccgaggacaccgccgtgtactattgtgctgctgcccctggctgtctgctgtctgcacttagaagcgccgactacagaaactggggccagggcacactggtcaccgtttcttctggatccggcggcggaggatctggcggaggcggatctgggggcggaggctctttcgaagaagtgcaactggtggaaagcggaggcggcctggtgcagcctggcggatctctgagactgagctgtgccgccagcggctacgagttcagccggtcctggatgaactgggtgcgccaggcccctggcaagggactggaatgggtgggaagaatctaccccggcgacggcgacaccaactacagcggcaagttcaagggccggttcaccatcagcgccgacaccagcaagaacaccgcctacctccagatgaacagcctgcgggccgaggataccgccgtgtactactgtgccagagatggcagctcctgggactggtacttcgacgtgtggggacagggaacccttgtgaccgtgtccagcacgcgtatccagaaccctgatcctgccgtgtaccagctgcgggatagcaagagcagcgacaagagcgtgtgtctgttcaccgacttcgacagccagaccaacgtgtcccagagcaaggactccgacgtgtacatcaccgataagtgcgtgctggacatgcggagcatggacttcaagagcaactccgccgtggcctggtccaacaagtccgatttcgcctgcgccaacgccttcaacaacagcattatccccgaggacacattcttcccaagccccgagagcagctgcgacgtgaagctggtggaaaagagcttcgagacagacaccaacctgaacttccagaacctgagcgtgatcggcttcagaatcctgctgctgaaagtggccggctttaacctgctgatgaccctgcggctgtggtccagc

SEQ ID NO: 34486 - DNA, 2721 bp, synthetic construct
  source 1..2721: mol_type = other DNA
atggccttaccagtgaccgccttgctcctgccgctggccttgctgctccacgccgccaggccggaagtgcaactggttgaatccggtggcggcctggtgcaagcaggcggatctctcagacttagctgtgccgcctccggcagaaccttcacaatgggatggtttaggcaggctccagggaaagagagagagttcgtcgccgccatctctctgtctcccacactggcctactacgccgactctgtgaaaggccggttcaccatctccagagataatgccaagaacaccgtggtgctgcaaatgaactctctgaaacccgaggatacagccctgtactattgtgccgctgaccggaagtccgtgatgagcatcagacccgattactggggacagggcacacaagtcacagtgtcctctggtaccggcggaggcggatctggcggcggaggtagcggtggcggaggatctgaattcatccagatgacccagagccccagcagcctgtctgccagcgtgggcgacagagtgaccatcacctgtcggagcagccagagcatcgtgcactccgtgggcaacaccttcctggaatggtatcagcagaagcccggcaaggcccccaagctgctgatctacaaggtgtccaacagattcagcggcgtgcccagcaggtttagcggctctggcagcggcaccgacttcaccctgaccatctctagcctccagcccgaggacttcgccacctactactgttttcaaggcagccagttcccctacaccttcggccagggaacaaaggtggaaatcaagcggctcgaggacctgaagaacgtgttcccacctgaggtggccgtgttcgagcctagcgaggccgagatcagccacacccagaaagccaccctcgtgtgcctggctaccggcttctaccccgaccatgtggaactgtcttggtgggtcaacggcaaagaggtgcacagcggcgtgtgtaccgacccccagccactgaaagaacagcccgccctgaacgacagccggtactgcctgagcagcagactgagagtgtccgccaccttctggcagaacccccggaaccacttcagatgccaggtgcagttctacggcctgagcgagaacgacgagtggacccaggacagagccaagcccgtgacccagatcgtgtctgccgaagcctggggcagagccgattgcggctttaccagcgagagctaccagcagggcgtgctgagcgccaccatcctgtacgagatcctgctgggcaaggccaccctgtacgccgtgctggtgtctgccctggtgctgatggctatggtcaagcggaaggacagccggggaagggccaagcgatctggatctggagcaacaaacttctcactactcaaacaagcaggtgacgtggaggagaatcccgggcctactagtaccatggactggatttggcgcatccttttccttgtcggcgctgctaccggcgcccattccgggccccaggtgcagctggttgaatctggcggaggactggttcagcctggcggatctctgagactgtcttgtgccgccagcggcaacatcaacagcagaaactgcatgggctggttcagacaggcccctggcaagggaagagaaggcgtggcagctatcggccaagtgaccggcagaacctactacgtggacagcgtgaagggcagattcaccatcagcctggacaacagcaagaacaccctgtacctccagatgaacagcctgagagccgaggacaccgccgtgtactattgtgctgctgcccctggctgtctgctgtctgcacttagaagcgccgactacagaaactggggccagggcacactggtcaccgtttcttctggatccggcggcggaggatctggcggaggcggatctgggggcggaggctctttcgaagaagtgcaactggtggaaagcggaggcggcctggtgcagcctggcggatctctgagactgagctgtgccgccagcggctacgagttcagccggtcctggatgaactgggtgcgccaggcccctggcaagggactggaatgggtgggaagaatctaccccggcgacggcgacaccaactacagcggcaagttcaagggccggttcaccatcagcgccgacaccagcaagaacaccgcctacctccagatgaacagcctgcgggccgaggataccgccgtgtactactgtgccagagatggcagctcctgggactggtacttcgacgtgtggggacagggaacccttgtgaccgtgtccagcacgcgtatccagaaccctgatcctgccgtgtaccagctgcgggatagcaagagcagcgacaagagcgtgtgtctgttcaccgacttcgacagccagaccaacgtgtcccagagcaaggactccgacgtgtacatcaccgataagtgcgtgctggacatgcggagcatggacttcaagagcaactccgccgtggcctggtccaacaagtccgatttcgcctgcgccaacgccttcaacaacagcattatccccgaggacacattcttcccaagccccgagagcagctgcgacgtgaagctggtggaaaagagcttcgagacagacaccaacctgaacttccagaacctgagcgtgatcggcttcagaatcctgctgctgaaagtggccggctttaacctgctgatgaccctgcggctgtggtccagc

SEQ ID NO: 34487 - DNA, 2733 bp, synthetic construct
  source 1..2733: mol_type = other DNA
atggccttaccagtgaccgccttgctcctgccgctggccttgctgctccacgccgccaggccgcaggttcagctgcaagagtctggccctggcctggtcaagcctagccaaacactgagcctgacctgtaccgtgtctggcggctctatcaccaccggcgagttctactggaactggttcagacagcctcctggcaaaggactggaatggatgggagccattgccgccagcggcagcacaacatacagccctagcttcgagagccggaccagcatcagcagagacaccagcaagaatcagttcagcctgaagctgagcagcgtgacagccgccgatacagccgtgtattactgcggcagatcctttggagtggccgccgtgacaaccggccagaatagaggacagggcaccctggtcacagtgtctagcggtaccggcggaggcggatctggcggcggaggtagcggtggcggaggatctgaattcatccagatgacccagagccccagcagcctgtctgccagcgtgggcgacagagtgaccatcacctgtcggagcagccagagcatcgtgcactccgtgggcaacaccttcctggaatggtatcagcagaagcccggcaaggcccccaagctgctgatctacaaggtgtccaacagattcagcggcgtgcccagcaggtttagcggctctggcagcggcaccgacttcaccctgaccatctctagcctccagcccgaggacttcgccacctactactgttttcaaggcagccagttcccctacaccttcggccagggaacaaaggtggaaatcaagcggctcgaggacctgaagaacgtgttcccacctgaggtggccgtgttcgagcctagcgaggccgagatcagccacacccagaaagccaccctcgtgtgcctggctaccggcttctaccccgaccatgtggaactgtcttggtgggtcaacggcaaagaggtgcacagcggcgtgtgtaccgacccccagccactgaaagaacagcccgccctgaacgacagccggtactgcctgagcagcagactgagagtgtccgccaccttctggcagaacccccggaaccacttcagatgccaggtgcagttctacggcctgagcgagaacgacgagtggacccaggacagagccaagcccgtgacccagatcgtgtctgccgaagcctggggcagagccgattgcggctttaccagcgagagctaccagcagggcgtgctgagcgccaccatcctgtacgagatcctgctgggcaaggccaccctgtacgccgtgctggtgtctgccctggtgctgatggctatggtcaagcggaaggacagccggggaagggccaagcgatctggatctggagcaacaaacttctcactactcaaacaagcaggtgacgtggaggagaatcccgggcctactagtaccatggactggatttggcgcatccttttccttgtcggcgctgctaccggcgcccattccgggccccaggtgcagctggttgaatctggcggaggactggttcagcctggcggatctctgagactgtcttgtgccgccagcggcaacatcaacagcagaaactgcatgggctggttcagacaggcccctggcaagggaagagaaggcgtggcagctatcggccaagtgaccggcagaacctactacgtggacagcgtgaagggcagattcaccatcagcctggacaacagcaagaacaccctgtacctccagatgaacagcctgagagccgaggacaccgccgtgtactattgtgctgctgcccctggctgtctgctgtctgcacttagaagcgccgactacagaaactggggccagggcacactggtcaccgtttcttctggatccggcggcggaggatctggcggaggcggatctgggggcggaggctctttcgaagaagtgcaactggtggaaagcggaggcggcctggtgcagcctggcggatctctgagactgagctgtgccgccagcggctacgagttcagccggtcctggatgaactgggtgcgccaggcccctggcaagggactggaatgggtgggaagaatctaccccggcgacggcgacaccaactacagcggcaagttcaagggccggttcaccatcagcgccgacaccagcaagaacaccgcctacctccagatgaacagcctgcgggccgaggataccgccgtgtactactgtgccagagatggcagctcctgggactggtacttcgacgtgtggggacagggaacccttgtgaccgtgtccagcacgcgtatccagaaccctgatcctgccgtgtaccagctgcgggatagcaagagcagcgacaagagcgtgtgtctgttcaccgacttcgacagccagaccaacgtgtcccagagcaaggactccgacgtgtacatcaccgataagtgcgtgctggacatgcggagcatggacttcaagagcaactccgccgtggcctggtccaacaagtccgatttcgcctgcgccaacgccttcaacaacagcattatccccgaggacacattcttcccaagccccgagagcagctgcgacgtgaagctggtggaaaagagcttcgagacagacaccaacctgaacttccagaacctgagcgtgatcggcttcagaatcctgctgctgaaagtggccggctttaacctgctgatgaccctgcggctgtggtccagc

SEQ ID NO: 34488 - DNA, 1482 bp, synthetic construct
  source 1..1482: mol_type = other DNA
atggccttaccagtgaccgccttgctcctgccgctggccttgctgctccacgccgccaggccggaactgcaaagcgtgctgacacagcctcctagcgcctctggaacacctggacagagagtgacaatcagctgctccggcagctccagcaacatcggcagcaactacgtgaactggtatcagcagctgcctggcacagcccctaaactgctgatctacggcgactaccagaggccaagcggcgtgccagatagattcagcggcagcaagtctggcacaagcgccagcctggctatctctggactgagaagcgaggacgaggccgactactactgtgccaccagagatgatagcctgagcggcagcgtggtgtttggcacaggcacaaagctgacagtgctgggcggcggaggcggaagtggaggcggaggatctggcggcggaggctctgaagttcagctggttcagagcggagccgaagtgaagaagcctggcgagagcctgaagattagctgcaaaggcagcggctacggcttcaccagctattggatcggctgggtccgacagatgcctggcaaaggactggaatggatgggcatcattcaccccgacgacagcgacaccaagtacagccctagcttccagggccaagtgaccatcagcgccgacaagagcatcagcacagcctacctccagtggtcctctctgaaggccagcgataccgccatgtactactgcgccagcagctacctgagaggactgtggggcggctacttcgatttttggggccagggcacactggtcaccgttagttctacgcgtaaaattgaagttatgtatcctcctccttacctagacaatgagaagagcaatggaaccattatccatgtgaaagggaaacacctttgtccaagtcccctatttcccggaccttctaagcccttttgggtgctggtggtggttgggggagtcctggcttgctatagcttgctagtaacagtggcctttattattttctgggtgaggagtaagaggagcaggctcctgcacagtgactacatgaacatgactccacgccgccccggacccacccgcaagcattaccagccctatgccccaccacgcgacttcgcagcctatcgctccagagtgaagttcagcaggagcgcagacgcccccgcgtaccagcagggccagaaccagctctataacgagctcaatctaggacgaagagaggagtacgatgttttggacaagagacgtggccgggaccctgagatggggggaaagccgagaaggaagaaccctcaggaaggcctgtacaatgaactgcagaaagataagatggcggaggcctacagtgagattgggatgaaaggcgagcgccggaggggcaaggggcacgatggcctttaccagggtctcagtacagccaccaaggacacctacgacgcccttcacatgcaggccctgccccctcgc

SEQ ID NO: 34489 - DNA, 1500 bp, synthetic construct
  source 1..1500: mol_type = other DNA
atggccttaccagtgaccgccttgctcctgccgctggccttgctgctccacgccgccaggccggaactgcaaagcgtgctgacacagcctcctagcgcctctggaacacctggacagagagtgacaatcagctgctccggcagctccagcaacatcggcagcaactacgtgaactggtatcagcagctgcctggcacagcccctaaactgctgatctacggcgactaccagaggccaagcggcgtgccagatagattcagcggcagcaagtctggcacaagcgccagcctggctatctctggactgagaagcgaggacgaggccgactactactgtgccaccagagatgatagcctgagcggcagcgtggtgtttggcacaggcacaaagctgacagtgctgggcggcggaggcggaagtggaggcggaggatctggcggcggaggctctgaagttcagctggttcagagcggagccgaagtgaagaagcctggcgagagcctgaagattagctgcaaaggcagcggctacggcttcaccagctattggatcggctgggtccgacagatgcctggcaaaggactggaatggatgggcatcattcaccccgacgacagcgacaccaagtacagccctagcttccagggccaagtgaccatcagcgccgacaagagcatcagcacagcctacctccagtggtcctctctgaaggccagcgataccgccatgtactactgcgccagcagctacctgagaggactgtggggcggctacttcgatttttggggccagggcacactggtcaccgttagttctacgcgtgcgaagcccaccacgacgccagcgccgcgaccaccaacaccggcgcccaccatcgcgtcgcagcccctgtccctgcgcccagaggcgtgccggccagcggcggggggcgcagtgcacacgagggggctggacttcgcctgtgacatctacatctgggcgcccttggccgggacttgtggggtccttctcctgtcactggttatcaccctttactgcaaacggggcagaaagaaactcctgtatatattcaaacaaccatttatgagaccagtacaaactactcaagaggaagatggctgtagctgccgatttccagaagaagaagaaggaggatgtgaactgagagtgaagttcagcaggagcgcagacgcccccgcgtaccagcagggccagaaccagctctataacgagctgaatctaggacgaagagaggagtacgatgttttggacaagagacgtggccgggaccctgagatggggggaaagccgagaaggaagaaccctcaggaaggcctgtacaatgaactgcagaaagataagatggcggaggcctacagtgagattgggatgaaaggcgagcgccggaggggcaaggggcacgatggcctttaccagggtctcagtacagccaccaaggacacctacgacgcccttcacatgcaggccctgccccctcgc

SEQ ID NO: 34490 - DNA, 1500 bp, synthetic construct
  source 1..1500: mol_type = other DNA
atggccttaccagtgaccgccttgctcctgccgctggccttgctgctccacgccgccaggccggaagttcagctggttcagagcggagccgaagtgaagaagcctggcgagagcctgaagattagctgcaaaggcagcggctacggcttcaccagctattggatcggctgggtccgacagatgcctggcaaaggactggaatggatgggcatcattcaccccgacgacagcgacaccaagtacagccctagcttccagggccaagtgaccatcagcgccgacaagagcatcagcacagcctacctccagtggtcctctctgaaggccagcgataccgccatgtactactgcgccagcagctacctgagaggactgtggggcggctacttcgatttttggggccagggcacactggtcaccgttagttctggcggaggcggaagtggaggcggaggatctggcggcggaggctctgaactgcaaagcgtgctgacacagcctcctagcgcctctggaacacctggacagagagtgacaatcagctgctccggcagctccagcaacatcggcagcaactacgtgaactggtatcagcagctgcctggcacagcccctaaactgctgatctacggcgactaccagaggccaagcggcgtgccagatagattcagcggcagcaagtctggcacaagcgccagcctggctatctctggactgagaagcgaggacgaggccgactactactgtgccaccagagatgatagcctgagcggcagcgtggtgtttggcacaggcacaaagctgacagtgctgggcacgcgtgcgaagcccaccacgacgccagcgccgcgaccaccaacaccggcgcccaccatcgcgtcgcagcccctgtccctgcgcccagaggcgtgccggccagcggcggggggcgcagtgcacacgagggggctggacttcgcctgtgacatctacatctgggcgcccttggccgggacttgtggggtccttctcctgtcactggttatcaccctttactgcaaacggggcagaaagaaactcctgtatatattcaaacaaccatttatgagaccagtacaaactactcaagaggaagatggctgtagctgccgatttccagaagaagaagaaggaggatgtgaactgagagtgaagttcagcaggagcgcagacgcccccgcgtaccagcagggccagaaccagctctataacgagctgaatctaggacgaagagaggagtacgatgttttggacaagagacgtggccgggaccctgagatggggggaaagccgagaaggaagaaccctcaggaaggcctgtacaatgaactgcagaaagataagatggcggaggcctacagtgagattgggatgaaaggcgagcgccggaggggcaaggggcacgatggcctttaccagggtctcagtacagccaccaaggacacctacgacgcccttcacatgcaggccctgccccctcgc

SEQ ID NO: 34491 - DNA, 1899 bp, synthetic construct
  source 1..1899: mol_type = other DNA
atggccttaccagtgaccgccttgctcctgccgctggccttgctgctccacgccgccaggccggaactgcaaagcgtgctgacacagcctcctagcgcctctggaacacctggacagagagtgacaatcagctgctccggcagctccagcaacatcggcagcaactacgtgaactggtatcagcagctgcctggcacagcccctaaactgctgatctacggcgactaccagaggccaagcggcgtgccagatagattcagcggcagcaagtctggcacaagcgccagcctggctatctctggactgagaagcgaggacgaggccgactactactgtgccaccagagatgatagcctgagcggcagcgtggtgtttggcacaggcacaaagctgacagtgctgggcctcgagatccagaaccctgatcctgccgtgtaccagctgcgggatagcaagagcagcgacaagagcgtgtgtctgttcaccgacttcgacagccagaccaacgtgtcccagagcaaggactccgacgtgtacatcaccgataagtgcgtgctggacatgcggagcatggacttcaagagcaactccgccgtggcctggtccaacaagtccgatttcgcctgcgccaacgccttcaacaacagcattatccccgaggacacattcttcccaagcagcgacgtgccctgcgacgtgaagctggtggaaaagagcttcgagacagacaccaacctgaacttccagaacctgagcgtgatcggcttcagaatcctgctgctgaaagtggccggctttaacctgctgatgaccctgcggctgtggtccagccgcgccaagagaagcggatctggcgtgaagcagaccctgaatttcgacctgctgaagctggctggcgacgtggaatccaacccaggccctactagtatggactggatttggcgcatccttttccttgtcggcgctgctaccggcgcgcattccttcgaagaagttcagctggttcagagcggagccgaagtgaagaagcctggcgagagcctgaagattagctgcaaaggcagcggctacggcttcaccagctattggatcggctgggtccgacagatgcctggcaaaggactggaatggatgggcatcattcaccccgacgacagcgacaccaagtacagccctagcttccagggccaagtgaccatcagcgccgacaagagcatcagcacagcctacctccagtggtcctctctgaaggccagcgataccgccatgtactactgcgccagcagctacctgagaggactgtggggcggctacttcgatttttggggccagggcacactggtcaccgttagttctacgcgtgaggacctgaagaacgtgttcccacctgaggtggccgtgttcgagcctagcaaggccgagatcgcccacacccagaaagccaccctcgtgtgcctggctaccggcttctaccccgaccatgtggaactgtcttggtgggtcaacggcaaagaggtgcacagcggcgtgtgtaccgacccccagccactgaaagaacagcccgccctgaacgacagccggtactgcctgagcagcagactgagagtgtccgccaccttctggcagaacccccggaaccacttcagatgccaggtgcagttctacggcctgagcgagaacgacgagtggacccaggacagagccaagcccgtgacccagatcgtgtctgccgaagcctggggcagagccgattgcggcatcaccagcgccagctaccaccagggcgtgctgagcgccaccatcctgtacgagatcctgctgggcaaggccaccctgtacgccgtgctggtgtctgccctggtgctgatggctatggtcaagcggaaggacagccgggga

SEQ ID NO: 34492 - DNA, 1887 bp, synthetic construct
  source 1..1887: mol_type = other DNA
atggccttaccagtgaccgccttgctcctgccgctggccttgctgctccacgccgccaggccggaactgcaaagcgtgctgacacagcctcctagcgcctctggaacacctggacagagagtgacaatcagctgctccggcagctccagcaacatcggcagcaactacgtgaactggtatcagcagctgcctggcacagcccctaaactgctgatctacggcgactaccagaggccaagcggcgtgccagatagattcagcggcagcaagtctggcacaagcgccagcctggctatctctggactgagaagcgaggacgaggccgactactactgtgccaccagagatgatagcctgagcggcagcgtggtgtttggcacaggcacaaagctgacagtgctgggcctcgaggacctgaagaacgtgttcccacctgaggtggccgtgttcgagcctagcaaggccgagatcgcccacacccagaaagccaccctcgtgtgcctggctaccggcttctaccccgaccatgtggaactgtcttggtgggtcaacggcaaagaggtgcacagcggcgtgtgtaccgacccccagccactgaaagaacagcccgccctgaacgacagccggtactgcctgagcagcagactgagagtgtccgccaccttctggcagaacccccggaaccacttcagatgccaggtgcagttctacggcctgagcgagaacgacgagtggacccaggacagagccaagcccgtgacccagatcgtgtctgccgaagcctggggcagagccgattgcggcatcaccagcgccagctaccaccagggcgtgctgagcgccaccatcctgtacgagatcctgctgggcaaggccaccctgtacgccgtgctggtgtctgccctggtgctgatggctatggtcaagcggaaggacagccggggaagggccaagcgatctggatctggagcaacaaacttctcactactcaaacaagcaggtgacgtggaggagaatcccgggcctactagtatggactggatttggcgcatccttttccttgtcggcgctgctaccggcgcgcattccttcgaagaagttcagctggttcagagcggagccgaagtgaagaagcctggcgagagcctgaagattagctgcaaaggcagcggctacggcttcaccagctattggatcggctgggtccgacagatgcctggcaaaggactggaatggatgggcatcattcaccccgacgacagcgacaccaagtacagccctagcttccagggccaagtgaccatcagcgccgacaagagcatcagcacagcctacctccagtggtcctctctgaaggccagcgataccgccatgtactactgcgccagcagctacctgagaggactgtggggcggctacttcgatttttggggccagggcacactggtcaccgttagttctacgcgtatccagaaccctgatcctgccgtgtaccagctgcgggatagcaagagcagcgacaagagcgtgtgtctgttcaccgacttcgacagccagaccaacgtgtcccagagcaaggactccgacgtgtacatcaccgataagtgcgtgctggacatgcggagcatggacttcaagagcaactccgccgtggcctggtccaacaagtccgatttcgcctgcgccaacgccttcaacaacagcattatccccgaggacacattcttcccaagcagcgacgtgccctgcgacgtgaagctggtggaaaagagcttcgagacagacaccaacctgaacttccagaacctgagcgtgatcggcttcagaatcctgctgctgaaagtggccggctttaacctgctgatgaccctgcggctgtggtccagc

SEQ ID NO: 34493 - DNA, 1887 bp, synthetic construct; identical to SEQ ID NO: 20183
  source 1..1887: mol_type = other DNA

SEQ ID NO: 34494 - DNA, 1899 bp, synthetic construct; identical to SEQ ID NO: 20185
  source 1..1899: mol_type = other DNA

SEQ ID NO: 34495 - DNA, 1935 bp, synthetic construct
  source 1..1935: mol_type = other DNA
atggccttaccagtgaccgccttgctcctgccgctggccttgctgctccacgccgccaggccgctcgaggaggacctgaagaacgtgttcccacctgaggtggccgtgttcgagcctagcaaggccgagatcgcccacacccagaaagccaccctcgtgtgcctggctaccggcttctaccccgaccatgtggaactgtcttggtgggtcaacggcaaagaggtgcacagcggcgtgtgtaccgacccccagccactgaaagaacagcccgccctgaacgacagccggtactgcctgagcagcagactgagagtgtccgccaccttctggcagaacccccggaaccacttcagatgccaggtgcagttctacggcctgagcgagaacgacgagtggacccaggacagagccaagcccgtgacccagatcgtgtctgccgaagcctggggcagagccgattgcggcatcaccagcgccagctaccaccagggcgtgctgagcgccaccatcctgtacgagatcctgctgggcaaggccaccctgtacgccgtgctggtgtctgccctggtgctgatggctatggtcaagcggaaggacagccggggaagggccaagcgatctggatctggagcaacaaacttctcactactcaaacaagcaggtgacgtggaggagaatcccgggcctactagcatggccttaccagtgaccgccttgctcctgccgctggccttgctgctccacgccgccaggccggaactgcaaagcgtgctgacacagcctcctagcgcctctggaacacctggacagagagtgacaatcagctgctccggcagctccagcaacatcggcagcaactacgtgaactggtatcagcagctgcctggcacagcccctaaactgctgatctacggcgactaccagaggccaagcggcgtgccagatagattcagcggcagcaagtctggcacaagcgccagcctggctatctctggactgagaagcgaggacgaggccgactactactgtgccaccagagatgatagcctgagcggcagcgtggtgtttggcacaggcacaaagctgacagtgctgggcggcggaggcggaagtggaggcggaggatctggcggcggaggctctgaagttcagctggttcagagcggagccgaagtgaagaagcctggcgagagcctgaagattagctgcaaaggcagcggctacggcttcaccagctattggatcggctgggtccgacagatgcctggcaaaggactggaatggatgggcatcattcaccccgacgacagcgacaccaagtacagccctagcttccagggccaagtgaccatcagcgccgacaagagcatcagcacagcctacctccagtggtcctctctgaaggccagcgataccgccatgtactactgcgccagcagctacctgagaggactgtggggcggctacttcgatttttggggccagggcacactggtcaccgttagttctacgcgtatccagaaccctgatcctgccgtgtaccagctgcgggatagcaagagcagcgacaagagcgtgtgtctgttcaccgacttcgacagccagaccaacgtgtcccagagcaaggactccgacgtgtacatcaccgataagtgcgtgctggacatgcggagcatggacttcaagagcaactccgccgtggcctggtccaacaagtccgatttcgcctgcgccaacgccttcaacaacagcattatccccgaggacacattcttcccaagcagcgacgtgccctgcgacgtgaagctggtggaaaagagcttcgagacagacaccaacctgaacttccagaacctgagcgtgatcggcttcagaatcctgctgctgaaagtggccggctttaacctgctgatgaccctgcggctgtggtccagc

SEQ ID NO: 34496 - DNA, 1956 bp, synthetic construct
  source 1..1956: mol_type = other DNA
atggccttaccagtgaccgccttgctcctgccgctggccttgctgctccacgccgccaggccgctcgagggctccggcgatcgccctgatcctgccgtgtaccagctgcgggatagcaagagcagcgacaagagcgtgtgtctgttcaccgacttcgacagccagaccaacgtgtcccagagcaaggactccgacgtgtacatcaccgataagtgcgtgctggacatgcggagcatggacttcaagagcaactccgccgtggcctggtccaacaagtccgatttcgcctgcgccaacgccttcaacaacagcattatccccgaggacacattcttcccaagccccgagagcagctgcgacgtgaagctggtggaaaagagcttcgagacagacaccaacctgaacttccagaacctgagcgtgatcggcttcagaatcctgctgctgaaagtggccggctttaacctgctgatgaccctgcggctgtggtccagctctagtcgcgccaagagaagcggatctggcgtgaagcagaccctgaatttcgacctgctgaagctggctggcgacgtggaatccaacccaggccccactagcatggccttaccagtgaccgccttgctcctgccgctggccttgctgctccacgccgccaggccggaactgcaaagcgtgctgacacagcctcctagcgcctctggaacacctggacagagagtgacaatcagctgctccggcagctccagcaacatcggcagcaactacgtgaactggtatcagcagctgcctggcacagcccctaaactgctgatctacggcgactaccagaggccaagcggcgtgccagatagattcagcggcagcaagtctggcacaagcgccagcctggctatctctggactgagaagcgaggacgaggccgactactactgtgccaccagagatgatagcctgagcggcagcgtggtgtttggcacaggcacaaagctgacagtgctgggcggcggaggcggaagtggaggcggaggatctggcggcggaggctctgaagttcagctggttcagagcggagccgaagtgaagaagcctggcgagagcctgaagattagctgcaaaggcagcggctacggcttcaccagctattggatcggctgggtccgacagatgcctggcaaaggactggaatggatgggcatcattcaccccgacgacagcgacaccaagtacagccctagcttccagggccaagtgaccatcagcgccgacaagagcatcagcacagcctacctccagtggtcctctctgaaggccagcgataccgccatgtactactgcgccagcagctacctgagaggactgtggggcggctacttcgatttttggggccagggcacactggtcaccgttagttctacgcgtgaggacctgaagaacgtgttcccacctgaggtggccgtgttcgagcctagcgaggccgagatcagccacacccagaaagccaccctcgtgtgcctggctaccggcttctaccccgaccatgtggaactgtcttggtgggtcaacggcaaagaggtgcacagcggcgtgtgtaccgacccccagccactgaaagaacagcccgccctgaacgacagccggtactgcctgagcagcagactgagagtgtccgccaccttctggcagaacccccggaaccacttcagatgccaggtgcagttctacggcctgagcgagaacgacgagtggacccaggacagagccaagcccgtgacccagatcgtgtctgccgaagcctggggcagagccgattgcggctttaccagcgagagctaccagcagggcgtgctgagcgccaccatcctgtacgagatcctgctgggcaaggccaccctgtacgccgtgctggtgtctgccctggtgctgatggctatggtcaagcggaaggacagccgggga

SEQ ID NO: 34497 - DNA, 1887 bp, synthetic construct
  source 1..1887: mol_type = other DNA
atggccttaccagtgaccgccttgctcctgccgctggccttgctgctccacgccgccaggccggaactgcaaagcgtgctgacacagcctcctagcgcctctggaacacctggacagagagtgacaatcagctgctccggcagctccagcaacatcggcagcaactacgtgaactggtatcagcagctgcctggcacagcccctaaactgctgatctacggcgactaccagaggccaagcggcgtgccagatagattcagcggcagcaagtctggcacaagcgccagcctggctatctctggactgagaagcgaggacgaggccgactactactgtgccaccagagatgatagcctgagcggcagcgtggtgtttggcacaggcacaaagctgacagtgctgggcctcgaggacctgaagaacgtgttcccacctgaggtggccgtgttcgagcctagcgaggccgagatcagccacacccagaaagccaccctcgtgtgcctggctaccggcttctaccccgaccatgtggaactgtcttggtgggtcaacggcaaagaggtgcacagcggcgtgtctaccgacccccagccactgaaagaacagcccgccctgaacgacagccggtactgcctgagcagcagactgagagtgtccgccaccttctggcagaacccccggaaccacttcagatgccaggtgcagttctacggcctgagcgagaacgacgagtggacccaggacagagccaagcccgtgacccagatcgtgtctgccgaagcctggggcagagccgattgcggctttaccagcgagagctaccagcagggcgtgctgagcgccaccatcctgtacgagatcctgctgggcaaggccaccctgtacgccgtgctggtgtctgccctggtgctgatggctatggtcaagcggaaggacagccggggaagggccaagcgatctggatctggagcaacaaacttctcactactcaaacaagcaggtgacgtggaggagaatcccgggcctactagtatggactggatttggcgcatccttttccttgtcggcgctgctaccggcgcgcattccttcgaagaagttcagctggttcagagcggagccgaagtgaagaagcctggcgagagcctgaagattagctgcaaaggcagcggctacggcttcaccagctattggatcggctgggtccgacagatgcctggcaaaggactggaatggatgggcatcattcaccccgacgacagcgacaccaagtacagccctagcttccagggccaagtgaccatcagcgccgacaagagcatcagcacagcctacctccagtggtcctctctgaaggccagcgataccgccatgtactactgcgccagcagctacctgagaggactgtggggcggctacttcgatttttggggccagggcacactggtcaccgttagttctacgcgtatccagaaccctgatcctgccgtgtaccagctgcgggatagcaagagcagcgacaagagcgtgtgtctgttcaccgacttcgacagccagaccaacgtgtcccagagcaaggactccgacgtgtacatcaccgataagaccgtgctggacatgcggagcatggacttcaagagcaactccgccgtggcctggtccaacaagtccgatttcgcctgcgccaacgccttcaacaacagcattatccccgaggacacattcttcccaagccccgagagcagctgcgacgtgaagctggtggaaaagagcttcgagacagacaccaacctgaacttccagaacctgagcgtgatcggcttcagaatcctgctgctgaaagtggccggctttaacctgctgatgaccctgcggctgtggtccagc

SEQ ID NO: 34498 - DNA, 1911 bp, synthetic construct
  source 1..1911: mol_type = other DNA
atggccttaccagtgaccgccttgctcctgccgctggccttgctgctccacgccgccaggccggaactgcaaagcgtgctgacacagcctcctagcgcctctggaacacctggacagagagtgacaatcagctgctccggcagctccagcaacatcggcagcaactacgtgaactggtatcagcagctgcctggcacagcccctaaactgctgatctacggcgactaccagaggccaagcggcgtgccagatagattcagcggcagcaagtctggcacaagcgccagcctggctatctctggactgagaagcgaggacgaggccgactactactgtgccaccagagatgatagcctgagcggcagcgtggtgtttggcacaggcacaaagctgacagtgctgggcctcgaggacaagcagctggacgccgacgtgtcccccaagcctaccatcttcctgccctctatcgccgagacaaagctccagaaggccggcacctacctgtgcctgctggaaaagttcttcccagatgtgattaagatccactggcaggaaaagaagtccaacaccatcctgggcagccaggaaggcaacaccatgaagaccaacgacacctacatgaagttcagctggctgaccgtgcccgagaagtccctggacaaagaacacagatgcatcgtgcggcacgaaaacaacaagaacggcgtggaccaggaaatcatcttcccacccatcaagaccgatgtgattacaatggaccccaaggacaactgctccaaggacgccaacgataccctgctgctccagctgaccaacaccagcgcctactacatgtacttgttgctgctgctgaagtccgtggtgtacttcgccatcatcacatgctgcctgctgcggagaaccgccttctgctgcaacggcgagaagtctagggccaagcgatctggatctggagcaacaaacttctcactactcaaacaagcaggtgacgtggaggagaatcccgggcctactagtatggactggatttggcgcatccttttccttgtcggcgctgctaccggcgcgcattccttcgaagaagttcagctggttcagagcggagccgaagtgaagaagcctggcgagagcctgaagattagctgcaaaggcagcggctacggcttcaccagctattggatcggctgggtccgacagatgcctggcaaaggactggaatggatgggcatcattcaccccgacgacagcgacaccaagtacagccctagcttccagggccaagtgaccatcagcgccgacaagagcatcagcacagcctacctccagtggtcctctctgaaggccagcgataccgccatgtactactgcgccagcagctacctgagaggactgtggggcggctacttcgatttttggggccagggcacactggtcaccgttagttctacgcgtagccagcctcacaccaagcccagcgtgttcgtgatgaagaacggcaccaacgtggcctgcctcgtgaaagagttctaccccaaggacatcaggatcaacctggtgtccagcaagaagatcaccgagttcgaccccgccatcgtgatctcccccagcggcaagtacaacgccgtgaagctggggaagtacgaggacagcaacagcgtgacctgctccgtgcagcacgacaacaagaccgtgcacagcaccgactttgaagtgaaaaccgactccaccgaccacgtgaagcccaaagagacagagaacaccaagcagcccagcaagagctgccacaagcccaaggccatcgtgcacaccgagaaagtgaacatgatgagcctgaccgtgctgggcctgcggatgctgttcgccaaaaccgtggccgtgaacttcctgctgaccgccaagctgttcttcctc

SEQ ID NO: 34499 - DNA, 1911 bp, synthetic construct; identical to SEQ ID NO: 20193
  source 1..1911: mol_type = other DNA

SEQ ID NO: 34500 - DNA, 1956 bp, synthetic construct
  source 1..1956: mol_type = other DNA
atggccttaccagtgaccgccttgctcctgccgctggccttgctgctccacgccgccaggccgctcgaggacaagcagctggacgccgacgtgtcccccaagcctaccatcttcctgccctctatcgccgagacaaagctccagaaggccggcacctacctgtgcctgctggaaaagttcttcccagatgtgattaagatccactggcaggaaaagaagtccaacaccatcctgggcagccaggaaggcaacaccatgaagaccaacgacacctacatgaagttcagctggctgaccgtgcccgagaagtccctggacaaagaacacagatgcatcgtgcggcacgaaaacaacaagaacggcgtggaccaggaaatcatcttcccacccatcaagaccgatgtgattacaatggaccccaaggacaactgctccaaggacgccaacgataccctgctgctccagctgaccaacaccagcgcctactacatgtacttgttgctgctgctgaagtccgtggtgtacttcgccatcatcacatgctgcctgctgcggagaaccgccttctgctgcaacggcgagaagtctagggccaagcgatctggatctggagcaacaaacttctcactactcaaacaagcaggtgacgtggaggagaatcccgggcctactagcatggccttaccagtgaccgccttgctcctgccgctggccttgctgctccacgccgccaggccggaactgcaaagcgtgctgacacagcctcctagcgcctctggaacacctggacagagagtgacaatcagctgctccggcagctccagcaacatcggcagcaactacgtgaactggtatcagcagctgcctggcacagcccctaaactgctgatctacggcgactaccagaggccaagcggcgtgccagatagattcagcggcagcaagtctggcacaagcgccagcctggctatctctggactgagaagcgaggacgaggccgactactactgtgccaccagagatgatagcctgagcggcagcgtggtgtttggcacaggcacaaagctgacagtgctgggcggcggaggcggaagtggaggcggaggatctggcggcggaggctctgaagttcagctggttcagagcggagccgaagtgaagaagcctggcgagagcctgaagattagctgcaaaggcagcggctacggcttcaccagctattggatcggctgggtccgacagatgcctggcaaaggactggaatggatgggcatcattcaccccgacgacagcgacaccaagtacagccctagcttccagggccaagtgaccatcagcgccgacaagagcatcagcacagcctacctccagtggtcctctctgaaggccagcgataccgccatgtactactgcgccagcagctacctgagaggactgtggggcggctacttcgatttttggggccagggcacactggtcaccgttagttctacgcgtagccagcctcacaccaagcccagcgtgttcgtgatgaagaacggcaccaacgtggcctgcctcgtgaaagagttctaccccaaggacatcaggatcaacctggtgtccagcaagaagatcaccgagttcgaccccgccatcgtgatctcccccagcggcaagtacaacgccgtgaagctggggaagtacgaggacagcaacagcgtgacctgctccgtgcagcacgacaacaagaccgtgcacagcaccgactttgaagtgaaaaccgactccaccgaccacgtgaagcccaaagagacagagaacaccaagcagcccagcaagagctgccacaagcccaaggccatcgtgcacaccgagaaagtgaacatgatgagcctgaccgtgctgggcctgcggatgctgttcgccaaaaccgtggccgtgaacttcctgctgaccgccaagctgttcttcctc

SEQ ID NO: 34501 - DNA, 2418 bp, synthetic construct
  source 1..2418: mol_type = other DNA
atggccttaccagtgaccgccttgctcctgccgctggccttgctgctccacgccgccaggccggaactgcaaagcgtgctgacacagcctcctagcgcctctggaacacctggacagagagtgacaatcagctgctccggcagctccagcaacatcggcagcaactacgtgaactggtatcagcagctgcctggcacagcccctaaactgctgatctacggcgactaccagaggccaagcggcgtgccagatagattcagcggcagcaagtctggcacaagcgccagcctggctatctctggactgagaagcgaggacgaggccgactactactgtgccaccagagatgatagcctgagcggcagcgtggtgtttggcacaggcacaaagctgacagtgctgggcggacagcctaaggccaatcctaccgtgacactgttccctccaagcagcgaagaactccaggccaacaaggccacacttgtgtgcctgatctccgacttctaccctggggctgtgacagtggcttggaaggccgatggatctcctgtgaaagccggcgtggaaaccaccaagccatccaagcagagcaacaacaaatacgccgccagctcctacctgagcctgacacctgagcagtggaagtcccacagatcctacagctgccaagtgacccacgaaggcagcaccgtggaaaagacagtggcccctacagagtgcagcggatcccagagcttcggcctgctggaccccaagctgtgctacctgctggatggcatcctgttcatctacggcgtgatcctgaccgccctgttcctgagagtgaagttcagcagaagcgccgacgcccctgcctaccagcagggacagaaccaactgtacaacgagctgaacctgggcagacgggaagagtacgacgtgctggacaagcggagaggcagggaccctgagatgggcggaaagccccagcggagaaagaacccccaggaaggactgtataacgaactccagaaagacaagatggccgaagcctacagcgagatcggcatgaagggcgagcggagaagaggcaagggccacgatggcctgtaccagggcctgagcaccgccaccaaggacacctatgacgccctgcacatgcaggccctgcctccaagaagggccaagcgatctggatctggagcaacaaacttctcactactcaaacaagcaggtgacgtggaggagaatcccgggcctactagtatggactggatttggcgcatccttttccttgtcggcgctgctaccggcgcgcattccttcgaagaagttcagctggttcagagcggagccgaagtgaagaagcctggcgagagcctgaagattagctgcaaaggcagcggctacggcttcaccagctattggatcggctgggtccgacagatgcctggcaaaggactggaatggatgggcatcattcaccccgacgacagcgacaccaagtacagccctagcttccagggccaagtgaccatcagcgccgacaagagcatcagcacagcctacctccagtggtcctctctgaaggccagcgataccgccatgtactactgcgccagcagctacctgagaggactgtggggcggctacttcgatttttggggccagggcacactggtcaccgttagttctgcctctacaaagggaccctccgtgtttcctctggctcccagcagcaagtctacaagcggaggaacagccgctctgggctgcctggtcaaggattactttcccgagcctgtgaccgtgtcctggaatagcggagcactgacaagcggcgtgcacacctttccagccgtgctgcaaagcagcggcctgtactctctgagcagcgtggtcacagtgcctagctctagcctgggcacccagacctacatctgcaatgtgaaccacaagcctagcaacaccaaggtggacaagagagtggaacccaagagctgtggtacccagagttttgggttgttggaccctaaattgtgctatctgttggacggaatcctgttcatttacggagtgatcctgaccgcattgttcctgcgggttaagttttccagatccgcagacgcacccgcttaccaacaagggcagaaccaactctacaatgaacttaatttggggcggagggaagagtacgacgttctggacaaaaggaggggacgagatcccgagatgggcggaaagcctcagcgaaggaagaatccgcaagaggggctttataacgaactccagaaagataaaatggcagaagcctatagtgagattgggatgaagggagaaaggaggaggggtaaaggtcacgatgggttgtaccaaggattgagcacagccactaaagatacctatgatgcgctccacatgcaggccctgccgccaaga

SEQ ID NO: 34502 - DNA, 2475 bp, synthetic construct; identical to SEQ ID NO: 20196
  source 1..2475: mol_type = other DNA

SEQ ID NO: 34503 - DNA, 2601 bp, synthetic construct
  source 1..2601: mol_type = other DNA
atggccttaccagtgaccgccttgctcctgccgctggccttgctgctccacgccgccaggccggaactgcaaagcgtgctgacacagcctcctagcgcctctggaacacctggacagagagtgacaatcagctgctccggcagctccagcaacatcggcagcaactacgtgaactggtatcagcagctgcctggcacagcccctaaactgctgatctacggcgactaccagaggccaagcggcgtgccagatagattcagcggcagcaagtctggcacaagcgccagcctggctatctctggactgagaagcgaggacgaggccgactactactgtgccaccagagatgatagcctgagcggcagcgtggtgtttggcacaggcacaaagctgacagtgctgggcctcgaggaggacctgaagaacgtgttcccacctgaggtggccgtgttcgagcctagcgaggccgagatcagccacacccagaaagccaccctcgtgtgcctggctaccggcttctaccccgaccatgtggaactgtcttggtgggtcaacggcaaagaggtgcacagcggcgtgtctaccgacccccagccactgaaagaacagcccgccctgaacgacagccggtactgcctgagcagcagactgagagtgtccgccaccttctggcagaacccccggaaccacttcagatgccaggtgcagttctacggcctgagcgagaacgacgagtggacccaggacagagccaagcccgtgacccagatcgtgtctgccgaagcctggggcagagccgattgcggatcccagagcttcggcctgctggaccccaagctgtgctacctgctggatggcatcctgttcatctacggcgtgatcctgaccgccctgttcctgagagtgaagttcagcagaagcgccgacgcccctgcctaccagcagggacagaaccaactgtacaacgagctgaacctgggcagacgggaagagtacgacgtgctggacaagcggagaggcagggaccctgagatgggcggaaagccccagcggagaaagaacccccaggaaggactgtataacgaactccagaaagacaagatggccgaagcctacagcgagatcggcatgaagggcgagcggagaagaggcaagggccacgatggcctgtaccagggcctgagcaccgccaccaaggacacctatgacgccctgcacatgcaggccctgcctccaagaagggccaagcgatctggatctggagcaacaaacttctcactactcaaacaagcaggtgacgtggaggagaatcccgggcctactagtatggactggatttggcgcatccttttccttgtcggcgctgctaccggcgcgcattccttcgaagaagttcagctggttcagagcggagccgaagtgaagaagcctggcgagagcctgaagattagctgcaaaggcagcggctacggcttcaccagctattggatcggctgggtccgacagatgcctggcaaaggactggaatggatgggcatcattcaccccgacgacagcgacaccaagtacagccctagcttccagggccaagtgaccatcagcgccgacaagagcatcagcacagcctacctccagtggtcctctctgaaggccagcgataccgccatgtactactgcgccagcagctacctgagaggactgtggggcggctacttcgatttttggggccagggcacactggtcaccgttagttctacgcgtatccagaaccctgatcctgccgtgtaccagctgcgggatagcaagagcagcgacaagagcgtgtgtctgttcaccgacttcgacagccagaccaacgtgtcccagagcaaggactccgacgtgtacatcaccgataagaccgtgctggacatgcggagcatggacttcaagagcaactccgccgtggcctggtccaacaagtccgatttcgcctgcgccaacgccttcaacaacagcattatccccgaggacacattcttcccaagccccgagagcagctgcggtacccagagttttgggttgttggaccctaaattgtgctatctgttggacggaatcctgttcatttacggagtgatcctgaccgcattgttcctgaggagcaagcggtcacggctgctccacagcgattacatgaatatgacaccacgaagaccgggtcctactcgcaaacactaccaaccctacgcacctccccgcgactttgcagcgtaccgatctcgggttaagttttccagatccgcagacgcacccgcttaccaacaagggcagaaccaactctacaatgaacttaatttggggcggagggaagagtacgacgttctggacaaaaggaggggacgagatcccgagatgggcggaaagcctcagcgaaggaagaatccgcaagaggggctttataacgaactccagaaagataaaatggcagaagcctatagtgagattgggatgaagggagaaaggaggaggggtaaaggtcacgatgggttgtaccaaggattgagcacagccactaaagatacctatgatgcgctccacatgcaggccctgccgccaaga

SEQ ID NO: 34504 - DNA, 2730 bp, synthetic construct
  source 1..2730: mol_type = other DNA
atggccttaccagtgaccgccttgctcctgccgctggccttgctgctccacgccgccaggccggaactgcaaagcgtgctgacacagcctcctagcgcctctggaacacctggacagagagtgacaatcagctgctccggcagctccagcaacatcggcagcaactacgtgaactggtatcagcagctgcctggcacagcccctaaactgctgatctacggcgactaccagaggccaagcggcgtgccagatagattcagcggcagcaagtctggcacaagcgccagcctggctatctctggactgagaagcgaggacgaggccgactactactgtgccaccagagatgatagcctgagcggcagcgtggtgtttggcacaggcacaaagctgacagtgctgggcctcgaggaggacctgaagaacgtgttcccacctgaggtggccgtgttcgagcctagcgaggccgagatcagccacacccagaaagccaccctcgtgtgcctggctaccggcttctaccccgaccatgtggaactgtcttggtgggtcaacggcaaagaggtgcacagcggcgtgtctaccgacccccagccactgaaagaacagcccgccctgaacgacagccggtactgcctgagcagcagactgagagtgtccgccaccttctggcagaacccccggaaccacttcagatgccaggtgcagttctacggcctgagcgagaacgacgagtggacccaggacagagccaagcccgtgacccagatcgtgtctgccgaagcctggggcagagccgattgcggatcccagagcttcggcctgctggaccccaagctgtgctacctgctggatggcatcctgttcatctacggcgtgatcctgaccgccctgttcctgaaacggggcagaaagaaactcctgtatatattcaaacaaccatttatgagaccagtacaaactactcaagaggaagatggctgtagctgccgatttccagaagaagaagaaggaggatgtgaactgagagtgaagttcagcagaagcgccgacgcccctgcctaccagcagggacagaaccaactgtacaacgagctgaacctgggcagacgggaagagtacgacgtgctggacaagcggagaggcagggaccctgagatgggcggaaagccccagcggagaaagaacccccaggaaggactgtataacgaactccagaaagacaagatggccgaagcctacagcgagatcggcatgaagggcgagcggagaagaggcaagggccacgatggcctgtaccagggcctgagcaccgccaccaaggacacctatgacgccctgcacatgcaggccctgcctccaagaagggccaagcgatctggatctggagcaacaaacttctcactactcaaacaagcaggtgacgtggaggagaatcccgggcctactagtatggactggatttggcgcatccttttccttgtcggcgctgctaccggcgcgcattccttcgaagaagttcagctggttcagagcggagccgaagtgaagaagcctggcgagagcctgaagattagctgcaaaggcagcggctacggcttcaccagctattggatcggctgggtccgacagatgcctggcaaaggactggaatggatgggcatcattcaccccgacgacagcgacaccaagtacagccctagcttccagggccaagtgaccatcagcgccgacaagagcatcagcacagcctacctccagtggtcctctctgaaggccagcgataccgccatgtactactgcgccagcagctacctgagaggactgtggggcggctacttcgatttttggggccagggcacactggtcaccgttagttctacgcgtatccagaaccctgatcctgccgtgtaccagctgcgggatagcaagagcagcgacaagagcgtgtgtctgttcaccgacttcgacagccagaccaacgtgtcccagagcaaggactccgacgtgtacatcaccgataagaccgtgctggacatgcggagcatggacttcaagagcaactccgccgtggcctggtccaacaagtccgatttcgcctgcgccaacgccttcaacaacagcattatccccgaggacacattcttcccaagccccgagagcagctgcggtacccagagttttgggttgttggaccctaaattgtgctatctgttggacggaatcctgttcatttacggagtgatcctgaccgcattgttcctgaagagaggccggaagaagctgctgtacatcttcaagcagcctttcatgcggcccgtgcagaccacccaggaagaggacggctgctcctgccggttccccgaggaagaagaaggcggctgcgagctgcgggttaagttttccagatccgcagacgcacccgcttaccaacaagggcagaaccaactctacaatgaacttaatttggggcggagggaagagtacgacgttctggacaaaaggaggggacgagatcccgagatgggcggaaagcctcagcgaaggaagaatccgcaagaggggctttataacgaactccagaaagataaaatggcagaagcctatagtgagattgggatgaagggagaaaggaggaggggtaaaggtcacgatgggttgtaccaaggattgagcacagccactaaagatacctatgatgcgctccacatgcaggccctgccgccaaga

SEQ ID NO: 34505 - DNA, 1791 bp, synthetic construct
  source 1..1791: mol_type = other DNA
atggccttaccagtgaccgccttgctcctgccgctggccttgctgctccacgccgccaggccggaactgcaaagcgtgctgacacagcctcctagcgcctctggaacacctggacagagagtgacaatcagctgctccggcagctccagcaacatcggcagcaactacgtgaactggtatcagcagctgcctggcacagcccctaaactgctgatctacggcgactaccagaggccaagcggcgtgccagatagattcagcggcagcaagtctggcacaagcgccagcctggctatctctggactgagaagcgaggacgaggccgactactactgtgccaccagagatgatagcctgagcggcagcgtggtgtttggcacaggcacaaagctgacagtgctgggcctcgagcagagcttcggcctgctggaccccaagctgtgctacctgctggatggcatcctgttcatctacggcgtgatcctgaccgccctgttcctgagagtgaagttcagcagaagcgccgacgcccctgcctaccagcagggacagaaccaactgtacaacgagctgaacctgggcagacgggaagagtacgacgtgctggacaagcggagaggcagggaccctgagatgggcggaaagccccagcggagaaagaacccccaggaaggactgtataacgaactccagaaagacaagatggccgaagcctacagcgagatcggcatgaagggcgagcggagaagaggcaagggccacgatggcctgtaccagggcctgagcaccgccaccaaggacacctatgacgccctgcacatgcaggccctgcctccaagaagggccaagcgatctggatctggagcaacaaacttctcactactcaaacaagcaggtgacgtggaggagaatcccgggcctactagtatggactggatttggcgcatccttttccttgtcggcgctgctaccggcgcgcattccttcgaagaagttcagctggttcagagcggagccgaagtgaagaagcctggcgagagcctgaagattagctgcaaaggcagcggctacggcttcaccagctattggatcggctgggtccgacagatgcctggcaaaggactggaatggatgggcatcattcaccccgacgacagcgacaccaagtacagccctagcttccagggccaagtgaccatcagcgccgacaagagcatcagcacagcctacctccagtggtcctctctgaaggccagcgataccgccatgtactactgcgccagcagctacctgagaggactgtggggcggctacttcgatttttggggccagggcacactggtcaccgttagttctacgcgtcagagttttgggttgttggaccctaaattgtgctatctgttggacggaatcctgttcatttacggagtgatcctgaccgcattgttcctgcgggttaagttttccagatccgcagacgcacccgcttaccaacaagggcagaaccaactctacaatgaacttaatttggggcggagggaagagtacgacgttctggacaaaaggaggggacgagatcccgagatgggcggaaagcctcagcgaaggaagaatccgcaagaggggctttataacgaactccagaaagataaaatggcagaagcctatagtgagattgggatgaagggagaaaggaggaggggtaaaggtcacgatgggttgtaccaaggattgagcacagccactaaagatacctatgatgcgctccacatgcaggccctgccgccaaga

SEQ ID NO: 34506 - DNA, 1965 bp, synthetic construct; identical to SEQ ID NO: 20203
  source 1..1965: mol_type = other DNA

SEQ ID NO: 34507 - DNA, 1899 bp, synthetic construct; identical to SEQ ID NO: 20204
  source 1..1899: mol_type = other DNA

SEQ ID NO: 34508 - DNA, 1899 bp, synthetic construct; identical to SEQ ID NO: 20205
  source 1..1899: mol_type = other DNA

SEQ ID NO: 34509 - DNA, 1377 bp, synthetic construct; identical to SEQ ID NO: 20206
  source 1..1377: mol_type = other DNA

SEQ ID NO: 34510 - DNA, 1272 bp, synthetic construct; identical to SEQ ID NO: 20207
  source 1..1272: mol_type = other DNA

SEQ ID NO: 34511 - DNA, 1302 bp, synthetic construct; identical to SEQ ID NO: 20208
  source 1..1302: mol_type = other DNA

SEQ ID NO: 34512 - DNA, 1251 bp, synthetic construct; identical to SEQ ID NO: 20209
  source 1..1251: mol_type = other DNA

SEQ ID NO: 34513 - DNA, 1536 bp, synthetic construct; identical to SEQ ID NO: 20214
  source 1..1536: mol_type = other DNA

SEQ ID NO: 34514 - DNA, 1461 bp, synthetic construct
  source 1..1461: mol_type = other DNA
atggccttaccagtgaccgccttgctcctgccgctggccttgctgctccacgccgccaggccggaactgcaaagcgtgctgacacagcctcctagcgcctctggaacacctggacagagagtgacaatcagctgctccggcagctccagcaacatcggcagcaactacgtgaactggtatcagcagctgcctggcacagcccctaaactgctgatctacggcgactaccagaggccaagcggcgtgccagatagattcagcggcagcaagtctggcacaagcgccagcctggctatctctggactgagaagcgaggacgaggccgactactactgtgccaccagagatgatagcctgagcggcagcgtggtgtttggcacaggcacaaagctgacagtgctgggcggcggaggcggaagtggaggcggaggatctggcggcggaggctctgaagttcagctggttcagagcggagccgaagtgaagaagcctggcgagagcctgaagattagctgcaaaggcagcggctacggcttcaccagctattggatcggctgggtccgacagatgcctggcaaaggactggaatggatgggcatcattcaccccgacgacagcgacaccaagtacagccctagcttccagggccaagtgaccatcagcgccgacaagagcatcagcacagcctacctccagtggtcctctctgaaggccagcgataccgccatgtactactgcgccagcagctacctgagaggactgtggggcggctacttcgatttttggggccagggcacactggtcaccgttagttctacgcgtggaatgaggactgaggatcttcccaaagctgtcgtctttctcgaaccccaatggtatcgggtgctcgaaaaagactctgtgacactgaaatgccaaggggcctactctcccgaggacaactccacacagtggtttcataatgagtccctcatcagctctcaggccagctcttatttcattgatgccgctacagtggacgactccggcgagtatcggtgtcagaccaatctgtctacactgtctgaccccgtgcagcttgaggtccacattggatggttgctcttgcaagccccacgctgggttttcaaagaggaagatccaatccatctgcggtgccacagctggaaaaacaccgctctccacaaagtcacatacctgcaaaatggcaaaggacgcaaatacttccatcacaattccgatttttacattccgaaggctaccctgaaagacagcggcagctatttctgccggggactcgtcggctccaagaatgtgtcctccgaaaccgtgaatatcacgattacccaaggactggctgtgcctacaatctctagcttctttccgcctggataccaagtctccttctgtcttgtgatggtcctcctgtttgctgtggacacaggactgtacttttccgtg

SEQ ID NO: 34515 - DNA, 1464 bp, synthetic construct
  source 1..1464: mol_type = other DNA
atggccttaccagtgaccgccttgctcctgccgctggccttgctgctccacgccgccaggccggaactgcaaagcgtgctgacacagcctcctagcgcctctggaacacctggacagagagtgacaatcagctgctccggcagctccagcaacatcggcagcaactacgtgaactggtatcagcagctgcctggcacagcccctaaactgctgatctacggcgactaccagaggccaagcggcgtgccagatagattcagcggcagcaagtctggcacaagcgccagcctggctatctctggactgagaagcgaggacgaggccgactactactgtgccaccagagatgatagcctgagcggcagcgtggtgtttggcacaggcacaaagctgacagtgctgggcggcggaggcggaagtggaggcggaggatctggcggcggaggctctgaagttcagctggttcagagcggagccgaagtgaagaagcctggcgagagcctgaagattagctgcaaaggcagcggctacggcttcaccagctattggatcggctgggtccgacagatgcctggcaaaggactggaatggatgggcatcattcaccccgacgacagcgacaccaagtacagccctagcttccagggccaagtgaccatcagcgccgacaagagcatcagcacagcctacctccagtggtcctctctgaaggccagcgataccgccatgtactactgcgccagcagctacctgagaggactgtggggcggctacttcgatttttggggccagggcacactggtcaccgttagttctacgcgtggaatgaggactgaggatcttcccaaagctgtcgtctttctcgaaccccaatggtatcgggtgctcgaaaaagactctgtgacactgaaatgccaaggggcctactctcccgaggacaactccacacagtggtttcataatgagtccctcatcagctctcaggccagctcttatttcattgatgccgctacagtggacgactccggcgagtatcggtgtcagaccaatctgtctacactgtctgaccccgtgcagcttgaggtccacattggatggttgctcttgcaagccccacgctgggttttcaaagaggaagatccaatccatctgcggtgccacagctggaaaaacaccgctctccacaaagtcacatacctgcaaaatggcaaaggacgcaaatacttccatcacaattccgatttttacattccgaaggctaccctgaaagacagcggcagctatttctgccggggactcgtcggctccaagaatgtgtcctccgaaaccgtgaatatcacgattacccaaggactggctgtgcctacaatctctagcttctttccgcctggataccaagtctccttctgtcttgtgatggtcctcctgtttgctgtggacacaggactgtacttttccgtgaaa

SEQ ID NO: 34516 - DNA, 2196 bp, synthetic construct
  source 1..2196: mol_type = other DNA
atggccttaccagtgaccgccttgctcctgccgctggccttgctgctccacgccgccaggccggaactgcaaagcgtgctgacacagcctcctagcgcctctggaacacctggacagagagtgacaatcagctgctccggcagctccagcaacatcggcagcaactacgtgaactggtatcagcagctgcctggcacagcccctaaactgctgatctacggcgactaccagaggccaagcggcgtgccagatagattcagcggcagcaagtctggcacaagcgccagcctggctatctctggactgagaagcgaggacgaggccgactactactgtgccaccagagatgatagcctgagcggcagcgtggtgtttggcacaggcacaaagctgacagtgctgggcctcgagggacagcctaaggccaatcctaccgtgacactgttccctccaagcagcgaagaactccaggccaacaaggccacacttgtgtgcctgatctccgacttctaccctggggctgtgacagtggcttggaaggccgatggatctcctgtgaaagccggcgtggaaaccaccaagccatccaagcagagcaacaacaaatacgccgccagctcctacctgagcctgacacctgagcagtggaagtcccacagatcctacagctgccaagtgacccacgaaggcagcaccgtggaaaagacagtggcccctacagagtgcagcggatcccagagcttcggcctgctggaccccaagctgtgctacctgctggatggcatcctgttcatctacggcgtgatcctgaccgccctgttcctgagagtgaagttcagcagaagcgccgacgcccctgcctaccagcagggacagaaccaactgtacaacgagctgaacctgggcagacgggaagagtacgacgtgctggacaagcggagaggcagggaccctgagatgggcggaaagccccagcggagaaagaacccccaggaaggactgtataacgaactccagaaagacaagatggccgaagcctacagcgagatcggcatgaagggcgagcggagaagaggcaagggccacgatggcctgtaccagggcctgagcaccgccaccaaggacacctatgacgccctgcacatgcaggccctgcctccaagaagggccaagcgatctggatctggagcaacaaacttctcactactcaaacaagcaggtgacgtggaggagaatcccgggcctactagtatggactggatttggcgcatccttttccttgtcggcgctgctaccggcgcgcattccttcgaagaagttcagctggttcagagcggagccgaagtgaagaagcctggcgagagcctgaagattagctgcaaaggcagcggctacggcttcaccagctattggatcggctgggtccgacagatgcctggcaaaggactggaatggatgggcatcattcaccccgacgacagcgacaccaagtacagccctagcttccagggccaagtgaccatcagcgccgacaagagcatcagcacagcctacctccagtggtcctctctgaaggccagcgataccgccatgtactactgcgccagcagctacctgagaggactgtggggcggctacttcgatttttggggccagggcacactggtcaccgttagttctacgcgtgcctctacaaagggaccctccgtgtttcctctggctcccagcagcaagtctacaagcggaggaacagccgctctgggctgcctggtcaaggattactttcccgagcctgtgaccgtgtcctggaatagcggagcactgacaagcggcgtgcacacctttccagccgtgctgcaaagcagcggcctgtactctctgagcagcgtggtcacagtgcctagctctagcctgggcacccagacctacatctgcaatgtgaaccacaagcctagcaacaccaaggtggacaagagagtggaacccaagagctgtggtaccatcactcaaggtttggcagtgtcaaccatctcatcattctttccacctggctaccaagtgtccttctgcctggtcatggtgctgctgttcgccgtggataccggcctgtacttcagcgtcaagaccaacatccggtccagcaccagagactggaaggaccacaagttcaagtggcggaaggaccctcaggacaag

SEQ ID NO: 34517 - DNA, 2241 bp, synthetic construct
  source 1..2241: mol_type = other DNA
atggccttaccagtgaccgccttgctcctgccgctggccttgctgctccacgccgccaggccggaactgcaaagcgtgctgacacagcctcctagcgcctctggaacacctggacagagagtgacaatcagctgctccggcagctccagcaacatcggcagcaactacgtgaactggtatcagcagctgcctggcacagcccctaaactgctgatctacggcgactaccagaggccaagcggcgtgccagatagattcagcggcagcaagtctggcacaagcgccagcctggctatctctggactgagaagcgaggacgaggccgactactactgtgccaccagagatgatagcctgagcggcagcgtggtgtttggcacaggcacaaagctgacagtgctgggcctcgaggacctgaagaacgtgttcccacctgaggtggccgtgttcgagcctagcgaggccgagatcagccacacccagaaagccaccctcgtgtgcctggctaccggcttctaccccgaccatgtggaactgtcttggtgggtcaacggcaaagaggtgcacagcggcgtgtctaccgacccccagccactgaaagaacagcccgccctgaacgacagccggtactgcctgagcagcagactgagagtgtccgccaccttctggcagaacccccggaaccacttcagatgccaggtgcagttctacggcctgagcgagaacgacgagtggacccaggacagagccaagcccgtgacccagatcgtgtctgccgaagcctggggcagagccgattgcggatcccagagcttcggcctgctggaccccaagctgtgctacctgctggatggcatcctgttcatctacggcgtgatcctgaccgccctgttcctgagagtgaagttcagcagaagcgccgacgcccctgcctaccagcagggacagaaccaactgtacaacgagctgaacctgggcagacgggaagagtacgacgtgctggacaagcggagaggcagggaccctgagatgggcggaaagccccagcggagaaagaacccccaggaaggactgtataacgaactccagaaagacaagatggccgaagcctacagcgagatcggcatgaagggcgagcggagaagaggcaagggccacgatggcctgtaccagggcctgagcaccgccaccaaggacacctatgacgccctgcacatgcaggccctgcctccaagaagggccaagcgatctggatctggagcaacaaacttctcactactcaaacaagcaggtgacgtggaggagaatcccgggcctactagtatggactggatttggcgcatccttttccttgtcggcgctgctaccggcgcgcattccttcgaagaagttcagctggttcagagcggagccgaagtgaagaagcctggcgagagcctgaagattagctgcaaaggcagcggctacggcttcaccagctattggatcggctgggtccgacagatgcctggcaaaggactggaatggatgggcatcattcaccccgacgacagcgacaccaagtacagccctagcttccagggccaagtgaccatcagcgccgacaagagcatcagcacagcctacctccagtggtcctctctgaaggccagcgataccgccatgtactactgcgccagcagctacctgagaggactgtggggcggctacttcgatttttggggccagggcacactggtcaccgttagttctacgcgtatccagaaccctgatcctgccgtgtaccagctgcgggatagcaagagcagcgacaagagcgtgtgtctgttcaccgacttcgacagccagaccaacgtgtcccagagcaaggactccgacgtgtacatcaccgataagaccgtgctggacatgcggagcatggacttcaagagcaactccgccgtggcctggtccaacaagtccgatttcgcctgcgccaacgccttcaacaacagcattatccccgaggacacattcttcccaagccccgagagcagctgcggtaccatcactcaaggtttggcagtgtcaaccatctcatcattctttccacctggctaccaagtgtccttctgcctggtcatggtgctgctgttcgccgtggataccggcctgtacttcagcgtcaagaccaacatccggtccagcaccagagactggaaggaccacaagttcaagtggcggaaggaccctcaggacaag

SEQ ID NO: 34518 - DNA, 2166 bp, synthetic construct
  source 1..2166: mol_type = other DNA
atggccttaccagtgaccgccttgctcctgccgctggccttgctgctccacgccgccaggccggaactgcaaagcgtgctgacacagcctcctagcgcctctggaacacctggacagagagtgacaatcagctgctccggcagctccagcaacatcggcagcaactacgtgaactggtatcagcagctgcctggcacagcccctaaactgctgatctacggcgactaccagaggccaagcggcgtgccagatagattcagcggcagcaagtctggcacaagcgccagcctggctatctctggactgagaagcgaggacgaggccgactactactgtgccaccagagatgatagcctgagcggcagcgtggtgtttggcacaggcacaaagctgacagtgctgggcctcgaggacctgaagaacgtgttcccacctgaggtggccgtgttcgagcctagcgaggccgagatcagccacacccagaaagccaccctcgtgtgcctggctaccggcttctaccccgaccatgtggaactgtcttggtgggtcaacggcaaagaggtgcacagcggcgtgtctaccgacccccagccactgaaagaacagcccgccctgaacgacagccggtactgcctgagcagcagactgagagtgtccgccaccttctggcagaacccccggaaccacttcagatgccaggtgcagttctacggcctgagcgagaacgacgagtggacccaggacagagccaagcccgtgacccagatcgtgtctgccgaagcctggggcagagccgattgcggatcccagagcttcggcctgctggaccccaagctgtgctacctgctggatggcatcctgttcatctacggcgtgatcctgaccgccctgttcctgagagtgaagttcagcagaagcgccgacgcccctgcctaccagcagggacagaaccaactgtacaacgagctgaacctgggcagacgggaagagtacgacgtgctggacaagcggagaggcagggaccctgagatgggcggaaagccccagcggagaaagaacccccaggaaggactgtataacgaactccagaaagacaagatggccgaagcctacagcgagatcggcatgaagggcgagcggagaagaggcaagggccacgatggcctgtaccagggcctgagcaccgccaccaaggacacctatgacgccctgcacatgcaggccctgcctccaagaagggccaagcgatctggatctggagcaacaaacttctcactactcaaacaagcaggtgacgtggaggagaatcccgggcctactagtatggactggatttggcgcatccttttccttgtcggcgctgctaccggcgcgcattccttcgaagaagttcagctggttcagagcggagccgaagtgaagaagcctggcgagagcctgaagattagctgcaaaggcagcggctacggcttcaccagctattggatcggctgggtccgacagatgcctggcaaaggactggaatggatgggcatcattcaccccgacgacagcgacaccaagtacagccctagcttccagggccaagtgaccatcagcgccgacaagagcatcagcacagcctacctccagtggtcctctctgaaggccagcgataccgccatgtactactgcgccagcagctacctgagaggactgtggggcggctacttcgatttttggggccagggcacactggtcaccgttagttctacgcgtatccagaaccctgatcctgccgtgtaccagctgcgggatagcaagagcagcgacaagagcgtgtgtctgttcaccgacttcgacagccagaccaacgtgtcccagagcaaggactccgacgtgtacatcaccgataagaccgtgctggacatgcggagcatggacttcaagagcaactccgccgtggcctggtccaacaagtccgatttcgcctgcgccaacgccttcaacaacagcattatccccgaggacacattcttcccaagccccgagagcagctgcggtaccatcactcaaggtttggcagtgtcaaccatctcatcattctttccacctggctaccaagtgtccttctgcctggtcatggtgctgctgttcgccgtggataccggcctgtacttcagcgtc

SEQ ID NO: 34519 - DNA, 2169 bp, synthetic construct
  source 1..2169: mol_type = other DNA
atggccttaccagtgaccgccttgctcctgccgctggccttgctgctccacgccgccaggccggaactgcaaagcgtgctgacacagcctcctagcgcctctggaacacctggacagagagtgacaatcagctgctccggcagctccagcaacatcggcagcaactacgtgaactggtatcagcagctgcctggcacagcccctaaactgctgatctacggcgactaccagaggccaagcggcgtgccagatagattcagcggcagcaagtctggcacaagcgccagcctggctatctctggactgagaagcgaggacgaggccgactactactgtgccaccagagatgatagcctgagcggcagcgtggtgtttggcacaggcacaaagctgacagtgctgggcctcgaggacctgaagaacgtgttcccacctgaggtggccgtgttcgagcctagcgaggccgagatcagccacacccagaaagccaccctcgtgtgcctggctaccggcttctaccccgaccatgtggaactgtcttggtgggtcaacggcaaagaggtgcacagcggcgtgtctaccgacccccagccactgaaagaacagcccgccctgaacgacagccggtactgcctgagcagcagactgagagtgtccgccaccttctggcagaacccccggaaccacttcagatgccaggtgcagttctacggcctgagcgagaacgacgagtggacccaggacagagccaagcccgtgacccagatcgtgtctgccgaagcctggggcagagccgattgcggatcccagagcttcggcctgctggaccccaagctgtgctacctgctggatggcatcctgttcatctacggcgtgatcctgaccgccctgttcctgagagtgaagttcagcagaagcgccgacgcccctgcctaccagcagggacagaaccaactgtacaacgagctgaacctgggcagacgggaagagtacgacgtgctggacaagcggagaggcagggaccctgagatgggcggaaagccccagcggagaaagaacccccaggaaggactgtataacgaactccagaaagacaagatggccgaagcctacagcgagatcggcatgaagggcgagcggagaagaggcaagggccacgatggcctgtaccagggcctgagcaccgccaccaaggacacctatgacgccctgcacatgcaggccctgcctccaagaagggccaagcgatctggatctggagcaacaaacttctcactactcaaacaagcaggtgacgtggaggagaatcccgggcctactagtatggactggatttggcgcatccttttccttgtcggcgctgctaccggcgcgcattccttcgaagaagttcagctggttcagagcggagccgaagtgaagaagcctggcgagagcctgaagattagctgcaaaggcagcggctacggcttcaccagctattggatcggctgggtccgacagatgcctggcaaaggactggaatggatgggcatcattcaccccgacgacagcgacaccaagtacagccctagcttccagggccaagtgaccatcagcgccgacaagagcatcagcacagcctacctccagtggtcctctctgaaggccagcgataccgccatgtactactgcgccagcagctacctgagaggactgtggggcggctacttcgatttttggggccagggcacactggtcaccgttagttctacgcgtatccagaaccctgatcctgccgtgtaccagctgcgggatagcaagagcagcgacaagagcgtgtgtctgttcaccgacttcgacagccagaccaacgtgtcccagagcaaggactccgacgtgtacatcaccgataagaccgtgctggacatgcggagcatggacttcaagagcaactccgccgtggcctggtccaacaagtccgatttcgcctgcgccaacgccttcaacaacagcattatccccgaggacacattcttcccaagccccgagagcagctgcggtaccatcactcaaggtttggcagtgtcaaccatctcatcattctttccacctggctaccaagtgtccttctgcctggtcatggtgctgctgttcgccgtggataccggcctgtacttcagcgtcaag

SEQ ID NO: 34520 - DNA, 2172 bp, synthetic construct
  source 1..2172: mol_type = other DNA
atggccttaccagtgaccgccttgctcctgccgctggccttgctgctccacgccgccaggccggaactgcaaagcgtgctgacacagcctcctagcgcctctggaacacctggacagagagtgacaatcagctgctccggcagctccagcaacatcggcagcaactacgtgaactggtatcagcagctgcctggcacagcccctaaactgctgatctacggcgactaccagaggccaagcggcgtgccagatagattcagcggcagcaagtctggcacaagcgccagcctggctatctctggactgagaagcgaggacgaggccgactactactgtgccaccagagatgatagcctgagcggcagcgtggtgtttggcacaggcacaaagctgacagtgctgggcctcgaggacctgaagaacgtgttcccacctgaggtggccgtgttcgagcctagcgaggccgagatcagccacacccagaaagccaccctcgtgtgcctggctaccggcttctaccccgaccatgtggaactgtcttggtgggtcaacggcaaagaggtgcacagcggcgtgtctaccgacccccagccactgaaagaacagcccgccctgaacgacagccggtactgcctgagcagcagactgagagtgtccgccaccttctggcagaacccccggaaccacttcagatgccaggtgcagttctacggcctgagcgagaacgacgagtggacccaggacagagccaagcccgtgacccagatcgtgtctgccgaagcctggggcagagccgattgcggatcccagagcttcggcctgctggaccccaagctgtgctacctgctggatggcatcctgttcatctacggcgtgatcctgaccgccctgttcctgagagtgaagttcagcagaagcgccgacgcccctgcctaccagcagggacagaaccaactgtacaacgagctgaacctgggcagacgggaagagtacgacgtgctggacaagcggagaggcagggaccctgagatgggcggaaagccccagcggagaaagaacccccaggaaggactgtataacgaactccagaaagacaagatggccgaagcctacagcgagatcggcatgaagggcgagcggagaagaggcaagggccacgatggcctgtaccagggcctgagcaccgccaccaaggacacctatgacgccctgcacatgcaggccctgcctccaagaagggccaagcgatctggatctggagcaacaaacttctcactactcaaacaagcaggtgacgtggaggagaatcccgggcctactagtatggactggatttggcgcatccttttccttgtcggcgctgctaccggcgcgcattccttcgaagaagttcagctggttcagagcggagccgaagtgaagaagcctggcgagagcctgaagattagctgcaaaggcagcggctacggcttcaccagctattggatcggctgggtccgacagatgcctggcaaaggactggaatggatgggcatcattcaccccgacgacagcgacaccaagtacagccctagcttccagggccaagtgaccatcagcgccgacaagagcatcagcacagcctacctccagtggtcctctctgaaggccagcgataccgccatgtactactgcgccagcagctacctgagaggactgtggggcggctacttcgatttttggggccagggcacactggtcaccgttagttctacgcgtatccagaaccctgatcctgccgtgtaccagctgcgggatagcaagagcagcgacaagagcgtgtgtctgttcaccgacttcgacagccagaccaacgtgtcccagagcaaggactccgacgtgtacatcaccgataagaccgtgctggacatgcggagcatggacttcaagagcaactccgccgtggcctggtccaacaagtccgatttcgcctgcgccaacgccttcaacaacagcattatccccgaggacacattcttcccaagccccgagagcagctgcggtaccatcactcaaggtttggcagtgtcaaccatctcatcattctttccacctggctaccaagtgtccttctgcctggtcatggtgctgctgttcgccgtggataccggcctgtacttcagcgtcaagacc

SEQ ID NO: 34521 - DNA, 1983 bp, synthetic construct; identical to SEQ ID NO: 20233
  source 1..1983: mol_type = other DNA

SEQ ID NO: 34522 - DNA, 1890 bp, synthetic construct
  source 1..1890: mol_type = other DNA
atggccttaccagtgaccgccttgctcctgccgctggccttgctgctccacgccgccaggccggaactgcaaagcgtgctgacacagcctcctagcgcctctggaacacctggacagagagtgacaatcagctgctccggcagctccagcaacatcggcagcaactacgtgaactggtatcagcagctgcctggcacagcccctaaactgctgatctacggcgactaccagaggccaagcggcgtgccagatagattcagcggcagcaagtctggcacaagcgccagcctggctatctctggactgagaagcgaggacgaggccgactactactgtgccaccagagatgatagcctgagcggcagcgtggtgtttggcacaggcacaaagctgacagtgctgggcctcgaggacctgaagaacgtgttcccacctgaggtggccgtgttcgagcctagcgaggccgagatcagccacacccagaaagccaccctcgtgtgcctggctaccggcttctaccccgaccatgtggaactgtcttggtgggtcaacggcaaagaggtgcacagcggcgtgtgtaccgacccccagccactgaaagaacagcccgccctgaacgacagccggtactgcctgagcagcagactgagagtgtccgccaccttctggcagaacccccggaaccacttcagatgccaggtgcagttctacggcctgagcgagaacgacgagtggacccaggacagagccaagcccgtgacccagatcgtgtctgccgaagcctggggcagagccgattgcggctttaccagcgagagctaccagcagggcgtgctgagcgcctactacatgtacttgttgctgctgctgaagtccgtggtgtacttcgccatcatcacatgctgcctgctgcggagaaccgccttctgctgcaacggcgagaagtctagggccaagcgatctggatctggagcaacaaacttctcactactcaaacaagcaggtgacgtggaggagaatcccgggcctactagtatggactggatttggcgcatccttttccttgtcggcgctgctaccggcgcgcattccttcgaagaagttcagctggttcagagcggagccgaagtgaagaagcctggcgagagcctgaagattagctgcaaaggcagcggctacggcttcaccagctattggatcggctgggtccgacagatgcctggcaaaggactggaatggatgggcatcattcaccccgacgacagcgacaccaagtacagccctagcttccagggccaagtgaccatcagcgccgacaagagcatcagcacagcctacctccagtggtcctctctgaaggccagcgataccgccatgtactactgcgccagcagctacctgagaggactgtggggcggctacttcgatttttggggccagggcacactggtcaccgttagttctacgcgtatccagaaccctgatcctgccgtgtaccagctgcgggatagcaagagcagcgacaagagcgtgtgtctgttcaccgacttcgacagccagaccaacgtgtcccagagcaaggactccgacgtgtacatcaccgataagtgcgtgctggacatgcggagcatggacttcaagagcaactccgccgtggcctggtccaacaagtccgatttcgcctgcgccaacgccttcaacaacagcattatccccgaggacacattcttcccaagccccgagagcagctgcgacgtgaagctggtggaaaagagcttcgagacagacaccaacctgaacttccagaacctgagcgtgatcggcttcagaatcctgctgctgaaagtggccggctttaacctgctgatgaccctgcggctgtggtccagc

SEQ ID NO: 34523 - DNA, 1911 bp, synthetic construct
  source 1..1911: mol_type = other DNA
atggccttaccagtgaccgccttgctcctgccgctggccttgctgctccacgccgccaggccggaactgcaaagcgtgctgacacagcctcctagcgcctctggaacacctggacagagagtgacaatcagctgctccggcagctccagcaacatcggcagcaactacgtgaactggtatcagcagctgcctggcacagcccctaaactgctgatctacggcgactaccagaggccaagcggcgtgccagatagattcagcggcagcaagtctggcacaagcgccagcctggctatctctggactgagaagcgaggacgaggccgactactactgtgccaccagagatgatagcctgagcggcagcgtggtgtttggcacaggcacaaagctgacagtgctgggcctcgaggacaagcagctggacgccgacgtgtcccccaagcctaccatcttcctgccctctatcgccgagacaaagctccagaaggccggcacctacctgtgcctgctggaaaagttcttcccagatgtgattaagatccactggcaggaaaagaagtccaacaccatcctgggcagccaggaaggcaacaccatgaagaccaacgacacctacatgaagttcagctggctgaccgtgcccgagaagtccctggacaaagaacacagatgcatcgtgcggcacgaaaacaacaagaacggcgtggaccaggaaatcatcttcccacccatcaagaccgatgtgattacaatggaccccaaggacaactgctccaaggacgccaacgataccctgctgctccagctgaccaacaccagcgcctactacatgtacgagatcctgctgggcaaggccaccctgtacgccgtgctggtgtctgccctggtgctgatggctatggtcaagcggaaggacagccggggaagggccaagcgatctggatctggagcaacaaacttctcactactcaaacaagcaggtgacgtggaggagaatcccgggcctactagtatggactggatttggcgcatccttttccttgtcggcgctgctaccggcgcgcattccttcgaagaagttcagctggttcagagcggagccgaagtgaagaagcctggcgagagcctgaagattagctgcaaaggcagcggctacggcttcaccagctattggatcggctgggtccgacagatgcctggcaaaggactggaatggatgggcatcattcaccccgacgacagcgacaccaagtacagccctagcttccagggccaagtgaccatcagcgccgacaagagcatcagcacagcctacctccagtggtcctctctgaaggccagcgataccgccatgtactactgcgccagcagctacctgagaggactgtggggcggctacttcgatttttggggccagggcacactggtcaccgttagttctacgcgtagccagcctcacaccaagcccagcgtgttcgtgatgaagaacggcaccaacgtggcctgcctcgtgaaagagttctaccccaaggacatcaggatcaacctggtgtccagcaagaagatcaccgagttcgaccccgccatcgtgatctcccccagcggcaagtacaacgccgtgaagctggggaagtatgaggacagcaacagcgtgacctgctccgtgcagcacgacaacaagaccgtgcacagcaccgactttgaagtgaaaaccgactccaccgaccacgtgaagcccaaagagacagagaacaccaagcagcccagcaagagctgccacaagcccaaggccatcgtgcacaccgagaaagtgaacatgatgagcctgaccgtgatcggcttcagaatcctgctgctgaaagtggccggctttaacctgctgatgaccctgcggctgtggtccagctaa

SEQ ID NO: 34524 - DNA, 1911 bp, synthetic construct
  source 1..1911: mol_type = other DNA
atggccttaccagtgaccgccttgctcctgccgctggccttgctgctccacgccgccaggccggaactgcaaagcgtgctgacacagcctcctagcgcctctggaacacctggacagagagtgacaatcagctgctccggcagctccagcaacatcggcagcaactacgtgaactggtatcagcagctgcctggcacagcccctaaactgctgatctacggcgactaccagaggccaagcggcgtgccagatagattcagcggcagcaagtctggcacaagcgccagcctggctatctctggactgagaagcgaggacgaggccgactactactgtgccaccagagatgatagcctgagcggcagcgtggtgtttggcacaggcacaaagctgacagtgctgggcctcgaggacaagcagctggacgccgacgtgtcccccaagcctaccatcttcctgccctctatcgccgagacaaagctccagaaggccggcacctacctgtgcctgctggaaaagttcttcccagatgtgattaagatccactggcaggaaaagaagtccaacaccatcctgggcagccaggaaggcaacaccatgaagaccaacgacacctacatgaagttcagctggctgaccgtgcccgagaagtccctggacaaagaacacagatgcatcgtgcggcacgaaaacaacaagaacggcgtggaccaggaaatcatcttcccacccatcaagaccgatgtgattacaatggaccccaaggacaactgctccaaggacgccaacgataccctgctgctccagctgaccaacaccagcgccaccatcctgtacgagatcctgctgggcaaggccaccctgtacgccgtgctggtgtctgccctggtgctgatggctatggtcaagcggaaggacagccggggaagggccaagcgatctggatctggagcaacaaacttctcactactcaaacaagcaggtgacgtggaggagaatcccgggcctactagtatggactggatttggcgcatccttttccttgtcggcgctgctaccggcgcgcattccttcgaagaagttcagctggttcagagcggagccgaagtgaagaagcctggcgagagcctgaagattagctgcaaaggcagcggctacggcttcaccagctattggatcggctgggtccgacagatgcctggcaaaggactggaatggatgggcatcattcaccccgacgacagcgacaccaagtacagccctagcttccagggccaagtgaccatcagcgccgacaagagcatcagcacagcctacctccagtggtcctctctgaaggccagcgataccgccatgtactactgcgccagcagctacctgagaggactgtggggcggctacttcgatttttggggccagggcacactggtcaccgttagttctacgcgtagccagcctcacaccaagcccagcgtgttcgtgatgaagaacggcaccaacgtggcctgcctcgtgaaagagttctaccccaaggacatcaggatcaacctggtgtccagcaagaagatcaccgagttcgaccccgccatcgtgatctcccccagcggcaagtacaacgccgtgaagctggggaagtatgaggacagcaacagcgtgacctgctccgtgcagcacgacaacaagaccgtgcacagcaccgactttgaagtgaaaaccgactccaccgaccacgtgaagcccaaagagacagagaacaccaagcagcccagcaagagctgccacaagcccaaggccatcgtgcacaccgagaaagtgaacatgatgagcctgaccgtgatcggcttcagaatcctgctgctgaaagtggccggctttaacctgctgatgaccctgcggctgtggtccagctaa

SEQ ID NO: 34525 - DNA, 1911 bp, synthetic construct
  source 1..1911: mol_type = other DNA
atggccttaccagtgaccgccttgctcctgccgctggccttgctgctccacgccgccaggccggaactgcaaagcgtgctgacacagcctcctagcgcctctggaacacctggacagagagtgacaatcagctgctccggcagctccagcaacatcggcagcaactacgtgaactggtatcagcagctgcctggcacagcccctaaactgctgatctacggcgactaccagaggccaagcggcgtgccagatagattcagcggcagcaagtctggcacaagcgccagcctggctatctctggactgagaagcgaggacgaggccgactactactgtgccaccagagatgatagcctgagcggcagcgtggtgtttggcacaggcacaaagctgacagtgctgggcctcgaggacaagcagctggacgccgacgtgtcccccaagcctaccatcttcctgccctctatcgccgagacaaagctccagaaggccggcacctacctgtgcctgctggaaaagttcttcccagatgtgattaagatccactggcaggaaaagaagtccaacaccatcctgggcagccaggaaggcaacaccatgaagaccaacgacacctacatgaagttcagctggctgaccgtgcccgagaagtccctggacaaagaacacagatgcatcgtgcggcacgaaaacaacaagaacggcgtggaccaggaaatcatcttcccacccatcaagaccgatgtgattacaatggaccccaaggacaactgctccaaggacgccaacgataccctgctgctccagctgaccaacaccagcgcctactacatgtacgagatcctgctgggcaaggccaccctgtacgccgtgctggtgtctgccctggtgctgatggctatggtcaagcggaaggacagccggggaagggccaagcgatctggatctggagcaacaaacttctcactactcaaacaagcaggtgacgtggaggagaatcccgggcctactagtatggactggatttggcgcatccttttccttgtcggcgctgctaccggcgcgcattccttcgaagaagttcagctggttcagagcggagccgaagtgaagaagcctggcgagagcctgaagattagctgcaaaggcagcggctacggcttcaccagctattggatcggctgggtccgacagatgcctggcaaaggactggaatggatgggcatcattcaccccgacgacagcgacaccaagtacagccctagcttccagggccaagtgaccatcagcgccgacaagagcatcagcacagcctacctccagtggtcctctctgaaggccagcgataccgccatgtactactgcgccagcagctacctgagaggactgtggggcggctacttcgatttttggggccagggcacactggtcaccgttagttctacgcgtagccagcctcacaccaagcccagcgtgttcgtgatgaagaacggcaccaacgtggcctgcctcgtgaaagagttctaccccaaggacatcaggatcaacctggtgtccagcaagaagatcaccgagttcgaccccgccatcgtgatctcccccagcggcaagtacaacgccgtgaagctggggaagtacgaggacagcaacagcgtgacctgctccgtgcagcacgacaacaagaccgtgcacagcaccgactttgaagtgaaaaccgactccaccgaccacgtgaagcccaaagagacagagaacaccaagcagcccagcaagagctgccacaagcccaaggccatcgtgcacaccgagaaagtgaacatgatgagcctgaccgtgctgggcttcagaatcctgctgctgaaagtggccggctttaacctgctgatgaccctgcggctgtggtccagctaa

SEQ ID NO: 34526 - DNA, 1911 bp, synthetic construct
  source 1..1911: mol_type = other DNA
atggccttaccagtgaccgccttgctcctgccgctggccttgctgctccacgccgccaggccggaactgcaaagcgtgctgacacagcctcctagcgcctctggaacacctggacagagagtgacaatcagctgctccggcagctccagcaacatcggcagcaactacgtgaactggtatcagcagctgcctggcacagcccctaaactgctgatctacggcgactaccagaggccaagcggcgtgccagatagattcagcggcagcaagtctggcacaagcgccagcctggctatctctggactgagaagcgaggacgaggccgactactactgtgccaccagagatgatagcctgagcggcagcgtggtgtttggcacaggcacaaagctgacagtgctgggcctcgaggacaagcagctggacgccgacgtgtcccccaagcctaccatcttcctgccctctatcgccgagacaaagctccagaaggccggcacctacctgtgcctgctggaaaagttcttcccagatgtgattaagatccactggcaggaaaagaagtccaacaccatcctgggcagccaggaaggcaacaccatgaagaccaacgacacctacatgaagttcagctggctgaccgtgcccgagaagtccctggacaaagaacacagatgcatcgtgcggcacgaaaacaacaagaacggcgtggaccaggaaatcatcttcccacccatcaagaccgatgtgattacaatggaccccaaggacaactgctccaaggacgccaacgataccctgctgctccagctgaccaacaccagcgccaccatcctgtacgagatcctgctgggcaaggccaccctgtacgccgtgctggtgtctgccctggtgctgatggctatggtcaagcggaaggacagccggggaagggccaagcgatctggatctggagcaacaaacttctcactactcaaacaagcaggtgacgtggaggagaatcccgggcctactagtatggactggatttggcgcatccttttccttgtcggcgctgctaccggcgcgcattccttcgaagaagttcagctggttcagagcggagccgaagtgaagaagcctggcgagagcctgaagattagctgcaaaggcagcggctacggcttcaccagctattggatcggctgggtccgacagatgcctggcaaaggactggaatggatgggcatcattcaccccgacgacagcgacaccaagtacagccctagcttccagggccaagtgaccatcagcgccgacaagagcatcagcacagcctacctccagtggtcctctctgaaggccagcgataccgccatgtactactgcgccagcagctacctgagaggactgtggggcggctacttcgatttttggggccagggcacactggtcaccgttagttctacgcgtagccagcctcacaccaagcccagcgtgttcgtgatgaagaacggcaccaacgtggcctgcctcgtgaaagagttctaccccaaggacatcaggatcaacctggtgtccagcaagaagatcaccgagttcgaccccgccatcgtgatctcccccagcggcaagtacaacgccgtgaagctggggaagtacgaggacagcaacagcgtgacctgctccgtgcagcacgacaacaagaccgtgcacagcaccgactttgaagtgaaaaccgactccaccgaccacgtgaagcccaaagagacagagaacaccaagcagcccagcaagagctgccacaagcccaaggccatcgtgcacaccgagaaagtgaacatgatgagcctgaccgtgctgggcttcagaatcctgctgctgaaagtggccggctttaacctgctgatgaccctgcggctgtggtccagctaa

SEQ ID NO: 34527 - DNA, 1893 bp, synthetic construct
  source 1..1893: mol_type = other DNA
atggccttaccagtgaccgccttgctcctgccgctggccttgctgctccacgccgccaggccggaactgcaaagcgtgctgacacagcctcctagcgcctctggaacacctggacagagagtgacaatcagctgctccggcagctccagcaacatcggcagcaactacgtgaactggtatcagcagctgcctggcacagcccctaaactgctgatctacggcgactaccagaggccaagcggcgtgccagatagattcagcggcagcaagtctggcacaagcgccagcctggctatctctggactgagaagcgaggacgaggccgactactactgtgccaccagagatgatagcctgagcggcagcgtggtgtttggcacaggcacaaagctgacagtgctgggcctcgaggacctgaagaacgtgttcccacctgaggtggccgtgttcgagcctagcgaggccgagatcagccacacccagaaagccaccctcgtgtgcctggctaccggcttctaccccgaccatgtggaactgtcttggtgggtcaacggcaaagaggtgcacagcggcgtgtgtaccgacccccagccactgaaagaacagcccgccctgaacgacagccggtactgcctgagcagcagactgagagtgtccgccaccttctggcagaacccccggaaccacttcagatgccaggtgcagttctacggcctgagcgagaacgacgagtggacccaggacagagccaagcccgtgacccagatcgtgtctgccgaagcctggggcagagccgattgcggctttaccagcgagagctaccagcagggcgtgctgagcgccaccatcctgtacttgttgctgctgctgaagtccgtggtgtacttcgccatcatcacatgctgcctgctgcggagaaccgccttctgctgcaacggcgagaagtctagggccaagcgatctggatctggagcaacaaacttctcactactcaaacaagcaggtgacgtggaggagaatcccgggcctactagtatggactggatttggcgcatccttttccttgtcggcgctgctaccggcgcgcattccttcgaagaagttcagctggttcagagcggagccgaagtgaagaagcctggcgagagcctgaagattagctgcaaaggcagcggctacggcttcaccagctattggatcggctgggtccgacagatgcctggcaaaggactggaatggatgggcatcattcaccccgacgacagcgacaccaagtacagccctagcttccagggccaagtgaccatcagcgccgacaagagcatcagcacagcctacctccagtggtcctctctgaaggccagcgataccgccatgtactactgcgccagcagctacctgagaggactgtggggcggctacttcgatttttggggccagggcacactggtcaccgttagttctacgcgtatccagaaccctgatcctgccgtgtaccagctgcgggatagcaagagcagcgacaagagcgtgtgtctgttcaccgacttcgacagccagaccaacgtgtcccagagcaaggactccgacgtgtacatcaccgataagtgcgtgctggacatgcggagcatggacttcaagagcaactccgccgtggcctggtccaacaagtccgatttcgcctgcgccaacgccttcaacaacagcattatccccgaggacacattcttcccaagccccgagagcagctgcgacgtgaagctggtggaaaagagcttcgagacagacaccaacctgaacttccagaacctgagcgtgatcggcctgcggatgctgttcgccaaaaccgtggccgtgaacttcctgctgaccgccaagctgttcttcctctaa

SEQ ID NO: 34528 - DNA, 1980 bp, synthetic construct
  source 1..1980: mol_type = other DNA
atggccttaccagtgaccgccttgctcctgccgctggccttgctgctccacgccgccaggccggaactgcaaagcgtgctgacacagcctcctagcgcctctggaacacctggacagagagtgacaatcagctgctccggcagctccagcaacatcggcagcaactacgtgaactggtatcagcagctgcctggcacagcccctaaactgctgatctacggcgactaccagaggccaagcggcgtgccagatagattcagcggcagcaagtctggcacaagcgccagcctggctatctctggactgagaagcgaggacgaggccgactactactgtgccaccagagatgatagcctgagcggcagcgtggtgtttggcacaggcacaaagctgacagtgctgggcctcgaggacctgaagaacgtgttcccacctgaggtggccgtgttcgagcctagcgaggccgagatcagccacacccagaaagccaccctcgtgtgcctggctaccggcttctaccccgaccatgtggaactgtcttggtgggtcaacggcaaagaggtgcacagcggcgtgtctaccgacccccagccactgaaagaacagcccgccctgaacgacagccggtactgcctgagcagcagactgagagtgtccgccaccttctggcagaacccccggaaccacttcagatgccaggtgcagttctacggcctgagcgagaacgacgagtggacccaggacagagccaagcccgtgacccagatcgtgtctgccgaagcctggggcagagccgattgcggatcctccaaggacgccaacgataccctgctgctccagctgaccaacaccagcgcctactacatgtacttgttgctgctgctgaagtccgtggtgtacttcgccatcatcacatgctgcctgctgcggagaaccgccttctgctgcaacggcgagaagtctagggccaagcgatctggatctggagcaacaaacttctcactactcaaacaagcaggtgacgtggaggagaatcccgggcctactagtatggactggatttggcgcatccttttccttgtcggcgctgctaccggcgcgcattccttcgaagaagttcagctggttcagagcggagccgaagtgaagaagcctggcgagagcctgaagattagctgcaaaggcagcggctacggcttcaccagctattggatcggctgggtccgacagatgcctggcaaaggactggaatggatgggcatcattcaccccgacgacagcgacaccaagtacagccctagcttccagggccaagtgaccatcagcgccgacaagagcatcagcacagcctacctccagtggtcctctctgaaggccagcgataccgccatgtactactgcgccagcagctacctgagaggactgtggggcggctacttcgatttttggggccagggcacactggtcaccgttagttctacgcgtatccagaaccctgatcctgccgtgtaccagctgcgggatagcaagagcagcgacaagagcgtgtgtctgttcaccgacttcgacagccagaccaacgtgtcccagagcaaggactccgacgtgtacatcaccgataagaccgtgctggacatgcggagcatggacttcaagagcaactccgccgtggcctggtccaacaagtccgatttcgcctgcgccaacgccttcaacaacagcattatccccgaggacacattcttcccaagccccgagagcagctgcggtaccgaagtgaaaaccgactccaccgaccacgtgaagcccaaagagacagagaacaccaagcagcccagcaagagctgccacaagcccaaggccatcgtgcacaccgagaaagtgaacatgatgagcctgaccgtgctgggcctgcggatgctgttcgccaaaaccgtggccgtgaacttcctgctgaccgccaagctgttcttcctctaa

SEQ ID NO: 34529 - DNA, 1890 bp, synthetic construct
  source 1..1890: mol_type = other DNA
atggccttaccagtgaccgccttgctcctgccgctggccttgctgctccacgccgccaggccggaactgcaaagcgtgctgacacagcctcctagcgcctctggaacacctggacagagagtgacaatcagctgctccggcagctccagcaacatcggcagcaactacgtgaactggtatcagcagctgcctggcacagcccctaaactgctgatctacggcgactaccagaggccaagcggcgtgccagatagattcagcggcagcaagtctggcacaagcgccagcctggctatctctggactgagaagcgaggacgaggccgactactactgtgccaccagagatgatagcctgagcggcagcgtggtgtttggcacaggcacaaagctgacagtgctgggcctcgaggacctgaagaacgtgttcccacctgaggtggccgtgttcgagcctagcgaggccgagatcagccacacccagaaagccaccctcgtgtgcctggctaccggcttctaccccgaccatgtggaactgtcttggtgggtcaacggcaaagaggtgcacagcggcgtgtgtaccgacccccagccactgaaagaacagcccgccctgaacgacagccggtactgcctgagcagcagactgagagtgtccgccaccttctggcagaacccccggaaccacttcagatgccaggtgcagttctacggcctgagcgagaacgacgagtggacccaggacagagccaagcccgtgacccagatcgtgtctgccgaagcctggggcagagccgattgcgacgtgaagctggtggaaaagagcttcgagacagacaccaacctgaacttccagaacctgagcgtgatcggcttcagaatcctgctgctgaaagtggccggctttaacctgctgatgaccctgcggctgtggtccagcagggccaagcgatctggatctggagcaacaaacttctcactactcaaacaagcaggtgacgtggaggagaatcccgggcctactagtatggactggatttggcgcatccttttccttgtcggcgctgctaccggcgcgcattccttcgaagaagttcagctggttcagagcggagccgaagtgaagaagcctggcgagagcctgaagattagctgcaaaggcagcggctacggcttcaccagctattggatcggctgggtccgacagatgcctggcaaaggactggaatggatgggcatcattcaccccgacgacagcgacaccaagtacagccctagcttccagggccaagtgaccatcagcgccgacaagagcatcagcacagcctacctccagtggtcctctctgaaggccagcgataccgccatgtactactgcgccagcagctacctgagaggactgtggggcggctacttcgatttttggggccagggcacactggtcaccgttagttctacgcgtatccagaaccctgatcctgccgtgtaccagctgcgggatagcaagagcagcgacaagagcgtgtgtctgttcaccgacttcgacagccagaccaacgtgtcccagagcaaggactccgacgtgtacatcaccgataagtgcgtgctggacatgcggagcatggacttcaagagcaactccgccgtggcctggtccaacaagtccgatttcgcctgcgccaacgccttcaacaacagcattatccccgaggacacattcttcccaagccccgagagcagctgcggctttaccagcgagagctaccagcagggcgtgctgagcgccaccatcctgtacgagatcctgctgggcaaggccaccctgtacgccgtgctggtgtctgccctggtgctgatggctatggtcaagcggaaggacagccggggataa

SEQ ID NO: 34530 - DNA, 1890 bp, synthetic construct
  source 1..1890: mol_type = other DNA
atggccttaccagtgaccgccttgctcctgccgctggccttgctgctccacgccgccaggccggaactgcaaagcgtgctgacacagcctcctagcgcctctggaacacctggacagagagtgacaatcagctgctccggcagctccagcaacatcggcagcaactacgtgaactggtatcagcagctgcctggcacagcccctaaactgctgatctacggcgactaccagaggccaagcggcgtgccagatagattcagcggcagcaagtctggcacaagcgccagcctggctatctctggactgagaagcgaggacgaggccgactactactgtgccaccagagatgatagcctgagcggcagcgtggtgtttggcacaggcacaaagctgacagtgctgggcctcgaggacctgaagaacgtgttcccacctgaggtggccgtgttcgagcctagcgaggccgagatcagccacacccagaaagccaccctcgtgtgcctggctaccggcttctaccccgaccatgtggaactgtcttggtgggtcaacggcaaagaggtgcacagcggcgtgtgtaccgacccccagccactgaaagaacagcccgccctgaacgacagccggtactgcctgagcagcagactgagagtgtccgccaccttctggcagaacccccggaaccacttcagatgccaggtgcagttctacggcctgagcgagaacgacgagtggacccaggacagagccaagcccgtgacccagatcgtgtctgccgaagcctggggcagagccgattgcggctttaccagcgagagctaccagcagggcgtgctgagcgccaccaacctgagcgtgatcggcttcagaatcctgctgctgaaagtggccggctttaacctgctgatgaccctgcggctgtggtccagcagggccaagcgatctggatctggagcaacaaacttctcactactcaaacaagcaggtgacgtggaggagaatcccgggcctactagtatggactggatttggcgcatccttttccttgtcggcgctgctaccggcgcgcattccttcgaagaagttcagctggttcagagcggagccgaagtgaagaagcctggcgagagcctgaagattagctgcaaaggcagcggctacggcttcaccagctattggatcggctgggtccgacagatgcctggcaaaggactggaatggatgggcatcattcaccccgacgacagcgacaccaagtacagccctagcttccagggccaagtgaccatcagcgccgacaagagcatcagcacagcctacctccagtggtcctctctgaaggccagcgataccgccatgtactactgcgccagcagctacctgagaggactgtggggcggctacttcgatttttggggccagggcacactggtcaccgttagttctacgcgtatccagaaccctgatcctgccgtgtaccagctgcgggatagcaagagcagcgacaagagcgtgtgtctgttcaccgacttcgacagccagaccaacgtgtcccagagcaaggactccgacgtgtacatcaccgataagtgcgtgctggacatgcggagcatggacttcaagagcaactccgccgtggcctggtccaacaagtccgatttcgcctgcgccaacgccttcaacaacagcattatccccgaggacacattcttcccaagccccgagagcagctgcgacgtgaagctggtggaaaagagcttcgagacagacaccaacctgaacttccagatcctgtacgagatcctgctgggcaaggccaccctgtacgccgtgctggtgtctgccctggtgctgatggctatggtcaagcggaaggacagccggggataa

SEQ ID NO: 34531 - DNA, 1890 bp, synthetic construct; identical to SEQ ID NO: 34529
  source 1..1890: mol_type = other DNA

SEQ ID NO: 34532 - DNA, 1890 bp, synthetic construct; identical to SEQ ID NO: 34530
  source 1..1890: mol_type = other DNA

SEQ ID NO: 34533 - DNA, 1887 bp, synthetic construct
  source 1..1887: mol_type = other DNA
atggccttaccagtgaccgccttgctcctgccgctggccttgctgctccacgccgccaggccggaactgcaaagcgtgctgacacagcctcctagcgcctctggaacacctggacagagagtgacaatcagctgctccggcagctccagcaacatcggcagcaactacgtgaactggtatcagcagctgcctggcacagcccctaaactgctgatctacggcgactaccagaggccaagcggcgtgccagatagattcagcggcagcaagtctggcacaagcgccagcctggctatctctggactgagaagcgaggacgaggccgactactactgtgccaccagagatgatagcctgagcggcagcgtggtgtttggcacaggcacaaagctgacagtgctgggcctcgaggacctgaagaacgtgttcccacctgaggtggccgtgttcgagcctagcgaggccgagatcagccacacccagaaagccaccctcgtgtgcctggctaccggcttctaccccgaccatgtggaactgtcttggtgggtcaacggcaaagaggtgcacagcggcgtgtgtaccgacccccagccactgaaagaacagcccgccctgaacgacagccggtactgcctgagcagcagactgagagtgtccgccaccttctggcagaacccccggaaccacttcagatgccaggtgcagttctacggcctgagcgagaacgacgagtggacccaggacagagccaagcccgtgacccagatcgtgtctgccgaagcctggggcagagccgattgcgacgtgaagctggtggaaaagagcttcgagacagacaccaacctgaacttccagaacctgagcgtgatcggcttcagaatcctgctgctgaaagtggccggctttaacctgctgatgaccctgcggctgtggtccagcagggccaagcgatctggatctggagcaacaaacttctcactactcaaacaagcaggtgacgtggaggagaatcccgggcctactagtatggactggatttggcgcatccttttccttgtcggcgctgctaccggcgcgcattccttcgaagaagttcagctggttcagagcggagccgaagtgaagaagcctggcgagagcctgaagattagctgcaaaggcagcggctacggcttcaccagctattggatcggctgggtccgacagatgcctggcaaaggactggaatggatgggcatcattcaccccgacgacagcgacaccaagtacagccctagcttccagggccaagtgaccatcagcgccgacaagagcatcagcacagcctacctccagtggtcctctctgaaggccagcgataccgccatgtactactgcgccagcagctacctgagaggactgtggggcggctacttcgatttttggggccagggcacactggtcaccgttagttctacgcgtatccagaaccctgatcctgccgtgtaccagctgcgggatagcaagagcagcgacaagagcgtgtgtctgttcaccgacttcgacagccagaccaacgtgtcccagagcaaggactccgacgtgtacatcaccgataagtgcgtgctggacatgcggagcatggacttcaagagcaactccgccgtggcctggtccaacaagtccgatttcgcctgcgccaacgccttcaacaacagcattatccccgaggacacattcttcccaagccccgagagcagctgcggctttaccagcgagagctaccagcagggcgtgctgagcgccaccatcctgtacgagatcctgctgggcaaggccaccctgtacgccgtgctggtgtctgccctggtgctgatggctatggtcaagcggaaggacagccgggga

SEQ ID NO: 34534 - DNA, 1899 bp, synthetic construct
  source 1..1899: mol_type = other DNA
atggccttaccagtgaccgccttgctcctgccgctggccttgctgctccacgccgccaggccggaactgcaaagcgtgctgacacagcctcctagcgcctctggaacacctggacagagagtgacaatcagctgctccggcagctccagcaacatcggcagcaactacgtgaactggtatcagcagctgcctggcacagcccctaaactgctgatctacggcgactaccagaggccaagcggcgtgccagatagattcagcggcagcaagtctggcacaagcgccagcctggctatctctggactgagaagcgaggacgaggccgactactactgtgccaccagagatgatagcctgagcggcagcgtggtgtttggcacaggcacaaagctgacagtgctgggcctcgaggccgacgtgtcccccaagcctaccatcttcctgccctctatcgccgagacaaagctccagaaggccggcacctacctgtgcctgctggaaaagttcttcccagatgtgattaagatccactggcaggaaaagaagtccaacaccatcctgggcagccaggaaggcaacaccatgaagaccaacgacacctacatgaagttcagctggctgaccgtgcccgagaagtccctggacaaagaacacagatgcatcgtgcggcacgaaaacaacaagaacggcgtggaccaggaaatcatcttcccacccatcaagaccgatgtgattacaatggaccccaaggacaactgctccaaggacgccaacgataccctgctgctccagctgaccaacaccagcgcctactacatgtacttgttgctgctgctgaagtccgtggtgtacttcgccatcatcacatgctgcctgctgcggagaaccgccttctgctgcaacggcgagaagtctagggccaagcgatctggatctggagcaacaaacttctcactactcaaacaagcaggtgacgtggaggagaatcccgggcctactagtatggactggatttggcgcatccttttccttgtcggcgctgctaccggcgcgcattccttcgaagaagttcagctggttcagagcggagccgaagtgaagaagcctggcgagagcctgaagattagctgcaaaggcagcggctacggcttcaccagctattggatcggctgggtccgacagatgcctggcaaaggactggaatggatgggcatcattcaccccgacgacagcgacaccaagtacagccctagcttccagggccaagtgaccatcagcgccgacaagagcatcagcacagcctacctccagtggtcctctctgaaggccagcgataccgccatgtactactgcgccagcagctacctgagaggactgtggggcggctacttcgatttttggggccagggcacactggtcaccgttagttctacgcgtagccagcctcacaccaagcccagcgtgttcgtgatgaagaacggcaccaacgtggcctgcctcgtgaaagagttctaccccaaggacatcaggatcaacctggtgtccagcaagaagatcaccgagttcgaccccgccatcgtgatctcccccagcggcaagtacaacgccgtgaagctggggaagtatgaggacagcaacagcgtgacctgctccgtgcagcacgacaacaagaccgtgcacagcaccgactttgaagtgaaaaccgactccaccgaccacgtgaagcccaaagagacagagaacaccaagcagcccagcaagagctgccacaagcccaaggccatcgtgcacaccgagaaagtgaacatgatgagcctgaccgtgatcggcttcagaatcctgctgctgaaagtggccggctttaacctgctgatgaccctgcggctgtggtccagctaa

SEQ ID NO: 34535 - DNA, 1899 bp, synthetic construct
  source 1..1899: mol_type = other DNA
atggccttaccagtgaccgccttgctcctgccgctggccttgctgctccacgccgccaggccggaactgcaaagcgtgctgacacagcctcctagcgcctctggaacacctggacagagagtgacaatcagctgctccggcagctccagcaacatcggcagcaactacgtgaactggtatcagcagctgcctggcacagcccctaaactgctgatctacggcgactaccagaggccaagcggcgtgccagatagattcagcggcagcaagtctggcacaagcgccagcctggctatctctggactgagaagcgaggacgaggccgactactactgtgccaccagagatgatagcctgagcggcagcgtggtgtttggcacaggcacaaagctgacagtgctgggcctcgaggccgacgtgtcccccaagcctaccatcttcctgccctctatcgccgagacaaagctccagaaggccggcacctacctgtgcctgctggaaaagttcttcccagatgtgattaagatccactggcaggaaaagaagtccaacaccatcctgggcagccaggaaggcaacaccatgaagaccaacgacacctacatgaagttcagctggctgaccgtgcccgagaagtccctggacaaagaacacagatgcatcgtgcggcacgaaaacaacaagaacggcgtggaccaggaaatcatcttcccacccatcaagaccgatgtgattacaatggaccccaaggacaactgctccaaggacgccaacgataccctgctgctccagctgaccaacaccagcgcctactacatgtacttgttgctgctgctgaagtccgtggtgtacttcgccatcatcacatgctgcctgctgcggagaaccgccttctgctgcaacggcgagaagtctagggccaagcgatctggatctggagcaacaaacttctcactactcaaacaagcaggtgacgtggaggagaatcccgggcctactagtatggactggatttggcgcatccttttccttgtcggcgctgctaccggcgcgcattccttcgaagaagttcagctggttcagagcggagccgaagtgaagaagcctggcgagagcctgaagattagctgcaaaggcagcggctacggcttcaccagctattggatcggctgggtccgacagatgcctggcaaaggactggaatggatgggcatcattcaccccgacgacagcgacaccaagtacagccctagcttccagggccaagtgaccatcagcgccgacaagagcatcagcacagcctacctccagtggtcctctctgaaggccagcgataccgccatgtactactgcgccagcagctacctgagaggactgtggggcggctacttcgatttttggggccagggcacactggtcaccgttagttctacgcgtagccagcctcacaccaagcccagcgtgttcgtgatgaagaacggcaccaacgtggcctgcctcgtgaaagagttctaccccaaggacatcaggatcaacctggtgtccagcaagaagatcaccgagttcgaccccgccatcgtgatctcccccagcggcaagtacaacgccgtgaagctggggaagtacgaggacagcaacagcgtgacctgctccgtgcagcacgacaacaagaccgtgcacagcaccgactttgaagtgaaaaccgactccaccgaccacgtgaagcccaaagagacagagaacaccaagcagcccagcaagagctgccacaagcccaaggccatcgtgcacaccgagaaagtgaacatgatgagcctgaccgtgctgggcttcagaatcctgctgctgaaagtggccggctttaacctgctgatgaccctgcggctgtggtccagctaa

SEQ ID NO: 34536 - DNA, 1887 bp, synthetic construct; identical to SEQ ID NO: 34533
  source 1..1887: mol_type = other DNA

SEQ ID NO: 34537 - DNA, 1899 bp, synthetic construct
  source 1..1899: mol_type = other DNA
atggccttaccagtgaccgccttgctcctgccgctggccttgctgctccacgccgccaggccggaactgcaaagcgtgctgacacagcctcctagcgcctctggaacacctggacagagagtgacaatcagctgctccggcagctccagcaacatcggcagcaactacgtgaactggtatcagcagctgcctggcacagcccctaaactgctgatctacggcgactaccagaggccaagcggcgtgccagatagattcagcggcagcaagtctggcacaagcgccagcctggctatctctggactgagaagcgaggacgaggccgactactactgtgccaccagagatgatagcctgagcggcagcgtggtgtttggcacaggcacaaagctgacagtgctgggcctcgagatccagaaccctgatcctgccgtgtaccagctgcgggatagcaagagcagcgacaagagcgtgtgtctgttcaccgacttcgacagccagaccaacgtgtcccagagcaaggactccgacgtgtacatcaccgataagtgcgtgctggacatgcggagcatggacttcaagagcaactccgccgtggcctggtccaacaagtccgatttcgcctgcgccaacgccttcaacaacagcattatccccgaggacacattcttcccaagccccgagagcagctgcggctttaccagcgagagctaccagcagggcgtgctgagcgccaccatcctgtacgagatcctgctgggcaaggccaccctgtacgccgtgctggtgtctgccctggtgctgatggctatggtcaagcggaaggacagccggggacgcgccaagagaagcggatctggcgtgaagcagaccctgaatttcgacctgctgaagctggctggcgacgtggaatccaacccaggccctactagtatggactggatttggcgcatccttttccttgtcggcgctgctaccggcgcgcattccttcgaagaagttcagctggttcagagcggagccgaagtgaagaagcctggcgagagcctgaagattagctgcaaaggcagcggctacggcttcaccagctattggatcggctgggtccgacagatgcctggcaaaggactggaatggatgggcatcattcaccccgacgacagcgacaccaagtacagccctagcttccagggccaagtgaccatcagcgccgacaagagcatcagcacagcctacctccagtggtcctctctgaaggccagcgataccgccatgtactactgcgccagcagctacctgagaggactgtggggcggctacttcgatttttggggccagggcacactggtcaccgttagttctacgcgtgaggacctgaagaacgtgttcccacctgaggtggccgtgttcgagcctagcgaggccgagatcagccacacccagaaagccaccctcgtgtgcctggctaccggcttctaccccgaccatgtggaactgtcttggtgggtcaacggcaaagaggtgcacagcggcgtgtgtaccgacccccagccactgaaagaacagcccgccctgaacgacagccggtactgcctgagcagcagactgagagtgtccgccaccttctggcagaacccccggaaccacttcagatgccaggtgcagttctacggcctgagcgagaacgacgagtggacccaggacagagccaagcccgtgacccagatcgtgtctgccgaagcctggggcagagccgattgcgacgtgaagctggtggaaaagagcttcgagacagacaccaacctgaacttccagaacctgagcgtgatcggcttcagaatcctgctgctgaaagtggccggctttaacctgctgatgaccctgcggctgtggtccagc

SEQ ID NO: 34538 - DNA, 2292 bp, synthetic construct
  source 1..2292: mol_type = other DNA
atggccttaccagtgaccgccttgctcctgccgctggccttgctgctccacgccgccaggccggaagtgcagctggttgaatctggcggaggactggttcagcctggcggatctctgagactgtcttgtgccgccagcggcttcagcttcagcgacttttggatgagctgggtccgacaggcccctggcaaaggacttgaatgggtcgccacaatcagccaggccggcagcgagaaggactacgtggactctgtgaagggcagattcaccatcagccgggacaacgccaagaagtccctgtacctccagatgaacagcctgagagccgaggacaccgccgtgtactattgtgcctctggcgtgtacagcttcgactacagaggccagggcaccctggtcacagtctcttctggtaccggcggaggcggatctggcggcggaggtagcggtggcggaggatctgaattcgaactgcaaagcgtgctgacacagcctcctagcgcctctggaacacctggacagagagtgacaatcagctgctccggcagctccagcaacatcggcagcaactacgtgaactggtatcagcagctgcctggcacagcccctaaactgctgatctacggcgactaccagaggccaagcggcgtgccagatagattcagcggcagcaagtctggcacaagcgccagcctggctatctctggactgagaagcgaggacgaggccgactactactgtgccaccagagatgatagcctgagcggcagcgtggtgtttggcacaggcacaaagctgacagtgctgggcctcgaggacctgaagaacgtgttcccacctgaggtggccgtgttcgagcctagcgaggccgagatcagccacacccagaaagccaccctcgtgtgcctggctaccggcttctaccccgaccatgtggaactgtcttggtgggtcaacggcaaagaggtgcacagcggcgtgtgtaccgacccccagccactgaaagaacagcccgccctgaacgacagccggtactgcctgagcagcagactgagagtgtccgccaccttctggcagaacccccggaaccacttcagatgccaggtgcagttctacggcctgagcgagaacgacgagtggacccaggacagagccaagcccgtgacccagatcgtgtctgccgaagcctggggcagagccgattgcgacgtgaagctggtggaaaagagcttcgagacagacaccaacctgaacttccagaacctgagcgtgatcggcttcagaatcctgctgctgaaagtggccggctttaacctgctgatgaccctgcggctgtggtccagcagggccaagcgatctggatctggagcaacaaacttctcactactcaaacaagcaggtgacgtggaggagaatcccgggcctactagtatggactggatttggcgcatccttttccttgtcggcgctgctaccggcgcgcattccttcgaagaagttcagctggttcagagcggagccgaagtgaagaagcctggcgagagcctgaagattagctgcaaaggcagcggctacggcttcaccagctattggatcggctgggtccgacagatgcctggcaaaggactggaatggatgggcatcattcaccccgacgacagcgacaccaagtacagccctagcttccagggccaagtgaccatcagcgccgacaagagcatcagcacagcctacctccagtggtcctctctgaaggccagcgataccgccatgtactactgcgccagcagctacctgagaggactgtggggcggctacttcgatttttggggccagggcacactggtcaccgttagttctacgcgtatccagaaccctgatcctgccgtgtaccagctgcgggatagcaagagcagcgacaagagcgtgtgtctgttcaccgacttcgacagccagaccaacgtgtcccagagcaaggactccgacgtgtacatcaccgataagtgcgtgctggacatgcggagcatggacttcaagagcaactccgccgtggcctggtccaacaagtccgatttcgcctgcgccaacgccttcaacaacagcattatccccgaggacacattcttcccaagccccgagagcagctgcggctttaccagcgagagctaccagcagggcgtgctgagcgccaccatcctgtacgagatcctgctgggcaaggccaccctgtacgccgtgctggtgtctgccctggtgctgatggctatggtcaagcggaaggacagccgggga

SEQ ID NO: 34539 - DNA, 2304 bp, synthetic construct
  source 1..2304: mol_type = other DNA
atggccttaccagtgaccgccttgctcctgccgctggccttgctgctccacgccgccaggccggaagtgcagctggttgaatctggcggaggactggttcagcctggcggatctctgagactgtcttgtgccgccagcggcttcagcttcagcgacttttggatgagctgggtccgacaggcccctggcaaaggacttgaatgggtcgccacaatcagccaggccggcagcgagaaggactacgtggactctgtgaagggcagattcaccatcagccgggacaacgccaagaagtccctgtacctccagatgaacagcctgagagccgaggacaccgccgtgtactattgtgcctctggcgtgtacagcttcgactacagaggccagggcaccctggtcacagtctcttctggtaccggcggaggcggatctggcggcggaggtagcggtggcggaggatctgaattcgaactgcaaagcgtgctgacacagcctcctagcgcctctggaacacctggacagagagtgacaatcagctgctccggcagctccagcaacatcggcagcaactacgtgaactggtatcagcagctgcctggcacagcccctaaactgctgatctacggcgactaccagaggccaagcggcgtgccagatagattcagcggcagcaagtctggcacaagcgccagcctggctatctctggactgagaagcgaggacgaggccgactactactgtgccaccagagatgatagcctgagcggcagcgtggtgtttggcacaggcacaaagctgacagtgctgggcctcgagatccagaaccctgatcctgccgtgtaccagctgcgggatagcaagagcagcgacaagagcgtgtgtctgttcaccgacttcgacagccagaccaacgtgtcccagagcaaggactccgacgtgtacatcaccgataagtgcgtgctggacatgcggagcatggacttcaagagcaactccgccgtggcctggtccaacaagtccgatttcgcctgcgccaacgccttcaacaacagcattatccccgaggacacattcttcccaagccccgagagcagctgcggctttaccagcgagagctaccagcagggcgtgctgagcgccaccatcctgtacgagatcctgctgggcaaggccaccctgtacgccgtgctggtgtctgccctggtgctgatggctatggtcaagcggaaggacagccggggacgcgccaagagaagcggatctggcgtgaagcagaccctgaatttcgacctgctgaagctggctggcgacgtggaatccaacccaggccctactagtatggactggatttggcgcatccttttccttgtcggcgctgctaccggcgcgcattccttcgaagaagttcagctggttcagagcggagccgaagtgaagaagcctggcgagagcctgaagattagctgcaaaggcagcggctacggcttcaccagctattggatcggctgggtccgacagatgcctggcaaaggactggaatggatgggcatcattcaccccgacgacagcgacaccaagtacagccctagcttccagggccaagtgaccatcagcgccgacaagagcatcagcacagcctacctccagtggtcctctctgaaggccagcgataccgccatgtactactgcgccagcagctacctgagaggactgtggggcggctacttcgatttttggggccagggcacactggtcaccgttagttctacgcgtgaggacctgaagaacgtgttcccacctgaggtggccgtgttcgagcctagcgaggccgagatcagccacacccagaaagccaccctcgtgtgcctggctaccggcttctaccccgaccatgtggaactgtcttggtgggtcaacggcaaagaggtgcacagcggcgtgtgtaccgacccccagccactgaaagaacagcccgccctgaacgacagccggtactgcctgagcagcagactgagagtgtccgccaccttctggcagaacccccggaaccacttcagatgccaggtgcagttctacggcctgagcgagaacgacgagtggacccaggacagagccaagcccgtgacccagatcgtgtctgccgaagcctggggcagagccgattgcgacgtgaagctggtggaaaagagcttcgagacagacaccaacctgaacttccagaacctgagcgtgatcggcttcagaatcctgctgctgaaagtggccggctttaacctgctgatgaccctgcggctgtggtccagc

SEQ ID NO: 34540 - DNA, 2703 bp, synthetic construct
  source 1..2703: mol_type = other DNA
atggccttaccagtgaccgccttgctcctgccgctggccttgctgctccacgccgccaggccggaagtgcagctggttgaatctggcggaggactggttcagcctggcggatctctgagactgtcttgtgccgccagcggcttcagcttcagcgacttttggatgagctgggtccgacaggcccctggcaaaggacttgaatgggtcgccacaatcagccaggccggcagcgagaaggactacgtggactctgtgaagggcagattcaccatcagccgggacaacgccaagaagtccctgtacctccagatgaacagcctgagagccgaggacaccgccgtgtactattgtgcctctggcgtgtacagcttcgactacagaggccagggcaccctggtcacagtctcttctggtaccggcggaggcggatctggcggcggaggtagcggtggcggaggatctgaattcgaactgcaaagcgtgctgacacagcctcctagcgcctctggaacacctggacagagagtgacaatcagctgctccggcagctccagcaacatcggcagcaactacgtgaactggtatcagcagctgcctggcacagcccctaaactgctgatctacggcgactaccagaggccaagcggcgtgccagatagattcagcggcagcaagtctggcacaagcgccagcctggctatctctggactgagaagcgaggacgaggccgactactactgtgccaccagagatgatagcctgagcggcagcgtggtgtttggcacaggcacaaagctgacagtgctgggcctcgaggacctgaagaacgtgttcccacctgaggtggccgtgttcgagcctagcgaggccgagatcagccacacccagaaagccaccctcgtgtgcctggctaccggcttctaccccgaccatgtggaactgtcttggtgggtcaacggcaaagaggtgcacagcggcgtgtgtaccgacccccagccactgaaagaacagcccgccctgaacgacagccggtactgcctgagcagcagactgagagtgtccgccaccttctggcagaacccccggaaccacttcagatgccaggtgcagttctacggcctgagcgagaacgacgagtggacccaggacagagccaagcccgtgacccagatcgtgtctgccgaagcctggggcagagccgattgcgacgtgaagctggtggaaaagagcttcgagacagacaccaacctgaacttccagaacctgagcgtgatcggcttcagaatcctgctgctgaaagtggccggctttaacctgctgatgaccctgcggctgtggtccagcagggccaagcgatctggatctggagcaacaaacttctcactactcaaacaagcaggtgacgtggaggagaatcccgggcctactagtatggactggatttggcgcatccttttccttgtcggcgctgctaccggcgcgcattccgggccccagctccagctgcaagagtctggacctggcctggtcaagcctagcgagacactgagcctgacctgtaccgtgtccggcgatagcatcagcagcggcgattactactggggctggatcagacagcctcctggcaaaggactggaatggatcggccacatctactacagcggcgtgacctactacaaccccagcctgaagtccagagtgaccatcagcgtggacaccagccggaaccagttctccctgaagctgtctagcgtgacagccgccgataccgccgtgtactactgcaccagagaggacagcagcaactggcggagtagaggccagggaacactggtcacagttagctctggatccggcggaggcggaagtggaggcggaggatctggcggcggaggctctttcgaagaagttcagctggttcagagcggagccgaagtgaagaagcctggcgagagcctgaagattagctgcaaaggcagcggctacggcttcaccagctattggatcggctgggtccgacagatgcctggcaaaggactggaatggatgggcatcattcaccccgacgacagcgacaccaagtacagccctagcttccagggccaagtgaccatcagcgccgacaagagcatcagcacagcctacctccagtggtcctctctgaaggccagcgataccgccatgtactactgcgccagcagctacctgagaggactgtggggcggctacttcgatttttggggccagggcacactggtcaccgttagttctacgcgtatccagaaccctgatcctgccgtgtaccagctgcgggatagcaagagcagcgacaagagcgtgtgtctgttcaccgacttcgacagccagaccaacgtgtcccagagcaaggactccgacgtgtacatcaccgataagtgcgtgctggacatgcggagcatggacttcaagagcaactccgccgtggcctggtccaacaagtccgatttcgcctgcgccaacgccttcaacaacagcattatccccgaggacacattcttcccaagccccgagagcagctgcggctttaccagcgagagctaccagcagggcgtgctgagcgccaccatcctgtacgagatcctgctgggcaaggccaccctgtacgccgtgctggtgtctgccctggtgctgatggctatggtcaagcggaaggacagccgggga

SEQ ID NO: 34541 - DNA, 2715 bp, synthetic construct
  source 1..2715: mol_type = other DNA
atggccttaccagtgaccgccttgctcctgccgctggccttgctgctccacgccgccaggccggaagtgcagctggttgaatctggcggaggactggttcagcctggcggatctctgagactgtcttgtgccgccagcggcttcagcttcagcgacttttggatgagctgggtccgacaggcccctggcaaaggacttgaatgggtcgccacaatcagccaggccggcagcgagaaggactacgtggactctgtgaagggcagattcaccatcagccgggacaacgccaagaagtccctgtacctccagatgaacagcctgagagccgaggacaccgccgtgtactattgtgcctctggcgtgtacagcttcgactacagaggccagggcaccctggtcacagtctcttctggtaccggcggaggcggatctggcggcggaggtagcggtggcggaggatctgaattcgaactgcaaagcgtgctgacacagcctcctagcgcctctggaacacctggacagagagtgacaatcagctgctccggcagctccagcaacatcggcagcaactacgtgaactggtatcagcagctgcctggcacagcccctaaactgctgatctacggcgactaccagaggccaagcggcgtgccagatagattcagcggcagcaagtctggcacaagcgccagcctggctatctctggactgagaagcgaggacgaggccgactactactgtgccaccagagatgatagcctgagcggcagcgtggtgtttggcacaggcacaaagctgacagtgctgggcctcgagatccagaaccctgatcctgccgtgtaccagctgcgggatagcaagagcagcgacaagagcgtgtgtctgttcaccgacttcgacagccagaccaacgtgtcccagagcaaggactccgacgtgtacatcaccgataagtgcgtgctggacatgcggagcatggacttcaagagcaactccgccgtggcctggtccaacaagtccgatttcgcctgcgccaacgccttcaacaacagcattatccccgaggacacattcttcccaagccccgagagcagctgcggctttaccagcgagagctaccagcagggcgtgctgagcgccaccatcctgtacgagatcctgctgggcaaggccaccctgtacgccgtgctggtgtctgccctggtgctgatggctatggtcaagcggaaggacagccggggacgcgccaagagaagcggatctggcgtgaagcagaccctgaatttcgacctgctgaagctggctggcgacgtggaatccaacccaggccctactagtatggactggatttggcgcatccttttccttgtcggcgctgctaccggcgcgcattccgggccccagctccagctgcaagagtctggacctggcctggtcaagcctagcgagacactgagcctgacctgtaccgtgtccggcgatagcatcagcagcggcgattactactggggctggatcagacagcctcctggcaaaggactggaatggatcggccacatctactacagcggcgtgacctactacaaccccagcctgaagtccagagtgaccatcagcgtggacaccagccggaaccagttctccctgaagctgtctagcgtgacagccgccgataccgccgtgtactactgcaccagagaggacagcagcaactggcggagtagaggccagggaacactggtcacagttagctctggatccggcggaggcggaagtggaggcggaggatctggcggcggaggctctttcgaagaagttcagctggttcagagcggagccgaagtgaagaagcctggcgagagcctgaagattagctgcaaaggcagcggctacggcttcaccagctattggatcggctgggtccgacagatgcctggcaaaggactggaatggatgggcatcattcaccccgacgacagcgacaccaagtacagccctagcttccagggccaagtgaccatcagcgccgacaagagcatcagcacagcctacctccagtggtcctctctgaaggccagcgataccgccatgtactactgcgccagcagctacctgagaggactgtggggcggctacttcgatttttggggccagggcacactggtcaccgttagttctacgcgtgaggacctgaagaacgtgttcccacctgaggtggccgtgttcgagcctagcgaggccgagatcagccacacccagaaagccaccctcgtgtgcctggctaccggcttctaccccgaccatgtggaactgtcttggtgggtcaacggcaaagaggtgcacagcggcgtgtgtaccgacccccagccactgaaagaacagcccgccctgaacgacagccggtactgcctgagcagcagactgagagtgtccgccaccttctggcagaacccccggaaccacttcagatgccaggtgcagttctacggcctgagcgagaacgacgagtggacccaggacagagccaagcccgtgacccagatcgtgtctgccgaagcctggggcagagccgattgcgacgtgaagctggtggaaaagagcttcgagacagacaccaacctgaacttccagaacctgagcgtgatcggcttcagaatcctgctgctgaaagtggccggctttaacctgctgatgaccctgcggctgtggtccagc

SEQ ID NO: 34542 - DNA, 2097 bp, synthetic construct
  source 1..2097: mol_type = other DNA
atggccttaccagtgaccgccttgctcctgccgctggccttgctgctccacgccgccaggccggaactgcaaagcgtgctgacacagcctcctagcgcctctggaacacctggacagagagtgacaatcagctgctccggcagctccagcaacatcggcagcaactacgtgaactggtatcagcagctgcctggcacagcccctaaactgctgatctacggcgactaccagaggccaagcggcgtgccagatagattcagcggcagcaagtctggcacaagcgccagcctggctatctctggactgagaagcgaggacgaggccgactactactgtgccaccagagatgatagcctgagcggcagcgtggtgtttggcacaggcacaaagctgacagtgctgggcctcgaggacctgaagaacgtgttcccacctgaggtggccgtgttcgagcctagcgaggccgagatcagccacacccagaaagccaccctcgtgtgcctggctaccggcttctaccccgaccatgtggaactgtcttggtgggtcaacggcaaagaggtgcacagcggcgtgtgtaccgacccccagccactgaaagaacagcccgccctgaacgacagccggtactgcctgagcagcagactgagagtgtccgccaccttctggcagaacccccggaaccacttcagatgccaggtgcagttctacggcctgagcgagaacgacgagtggacccaggacagagccaagcccgtgacccagatcgtgtctgccgaagcctggggcagagccgattgcgacgtgaagctggtggaaaagagcttcgagacagacaccaacctgaacttccagaacctgagcgtgatcggcttcagaatcctgctgctgaaagtggccggctttaacctgctgatgaccctgcggctgtggtccagcagggccaagcgatctggatctggagcaacaaacttctcactactcaaacaagcaggtgacgtggaggagaatcccgggcctactagtatggactggatttggcgcatccttttccttgtcggcgctgctaccggcgcccattccgggcccatggaccccgacctggaaatcagagccgccttcctgcggcagagaaacacagccctgagaacagaggtggccgagctggaacaagaggtgcagcggctggaaaacgaggtgtcccagtacgagacaagatacggccctctcggaggcggaaaaggatccggcggcggaggatctggcggaggcggatctgggggcggaggctctttcgaagaagttcagctggttcagagcggagccgaagtgaagaagcctggcgagagcctgaagattagctgcaaaggcagcggctacggcttcaccagctattggatcggctgggtccgacagatgcctggcaaaggactggaatggatgggcatcattcaccccgacgacagcgacaccaagtacagccctagcttccagggccaagtgaccatcagcgccgacaagagcatcagcacagcctacctccagtggtcctctctgaaggccagcgataccgccatgtactactgcgccagcagctacctgagaggactgtggggcggctacttcgatttttggggccagggcacactggtcaccgttagttctacgcgtatccagaaccctgatcctgccgtgtaccagctgcgggatagcaagagcagcgacaagagcgtgtgtctgttcaccgacttcgacagccagaccaacgtgtcccagagcaaggactccgacgtgtacatcaccgataagtgcgtgctggacatgcggagcatggacttcaagagcaactccgccgtggcctggtccaacaagtccgatttcgcctgcgccaacgccttcaacaacagcattatccccgaggacacattcttcccaagccccgagagcagctgcggctttaccagcgagagctaccagcagggcgtgctgagcgccaccatcctgtacgagatcctgctgggcaaggccaccctgtacgccgtgctggtgtctgccctggtgctgatggctatggtcaagcggaaggacagccgggga

SEQ ID NO: 34543 - DNA, 2109 bp, synthetic construct
  source 1..2109: mol_type = other DNA
atggccttaccagtgaccgccttgctcctgccgctggccttgctgctccacgccgccaggccggaactgcaaagcgtgctgacacagcctcctagcgcctctggaacacctggacagagagtgacaatcagctgctccggcagctccagcaacatcggcagcaactacgtgaactggtatcagcagctgcctggcacagcccctaaactgctgatctacggcgactaccagaggccaagcggcgtgccagatagattcagcggcagcaagtctggcacaagcgccagcctggctatctctggactgagaagcgaggacgaggccgactactactgtgccaccagagatgatagcctgagcggcagcgtggtgtttggcacaggcacaaagctgacagtgctgggcctcgagatccagaaccctgatcctgccgtgtaccagctgcgggatagcaagagcagcgacaagagcgtgtgtctgttcaccgacttcgacagccagaccaacgtgtcccagagcaaggactccgacgtgtacatcaccgataagtgcgtgctggacatgcggagcatggacttcaagagcaactccgccgtggcctggtccaacaagtccgatttcgcctgcgccaacgccttcaacaacagcattatccccgaggacacattcttcccaagccccgagagcagctgcggctttaccagcgagagctaccagcagggcgtgctgagcgccaccatcctgtacgagatcctgctgggcaaggccaccctgtacgccgtgctggtgtctgccctggtgctgatggctatggtcaagcggaaggacagccggggacgcgccaagagaagcggatctggcgtgaagcagaccctgaatttcgacctgctgaagctggctggcgacgtggaatccaacccaggccctactagtatggactggatttggcgcatccttttccttgtcggcgctgctaccggcgcccattccgggcccatggaccccgacctggaaatcagagccgccttcctgcggcagagaaacacagccctgagaacagaggtggccgagctggaacaagaggtgcagcggctggaaaacgaggtgtcccagtacgagacaagatacggccctctcggaggcggaaaaggatccggcggcggaggatctggcggaggcggatctgggggcggaggctctttcgaagaagttcagctggttcagagcggagccgaagtgaagaagcctggcgagagcctgaagattagctgcaaaggcagcggctacggcttcaccagctattggatcggctgggtccgacagatgcctggcaaaggactggaatggatgggcatcattcaccccgacgacagcgacaccaagtacagccctagcttccagggccaagtgaccatcagcgccgacaagagcatcagcacagcctacctccagtggtcctctctgaaggccagcgataccgccatgtactactgcgccagcagctacctgagaggactgtggggcggctacttcgatttttggggccagggcacactggtcaccgttagttctacgcgtgaggacctgaagaacgtgttcccacctgaggtggccgtgttcgagcctagcgaggccgagatcagccacacccagaaagccaccctcgtgtgcctggctaccggcttctaccccgaccatgtggaactgtcttggtgggtcaacggcaaagaggtgcacagcggcgtgtgtaccgacccccagccactgaaagaacagcccgccctgaacgacagccggtactgcctgagcagcagactgagagtgtccgccaccttctggcagaacccccggaaccacttcagatgccaggtgcagttctacggcctgagcgagaacgacgagtggacccaggacagagccaagcccgtgacccagatcgtgtctgccgaagcctggggcagagccgattgcgacgtgaagctggtggaaaagagcttcgagacagacaccaacctgaacttccagaacctgagcgtgatcggcttcagaatcctgctgctgaaagtggccggctttaacctgctgatgaccctgcggctgtggtccagc

SEQ ID NO: 34544 - DNA, 2028 bp, synthetic construct
  source 1..2028: mol_type = other DNA
atggccttaccagtgaccgccttgctcctgccgctggccttgctgctccacgccgccaggccggaactgcaaagcgtgctgacacagcctcctagcgcctctggaacacctggacagagagtgacaatcagctgctccggcagctccagcaacatcggcagcaactacgtgaactggtatcagcagctgcctggcacagcccctaaactgctgatctacggcgactaccagaggccaagcggcgtgccagatagattcagcggcagcaagtctggcacaagcgccagcctggctatctctggactgagaagcgaggacgaggccgactactactgtgccaccagagatgatagcctgagcggcagcgtggtgtttggcacaggcacaaagctgacagtgctgggcctcgaggacctgaagaacgtgttcccacctgaggtggccgtgttcgagcctagcgaggccgagatcagccacacccagaaagccaccctcgtgtgcctggctaccggcttctaccccgaccatgtggaactgtcttggtgggtcaacggcaaagaggtgcacagcggcgtgtgtaccgacccccagccactgaaagaacagcccgccctgaacgacagccggtactgcctgagcagcagactgagagtgtccgccaccttctggcagaacccccggaaccacttcagatgccaggtgcagttctacggcctgagcgagaacgacgagtggacccaggacagagccaagcccgtgacccagatcgtgtctgccgaagcctggggcagagccgattgcgacgtgaagctggtggaaaagagcttcgagacagacaccaacctgaacttccagaacctgagcgtgatcggcttcagaatcctgctgctgaaagtggccggctttaacctgctgatgaccctgcggctgtggtccagcagggccaagcgatctggatctggagcaacaaacttctcactactcaaacaagcaggtgacgtggaggagaatcccgggcctactagtatggactggatttggcgcatccttttccttgtcggcgctgctaccggcgcccattccgggcccgaagttgctgccctcgagaaggaggtagcagctttggaaaaagaagtcgcagcccttgagaaagaagttgcggctctggagaagggatccggcggcggaggatctggcggaggcggatctgggggcggaggctctttcgaagaagttcagctggttcagagcggagccgaagtgaagaagcctggcgagagcctgaagattagctgcaaaggcagcggctacggcttcaccagctattggatcggctgggtccgacagatgcctggcaaaggactggaatggatgggcatcattcaccccgacgacagcgacaccaagtacagccctagcttccagggccaagtgaccatcagcgccgacaagagcatcagcacagcctacctccagtggtcctctctgaaggccagcgataccgccatgtactactgcgccagcagctacctgagaggactgtggggcggctacttcgatttttggggccagggcacactggtcaccgttagttctacgcgtatccagaaccctgatcctgccgtgtaccagctgcgggatagcaagagcagcgacaagagcgtgtgtctgttcaccgacttcgacagccagaccaacgtgtcccagagcaaggactccgacgtgtacatcaccgataagtgcgtgctggacatgcggagcatggacttcaagagcaactccgccgtggcctggtccaacaagtccgatttcgcctgcgccaacgccttcaacaacagcattatccccgaggacacattcttcccaagccccgagagcagctgcggctttaccagcgagagctaccagcagggcgtgctgagcgccaccatcctgtacgagatcctgctgggcaaggccaccctgtacgccgtgctggtgtctgccctggtgctgatggctatggtcaagcggaaggacagccgggga

SEQ ID NO: 34545 - DNA, 2040 bp, synthetic construct
  source 1..2040: mol_type = other DNA
atggccttaccagtgaccgccttgctcctgccgctggccttgctgctccacgccgccaggccggaactgcaaagcgtgctgacacagcctcctagcgcctctggaacacctggacagagagtgacaatcagctgctccggcagctccagcaacatcggcagcaactacgtgaactggtatcagcagctgcctggcacagcccctaaactgctgatctacggcgactaccagaggccaagcggcgtgccagatagattcagcggcagcaagtctggcacaagcgccagcctggctatctctggactgagaagcgaggacgaggccgactactactgtgccaccagagatgatagcctgagcggcagcgtggtgtttggcacaggcacaaagctgacagtgctgggcctcgagatccagaaccctgatcctgccgtgtaccagctgcgggatagcaagagcagcgacaagagcgtgtgtctgttcaccgacttcgacagccagaccaacgtgtcccagagcaaggactccgacgtgtacatcaccgataagtgcgtgctggacatgcggagcatggacttcaagagcaactccgccgtggcctggtccaacaagtccgatttcgcctgcgccaacgccttcaacaacagcattatccccgaggacacattcttcccaagccccgagagcagctgcggctttaccagcgagagctaccagcagggcgtgctgagcgccaccatcctgtacgagatcctgctgggcaaggccaccctgtacgccgtgctggtgtctgccctggtgctgatggctatggtcaagcggaaggacagccggggacgcgccaagagaagcggatctggcgtgaagcagaccctgaatttcgacctgctgaagctggctggcgacgtggaatccaacccaggccctactagtatggactggatttggcgcatccttttccttgtcggcgctgctaccggcgcccattccgggcccgaagttgctgccctcgagaaggaggtagcagctttggaaaaagaagtcgcagcccttgagaaagaagttgcggctctggagaagggatccggcggcggaggatctggcggaggcggatctgggggcggaggctctttcgaagaagttcagctggttcagagcggagccgaagtgaagaagcctggcgagagcctgaagattagctgcaaaggcagcggctacggcttcaccagctattggatcggctgggtccgacagatgcctggcaaaggactggaatggatgggcatcattcaccccgacgacagcgacaccaagtacagccctagcttccagggccaagtgaccatcagcgccgacaagagcatcagcacagcctacctccagtggtcctctctgaaggccagcgataccgccatgtactactgcgccagcagctacctgagaggactgtggggcggctacttcgatttttggggccagggcacactggtcaccgttagttctacgcgtgaggacctgaagaacgtgttcccacctgaggtggccgtgttcgagcctagcgaggccgagatcagccacacccagaaagccaccctcgtgtgcctggctaccggcttctaccccgaccatgtggaactgtcttggtgggtcaacggcaaagaggtgcacagcggcgtgtgtaccgacccccagccactgaaagaacagcccgccctgaacgacagccggtactgcctgagcagcagactgagagtgtccgccaccttctggcagaacccccggaaccacttcagatgccaggtgcagttctacggcctgagcgagaacgacgagtggacccaggacagagccaagcccgtgacccagatcgtgtctgccgaagcctggggcagagccgattgcgacgtgaagctggtggaaaagagcttcgagacagacaccaacctgaacttccagaacctgagcgtgatcggcttcagaatcctgctgctgaaagtggccggctttaacctgctgatgaccctgcggctgtggtccagc

SEQ ID NO: 34546 - DNA, 2298 bp, synthetic construct
  source 1..2298: mol_type = other DNA
atggccttaccagtgaccgccttgctcctgccgctggccttgctgctccacgccgccaggccggaactgcaaagcgtgctgacacagcctcctagcgcctctggaacacctggacagagagtgacaatcagctgctccggcagctccagcaacatcggcagcaactacgtgaactggtatcagcagctgcctggcacagcccctaaactgctgatctacggcgactaccagaggccaagcggcgtgccagatagattcagcggcagcaagtctggcacaagcgccagcctggctatctctggactgagaagcgaggacgaggccgactactactgtgccaccagagatgatagcctgagcggcagcgtggtgtttggcacaggcacaaagctgacagtgctgggcctcgaggacctgaagaacgtgttcccacctgaggtggccgtgttcgagcctagcgaggccgagatcagccacacccagaaagccaccctcgtgtgcctggctaccggcttctaccccgaccatgtggaactgtcttggtgggtcaacggcaaagaggtgcacagcggcgtgtgtaccgacccccagccactgaaagaacagcccgccctgaacgacagccggtactgcctgagcagcagactgagagtgtccgccaccttctggcagaacccccggaaccacttcagatgccaggtgcagttctacggcctgagcgagaacgacgagtggacccaggacagagccaagcccgtgacccagatcgtgtctgccgaagcctggggcagagccgattgcgacgtgaagctggtggaaaagagcttcgagacagacaccaacctgaacttccagaacctgagcgtgatcggcttcagaatcctgctgctgaaagtggccggctttaacctgctgatgaccctgcggctgtggtccagcagggccaagcgatctggatctggagcaacaaacttctcactactcaaacaagcaggtgacgtggaggagaatcccgggcctactagtatggactggatttggcgcatccttttccttgtcggcgctgctaccggcgcccattccgggccccaggttcagctgcaagagtctggcggaggacttgctcaagctggcggaagcctgagactgtcttgtgccgcctctggcagaaccttcagcatgggctggtttagacaggcccctggcaaagagagagagttcgtcgccgccatcacatacagcggcggcagcccttactacgcctcttctgtcagaggccggttcaccatcagccgggacaacgccaagaacaccgtgtacctccagatgaacagcctgaagccagaggacaccgccgtgtactactgtgccgccaatccaacctacggcagcgactggaatgccgagaattggggccagggcacccaagtgacagtgtctagtggatccggcggcggaggatctggcggaggcggatctgggggcggaggctctttcgaagaagttcagctggttcagagcggagccgaagtgaagaagcctggcgagagcctgaagattagctgcaaaggcagcggctacggcttcaccagctattggatcggctgggtccgacagatgcctggcaaaggactggaatggatgggcatcattcaccccgacgacagcgacaccaagtacagccctagcttccagggccaagtgaccatcagcgccgacaagagcatcagcacagcctacctccagtggtcctctctgaaggccagcgataccgccatgtactactgcgccagcagctacctgagaggactgtggggcggctacttcgatttttggggccagggcacactggtcaccgttagttctacgcgtatccagaaccctgatcctgccgtgtaccagctgcgggatagcaagagcagcgacaagagcgtgtgtctgttcaccgacttcgacagccagaccaacgtgtcccagagcaaggactccgacgtgtacatcaccgataagtgcgtgctggacatgcggagcatggacttcaagagcaactccgccgtggcctggtccaacaagtccgatttcgcctgcgccaacgccttcaacaacagcattatccccgaggacacattcttcccaagccccgagagcagctgcggctttaccagcgagagctaccagcagggcgtgctgagcgccaccatcctgtacgagatcctgctgggcaaggccaccctgtacgccgtgctggtgtctgccctggtgctgatggctatggtcaagcggaaggacagccgggga

SEQ ID NO: 34547 - DNA, 2310 bp, synthetic construct
  source 1..2310: mol_type = other DNA
atggccttaccagtgaccgccttgctcctgccgctggccttgctgctccacgccgccaggccggaactgcaaagcgtgctgacacagcctcctagcgcctctggaacacctggacagagagtgacaatcagctgctccggcagctccagcaacatcggcagcaactacgtgaactggtatcagcagctgcctggcacagcccctaaactgctgatctacggcgactaccagaggccaagcggcgtgccagatagattcagcggcagcaagtctggcacaagcgccagcctggctatctctggactgagaagcgaggacgaggccgactactactgtgccaccagagatgatagcctgagcggcagcgtggtgtttggcacaggcacaaagctgacagtgctgggcctcgagatccagaaccctgatcctgccgtgtaccagctgcgggatagcaagagcagcgacaagagcgtgtgtctgttcaccgacttcgacagccagaccaacgtgtcccagagcaaggactccgacgtgtacatcaccgataagtgcgtgctggacatgcggagcatggacttcaagagcaactccgccgtggcctggtccaacaagtccgatttcgcctgcgccaacgccttcaacaacagcattatccccgaggacacattcttcccaagccccgagagcagctgcggctttaccagcgagagctaccagcagggcgtgctgagcgccaccatcctgtacgagatcctgctgggcaaggccaccctgtacgccgtgctggtgtctgccctggtgctgatggctatggtcaagcggaaggacagccggggacgcgccaagagaagcggatctggcgtgaagcagaccctgaatttcgacctgctgaagctggctggcgacgtggaatccaacccaggccctactagtatggactggatttggcgcatccttttccttgtcggcgctgctaccggcgcccattccgggccccaggttcagctgcaagagtctggcggaggacttgctcaagctggcggaagcctgagactgtcttgtgccgcctctggcagaaccttcagcatgggctggtttagacaggcccctggcaaagagagagagttcgtcgccgccatcacatacagcggcggcagcccttactacgcctcttctgtcagaggccggttcaccatcagccgggacaacgccaagaacaccgtgtacctccagatgaacagcctgaagccagaggacaccgccgtgtactactgtgccgccaatccaacctacggcagcgactggaatgccgagaattggggccagggcacccaagtgacagtgtctagtggatccggcggcggaggatctggcggaggcggatctgggggcggaggctctttcgaagaagttcagctggttcagagcggagccgaagtgaagaagcctggcgagagcctgaagattagctgcaaaggcagcggctacggcttcaccagctattggatcggctgggtccgacagatgcctggcaaaggactggaatggatgggcatcattcaccccgacgacagcgacaccaagtacagccctagcttccagggccaagtgaccatcagcgccgacaagagcatcagcacagcctacctccagtggtcctctctgaaggccagcgataccgccatgtactactgcgccagcagctacctgagaggactgtggggcggctacttcgatttttggggccagggcacactggtcaccgttagttctacgcgtgaggacctgaagaacgtgttcccacctgaggtggccgtgttcgagcctagcgaggccgagatcagccacacccagaaagccaccctcgtgtgcctggctaccggcttctaccccgaccatgtggaactgtcttggtgggtcaacggcaaagaggtgcacagcggcgtgtgtaccgacccccagccactgaaagaacagcccgccctgaacgacagccggtactgcctgagcagcagactgagagtgtccgccaccttctggcagaacccccggaaccacttcagatgccaggtgcagttctacggcctgagcgagaacgacgagtggacccaggacagagccaagcccgtgacccagatcgtgtctgccgaagcctggggcagagccgattgcgacgtgaagctggtggaaaagagcttcgagacagacaccaacctgaacttccagaacctgagcgtgatcggcttcagaatcctgctgctgaaagtggccggctttaacctgctgatgaccctgcggctgtggtccagc

SEQ ID NO: 34548 - DNA, 2316 bp, synthetic construct
  source 1..2316: mol_type = other DNA
atggccttaccagtgaccgccttgctcctgccgctggccttgctgctccacgccgccaggccggaagtgcaactggtggaatctggaggctctctggtgcagccagggggaagcctgagactgtcttgtgccgcttccggcttcaccttcgacgactacgccatgagctgggtgcgccaggtgccaggcaaaggcctggaatgggtgtccagcatcaactggagcggcacccacaccgattacgccgactccgtgaaaggcagattcacaatcagcagaaacaacgccaacaataccctgtacctgcagatgaactccctgaagtctgaggatacagcagtgtattattgcgccaagaactggcgggacgccggcaccacttggtttgagaaaagcggctctgccggacagggaacccaagtgacagtgtcctccggtaccggcggaggcggatctggcggcggaggtagcggtggcggaggatctgaattcgaactgcaaagcgtgctgacacagcctcctagcgcctctggaacacctggacagagagtgacaatcagctgctccggcagctccagcaacatcggcagcaactacgtgaactggtatcagcagctgcctggcacagcccctaaactgctgatctacggcgactaccagaggccaagcggcgtgccagatagattcagcggcagcaagtctggcacaagcgccagcctggctatctctggactgagaagcgaggacgaggccgactactactgtgccaccagagatgatagcctgagcggcagcgtggtgtttggcacaggcacaaagctgacagtgctgggcctcgaggacctgaagaacgtgttcccacctgaggtggccgtgttcgagcctagcgaggccgagatcagccacacccagaaagccaccctcgtgtgcctggctaccggcttctaccccgaccatgtggaactgtcttggtgggtcaacggcaaagaggtgcacagcggcgtgtgtaccgacccccagccactgaaagaacagcccgccctgaacgacagccggtactgcctgagcagcagactgagagtgtccgccaccttctggcagaacccccggaaccacttcagatgccaggtgcagttctacggcctgagcgagaacgacgagtggacccaggacagagccaagcccgtgacccagatcgtgtctgccgaagcctggggcagagccgattgcgacgtgaagctggtggaaaagagcttcgagacagacaccaacctgaacttccagaacctgagcgtgatcggcttcagaatcctgctgctgaaagtggccggctttaacctgctgatgaccctgcggctgtggtccagcagggccaagcgatctggatctggagcaacaaacttctcactactcaaacaagcaggtgacgtggaggagaatcccgggcctactagtatggactggatttggcgcatccttttccttgtcggcgctgctaccggcgcgcattccttcgaagaagttcagctggttcagagcggagccgaagtgaagaagcctggcgagagcctgaagattagctgcaaaggcagcggctacggcttcaccagctattggatcggctgggtccgacagatgcctggcaaaggactggaatggatgggcatcattcaccccgacgacagcgacaccaagtacagccctagcttccagggccaagtgaccatcagcgccgacaagagcatcagcacagcctacctccagtggtcctctctgaaggccagcgataccgccatgtactactgcgccagcagctacctgagaggactgtggggcggctacttcgatttttggggccagggcacactggtcaccgttagttctacgcgtatccagaaccctgatcctgccgtgtaccagctgcgggatagcaagagcagcgacaagagcgtgtgtctgttcaccgacttcgacagccagaccaacgtgtcccagagcaaggactccgacgtgtacatcaccgataagtgcgtgctggacatgcggagcatggacttcaagagcaactccgccgtggcctggtccaacaagtccgatttcgcctgcgccaacgccttcaacaacagcattatccccgaggacacattcttcccaagccccgagagcagctgcggctttaccagcgagagctaccagcagggcgtgctgagcgccaccatcctgtacgagatcctgctgggcaaggccaccctgtacgccgtgctggtgtctgccctggtgctgatggctatggtcaagcggaaggacagccgggga

SEQ ID NO: 34549 - DNA, 2328 bp, synthetic construct
  source 1..2328: mol_type = other DNA
atggccttaccagtgaccgccttgctcctgccgctggccttgctgctccacgccgccaggccggaagtgcaactggtggaatctggaggctctctggtgcagccagggggaagcctgagactgtcttgtgccgcttccggcttcaccttcgacgactacgccatgagctgggtgcgccaggtgccaggcaaaggcctggaatgggtgtccagcatcaactggagcggcacccacaccgattacgccgactccgtgaaaggcagattcacaatcagcagaaacaacgccaacaataccctgtacctgcagatgaactccctgaagtctgaggatacagcagtgtattattgcgccaagaactggcgggacgccggcaccacttggtttgagaaaagcggctctgccggacagggaacccaagtgacagtgtcctccggtaccggcggaggcggatctggcggcggaggtagcggtggcggaggatctgaattcgaactgcaaagcgtgctgacacagcctcctagcgcctctggaacacctggacagagagtgacaatcagctgctccggcagctccagcaacatcggcagcaactacgtgaactggtatcagcagctgcctggcacagcccctaaactgctgatctacggcgactaccagaggccaagcggcgtgccagatagattcagcggcagcaagtctggcacaagcgccagcctggctatctctggactgagaagcgaggacgaggccgactactactgtgccaccagagatgatagcctgagcggcagcgtggtgtttggcacaggcacaaagctgacagtgctgggcctcgagatccagaaccctgatcctgccgtgtaccagctgcgggatagcaagagcagcgacaagagcgtgtgtctgttcaccgacttcgacagccagaccaacgtgtcccagagcaaggactccgacgtgtacatcaccgataagtgcgtgctggacatgcggagcatggacttcaagagcaactccgccgtggcctggtccaacaagtccgatttcgcctgcgccaacgccttcaacaacagcattatccccgaggacacattcttcccaagccccgagagcagctgcggctttaccagcgagagctaccagcagggcgtgctgagcgccaccatcctgtacgagatcctgctgggcaaggccaccctgtacgccgtgctggtgtctgccctggtgctgatggctatggtcaagcggaaggacagccggggacgcgccaagagaagcggatctggcgtgaagcagaccctgaatttcgacctgctgaagctggctggcgacgtggaatccaacccaggccctactagtatggactggatttggcgcatccttttccttgtcggcgctgctaccggcgcgcattccttcgaagaagttcagctggttcagagcggagccgaagtgaagaagcctggcgagagcctgaagattagctgcaaaggcagcggctacggcttcaccagctattggatcggctgggtccgacagatgcctggcaaaggactggaatggatgggcatcattcaccccgacgacagcgacaccaagtacagccctagcttccagggccaagtgaccatcagcgccgacaagagcatcagcacagcctacctccagtggtcctctctgaaggccagcgataccgccatgtactactgcgccagcagctacctgagaggactgtggggcggctacttcgatttttggggccagggcacactggtcaccgttagttctacgcgtgaggacctgaagaacgtgttcccacctgaggtggccgtgttcgagcctagcgaggccgagatcagccacacccagaaagccaccctcgtgtgcctggctaccggcttctaccccgaccatgtggaactgtcttggtgggtcaacggcaaagaggtgcacagcggcgtgtgtaccgacccccagccactgaaagaacagcccgccctgaacgacagccggtactgcctgagcagcagactgagagtgtccgccaccttctggcagaacccccggaaccacttcagatgccaggtgcagttctacggcctgagcgagaacgacgagtggacccaggacagagccaagcccgtgacccagatcgtgtctgccgaagcctggggcagagccgattgcgacgtgaagctggtggaaaagagcttcgagacagacaccaacctgaacttccagaacctgagcgtgatcggcttcagaatcctgctgctgaaagtggccggctttaacctgctgatgaccctgcggctgtggtccagc

SEQ ID NO: 34550 - DNA, 2310 bp, synthetic construct
  source 1..2310: mol_type = other DNA
atggccttaccagtgaccgccttgctcctgccgctggccttgctgctccacgccgccaggccggaagttcagctgcttgagtctggcggaggactggttcaacctggcggaagcctgagactgtcttgtgccgccagcggcttcatcttcagcagctacgccatgagctgggtccgacaggctcctggaaagggccaagaatgggtttccggcgttagcggcacaggcgtgaacacctactacgccgatagcgtgaagggcagattcaccatcagccgggacaacagcaagaacaccctgtacctccagatgaacagcctgagagccgaggacaccgccgtgtactattgtgcctctggcaaaggctgggacagcggctcttggtacgaggactatagaggccagggcaccctggtcacagtttcttcaggtaccggcggaggcggatctggcggcggaggtagcggtggcggaggatctgaattcgaactgcaaagcgtgctgacacagcctcctagcgcctctggaacacctggacagagagtgacaatcagctgctccggcagctccagcaacatcggcagcaactacgtgaactggtatcagcagctgcctggcacagcccctaaactgctgatctacggcgactaccagaggccaagcggcgtgccagatagattcagcggcagcaagtctggcacaagcgccagcctggctatctctggactgagaagcgaggacgaggccgactactactgtgccaccagagatgatagcctgagcggcagcgtggtgtttggcacaggcacaaagctgacagtgctgggcctcgaggacctgaagaacgtgttcccacctgaggtggccgtgttcgagcctagcgaggccgagatcagccacacccagaaagccaccctcgtgtgcctggctaccggcttctaccccgaccatgtggaactgtcttggtgggtcaacggcaaagaggtgcacagcggcgtgtgtaccgacccccagccactgaaagaacagcccgccctgaacgacagccggtactgcctgagcagcagactgagagtgtccgccaccttctggcagaacccccggaaccacttcagatgccaggtgcagttctacggcctgagcgagaacgacgagtggacccaggacagagccaagcccgtgacccagatcgtgtctgccgaagcctggggcagagccgattgcgacgtgaagctggtggaaaagagcttcgagacagacaccaacctgaacttccagaacctgagcgtgatcggcttcagaatcctgctgctgaaagtggccggctttaacctgctgatgaccctgcggctgtggtccagcagggccaagcgatctggatctggagcaacaaacttctcactactcaaacaagcaggtgacgtggaggagaatcccgggcctactagtatggactggatttggcgcatccttttccttgtcggcgctgctaccggcgcgcattccttcgaagaagttcagctggttcagagcggagccgaagtgaagaagcctggcgagagcctgaagattagctgcaaaggcagcggctacggcttcaccagctattggatcggctgggtccgacagatgcctggcaaaggactggaatggatgggcatcattcaccccgacgacagcgacaccaagtacagccctagcttccagggccaagtgaccatcagcgccgacaagagcatcagcacagcctacctccagtggtcctctctgaaggccagcgataccgccatgtactactgcgccagcagctacctgagaggactgtggggcggctacttcgatttttggggccagggcacactggtcaccgttagttctacgcgtatccagaaccctgatcctgccgtgtaccagctgcgggatagcaagagcagcgacaagagcgtgtgtctgttcaccgacttcgacagccagaccaacgtgtcccagagcaaggactccgacgtgtacatcaccgataagtgcgtgctggacatgcggagcatggacttcaagagcaactccgccgtggcctggtccaacaagtccgatttcgcctgcgccaacgccttcaacaacagcattatccccgaggacacattcttcccaagccccgagagcagctgcggctttaccagcgagagctaccagcagggcgtgctgagcgccaccatcctgtacgagatcctgctgggcaaggccaccctgtacgccgtgctggtgtctgccctggtgctgatggctatggtcaagcggaaggacagccgggga

SEQ ID NO: 34551 - DNA, 2322 bp, synthetic construct
  source 1..2322: mol_type = other DNA
atggccttaccagtgaccgccttgctcctgccgctggccttgctgctccacgccgccaggccggaagttcagctgcttgagtctggcggaggactggttcaacctggcggaagcctgagactgtcttgtgccgccagcggcttcatcttcagcagctacgccatgagctgggtccgacaggctcctggaaagggccaagaatgggtttccggcgttagcggcacaggcgtgaacacctactacgccgatagcgtgaagggcagattcaccatcagccgggacaacagcaagaacaccctgtacctccagatgaacagcctgagagccgaggacaccgccgtgtactattgtgcctctggcaaaggctgggacagcggctcttggtacgaggactatagaggccagggcaccctggtcacagtttcttcaggtaccggcggaggcggatctggcggcggaggtagcggtggcggaggatctgaattcgaactgcaaagcgtgctgacacagcctcctagcgcctctggaacacctggacagagagtgacaatcagctgctccggcagctccagcaacatcggcagcaactacgtgaactggtatcagcagctgcctggcacagcccctaaactgctgatctacggcgactaccagaggccaagcggcgtgccagatagattcagcggcagcaagtctggcacaagcgccagcctggctatctctggactgagaagcgaggacgaggccgactactactgtgccaccagagatgatagcctgagcggcagcgtggtgtttggcacaggcacaaagctgacagtgctgggcctcgagatccagaaccctgatcctgccgtgtaccagctgcgggatagcaagagcagcgacaagagcgtgtgtctgttcaccgacttcgacagccagaccaacgtgtcccagagcaaggactccgacgtgtacatcaccgataagtgcgtgctggacatgcggagcatggacttcaagagcaactccgccgtggcctggtccaacaagtccgatttcgcctgcgccaacgccttcaacaacagcattatccccgaggacacattcttcccaagccccgagagcagctgcggctttaccagcgagagctaccagcagggcgtgctgagcgccaccatcctgtacgagatcctgctgggcaaggccaccctgtacgccgtgctggtgtctgccctggtgctgatggctatggtcaagcggaaggacagccggggacgcgccaagagaagcggatctggcgtgaagcagaccctgaatttcgacctgctgaagctggctggcgacgtggaatccaacccaggccctactagtatggactggatttggcgcatccttttccttgtcggcgctgctaccggcgcgcattccttcgaagaagttcagctggttcagagcggagccgaagtgaagaagcctggcgagagcctgaagattagctgcaaaggcagcggctacggcttcaccagctattggatcggctgggtccgacagatgcctggcaaaggactggaatggatgggcatcattcaccccgacgacagcgacaccaagtacagccctagcttccagggccaagtgaccatcagcgccgacaagagcatcagcacagcctacctccagtggtcctctctgaaggccagcgataccgccatgtactactgcgccagcagctacctgagaggactgtggggcggctacttcgatttttggggccagggcacactggtcaccgttagttctacgcgtgaggacctgaagaacgtgttcccacctgaggtggccgtgttcgagcctagcgaggccgagatcagccacacccagaaagccaccctcgtgtgcctggctaccggcttctaccccgaccatgtggaactgtcttggtgggtcaacggcaaagaggtgcacagcggcgtgtgtaccgacccccagccactgaaagaacagcccgccctgaacgacagccggtactgcctgagcagcagactgagagtgtccgccaccttctggcagaacccccggaaccacttcagatgccaggtgcagttctacggcctgagcgagaacgacgagtggacccaggacagagccaagcccgtgacccagatcgtgtctgccgaagcctggggcagagccgattgcgacgtgaagctggtggaaaagagcttcgagacagacaccaacctgaacttccagaacctgagcgtgatcggcttcagaatcctgctgctgaaagtggccggctttaacctgctgatgaccctgcggctgtggtccagc

SEQ ID NO: 34552 - DNA, 2214 bp, synthetic construct
  source 1..2214: mol_type = other DNA
atggccttaccagtgaccgccttgctcctgccgctggccttgctgctccacgccgccaggccgatgctgcccgctcctaagaatctggtggtgtccagaatcaccgaggacagcgccagactgtcttggacagctcctgatgccgccttcgacagcttccccatccggtacatcgagacactgatctggggcgaagccatctggctggatgtgcctggaagcgagagaagctacgacctgaccggactgaagcctggcacagagtatgccgtggtcatcaccggcgtgaaaggcggcagattctctagccctctggtggcctctttcaccaccggtaccggcggaggcggatctggcggcggaggtagcggtggcggaggatctgaattcgaactgcaaagcgtgctgacacagcctcctagcgcctctggaacacctggacagagagtgacaatcagctgctccggcagctccagcaacatcggcagcaactacgtgaactggtatcagcagctgcctggcacagcccctaaactgctgatctacggcgactaccagaggccaagcggcgtgccagatagattcagcggcagcaagtctggcacaagcgccagcctggctatctctggactgagaagcgaggacgaggccgactactactgtgccaccagagatgatagcctgagcggcagcgtggtgtttggcacaggcacaaagctgacagtgctgggcctcgaggacctgaagaacgtgttcccacctgaggtggccgtgttcgagcctagcgaggccgagatcagccacacccagaaagccaccctcgtgtgcctggctaccggcttctaccccgaccatgtggaactgtcttggtgggtcaacggcaaagaggtgcacagcggcgtgtgtaccgacccccagccactgaaagaacagcccgccctgaacgacagccggtactgcctgagcagcagactgagagtgtccgccaccttctggcagaacccccggaaccacttcagatgccaggtgcagttctacggcctgagcgagaacgacgagtggacccaggacagagccaagcccgtgacccagatcgtgtctgccgaagcctggggcagagccgattgcgacgtgaagctggtggaaaagagcttcgagacagacaccaacctgaacttccagaacctgagcgtgatcggcttcagaatcctgctgctgaaagtggccggctttaacctgctgatgaccctgcggctgtggtccagcagggccaagcgatctggatctggagcaacaaacttctcactactcaaacaagcaggtgacgtggaggagaatcccgggcctactagtatggactggatttggcgcatccttttccttgtcggcgctgctaccggcgcgcattccttcgaagaagttcagctggttcagagcggagccgaagtgaagaagcctggcgagagcctgaagattagctgcaaaggcagcggctacggcttcaccagctattggatcggctgggtccgacagatgcctggcaaaggactggaatggatgggcatcattcaccccgacgacagcgacaccaagtacagccctagcttccagggccaagtgaccatcagcgccgacaagagcatcagcacagcctacctccagtggtcctctctgaaggccagcgataccgccatgtactactgcgccagcagctacctgagaggactgtggggcggctacttcgatttttggggccagggcacactggtcaccgttagttctacgcgtatccagaaccctgatcctgccgtgtaccagctgcgggatagcaagagcagcgacaagagcgtgtgtctgttcaccgacttcgacagccagaccaacgtgtcccagagcaaggactccgacgtgtacatcaccgataagtgcgtgctggacatgcggagcatggacttcaagagcaactccgccgtggcctggtccaacaagtccgatttcgcctgcgccaacgccttcaacaacagcattatccccgaggacacattcttcccaagccccgagagcagctgcggctttaccagcgagagctaccagcagggcgtgctgagcgccaccatcctgtacgagatcctgctgggcaaggccaccctgtacgccgtgctggtgtctgccctggtgctgatggctatggtcaagcggaaggacagccgggga

SEQ ID NO: 34553 - DNA, 2226 bp, synthetic construct
  source 1..2226: mol_type = other DNA
atggccttaccagtgaccgccttgctcctgccgctggccttgctgctccacgccgccaggccgatgctgcccgctcctaagaatctggtggtgtccagaatcaccgaggacagcgccagactgtcttggacagctcctgatgccgccttcgacagcttccccatccggtacatcgagacactgatctggggcgaagccatctggctggatgtgcctggaagcgagagaagctacgacctgaccggactgaagcctggcacagagtatgccgtggtcatcaccggcgtgaaaggcggcagattctctagccctctggtggcctctttcaccaccggtaccggcggaggcggatctggcggcggaggtagcggtggcggaggatctgaattcgaactgcaaagcgtgctgacacagcctcctagcgcctctggaacacctggacagagagtgacaatcagctgctccggcagctccagcaacatcggcagcaactacgtgaactggtatcagcagctgcctggcacagcccctaaactgctgatctacggcgactaccagaggccaagcggcgtgccagatagattcagcggcagcaagtctggcacaagcgccagcctggctatctctggactgagaagcgaggacgaggccgactactactgtgccaccagagatgatagcctgagcggcagcgtggtgtttggcacaggcacaaagctgacagtgctgggcctcgagatccagaaccctgatcctgccgtgtaccagctgcgggatagcaagagcagcgacaagagcgtgtgtctgttcaccgacttcgacagccagaccaacgtgtcccagagcaaggactccgacgtgtacatcaccgataagtgcgtgctggacatgcggagcatggacttcaagagcaactccgccgtggcctggtccaacaagtccgatttcgcctgcgccaacgccttcaacaacagcattatccccgaggacacattcttcccaagccccgagagcagctgcggctttaccagcgagagctaccagcagggcgtgctgagcgccaccatcctgtacgagatcctgctgggcaaggccaccctgtacgccgtgctggtgtctgccctggtgctgatggctatggtcaagcggaaggacagccggggacgcgccaagagaagcggatctggcgtgaagcagaccctgaatttcgacctgctgaagctggctggcgacgtggaatccaacccaggccctactagtatggactggatttggcgcatccttttccttgtcggcgctgctaccggcgcgcattccttcgaagaagttcagctggttcagagcggagccgaagtgaagaagcctggcgagagcctgaagattagctgcaaaggcagcggctacggcttcaccagctattggatcggctgggtccgacagatgcctggcaaaggactggaatggatgggcatcattcaccccgacgacagcgacaccaagtacagccctagcttccagggccaagtgaccatcagcgccgacaagagcatcagcacagcctacctccagtggtcctctctgaaggccagcgataccgccatgtactactgcgccagcagctacctgagaggactgtggggcggctacttcgatttttggggccagggcacactggtcaccgttagttctacgcgtgaggacctgaagaacgtgttcccacctgaggtggccgtgttcgagcctagcgaggccgagatcagccacacccagaaagccaccctcgtgtgcctggctaccggcttctaccccgaccatgtggaactgtcttggtgggtcaacggcaaagaggtgcacagcggcgtgtgtaccgacccccagccactgaaagaacagcccgccctgaacgacagccggtactgcctgagcagcagactgagagtgtccgccaccttctggcagaacccccggaaccacttcagatgccaggtgcagttctacggcctgagcgagaacgacgagtggacccaggacagagccaagcccgtgacccagatcgtgtctgccgaagcctggggcagagccgattgcgacgtgaagctggtggaaaagagcttcgagacagacaccaacctgaacttccagaacctgagcgtgatcggcttcagaatcctgctgctgaaagtggccggctttaacctgctgatgaccctgcggctgtggtccagc

SEQ ID NO: 34554 - DNA, 2301 bp, synthetic construct
  source 1..2301: mol_type = other DNA
atggccttaccagtgaccgccttgctcctgccgctggccttgctgctccacgccgccaggccggaggtgcagctggttgaatctggcggaggactggttcagcctggcggatctctgagactgtcttgtgccgccagcggcttcaacatcaaggatacctgtatcggctgggttcgcagagcccctggcaaagaggaagaactggtcgccaaaatctgcaagtacagcggccacaccagatacgccgacagcgtgaagggcagattcaccatcagcgccgacaccagcaagaacaccgcctacctccagatgaacagcctgagagccgaggacaccgccgtgtactattgtgccgctgtgtccgtcagagatgggcactacaattactggggccagggcaccaccgtgaccgtttcttcaggtaccggcggaggcggatctggcggcggaggtagcggtggcggaggatctgaattcgaactgcaaagcgtgctgacacagcctcctagcgcctctggaacacctggacagagagtgacaatcagctgctccggcagctccagcaacatcggcagcaactacgtgaactggtatcagcagctgcctggcacagcccctaaactgctgatctacggcgactaccagaggccaagcggcgtgccagatagattcagcggcagcaagtctggcacaagcgccagcctggctatctctggactgagaagcgaggacgaggccgactactactgtgccaccagagatgatagcctgagcggcagcgtggtgtttggcacaggcacaaagctgacagtgctgggcctcgaggacctgaagaacgtgttcccacctgaggtggccgtgttcgagcctagcgaggccgagatcagccacacccagaaagccaccctcgtgtgcctggctaccggcttctaccccgaccatgtggaactgtcttggtgggtcaacggcaaagaggtgcacagcggcgtgtgtaccgacccccagccactgaaagaacagcccgccctgaacgacagccggtactgcctgagcagcagactgagagtgtccgccaccttctggcagaacccccggaaccacttcagatgccaggtgcagttctacggcctgagcgagaacgacgagtggacccaggacagagccaagcccgtgacccagatcgtgtctgccgaagcctggggcagagccgattgcgacgtgaagctggtggaaaagagcttcgagacagacaccaacctgaacttccagaacctgagcgtgatcggcttcagaatcctgctgctgaaagtggccggctttaacctgctgatgaccctgcggctgtggtccagcagggccaagcgatctggatctggagcaacaaacttctcactactcaaacaagcaggtgacgtggaggagaatcccgggcctactagtatggactggatttggcgcatccttttccttgtcggcgctgctaccggcgcgcattccttcgaagaagttcagctggttcagagcggagccgaagtgaagaagcctggcgagagcctgaagattagctgcaaaggcagcggctacggcttcaccagctattggatcggctgggtccgacagatgcctggcaaaggactggaatggatgggcatcattcaccccgacgacagcgacaccaagtacagccctagcttccagggccaagtgaccatcagcgccgacaagagcatcagcacagcctacctccagtggtcctctctgaaggccagcgataccgccatgtactactgcgccagcagctacctgagaggactgtggggcggctacttcgatttttggggccagggcacactggtcaccgttagttctacgcgtatccagaaccctgatcctgccgtgtaccagctgcgggatagcaagagcagcgacaagagcgtgtgtctgttcaccgacttcgacagccagaccaacgtgtcccagagcaaggactccgacgtgtacatcaccgataagtgcgtgctggacatgcggagcatggacttcaagagcaactccgccgtggcctggtccaacaagtccgatttcgcctgcgccaacgccttcaacaacagcattatccccgaggacacattcttcccaagccccgagagcagctgcggctttaccagcgagagctaccagcagggcgtgctgagcgccaccatcctgtacgagatcctgctgggcaaggccaccctgtacgccgtgctggtgtctgccctggtgctgatggctatggtcaagcggaaggacagccgggga

SEQ ID NO: 34555 - DNA, 2313 bp, synthetic construct
  source 1..2313: mol_type = other DNA
atggccttaccagtgaccgccttgctcctgccgctggccttgctgctccacgccgccaggccggaggtgcagctggttgaatctggcggaggactggttcagcctggcggatctctgagactgtcttgtgccgccagcggcttcaacatcaaggatacctgtatcggctgggttcgcagagcccctggcaaagaggaagaactggtcgccaaaatctgcaagtacagcggccacaccagatacgccgacagcgtgaagggcagattcaccatcagcgccgacaccagcaagaacaccgcctacctccagatgaacagcctgagagccgaggacaccgccgtgtactattgtgccgctgtgtccgtcagagatgggcactacaattactggggccagggcaccaccgtgaccgtttcttcaggtaccggcggaggcggatctggcggcggaggtagcggtggcggaggatctgaattcgaactgcaaagcgtgctgacacagcctcctagcgcctctggaacacctggacagagagtgacaatcagctgctccggcagctccagcaacatcggcagcaactacgtgaactggtatcagcagctgcctggcacagcccctaaactgctgatctacggcgactaccagaggccaagcggcgtgccagatagattcagcggcagcaagtctggcacaagcgccagcctggctatctctggactgagaagcgaggacgaggccgactactactgtgccaccagagatgatagcctgagcggcagcgtggtgtttggcacaggcacaaagctgacagtgctgggcctcgagatccagaaccctgatcctgccgtgtaccagctgcgggatagcaagagcagcgacaagagcgtgtgtctgttcaccgacttcgacagccagaccaacgtgtcccagagcaaggactccgacgtgtacatcaccgataagtgcgtgctggacatgcggagcatggacttcaagagcaactccgccgtggcctggtccaacaagtccgatttcgcctgcgccaacgccttcaacaacagcattatccccgaggacacattcttcccaagccccgagagcagctgcggctttaccagcgagagctaccagcagggcgtgctgagcgccaccatcctgtacgagatcctgctgggcaaggccaccctgtacgccgtgctggtgtctgccctggtgctgatggctatggtcaagcggaaggacagccggggacgcgccaagagaagcggatctggcgtgaagcagaccctgaatttcgacctgctgaagctggctggcgacgtggaatccaacccaggccctactagtatggactggatttggcgcatccttttccttgtcggcgctgctaccggcgcgcattccttcgaagaagttcagctggttcagagcggagccgaagtgaagaagcctggcgagagcctgaagattagctgcaaaggcagcggctacggcttcaccagctattggatcggctgggtccgacagatgcctggcaaaggactggaatggatgggcatcattcaccccgacgacagcgacaccaagtacagccctagcttccagggccaagtgaccatcagcgccgacaagagcatcagcacagcctacctccagtggtcctctctgaaggccagcgataccgccatgtactactgcgccagcagctacctgagaggactgtggggcggctacttcgatttttggggccagggcacactggtcaccgttagttctacgcgtgaggacctgaagaacgtgttcccacctgaggtggccgtgttcgagcctagcgaggccgagatcagccacacccagaaagccaccctcgtgtgcctggctaccggcttctaccccgaccatgtggaactgtcttggtgggtcaacggcaaagaggtgcacagcggcgtgtgtaccgacccccagccactgaaagaacagcccgccctgaacgacagccggtactgcctgagcagcagactgagagtgtccgccaccttctggcagaacccccggaaccacttcagatgccaggtgcagttctacggcctgagcgagaacgacgagtggacccaggacagagccaagcccgtgacccagatcgtgtctgccgaagcctggggcagagccgattgcgacgtgaagctggtggaaaagagcttcgagacagacaccaacctgaacttccagaacctgagcgtgatcggcttcagaatcctgctgctgaaagtggccggctttaacctgctgatgaccctgcggctgtggtccagc

SEQ ID NO: 34556 - DNA, 3417 bp, synthetic construct
  source 1..3417: mol_type = other DNA
atggccttaccagtgaccgccttgctcctgccgctggccttgctgctccacgccgccaggccggaagtgcagctggttgaatctggcggaggactggttcaggctggcggatctctgagactgtcttgtgccgccagcggcagaacctttagcatgggctggtttagacaggcccctggcaaagagagagagttcgtcgccgccatcacatactctggcggcagcccttactacgccgactctgtgaagggcagattcaccatcagccgggacaacgccaagaacaccgtgtacctccagatgaacagcctgaagcctgaggacaccgccgtgtactactgcgccgccaatccaacatacggcagcgactggaacgccgagaattggggccagggaacccaagtgacagtgtctagcggtaccggcggaggcggatctggcggcggaggtagcggtggcggaggatctgaattcgaactgcaaagcgtgctgacacagcctcctagcgcctctggaacacctggacagagagtgacaatcagctgctccggcagctccagcaacatcggcagcaactacgtgaactggtatcagcagctgcctggcacagcccctaaactgctgatctacggcgactaccagaggccaagcggcgtgccagatagattcagcggcagcaagtctggcacaagcgccagcctggctatctctggactgagaagcgaggacgaggccgactactactgtgccaccagagatgatagcctgagcggcagcgtggtgtttggcacaggcacaaagctgacagtgctgggcctcgaggacctgaagaacgtgttcccacctgaggtggccgtgttcgagcctagcgaggccgagatcagccacacccagaaagccaccctcgtgtgcctggctaccggcttctaccccgaccatgtggaactgtcttggtgggtcaacggcaaagaggtgcacagcggcgtgtgtaccgacccccagccactgaaagaacagcccgccctgaacgacagccggtactgcctgagcagcagactgagagtgtccgccaccttctggcagaacccccggaaccacttcagatgccaggtgcagttctacggcctgagcgagaacgacgagtggacccaggacagagccaagcccgtgacccagatcgtgtctgccgaagcctggggcagagccgattgcgacgtgaagctggtggaaaagagcttcgagacagacaccaacctgaacttccagaacctgagcgtgatcggcttcagaatcctgctgctgaaagtggccggctttaacctgctgatgaccctgcggctgtggtccagcagggccaagcgatctggatctggagcaacaaacttctcactactcaaacaagcaggtgacgtggaggagaatcccgggcctactagtgccaccatggactggatttggcgcatccttttccttgtcggcgctgctaccggcgcccattccgggcccgaagtgcaactggttgaatccggtggcggcctggtgcaagcaggcggatctctcagacttagctgtgccgcctccggcagaaccttcacaatgggatggtttaggcaggctccagggaaagagagagagttcgtcgccgccatctctctgtctcccacactggcctactacgccgactctgtgaaaggccggttcaccatctccagagataatgccaagaacaccgtggtgctgcaaatgaactctctgaaacccgaggatacagccctgtactattgtgccgctgaccggaagtccgtgatgagcatcagacccgattactggggacagggcacacaagtcacagtgtcctctggatccggcggcggaggatctggcggaggcggatctgggggcggaggctctttcgaagaagttcagctggttcagagcggagccgaagtgaagaagcctggcgagagcctgaagattagctgcaaaggcagcggctacggcttcaccagctattggatcggctgggtccgacagatgcctggcaaaggactggaatggatgggcatcattcaccccgacgacagcgacaccaagtacagccctagcttccagggccaagtgaccatcagcgccgacaagagcatcagcacagcctacctccagtggtcctctctgaaggccagcgataccgccatgtactactgcgccagcagctacctgagaggactgtggggcggctacttcgatttttggggccagggcacactggtcaccgttagttctacgcgtatccagaaccctgatcctgccgtgtaccagctgcgggatagcaagagcagcgacaagagcgtgtgtctgttcaccgacttcgacagccagaccaacgtgtcccagagcaaggactccgacgtgtacatcaccgataagtgcgtgctggacatgcggagcatggacttcaagagcaactccgccgtggcctggtccaacaagtccgatttcgcctgcgccaacgccttcaacaacagcattatccccgaggacacattcttcccaagccccgagagcagctgcggctttaccagcgagagctaccagcagggcgtgctgagcgccaccatcctgtacgagatcctgctgggcaaggccaccctgtacgccgtgctggtgtctgccctggtgctgatggctatggtcaagcggaaggacagccggggacgcgccaagagaagcggatctggcgtgaagcagaccctgaatttcgacctgctgaagctggctggcgacgtggaatccaacccaggcccttctagaggccatatgaccgagtacaagcccacggtgcgcctcgccacccgcgacgacgtccccagggccgtacgcaccctcgccgccgcgttcgccgactaccccgccacgcgccacaccgtcgatccggaccgccacatcgagcgggtcaccgagctgcaagaactcttcctcacgcgcgtcgggctcgacatcggcaaggtgtgggtcgcggacgacggcgccgcggtggcggtctggaccacgccggagagcgtcgaagcgggggcggtgttcgccgagatcggcccgcgcatggccgagttgagcggttcccggctggccgcgcagcaacagatggaaggcctcctggcgccgcaccggcccaaggagcccgcgtggttcctggccaccgtcggcgtctcgcccgaccaccagggcaagggtctgggcagcgccgtcgtgctccccggagtggaggcggccgagcgcgccggggtgcccgccttcctggagacctccgcgccccgcaacctccccttctacgagcggctcggcttcaccgtcaccgccgacgtcgaggtgcccgaaggaccgcgcacctggtgcatgacccgcaagcccggtgcctga

SEQ ID NO: 34557 - DNA, 2331 bp, synthetic construct
  source 1..2331: mol_type = other DNA
atggccttaccagtgaccgccttgctcctgccgctggccttgctgctccacgccgccaggccggaagtgcagctggttgaatctggcggaggactggttcagcctggcggatctctgagactgtcttgtgccgcctctggcttcgccagcgactactatatcatcggctggttcagacaggcccctggcaaagagagagagggcgtcagctgtatcagcagcagatacgccaacaccaactacgccgacagcgtgaagggcagattcaccatcagccgggacaacgccaagaacaccgtgtacctccagatgaacagcctgaagcctgaggacaccgccgtgtactactgtgccgccgacaccagaagatacacctgtcctgacattgccaccatgcaccggaacttcgattcttggggccagggcacactggtcaccgtttcttctggtaccggcggaggcggatctggcggcggaggtagcggtggcggaggatctgaattcgaactgcaaagcgtgctgacacagcctcctagcgcctctggaacacctggacagagagtgacaatcagctgctccggcagctccagcaacatcggcagcaactacgtgaactggtatcagcagctgcctggcacagcccctaaactgctgatctacggcgactaccagaggccaagcggcgtgccagatagattcagcggcagcaagtctggcacaagcgccagcctggctatctctggactgagaagcgaggacgaggccgactactactgtgccaccagagatgatagcctgagcggcagcgtggtgtttggcacaggcacaaagctgacagtgctgggcctcgaggacctgaagaacgtgttcccacctgaggtggccgtgttcgagcctagcgaggccgagatcagccacacccagaaagccaccctcgtgtgcctggctaccggcttctaccccgaccatgtggaactgtcttggtgggtcaacggcaaagaggtgcacagcggcgtgtgtaccgacccccagccactgaaagaacagcccgccctgaacgacagccggtactgcctgagcagcagactgagagtgtccgccaccttctggcagaacccccggaaccacttcagatgccaggtgcagttctacggcctgagcgagaacgacgagtggacccaggacagagccaagcccgtgacccagatcgtgtctgccgaagcctggggcagagccgattgcgacgtgaagctggtggaaaagagcttcgagacagacaccaacctgaacttccagaacctgagcgtgatcggcttcagaatcctgctgctgaaagtggccggctttaacctgctgatgaccctgcggctgtggtccagcagggccaagcgatctggatctggagcaacaaacttctcactactcaaacaagcaggtgacgtggaggagaatcccgggcctactagtatggactggatttggcgcatccttttccttgtcggcgctgctaccggcgcgcattccttcgaagaagttcagctggttcagagcggagccgaagtgaagaagcctggcgagagcctgaagattagctgcaaaggcagcggctacggcttcaccagctattggatcggctgggtccgacagatgcctggcaaaggactggaatggatgggcatcattcaccccgacgacagcgacaccaagtacagccctagcttccagggccaagtgaccatcagcgccgacaagagcatcagcacagcctacctccagtggtcctctctgaaggccagcgataccgccatgtactactgcgccagcagctacctgagaggactgtggggcggctacttcgatttttggggccagggcacactggtcaccgttagttctacgcgtatccagaaccctgatcctgccgtgtaccagctgcgggatagcaagagcagcgacaagagcgtgtgtctgttcaccgacttcgacagccagaccaacgtgtcccagagcaaggactccgacgtgtacatcaccgataagtgcgtgctggacatgcggagcatggacttcaagagcaactccgccgtggcctggtccaacaagtccgatttcgcctgcgccaacgccttcaacaacagcattatccccgaggacacattcttcccaagccccgagagcagctgcggctttaccagcgagagctaccagcagggcgtgctgagcgccaccatcctgtacgagatcctgctgggcaaggccaccctgtacgccgtgctggtgtctgccctggtgctgatggctatggtcaagcggaaggacagccggggataa

SEQ ID NO: 34558 - DNA, 2331 bp, synthetic construct
  source 1..2331: mol_type = other DNA
atggccttaccagtgaccgccttgctcctgccgctggccttgctgctccacgccgccaggccggaagtgcagctggttgaatctggcggaggactggttcagcctggcggatctctgagactgagctgtgaagccagcggcttcgccagcgacgattacatcatcggctggttcagacaggcccctggcaaagagagagagggcgtcagctgcatcagctctaagtacgccaacaccgtgtacaccgacagcgtgaagggcagattcagactgagcagaggcaccgccaagaataccgtgtacctccagatgagcgccctgaagcctgaggataccgccgtgtactactgcgctatggacagccgcagagtgacatgccctgagatcagcaccatgcaccggaacttcgattcttggggccagggcacactggtcacagtgtcatctggtaccggcggaggcggatctggcggcggaggtagcggtggcggaggatctgaattcgaactgcaaagcgtgctgacacagcctcctagcgcctctggaacacctggacagagagtgacaatcagctgctccggcagctccagcaacatcggcagcaactacgtgaactggtatcagcagctgcctggcacagcccctaaactgctgatctacggcgactaccagaggccaagcggcgtgccagatagattcagcggcagcaagtctggcacaagcgccagcctggctatctctggactgagaagcgaggacgaggccgactactactgtgccaccagagatgatagcctgagcggcagcgtggtgtttggcacaggcacaaagctgacagtgctgggcctcgaggacctgaagaacgtgttcccacctgaggtggccgtgttcgagcctagcgaggccgagatcagccacacccagaaagccaccctcgtgtgcctggctaccggcttctaccccgaccatgtggaactgtcttggtgggtcaacggcaaagaggtgcacagcggcgtgtgtaccgacccccagccactgaaagaacagcccgccctgaacgacagccggtactgcctgagcagcagactgagagtgtccgccaccttctggcagaacccccggaaccacttcagatgccaggtgcagttctacggcctgagcgagaacgacgagtggacccaggacagagccaagcccgtgacccagatcgtgtctgccgaagcctggggcagagccgattgcgacgtgaagctggtggaaaagagcttcgagacagacaccaacctgaacttccagaacctgagcgtgatcggcttcagaatcctgctgctgaaagtggccggctttaacctgctgatgaccctgcggctgtggtccagcagggccaagcgatctggatctggagcaacaaacttctcactactcaaacaagcaggtgacgtggaggagaatcccgggcctactagtatggactggatttggcgcatccttttccttgtcggcgctgctaccggcgcgcattccttcgaagaagttcagctggttcagagcggagccgaagtgaagaagcctggcgagagcctgaagattagctgcaaaggcagcggctacggcttcaccagctattggatcggctgggtccgacagatgcctggcaaaggactggaatggatgggcatcattcaccccgacgacagcgacaccaagtacagccctagcttccagggccaagtgaccatcagcgccgacaagagcatcagcacagcctacctccagtggtcctctctgaaggccagcgataccgccatgtactactgcgccagcagctacctgagaggactgtggggcggctacttcgatttttggggccagggcacactggtcaccgttagttctacgcgtatccagaaccctgatcctgccgtgtaccagctgcgggatagcaagagcagcgacaagagcgtgtgtctgttcaccgacttcgacagccagaccaacgtgtcccagagcaaggactccgacgtgtacatcaccgataagtgcgtgctggacatgcggagcatggacttcaagagcaactccgccgtggcctggtccaacaagtccgatttcgcctgcgccaacgccttcaacaacagcattatccccgaggacacattcttcccaagccccgagagcagctgcggctttaccagcgagagctaccagcagggcgtgctgagcgccaccatcctgtacgagatcctgctgggcaaggccaccctgtacgccgtgctggtgtctgccctggtgctgatggctatggtcaagcggaaggacagccggggataa

SEQ ID NO: 34559 - DNA, 2328 bp, synthetic construct
  source 1..2328: mol_type = other DNA
atggccttaccagtgaccgccttgctcctgccgctggccttgctgctccacgccgccaggccggaagtgcagctggttgaatctggcggaggactggttcagcctggcggatctctgagactgtcttgtgccgcctctggcttcgccagcgactactatatcatcggctggttcagacaggcccctggcaaagagagagagggcgtcagctgtatcagcagcagatacgccaacaccaactacgccgacagcgtgaagggcagattcaccatcagccgggacaacgccaagaacaccgtgtacctccagatgaacagcctgaagcctgaggacaccgccgtgtactactgtgccgccgacaccagaagatacacctgtcctgacattgccaccatgcaccggaacttcgattcttggggccagggcacactggtcaccgtttcttctggtaccggcggaggcggatctggcggcggaggtagcggtggcggaggatctgaattcgaactgcaaagcgtgctgacacagcctcctagcgcctctggaacacctggacagagagtgacaatcagctgctccggcagctccagcaacatcggcagcaactacgtgaactggtatcagcagctgcctggcacagcccctaaactgctgatctacggcgactaccagaggccaagcggcgtgccagatagattcagcggcagcaagtctggcacaagcgccagcctggctatctctggactgagaagcgaggacgaggccgactactactgtgccaccagagatgatagcctgagcggcagcgtggtgtttggcacaggcacaaagctgacagtgctgggcctcgagatccagaaccctgatcctgccgtgtaccagctgcgggatagcaagagcagcgacaagagcgtgtgtctgttcaccgacttcgacagccagaccaacgtgtcccagagcaaggactccgacgtgtacatcaccgataagtgcgtgctggacatgcggagcatggacttcaagagcaactccgccgtggcctggtccaacaagtccgatttcgcctgcgccaacgccttcaacaacagcattatccccgaggacacattcttcccaagccccgagagcagctgcggctttaccagcgagagctaccagcagggcgtgctgagcgccaccatcctgtacgagatcctgctgggcaaggccaccctgtacgccgtgctggtgtctgccctggtgctgatggctatggtcaagcggaaggacagccggggaagggccaagcgatctggatctggagcaacaaacttctcactactcaaacaagcaggtgacgtggaggagaatcccgggcctactagtatggactggatttggcgcatccttttccttgtcggcgctgctaccggcgcgcattccttcgaagaagttcagctggttcagagcggagccgaagtgaagaagcctggcgagagcctgaagattagctgcaaaggcagcggctacggcttcaccagctattggatcggctgggtccgacagatgcctggcaaaggactggaatggatgggcatcattcaccccgacgacagcgacaccaagtacagccctagcttccagggccaagtgaccatcagcgccgacaagagcatcagcacagcctacctccagtggtcctctctgaaggccagcgataccgccatgtactactgcgccagcagctacctgagaggactgtggggcggctacttcgatttttggggccagggcacactggtcaccgttagttctacgcgtgacctgaagaacgtgttcccacctgaggtggccgtgttcgagcctagcgaggccgagatcagccacacccagaaagccaccctcgtgtgcctggctaccggcttctaccccgaccatgtggaactgtcttggtgggtcaacggcaaagaggtgcacagcggcgtgtgtaccgacccccagccactgaaagaacagcccgccctgaacgacagccggtactgcctgagcagcagactgagagtgtccgccaccttctggcagaacccccggaaccacttcagatgccaggtgcagttctacggcctgagcgagaacgacgagtggacccaggacagagccaagcccgtgacccagatcgtgtctgccgaagcctggggcagagccgattgcgacgtgaagctggtggaaaagagcttcgagacagacaccaacctgaacttccagaacctgagcgtgatcggcttcagaatcctgctgctgaaagtggccggctttaacctgctgatgaccctgcggctgtggtccagc

SEQ ID NO: 34560 - DNA, 2328 bp, synthetic construct
  source 1..2328: mol_type = other DNA
atggccttaccagtgaccgccttgctcctgccgctggccttgctgctccacgccgccaggccggaagtgcagctggttgaatctggcggaggactggttcagcctggcggatctctgagactgagctgtgaagccagcggcttcgccagcgacgattacatcatcggctggttcagacaggcccctggcaaagagagagagggcgtcagctgcatcagctctaagtacgccaacaccgtgtacaccgacagcgtgaagggcagattcagactgagcagaggcaccgccaagaataccgtgtacctccagatgagcgccctgaagcctgaggataccgccgtgtactactgcgctatggacagccgcagagtgacatgccctgagatcagcaccatgcaccggaacttcgattcttggggccagggcacactggtcacagtgtcatctggtaccggcggaggcggatctggcggcggaggtagcggtggcggaggatctgaattcgaactgcaaagcgtgctgacacagcctcctagcgcctctggaacacctggacagagagtgacaatcagctgctccggcagctccagcaacatcggcagcaactacgtgaactggtatcagcagctgcctggcacagcccctaaactgctgatctacggcgactaccagaggccaagcggcgtgccagatagattcagcggcagcaagtctggcacaagcgccagcctggctatctctggactgagaagcgaggacgaggccgactactactgtgccaccagagatgatagcctgagcggcagcgtggtgtttggcacaggcacaaagctgacagtgctgggcctcgagatccagaaccctgatcctgccgtgtaccagctgcgggatagcaagagcagcgacaagagcgtgtgtctgttcaccgacttcgacagccagaccaacgtgtcccagagcaaggactccgacgtgtacatcaccgataagtgcgtgctggacatgcggagcatggacttcaagagcaactccgccgtggcctggtccaacaagtccgatttcgcctgcgccaacgccttcaacaacagcattatccccgaggacacattcttcccaagccccgagagcagctgcggctttaccagcgagagctaccagcagggcgtgctgagcgccaccatcctgtacgagatcctgctgggcaaggccaccctgtacgccgtgctggtgtctgccctggtgctgatggctatggtcaagcggaaggacagccggggaagggccaagcgatctggatctggagcaacaaacttctcactactcaaacaagcaggtgacgtggaggagaatcccgggcctactagtatggactggatttggcgcatccttttccttgtcggcgctgctaccggcgcgcattccttcgaagaagttcagctggttcagagcggagccgaagtgaagaagcctggcgagagcctgaagattagctgcaaaggcagcggctacggcttcaccagctattggatcggctgggtccgacagatgcctggcaaaggactggaatggatgggcatcattcaccccgacgacagcgacaccaagtacagccctagcttccagggccaagtgaccatcagcgccgacaagagcatcagcacagcctacctccagtggtcctctctgaaggccagcgataccgccatgtactactgcgccagcagctacctgagaggactgtggggcggctacttcgatttttggggccagggcacactggtcaccgttagttctacgcgtgacctgaagaacgtgttcccacctgaggtggccgtgttcgagcctagcgaggccgagatcagccacacccagaaagccaccctcgtgtgcctggctaccggcttctaccccgaccatgtggaactgtcttggtgggtcaacggcaaagaggtgcacagcggcgtgtgtaccgacccccagccactgaaagaacagcccgccctgaacgacagccggtactgcctgagcagcagactgagagtgtccgccaccttctggcagaacccccggaaccacttcagatgccaggtgcagttctacggcctgagcgagaacgacgagtggacccaggacagagccaagcccgtgacccagatcgtgtctgccgaagcctggggcagagccgattgcgacgtgaagctggtggaaaagagcttcgagacagacaccaacctgaacttccagaacctgagcgtgatcggcttcagaatcctgctgctgaaagtggccggctttaacctgctgatgaccctgcggctgtggtccagc

SEQ ID NO: 34561 - DNA, 2301 bp, synthetic construct
  source 1..2301: mol_type = other DNA
atggccttaccagtgaccgccttgctcctgccgctggccttgctgctccacgccgccaggccgcaagtcaaactggaagaaagcggtggcggcctggtgcaacctggcgaatctctgagactgagctgtagcgccagcggctccatcttcaaggtgttcagagtgttcgccatgagctggtacaggcaaggccctggcaagcagagagagctggtcgcctctatcagcagcggcgagacaaccacatacgccgaatctgtgaaaggccggttcaccatcagccgggataatgccaagaataccgcctatctccagatggactccctgaagcctgaagatacagctgtgtactactgcaacgccgaccataccttcaccggcgatttttggggccagggaacccaagtgaccgtgtctagtggtaccggcggaggcggatctggcggcggaggtagcggtggcggaggatctgaattcgaactgcaaagcgtgctgacacagcctcctagcgcctctggaacacctggacagagagtgacaatcagctgctccggcagctccagcaacatcggcagcaactacgtgaactggtatcagcagctgcctggcacagcccctaaactgctgatctacggcgactaccagaggccaagcggcgtgccagatagattcagcggcagcaagtctggcacaagcgccagcctggctatctctggactgagaagcgaggacgaggccgactactactgtgccaccagagatgatagcctgagcggcagcgtggtgtttggcacaggcacaaagctgacagtgctgggcctcgagatccagaaccctgatcctgccgtgtaccagctgcgggatagcaagagcagcgacaagagcgtgtgtctgttcaccgacttcgacagccagaccaacgtgtcccagagcaaggactccgacgtgtacatcaccgataagtgcgtgctggacatgcggagcatggacttcaagagcaactccgccgtggcctggtccaacaagtccgatttcgcctgcgccaacgccttcaacaacagcattatccccgaggacacattcttcccaagccccgagagcagctgcggctttaccagcgagagctaccagcagggcgtgctgagcgccaccatcctgtacgagatcctgctgggcaaggccaccctgtacgccgtgctggtgtctgccctggtgctgatggctatggtcaagcggaaggacagccggggaagggccaagcgatctggatctggagcaacaaacttctcactactcaaacaagcaggtgacgtggaggagaatcccgggcctactagtatggactggatttggcgcatccttttccttgtcggcgctgctaccggcgcgcattccttcgaagaagttcagctggttcagagcggagccgaagtgaagaagcctggcgagagcctgaagattagctgcaaaggcagcggctacggcttcaccagctattggatcggctgggtccgacagatgcctggcaaaggactggaatggatgggcatcattcaccccgacgacagcgacaccaagtacagccctagcttccagggccaagtgaccatcagcgccgacaagagcatcagcacagcctacctccagtggtcctctctgaaggccagcgataccgccatgtactactgcgccagcagctacctgagaggactgtggggcggctacttcgatttttggggccagggcacactggtcaccgttagttctacgcgtgacctgaagaacgtgttcccacctgaggtggccgtgttcgagcctagcgaggccgagatcagccacacccagaaagccaccctcgtgtgcctggctaccggcttctaccccgaccatgtggaactgtcttggtgggtcaacggcaaagaggtgcacagcggcgtgtgtaccgacccccagccactgaaagaacagcccgccctgaacgacagccggtactgcctgagcagcagactgagagtgtccgccaccttctggcagaacccccggaaccacttcagatgccaggtgcagttctacggcctgagcgagaacgacgagtggacccaggacagagccaagcccgtgacccagatcgtgtctgccgaagcctggggcagagccgattgcgacgtgaagctggtggaaaagagcttcgagacagacaccaacctgaacttccagaacctgagcgtgatcggcttcagaatcctgctgctgaaagtggccggctttaacctgctgatgaccctgcggctgtggtccagc

SEQ ID NO: 34562 - DNA, 2307 bp, synthetic construct
  source 1..2307: mol_type = other DNA
atggccttaccagtgaccgccttgctcctgccgctggccttgctgctccacgccgccaggccggaactgcaaagcgtgctgacacagcctcctagcgcctctggaacacctggacagagagtgacaatcagctgctccggcagctccagcaacatcggcagcaactacgtgaactggtatcagcagctgcctggcacagcccctaaactgctgatctacggcgactaccagaggccaagcggcgtgccagatagattcagcggcagcaagtctggcacaagcgccagcctggctatctctggactgagaagcgaggacgaggccgactactactgtgccaccagagatgatagcctgagcggcagcgtggtgtttggcacaggcacaaagctgacagtgctgggcctcgaggacctgaagaacgtgttcccacctgaggtggccgtgttcgagcctagcgaggccgagatcagccacacccagaaagccaccctcgtgtgcctggctaccggcttctaccccgaccatgtggaactgtcttggtgggtcaacggcaaagaggtgcacagcggcgtgtgtaccgacccccagccactgaaagaacagcccgccctgaacgacagccggtactgcctgagcagcagactgagagtgtccgccaccttctggcagaacccccggaaccacttcagatgccaggtgcagttctacggcctgagcgagaacgacgagtggacccaggacagagccaagcccgtgacccagatcgtgtctgccgaagcctggggcagagccgattgcgacgtgaagctggtggaaaagagcttcgagacagacaccaacctgaacttccagaacctgagcgtgatcggcttcagaatcctgctgctgaaagtggccggctttaacctgctgatgaccctgcggctgtggtccagcagggccaagcgatctggatctggagcaacaaacttctcactactcaaacaagcaggtgacgtggaggagaatcccgggcctactagtgccaccatggactggatttggcgcatccttttccttgtcggcgctgctaccggcgcccattccgggcccgaagtgcagctggttgaatctggcggaggactggttcaggctggcggatctctgagactgtcttgtgccgccagcggcagaacctttagcatgggctggtttagacaggcccctggcaaagagagagagttcgtcgccgccatcacatactctggcggcagcccttactacgccgactctgtgaagggcagattcaccatcagccgggacaacgccaagaacaccgtgtacctccagatgaacagcctgaagcctgaggacaccgccgtgtactactgcgccgccaatccaacatacggcagcgactggaacgccgagaattggggccagggaacccaagtgacagtgtctagcggatccggcggcggaggatctggcggaggcggatctgggggcggaggctctttcgaagaagttcagctggttcagagcggagccgaagtgaagaagcctggcgagagcctgaagattagctgcaaaggcagcggctacggcttcaccagctattggatcggctgggtccgacagatgcctggcaaaggactggaatggatgggcatcattcaccccgacgacagcgacaccaagtacagccctagcttccagggccaagtgaccatcagcgccgacaagagcatcagcacagcctacctccagtggtcctctctgaaggccagcgataccgccatgtactactgcgccagcagctacctgagaggactgtggggcggctacttcgatttttggggccagggcacactggtcaccgttagttctacgcgtatccagaaccctgatcctgccgtgtaccagctgcgggatagcaagagcagcgacaagagcgtgtgtctgttcaccgacttcgacagccagaccaacgtgtcccagagcaaggactccgacgtgtacatcaccgataagtgcgtgctggacatgcggagcatggacttcaagagcaactccgccgtggcctggtccaacaagtccgatttcgcctgcgccaacgccttcaacaacagcattatccccgaggacacattcttcccaagccccgagagcagctgcggctttaccagcgagagctaccagcagggcgtgctgagcgccaccatcctgtacgagatcctgctgggcaaggccaccctgtacgccgtgctggtgtctgccctggtgctgatggctatggtcaagcggaaggacagccggggataa

SEQ ID NO: 34563 - DNA, 2310 bp, synthetic construct
  source 1..2310: mol_type = other DNA
atggccttaccagtgaccgccttgctcctgccgctggccttgctgctccacgccgccaggccggaactgcaaagcgtgctgacacagcctcctagcgcctctggaacacctggacagagagtgacaatcagctgctccggcagctccagcaacatcggcagcaactacgtgaactggtatcagcagctgcctggcacagcccctaaactgctgatctacggcgactaccagaggccaagcggcgtgccagatagattcagcggcagcaagtctggcacaagcgccagcctggctatctctggactgagaagcgaggacgaggccgactactactgtgccaccagagatgatagcctgagcggcagcgtggtgtttggcacaggcacaaagctgacagtgctgggcctcgaggacctgaagaacgtgttcccacctgaggtggccgtgttcgagcctagcgaggccgagatcagccacacccagaaagccaccctcgtgtgcctggctaccggcttctaccccgaccatgtggaactgtcttggtgggtcaacggcaaagaggtgcacagcggcgtgtgtaccgacccccagccactgaaagaacagcccgccctgaacgacagccggtactgcctgagcagcagactgagagtgtccgccaccttctggcagaacccccggaaccacttcagatgccaggtgcagttctacggcctgagcgagaacgacgagtggacccaggacagagccaagcccgtgacccagatcgtgtctgccgaagcctggggcagagccgattgcgacgtgaagctggtggaaaagagcttcgagacagacaccaacctgaacttccagaacctgagcgtgatcggcttcagaatcctgctgctgaaagtggccggctttaacctgctgatgaccctgcggctgtggtccagcagggccaagcgatctggatctggagcaacaaacttctcactactcaaacaagcaggtgacgtggaggagaatcccgggcctactagtgccaccatggactggatttggcgcatccttttccttgtcggcgctgctaccggcgcccattccgggcccgaagtgcaactggtggaatctgggggcggactggtgcagccaggcggaagtctgaggctgtcttgtgccgcctccggcagcatcttcggcttcaacgacatggcctggtatcggcaggctcccggaaaacagcgcgagctggtggctctgattagcagagtgggcgtgaccagcagcgccgactctgtgaagggcagattcacaatctccagagtgaacgccaaggatacagtgtacctccagatgaactctctgaaacctgaggatacagcagtgtactattgctacatggaccagcggctggacggcagcacactggcctactggggacagggaactcaagtgacagtgtctagcggatccggcggcggaggatctggcggaggcggatctgggggcggaggctctttcgaagaagttcagctggttcagagcggagccgaagtgaagaagcctggcgagagcctgaagattagctgcaaaggcagcggctacggcttcaccagctattggatcggctgggtccgacagatgcctggcaaaggactggaatggatgggcatcattcaccccgacgacagcgacaccaagtacagccctagcttccagggccaagtgaccatcagcgccgacaagagcatcagcacagcctacctccagtggtcctctctgaaggccagcgataccgccatgtactactgcgccagcagctacctgagaggactgtggggcggctacttcgatttttggggccagggcacactggtcaccgttagttctacgcgtatccagaaccctgatcctgccgtgtaccagctgcgggatagcaagagcagcgacaagagcgtgtgtctgttcaccgacttcgacagccagaccaacgtgtcccagagcaaggactccgacgtgtacatcaccgataagtgcgtgctggacatgcggagcatggacttcaagagcaactccgccgtggcctggtccaacaagtccgatttcgcctgcgccaacgccttcaacaacagcattatccccgaggacacattcttcccaagccccgagagcagctgcggctttaccagcgagagctaccagcagggcgtgctgagcgccaccatcctgtacgagatcctgctgggcaaggccaccctgtacgccgtgctggtgtctgccctggtgctgatggctatggtcaagcggaaggacagccggggataa

SEQ ID NO: 34564 - DNA, 2298 bp, synthetic construct
  source 1..2298: mol_type = other DNA
atggccttaccagtgaccgccttgctcctgccgctggccttgctgctccacgccgccaggccggaactgcaaagcgtgctgacacagcctcctagcgcctctggaacacctggacagagagtgacaatcagctgctccggcagctccagcaacatcggcagcaactacgtgaactggtatcagcagctgcctggcacagcccctaaactgctgatctacggcgactaccagaggccaagcggcgtgccagatagattcagcggcagcaagtctggcacaagcgccagcctggctatctctggactgagaagcgaggacgaggccgactactactgtgccaccagagatgatagcctgagcggcagcgtggtgtttggcacaggcacaaagctgacagtgctgggcctcgaggacctgaagaacgtgttcccacctgaggtggccgtgttcgagcctagcgaggccgagatcagccacacccagaaagccaccctcgtgtgcctggctaccggcttctaccccgaccatgtggaactgtcttggtgggtcaacggcaaagaggtgcacagcggcgtgtgtaccgacccccagccactgaaagaacagcccgccctgaacgacagccggtactgcctgagcagcagactgagagtgtccgccaccttctggcagaacccccggaaccacttcagatgccaggtgcagttctacggcctgagcgagaacgacgagtggacccaggacagagccaagcccgtgacccagatcgtgtctgccgaagcctggggcagagccgattgcgacgtgaagctggtggaaaagagcttcgagacagacaccaacctgaacttccagaacctgagcgtgatcggcttcagaatcctgctgctgaaagtggccggctttaacctgctgatgaccctgcggctgtggtccagcagggccaagcgatctggatctggagcaacaaacttctcactactcaaacaagcaggtgacgtggaggagaatcccgggcctactagtgccaccatggactggatttggcgcatccttttccttgtcggcgctgctaccggcgcccattccgggcccgaggtgcagctggttgaatctggcggaggactggttcaggctggcggatctctgagactgtcttgtgccgccagcggctctgtgttcagcggcaatgtgatgggctggtacagacaggcccctggcaaagaaagagagtgggttgccgccattgccagcggcggcagcatctactacagagactctgtgaagggcagattcaccatcagccgggacaacgccaagaacaccgtgtacctccagatgaacagcctgaagcctgaggacaccgccgtgtactactgcaactctcaccctcctacactgccctattggggcctgggaacccaagtgacagtgtcctctggatccggcggcggaggatctggcggaggcggatctgggggcggaggctctttcgaagaagttcagctggttcagagcggagccgaagtgaagaagcctggcgagagcctgaagattagctgcaaaggcagcggctacggcttcaccagctattggatcggctgggtccgacagatgcctggcaaaggactggaatggatgggcatcattcaccccgacgacagcgacaccaagtacagccctagcttccagggccaagtgaccatcagcgccgacaagagcatcagcacagcctacctccagtggtcctctctgaaggccagcgataccgccatgtactactgcgccagcagctacctgagaggactgtggggcggctacttcgatttttggggccagggcacactggtcaccgttagttctacgcgtatccagaaccctgatcctgccgtgtaccagctgcgggatagcaagagcagcgacaagagcgtgtgtctgttcaccgacttcgacagccagaccaacgtgtcccagagcaaggactccgacgtgtacatcaccgataagtgcgtgctggacatgcggagcatggacttcaagagcaactccgccgtggcctggtccaacaagtccgatttcgcctgcgccaacgccttcaacaacagcattatccccgaggacacattcttcccaagccccgagagcagctgcggctttaccagcgagagctaccagcagggcgtgctgagcgccaccatcctgtacgagatcctgctgggcaaggccaccctgtacgccgtgctggtgtctgccctggtgctgatggctatggtcaagcggaaggacagccggggataa

SEQ ID NO: 34565 - DNA, 2292 bp, synthetic construct
  source 1..2292: mol_type = other DNA
atggccttaccagtgaccgccttgctcctgccgctggccttgctgctccacgccgccaggccggaactgcaaagcgtgctgacacagcctcctagcgcctctggaacacctggacagagagtgacaatcagctgctccggcagctccagcaacatcggcagcaactacgtgaactggtatcagcagctgcctggcacagcccctaaactgctgatctacggcgactaccagaggccaagcggcgtgccagatagattcagcggcagcaagtctggcacaagcgccagcctggctatctctggactgagaagcgaggacgaggccgactactactgtgccaccagagatgatagcctgagcggcagcgtggtgtttggcacaggcacaaagctgacagtgctgggcctcgaggacctgaagaacgtgttcccacctgaggtggccgtgttcgagcctagcgaggccgagatcagccacacccagaaagccaccctcgtgtgcctggctaccggcttctaccccgaccatgtggaactgtcttggtgggtcaacggcaaagaggtgcacagcggcgtgtgtaccgacccccagccactgaaagaacagcccgccctgaacgacagccggtactgcctgagcagcagactgagagtgtccgccaccttctggcagaacccccggaaccacttcagatgccaggtgcagttctacggcctgagcgagaacgacgagtggacccaggacagagccaagcccgtgacccagatcgtgtctgccgaagcctggggcagagccgattgcgacgtgaagctggtggaaaagagcttcgagacagacaccaacctgaacttccagaacctgagcgtgatcggcttcagaatcctgctgctgaaagtggccggctttaacctgctgatgaccctgcggctgtggtccagcagggccaagcgatctggatctggagcaacaaacttctcactactcaaacaagcaggtgacgtggaggagaatcccgggcctactagtgccaccatggactggatttggcgcatccttttccttgtcggcgctgctaccggcgcccattccgggcccgaagttcagctgctggaatctggcggaggactcgttcaacctggcggctctctgagactgagctgtgccgcttctggcttcagcttctctagctacgccctgagctgggttcgacaagctcccggaaagggccttgaatgggtgtccagcatcggcgagaatgacggcaccacagactatgccgatgccgtgaaaggccggtttaccatcagcagagacaattccaagaacacgctctatctgcaaatgaactccctgcgcgtggaagatacagccgtgtattattgcgtgaaggacggcatccactggggacagggaaccctggttacagtgtctagcggatccggcggcggaggatctggcggaggcggatctgggggcggaggctctttcgaagaagttcagctggttcagagcggagccgaagtgaagaagcctggcgagagcctgaagattagctgcaaaggcagcggctacggcttcaccagctattggatcggctgggtccgacagatgcctggcaaaggactggaatggatgggcatcattcaccccgacgacagcgacaccaagtacagccctagcttccagggccaagtgaccatcagcgccgacaagagcatcagcacagcctacctccagtggtcctctctgaaggccagcgataccgccatgtactactgcgccagcagctacctgagaggactgtggggcggctacttcgatttttggggccagggcacactggtcaccgttagttctacgcgtatccagaaccctgatcctgccgtgtaccagctgcgggatagcaagagcagcgacaagagcgtgtgtctgttcaccgacttcgacagccagaccaacgtgtcccagagcaaggactccgacgtgtacatcaccgataagtgcgtgctggacatgcggagcatggacttcaagagcaactccgccgtggcctggtccaacaagtccgatttcgcctgcgccaacgccttcaacaacagcattatccccgaggacacattcttcccaagccccgagagcagctgcggctttaccagcgagagctaccagcagggcgtgctgagcgccaccatcctgtacgagatcctgctgggcaaggccaccctgtacgccgtgctggtgtctgccctggtgctgatggctatggtcaagcggaaggacagccggggataa

SEQ ID NO: 34566 - DNA, 3399 bp, synthetic construct
  source 1..3399: mol_type = other DNA
atgggacccagactgctgttttgggctctgctgtgtctgctcggcacaggacctgttgaagctggcgtgacacagagccccacacacctgattaagaccagaggccagcaggccacactgagatgcagccctatcagcggccacaccagcgtgtactggtatcagcaggctctcggactgggcctccagttcctgctttggtacgacgagggcgaagagagaaaccggggcaacttccctcctcggttttccggcagacagttccccaactacagcagcgagctgaacgtgaacgccctggaactggaagatagcgccctgtacctgtgtgcctcttctcttggtggacctcgcggactggctggactgagaggggatgagcagtttttcggccctggcaccagactgaccgtgctggaaggtaccggcggaggcggatctggcggcggagaattcgaactgcaaagcgtgctgacacagcctcctagcgcctctggaacacctggacagagagtgacaatcagctgctccggcagctccagcaacatcggcagcaactacgtgaactggtatcagcagctgcctggcacagcccctaaactgctgatctacggcgactaccagaggccaagcggcgtgccagatagattcagcggcagcaagtctggcacaagcgccagcctggctatctctggactgagaagcgaggacgaggccgactactactgtgccaccagagatgatagcctgagcggcagcgtggtgtttggcacaggcacaaagctgacagtgctgggcctcgaggacctgaagaacgtgttcccacctgaggtggccgtgttcgagcctagcgaggccgagatcagccacacccagaaagccaccctcgtgtgcctggctaccggcttctaccccgaccatgtggaactgtcttggtgggtcaacggcaaagaggtgcacagcggcgtgtgtaccgacccccagccactgaaagaacagcccgccctgaacgacagccggtactgcctgagcagcagactgagagtgtccgccaccttctggcagaacccccggaaccacttcagatgccaggtgcagttctacggcctgagcgagaacgacgagtggacccaggacagagccaagcccgtgacccagatcgtgtctgccgaagcctggggcagagccgattgcgacgtgaagctggtggaaaagagcttcgagacagacaccaacctgaacttccagaacctgagcgtgatcggcttcagaatcctgctgctgaaagtggccggctttaacctgctgatgaccctgcggctgtggtccagcagggccaagcgatctggatctggagcaacaaacttctcactactcaaacaagcaggtgacgtggaggagaatcccgggcctactagtgccaccatggactggatttggcgcatccttttccttgtcggcgctgctaccggcgcccattccgggcccgaagtgcagctggttgaatctggcggaggactggttcaggctggcggatctctgagactgtcttgtgccgccagcggcagaacctttagcatgggctggtttagacaggcccctggcaaagagagagagttcgtcgccgccatcacatactctggcggcagcccttactacgccgactctgtgaagggcagattcaccatcagccgggacaacgccaagaacaccgtgtacctccagatgaacagcctgaagcctgaggacaccgccgtgtactactgcgccgccaatccaacatacggcagcgactggaacgccgagaattggggccagggaacccaagtgacagtgtctagcggatccggcggcggaggatctggcggaggcggatctgggggcggaggctctttcgaagaagttcagctggttcagagcggagccgaagtgaagaagcctggcgagagcctgaagattagctgcaaaggcagcggctacggcttcaccagctattggatcggctgggtccgacagatgcctggcaaaggactggaatggatgggcatcattcaccccgacgacagcgacaccaagtacagccctagcttccagggccaagtgaccatcagcgccgacaagagcatcagcacagcctacctccagtggtcctctctgaaggccagcgataccgccatgtactactgcgccagcagctacctgagaggactgtggggcggctacttcgatttttggggccagggcacactggtcaccgttagttctacgcgtatccagaaccctgatcctgccgtgtaccagctgcgggatagcaagagcagcgacaagagcgtgtgtctgttcaccgacttcgacagccagaccaacgtgtcccagagcaaggactccgacgtgtacatcaccgataagtgcgtgctggacatgcggagcatggacttcaagagcaactccgccgtggcctggtccaacaagtccgatttcgcctgcgccaacgccttcaacaacagcattatccccgaggacacattcttcccaagccccgagagcagctgcggctttaccagcgagagctaccagcagggcgtgctgagcgccaccatcctgtacgagatcctgctgggcaaggccaccctgtacgccgtgctggtgtctgccctggtgctgatggctatggtcaagcggaaggacagccggggacgcgccaagagaagcggatctggcgtgaagcagaccctgaatttcgacctgctgaagctggctggcgacgtggaatccaacccaggcccttctagaggccatatgaccgagtacaagcccacggtgcgcctcgccacccgcgacgacgtccccagggccgtacgcaccctcgccgccgcgttcgccgactaccccgccacgcgccacaccgtcgatccggaccgccacatcgagcgggtcaccgagctgcaagaactcttcctcacgcgcgtcgggctcgacatcggcaaggtgtgggtcgcggacgacggcgccgcggtggcggtctggaccacgccggagagcgtcgaagcgggggcggtgttcgccgagatcggcccgcgcatggccgagttgagcggttcccggctggccgcgcagcaacagatggaaggcctcctggcgccgcaccggcccaaggagcccgcgtggttcctggccaccgtcggcgtctcgcccgaccaccagggcaagggtctgggcagcgccgtcgtgctccccggagtggaggcggccgagcgcgccggggtgcccgccttcctggagacctccgcgccccgcaacctccccttctacgagcggctcggcttcaccgtcaccgccgacgtcgaggtgcccgaaggaccgcgcacctggtgcatgacccgcaagcccggtgcctga

SEQ ID NO: 34567 - DNA, 3396 bp, synthetic construct
  source 1..3396: mol_type = other DNA
atgggacccagactgctgttttgggctctgctgtgtctgctcggcacaggacctgttgaagctggcgtgacacagagccccacacacctgattaagaccagaggccagcaggccacactgagatgcagccctatcagcggccacaccagcgtgtactggtatcagcaggctctcggactgggcctccagttcctgctttggtacgacgagggcgaagagagaaaccggggcaacttccctcctcggttttccggcagacagttccccaactacagcagcgagctgaacgtgaacgccctggaactggaagatagcgccctgtacctgtgtgccagctctctcggcggagatgaactgggagccgatggcaacgagcagttctttggccctggcaccagactgaccgtgctggaaggtaccggcggaggcggatctggcggcggaagcgaattcgaactgcaaagcgtgctgacacagcctcctagcgcctctggaacacctggacagagagtgacaatcagctgctccggcagctccagcaacatcggcagcaactacgtgaactggtatcagcagctgcctggcacagcccctaaactgctgatctacggcgactaccagaggccaagcggcgtgccagatagattcagcggcagcaagtctggcacaagcgccagcctggctatctctggactgagaagcgaggacgaggccgactactactgtgccaccagagatgatagcctgagcggcagcgtggtgtttggcacaggcacaaagctgacagtgctgggcctcgaggacctgaagaacgtgttcccacctgaggtggccgtgttcgagcctagcgaggccgagatcagccacacccagaaagccaccctcgtgtgcctggctaccggcttctaccccgaccatgtggaactgtcttggtgggtcaacggcaaagaggtgcacagcggcgtgtgtaccgacccccagccactgaaagaacagcccgccctgaacgacagccggtactgcctgagcagcagactgagagtgtccgccaccttctggcagaacccccggaaccacttcagatgccaggtgcagttctacggcctgagcgagaacgacgagtggacccaggacagagccaagcccgtgacccagatcgtgtctgccgaagcctggggcagagccgattgcgacgtgaagctggtggaaaagagcttcgagacagacaccaacctgaacttccagaacctgagcgtgatcggcttcagaatcctgctgctgaaagtggccggctttaacctgctgatgaccctgcggctgtggtccagcagggccaagcgatctggatctggagcaacaaacttctcactactcaaacaagcaggtgacgtggaggagaatcccgggcctactagtgccaccatggactggatttggcgcatccttttccttgtcggcgctgctaccggcgcccattccgggcccgaagtgcagctggttgaatctggcggaggactggttcaggctggcggatctctgagactgtcttgtgccgccagcggcagaacctttagcatgggctggtttagacaggcccctggcaaagagagagagttcgtcgccgccatcacatactctggcggcagcccttactacgccgactctgtgaagggcagattcaccatcagccgggacaacgccaagaacaccgtgtacctccagatgaacagcctgaagcctgaggacaccgccgtgtactactgcgccgccaatccaacatacggcagcgactggaacgccgagaattggggccagggaacccaagtgacagtgtctagcggatccggcggcggaggatctggcggaggcggatctgggggcggaggctctttcgaagaagttcagctggttcagagcggagccgaagtgaagaagcctggcgagagcctgaagattagctgcaaaggcagcggctacggcttcaccagctattggatcggctgggtccgacagatgcctggcaaaggactggaatggatgggcatcattcaccccgacgacagcgacaccaagtacagccctagcttccagggccaagtgaccatcagcgccgacaagagcatcagcacagcctacctccagtggtcctctctgaaggccagcgataccgccatgtactactgcgccagcagctacctgagaggactgtggggcggctacttcgatttttggggccagggcacactggtcaccgttagttctacgcgtatccagaaccctgatcctgccgtgtaccagctgcgggatagcaagagcagcgacaagagcgtgtgtctgttcaccgacttcgacagccagaccaacgtgtcccagagcaaggactccgacgtgtacatcaccgataagtgcgtgctggacatgcggagcatggacttcaagagcaactccgccgtggcctggtccaacaagtccgatttcgcctgcgccaacgccttcaacaacagcattatccccgaggacacattcttcccaagccccgagagcagctgcggctttaccagcgagagctaccagcagggcgtgctgagcgccaccatcctgtacgagatcctgctgggcaaggccaccctgtacgccgtgctggtgtctgccctggtgctgatggctatggtcaagcggaaggacagccggggacgcgccaagagaagcggatctggcgtgaagcagaccctgaatttcgacctgctgaagctggctggcgacgtggaatccaacccaggcccttctagaggccatatgaccgagtacaagcccacggtgcgcctcgccacccgcgacgacgtccccagggccgtacgcaccctcgccgccgcgttcgccgactaccccgccacgcgccacaccgtcgatccggaccgccacatcgagcgggtcaccgagctgcaagaactcttcctcacgcgcgtcgggctcgacatcggcaaggtgtgggtcgcggacgacggcgccgcggtggcggtctggaccacgccggagagcgtcgaagcgggggcggtgttcgccgagatcggcccgcgcatggccgagttgagcggttcccggctggccgcgcagcaacagatggaaggcctcctggcgccgcaccggcccaaggagcccgcgtggttcctggccaccgtcggcgtctcgcccgaccaccagggcaagggtctgggcagcgccgtcgtgctccccggagtggaggcggccgagcgcgccggggtgcccgccttcctggagacctccgcgccccgcaacctccccttctacgagcggctcggcttcaccgtcaccgccgacgtcgaggtgcccgaaggaccgcgcacctggtgcatgacccgcaagcccggtgcctga

SEQ ID NO: 34568 - DNA, 2871 bp, synthetic construct
  source 1..2871: mol_type = other DNA
atggccttaccagtgaccgccttgctcctgccgctggccttgctgctccacgccgccaggccggaactgcaaagcgtgctgacacagcctcctagcgcctctggaacacctggacagagagtgacaatcagctgctccggcagctccagcaacatcggcagcaactacgtgaactggtatcagcagctgcctggcacagcccctaaactgctgatctacggcgactaccagaggccaagcggcgtgccagatagattcagcggcagcaagtctggcacaagcgccagcctggctatctctggactgagaagcgaggacgaggccgactactactgtgccaccagagatgatagcctgagcggcagcgtggtgtttggcacaggcacaaagctgacagtgctgggcctcgaggacctgaagaacgtgttcccacctgaggtggccgtgttcgagcctagcgaggccgagatcagccacacccagaaagccaccctcgtgtgcctggctaccggcttctaccccgaccatgtggaactgtcttggtgggtcaacggcaaagaggtgcacagcggcgtgtgtaccgacccccagccactgaaagaacagcccgccctgaacgacagccggtactgcctgagcagcagactgagagtgtccgccaccttctggcagaacccccggaaccacttcagatgccaggtgcagttctacggcctgagcgagaacgacgagtggacccaggacagagccaagcccgtgacccagatcgtgtctgccgaagcctggggcagagccgattgcgacgtgaagctggtggaaaagagcttcgagacagacaccaacctgaacttccagaacctgagcgtgatcggcttcagaatcctgctgctgaaagtggccggctttaacctgctgatgaccctgcggctgtggtccagcagggccaagcgatctggatctggagcaacaaacttctcactactcaaacaagcaggtgacgtggaggagaatcccgggcctactagtgccaccatggactggatttggcgcatccttttccttgtcggcgctgctaccggcgcccattccgggcccatgggaagctggcttgagttctaccacagactcaacgccattgacagcaggctgtgggcacttggcggaagcgaagctgaactcgccgcttttgaaaaagaaattgccgctttcgagtccgagcttcaggcttacaaaggcaaagggaatcctgaggtcgagagcctgagagatcacgctgcccacattagagagtggttgcaggcataccggcacaatggatccggcggcggaggatctggcggaggcggatctgggggcggaggctctttcgaagaagttcagctggttcagagcggagccgaagtgaagaagcctggcgagagcctgaagattagctgcaaaggcagcggctacggcttcaccagctattggatcggctgggtccgacagatgcctggcaaaggactggaatggatgggcatcattcaccccgacgacagcgacaccaagtacagccctagcttccagggccaagtgaccatcagcgccgacaagagcatcagcacagcctacctccagtggtcctctctgaaggccagcgataccgccatgtactactgcgccagcagctacctgagaggactgtggggcggctacttcgatttttggggccagggcacactggtcaccgttagttctacgcgtatccagaaccctgatcctgccgtgtaccagctgcgggatagcaagagcagcgacaagagcgtgtgtctgttcaccgacttcgacagccagaccaacgtgtcccagagcaaggactccgacgtgtacatcaccgataagtgcgtgctggacatgcggagcatggacttcaagagcaactccgccgtggcctggtccaacaagtccgatttcgcctgcgccaacgccttcaacaacagcattatccccgaggacacattcttcccaagccccgagagcagctgcggctttaccagcgagagctaccagcagggcgtgctgagcgccaccatcctgtacgagatcctgctgggcaaggccaccctgtacgccgtgctggtgtctgccctggtgctgatggctatggtcaagcggaaggacagccggggacgcgccaagagaagcggatctggcgtgaagcagaccctgaatttcgacctgctgaagctggctggcgacgtggaatccaacccaggcccttctagaggccatatgaccgagtacaagcccacggtgcgcctcgccacccgcgacgacgtccccagggccgtacgcaccctcgccgccgcgttcgccgactaccccgccacgcgccacaccgtcgatccggaccgccacatcgagcgggtcaccgagctgcaagaactcttcctcacgcgcgtcgggctcgacatcggcaaggtgtgggtcgcggacgacggcgccgcggtggcggtctggaccacgccggagagcgtcgaagcgggggcggtgttcgccgagatcggcccgcgcatggccgagttgagcggttcccggctggccgcgcagcaacagatggaaggcctcctggcgccgcaccggcccaaggagcccgcgtggttcctggccaccgtcggcgtctcgcccgaccaccagggcaagggtctgggcagcgccgtcgtgctccccggagtggaggcggccgagcgcgccggggtgcccgccttcctggagacctccgcgccccgcaacctccccttctacgagcggctcggcttcaccgtcaccgccgacgtcgaggtgcccgaaggaccgcgcacctggtgcatgacccgcaagcccggtgcctga

SEQ ID NO: 34569 - DNA, 2871 bp, synthetic construct
  source 1..2871: mol_type = other DNA
atggccttaccagtgaccgccttgctcctgccgctggccttgctgctccacgccgccaggccggcatgcatgggcagttggttcgagttctacgaccggctgaatgccatcgacgccagactgtgggctctcggaggatctgaagctgagctggccgccttcgagaaagagatcgccgcctttgagagcgagctgcaagcctacaaaggcaagggcaaccccgaggtggaaaacctgagagtgcacgccgctgccatcagagaatggctccaggcttacagacacaacggtaccggcggaggcggatctggcggcggaggtagcggtggcggaggatctgaattcgaactgcaaagcgtgctgacacagcctcctagcgcctctggaacacctggacagagagtgacaatcagctgctccggcagctccagcaacatcggcagcaactacgtgaactggtatcagcagctgcctggcacagcccctaaactgctgatctacggcgactaccagaggccaagcggcgtgccagatagattcagcggcagcaagtctggcacaagcgccagcctggctatctctggactgagaagcgaggacgaggccgactactactgtgccaccagagatgatagcctgagcggcagcgtggtgtttggcacaggcacaaagctgacagtgctgggcctcgaggacctgaagaacgtgttcccacctgaggtggccgtgttcgagcctagcgaggccgagatcagccacacccagaaagccaccctcgtgtgcctggctaccggcttctaccccgaccatgtggaactgtcttggtgggtcaacggcaaagaggtgcacagcggcgtgtgtaccgacccccagccactgaaagaacagcccgccctgaacgacagccggtactgcctgagcagcagactgagagtgtccgccaccttctggcagaacccccggaaccacttcagatgccaggtgcagttctacggcctgagcgagaacgacgagtggacccaggacagagccaagcccgtgacccagatcgtgtctgccgaagcctggggcagagccgattgcgacgtgaagctggtggaaaagagcttcgagacagacaccaacctgaacttccagaacctgagcgtgatcggcttcagaatcctgctgctgaaagtggccggctttaacctgctgatgaccctgcggctgtggtccagcagggccaagcgatctggatctggagcaacaaacttctcactactcaaacaagcaggtgacgtggaggagaatcccgggcctactagtatggactggatttggcgcatccttttccttgtcggcgctgctaccggcgcgcattccttcgaagaagttcagctggttcagagcggagccgaagtgaagaagcctggcgagagcctgaagattagctgcaaaggcagcggctacggcttcaccagctattggatcggctgggtccgacagatgcctggcaaaggactggaatggatgggcatcattcaccccgacgacagcgacaccaagtacagccctagcttccagggccaagtgaccatcagcgccgacaagagcatcagcacagcctacctccagtggtcctctctgaaggccagcgataccgccatgtactactgcgccagcagctacctgagaggactgtggggcggctacttcgatttttggggccagggcacactggtcaccgttagttctacgcgtatccagaaccctgatcctgccgtgtaccagctgcgggatagcaagagcagcgacaagagcgtgtgtctgttcaccgacttcgacagccagaccaacgtgtcccagagcaaggactccgacgtgtacatcaccgataagtgcgtgctggacatgcggagcatggacttcaagagcaactccgccgtggcctggtccaacaagtccgatttcgcctgcgccaacgccttcaacaacagcattatccccgaggacacattcttcccaagccccgagagcagctgcggctttaccagcgagagctaccagcagggcgtgctgagcgccaccatcctgtacgagatcctgctgggcaaggccaccctgtacgccgtgctggtgtctgccctggtgctgatggctatggtcaagcggaaggacagccggggacgcgccaagagaagcggatctggcgtgaagcagaccctgaatttcgacctgctgaagctggctggcgacgtggaatccaacccaggcccttctagaggccatatgaccgagtacaagcccacggtgcgcctcgccacccgcgacgacgtccccagggccgtacgcaccctcgccgccgcgttcgccgactaccccgccacgcgccacaccgtcgatccggaccgccacatcgagcgggtcaccgagctgcaagaactcttcctcacgcgcgtcgggctcgacatcggcaaggtgtgggtcgcggacgacggcgccgcggtggcggtctggaccacgccggagagcgtcgaagcgggggcggtgttcgccgagatcggcccgcgcatggccgagttgagcggttcccggctggccgcgcagcaacagatggaaggcctcctggcgccgcaccggcccaaggagcccgcgtggttcctggccaccgtcggcgtctcgcccgaccaccagggcaagggtctgggcagcgccgtcgtgctccccggagtggaggcggccgagcgcgccggggtgcccgccttcctggagacctccgcgccccgcaacctccccttctacgagcggctcggcttcaccgtcaccgccgacgtcgaggtgcccgaaggaccgcgcacctggtgcatgacccgcaagcccggtgcctga

SEQ ID NO: 34570 - DNA, 3222 bp, synthetic construct
  source 1..3222: mol_type = other DNA
atggccttaccagtgaccgccttgctcctgccgctggccttgctgctccacgccgccaggccggcatgcatggaccccgacctggaaatcagagccgccttcctgcggcagagaaacacagccctgagaacagaggtggccgagctggaacaagaggtgcagcggctggaaaacgaggtgtcccagtacgagacaagatacggccctctcggaggcggaaaaggtaccggcggaggcggatctggcggcggaggtagcggtggcggaggatctgaattcgaactgcaaagcgtgctgacacagcctcctagcgcctctggaacacctggacagagagtgacaatcagctgctccggcagctccagcaacatcggcagcaactacgtgaactggtatcagcagctgcctggcacagcccctaaactgctgatctacggcgactaccagaggccaagcggcgtgccagatagattcagcggcagcaagtctggcacaagcgccagcctggctatctctggactgagaagcgaggacgaggccgactactactgtgccaccagagatgatagcctgagcggcagcgtggtgtttggcacaggcacaaagctgacagtgctgggcctcgaggacctgaagaacgtgttcccacctgaggtggccgtgttcgagcctagcgaggccgagatcagccacacccagaaagccaccctcgtgtgcctggctaccggcttctaccccgaccatgtggaactgtcttggtgggtcaacggcaaagaggtgcacagcggcgtgtgtaccgacccccagccactgaaagaacagcccgccctgaacgacagccggtactgcctgagcagcagactgagagtgtccgccaccttctggcagaacccccggaaccacttcagatgccaggtgcagttctacggcctgagcgagaacgacgagtggacccaggacagagccaagcccgtgacccagatcgtgtctgccgaagcctggggcagagccgattgcgacgtgaagctggtggaaaagagcttcgagacagacaccaacctgaacttccagaacctgagcgtgatcggcttcagaatcctgctgctgaaagtggccggctttaacctgctgatgaccctgcggctgtggtccagcagggccaagcgatctggatctggagcaacaaacttctcactactcaaacaagcaggtgacgtggaggagaatcccgggcctactagtgccaccatggactggatttggcgcatccttttccttgtcggcgctgctaccggcgcccattccgggcccgaagtgcagctggttgaatctggcggaggactggttcaggctggcggatctctgagactgtcttgtgccgccagcggcagaacctttagcatgggctggtttagacaggcccctggcaaagagagagagttcgtcgccgccatcacatactctggcggcagcccttactacgccgactctgtgaagggcagattcaccatcagccgggacaacgccaagaacaccgtgtacctccagatgaacagcctgaagcctgaggacaccgccgtgtactactgcgccgccaatccaacatacggcagcgactggaacgccgagaattggggccagggaacccaagtgacagtgtctagcggatccggcggcggaggatctggcggaggcggatctgggggcggaggctctttcgaagaagttcagctggttcagagcggagccgaagtgaagaagcctggcgagagcctgaagattagctgcaaaggcagcggctacggcttcaccagctattggatcggctgggtccgacagatgcctggcaaaggactggaatggatgggcatcattcaccccgacgacagcgacaccaagtacagccctagcttccagggccaagtgaccatcagcgccgacaagagcatcagcacagcctacctccagtggtcctctctgaaggccagcgataccgccatgtactactgcgccagcagctacctgagaggactgtggggcggctacttcgatttttggggccagggcacactggtcaccgttagttctacgcgtatccagaaccctgatcctgccgtgtaccagctgcgggatagcaagagcagcgacaagagcgtgtgtctgttcaccgacttcgacagccagaccaacgtgtcccagagcaaggactccgacgtgtacatcaccgataagtgcgtgctggacatgcggagcatggacttcaagagcaactccgccgtggcctggtccaacaagtccgatttcgcctgcgccaacgccttcaacaacagcattatccccgaggacacattcttcccaagccccgagagcagctgcggctttaccagcgagagctaccagcagggcgtgctgagcgccaccatcctgtacgagatcctgctgggcaaggccaccctgtacgccgtgctggtgtctgccctggtgctgatggctatggtcaagcggaaggacagccggggacgcgccaagagaagcggatctggcgtgaagcagaccctgaatttcgacctgctgaagctggctggcgacgtggaatccaacccaggcccttctagaggccatatgaccgagtacaagcccacggtgcgcctcgccacccgcgacgacgtccccagggccgtacgcaccctcgccgccgcgttcgccgactaccccgccacgcgccacaccgtcgatccggaccgccacatcgagcgggtcaccgagctgcaagaactcttcctcacgcgcgtcgggctcgacatcggcaaggtgtgggtcgcggacgacggcgccgcggtggcggtctggaccacgccggagagcgtcgaagcgggggcggtgttcgccgagatcggcccgcgcatggccgagttgagcggttcccggctggccgcgcagcaacagatggaaggcctcctggcgccgcaccggcccaaggagcccgcgtggttcctggccaccgtcggcgtctcgcccgaccaccagggcaagggtctgggcagcgccgtcgtgctccccggagtggaggcggccgagcgcgccggggtgcccgccttcctggagacctccgcgccccgcaacctccccttctacgagcggctcggcttcaccgtcaccgccgacgtcgaggtgcccgaaggaccgcgcacctggtgcatgacccgcaagcccggtgcctga

SEQ ID NO: 34571 - DNA, 2871 bp, synthetic construct
  source 1..2871: mol_type = other DNA
atggccttaccagtgaccgccttgctcctgccgctggccttgctgctccacgccgccaggccggaactgcaaagcgtgctgacacagcctcctagcgcctctggaacacctggacagagagtgacaatcagctgctccggcagctccagcaacatcggcagcaactacgtgaactggtatcagcagctgcctggcacagcccctaaactgctgatctacggcgactaccagaggccaagcggcgtgccagatagattcagcggcagcaagtctggcacaagcgccagcctggctatctctggactgagaagcgaggacgaggccgactactactgtgccaccagagatgatagcctgagcggcagcgtggtgtttggcacaggcacaaagctgacagtgctgggcctcgaggacctgaagaacgtgttcccacctgaggtggccgtgttcgagcctagcgaggccgagatcagccacacccagaaagccaccctcgtgtgcctggctaccggcttctaccccgaccatgtggaactgtcttggtgggtcaacggcaaagaggtgcacagcggcgtgtgtaccgacccccagccactgaaagaacagcccgccctgaacgacagccggtactgcctgagcagcagactgagagtgtccgccaccttctggcagaacccccggaaccacttcagatgccaggtgcagttctacggcctgagcgagaacgacgagtggacccaggacagagccaagcccgtgacccagatcgtgtctgccgaagcctggggcagagccgattgcgacgtgaagctggtggaaaagagcttcgagacagacaccaacctgaacttccagaacctgagcgtgatcggcttcagaatcctgctgctgaaagtggccggctttaacctgctgatgaccctgcggctgtggtccagcagggccaagcgatctggatctggagcaacaaacttctcactactcaaacaagcaggtgacgtggaggagaatcccgggcctactagtgccaccatggactggatttggcgcatccttttccttgtcggcgctgctaccggcgcccattccgggcccatgggatcttggagcgagttttacgatcggctgcacgccattcaccaccggctgtatgctctcggaggaagcgaagctgagctggccgcttttgaaaaagaaattgccgctttcgagtccgagcttcaggcttacaaaggcaaagggaatcctgaggtcgaggccctgagagataccgccgccttcatcagaacccggttgcaggcataccggcacaacggatccggcggcggaggatctggcggaggcggatctgggggcggaggctctttcgaagaagttcagctggttcagagcggagccgaagtgaagaagcctggcgagagcctgaagattagctgcaaaggcagcggctacggcttcaccagctattggatcggctgggtccgacagatgcctggcaaaggactggaatggatgggcatcattcaccccgacgacagcgacaccaagtacagccctagcttccagggccaagtgaccatcagcgccgacaagagcatcagcacagcctacctccagtggtcctctctgaaggccagcgataccgccatgtactactgcgccagcagctacctgagaggactgtggggcggctacttcgatttttggggccagggcacactggtcaccgttagttctacgcgtatccagaaccctgatcctgccgtgtaccagctgcgggatagcaagagcagcgacaagagcgtgtgtctgttcaccgacttcgacagccagaccaacgtgtcccagagcaaggactccgacgtgtacatcaccgataagtgcgtgctggacatgcggagcatggacttcaagagcaactccgccgtggcctggtccaacaagtccgatttcgcctgcgccaacgccttcaacaacagcattatccccgaggacacattcttcccaagccccgagagcagctgcggctttaccagcgagagctaccagcagggcgtgctgagcgccaccatcctgtacgagatcctgctgggcaaggccaccctgtacgccgtgctggtgtctgccctggtgctgatggctatggtcaagcggaaggacagccggggacgcgccaagagaagcggatctggcgtgaagcagaccctgaatttcgacctgctgaagctggctggcgacgtggaatccaacccaggcccttctagaggccatatgaccgagtacaagcccacggtgcgcctcgccacccgcgacgacgtccccagggccgtacgcaccctcgccgccgcgttcgccgactaccccgccacgcgccacaccgtcgatccggaccgccacatcgagcgggtcaccgagctgcaagaactcttcctcacgcgcgtcgggctcgacatcggcaaggtgtgggtcgcggacgacggcgccgcggtggcggtctggaccacgccggagagcgtcgaagcgggggcggtgttcgccgagatcggcccgcgcatggccgagttgagcggttcccggctggccgcgcagcaacagatggaaggcctcctggcgccgcaccggcccaaggagcccgcgtggttcctggccaccgtcggcgtctcgcccgaccaccagggcaagggtctgggcagcgccgtcgtgctccccggagtggaggcggccgagcgcgccggggtgcccgccttcctggagacctccgcgccccgcaacctccccttctacgagcggctcggcttcaccgtcaccgccgacgtcgaggtgcccgaaggaccgcgcacctggtgcatgacccgcaagcccggtgcctga

SEQ ID NO: 34572 - DNA, 3501 bp, synthetic construct
  source 1..3501: mol_type = other DNA
atggccttaccagtgaccgccttgctcctgccgctggccttgctgctccacgccgccaggccggaactgcaaagcgtgctgacacagcctcctagcgcctctggaacacctggacagagagtgacaatcagctgctccggcagctccagcaacatcggcagcaactacgtgaactggtatcagcagctgcctggcacagcccctaaactgctgatctacggcgactaccagaggccaagcggcgtgccagatagattcagcggcagcaagtctggcacaagcgccagcctggctatctctggactgagaagcgaggacgaggccgactactactgtgccaccagagatgatagcctgagcggcagcgtggtgtttggcacaggcacaaagctgacagtgctgggcctcgaggacctgaagaacgtgttcccacctgaggtggccgtgttcgagcctagcgaggccgagatcagccacacccagaaagccaccctcgtgtgcctggctaccggcttctaccccgaccatgtggaactgtcttggtgggtcaacggcaaagaggtgcacagcggcgtgtgtaccgacccccagccactgaaagaacagcccgccctgaacgacagccggtactgcctgagcagcagactgagagtgtccgccaccttctggcagaacccccggaaccacttcagatgccaggtgcagttctacggcctgagcgagaacgacgagtggacccaggacagagccaagcccgtgacccagatcgtgtctgccgaagcctggggcagagccgattgcgacgtgaagctggtggaaaagagcttcgagacagacaccaacctgaacttccagaacctgagcgtgatcggcttcagaatcctgctgctgaaagtggccggctttaacctgctgatgaccctgcggctgtggtccagcagggccaagcgatctggatctggagcaacaaacttctcactactcaaacaagcaggtgacgtggaggagaatcccgggcctactagtaccatggactggatttggcgcatccttttccttgtcggcgctgctaccggcgcccattccctgttcaatcaagaggtgcagatccctctgaccgagagctactgtggcccctgtcctaagaactggatctgctacaagaacaactgctaccagttcttcgacgagagcaagaattggtacgagagccaggccagctgcatgagccagaatgccagcctgctgaaggtgtacagcaaagaggaccaggacctgctgaaactggtcaagagcgcccactggatgggccttgtgcacatccccaccaatggctcttggcagtgggaggacggcagcattctgagccctaacctgctgaccatcatcgagatgcagaagggcgactgcgccctgtacgccagcagctttaagggctacatcgagaattgcagcaccccgaacacctacatctgtatgcagagaaccgtttctggcggaggcggctctggaggaggcggaagtggcggcggaggcgacctctttaatcaagaagtccagattccactcaccgaatcctactgcggaccttgtccaaaaaattggatttgttataagaacaactgttatcaattctttgatgagtctaaaaattggtatgagtcccaggcttcctgcatgtctcagaacgcttctctgctgaaagtctactctaaagaagatcaggatctcctgaagctcgtcaagtctgcccattggatggggctcgtccacattcctaccaacggaagctggcaatgggaagatggctccatcctgtctccaaatctgctcacgattattgaaatgcagaaaggggattgtgctctctacgccagctccttcaagggatatattgagaactgtagcacgcccaatacttatatctgtatgcaacggaccgtgggatccggcggcggaggatctggcggaggcggatctgggggcggaggctctttcgaagaagttcagctggttcagagcggagccgaagtgaagaagcctggcgagagcctgaagattagctgcaaaggcagcggctacggcttcaccagctattggatcggctgggtccgacagatgcctggcaaaggactggaatggatgggcatcattcaccccgacgacagcgacaccaagtacagccctagcttccagggccaagtgaccatcagcgccgacaagagcatcagcacagcctacctccagtggtcctctctgaaggccagcgataccgccatgtactactgcgccagcagctacctgagaggactgtggggcggctacttcgatttttggggccagggcacactggtcaccgttagttctacgcgtatccagaaccctgatcctgccgtgtaccagctgcgggatagcaagagcagcgacaagagcgtgtgtctgttcaccgacttcgacagccagaccaacgtgtcccagagcaaggactccgacgtgtacatcaccgataagtgcgtgctggacatgcggagcatggacttcaagagcaactccgccgtggcctggtccaacaagtccgatttcgcctgcgccaacgccttcaacaacagcattatccccgaggacacattcttcccaagccccgagagcagctgcggctttaccagcgagagctaccagcagggcgtgctgagcgccaccatcctgtacgagatcctgctgggcaaggccaccctgtacgccgtgctggtgtctgccctggtgctgatggctatggtcaagcggaaggacagccggggacgcgccaagagaagcggatctggcgtgaagcagaccctgaatttcgacctgctgaagctggctggcgacgtggaatccaacccaggcccttctagaggccatatgaccgagtacaagcccacggtgcgcctcgccacccgcgacgacgtccccagggccgtacgcaccctcgccgccgcgttcgccgactaccccgccacgcgccacaccgtcgatccggaccgccacatcgagcgggtcaccgagctgcaagaactcttcctcacgcgcgtcgggctcgacatcggcaaggtgtgggtcgcggacgacggcgccgcggtggcggtctggaccacgccggagagcgtcgaagcgggggcggtgttcgccgagatcggcccgcgcatggccgagttgagcggttcccggctggccgcgcagcaacagatggaaggcctcctggcgccgcaccggcccaaggagcccgcgtggttcctggccaccgtcggcgtctcgcccgaccaccagggcaagggtctgggcagcgccgtcgtgctccccggagtggaggcggccgagcgcgccggggtgcccgccttcctggagacctccgcgccccgcaacctccccttctacgagcggctcggcttcaccgtcaccgccgacgtcgaggtgcccgaaggaccgcgcacctggtgcatgacccgcaagcccggtgcctga

SEQ ID NO: 34573 - DNA, 1887 bp, synthetic construct
  source 1..1887: mol_type = other DNA
atggccttaccagtgaccgccttgctcctgccgctggccttgctgctccacgccgccaggccggaactgcaaagcgtgctgacacagcctcctagcgcctctggaacacctggacagagagtgacaatcagctgctccggcagctccagcaacatcggcagcaactacgtgaactggtatcagcagctgcctggcacagcccctaaactgctgatctacggcgactaccagaggccaagcggcgtgccagatagattcagcggcagcaagtctggcacaagcgccagcctggctatctctggactgagaagcgaggacgaggccgactactactgtgccaccagagatgatagcctgagcggcagcgtggtgtttggcacaggcacaaagctgacagtgctgggcctcgaggacctgaagaacgtgttcccacctgaggtggccgtgttcgagcctagcgaggccgagatcagccacacccagaaagccaccctcgtgtgcctggctaccggcttctaccccgaccatgtggaactgtcttggtgggtcaacggcaaagaggtgcacagcggcgtgtgtaccgacccccagccactgaaagaacagcccgccctgaacgacagccggtactgcctgagcagcagactgagagtgtccgccaccttctggcagaacccccggaaccacttcagatgccaggtgcagttctacggcctgagcgagaacgacgagtggacccaggacagagccaagcccgtgacccagatcgtgtctgccgaagcctggggcagagccgattgcggctttaccagcgagagctaccagcagggcgtgctgagcgccaccaacctgagcgtgatcggcttcagaatcctgctgctgaaagtggccggctttaacctgctgatgaccctgcggctgtggtccagcagggccaagcgatctggatctggagcaacaaacttctcactactcaaacaagcaggtgacgtggaggagaatcccgggcctactagtatggactggatttggcgcatccttttccttgtcggcgctgctaccggcgcgcattccttcgaagaagttcagctggttcagagcggagccgaagtgaagaagcctggcgagagcctgaagattagctgcaaaggcagcggctacggcttcaccagctattggatcggctgggtccgacagatgcctggcaaaggactggaatggatgggcatcattcaccccgacgacagcgacaccaagtacagccctagcttccagggccaagtgaccatcagcgccgacaagagcatcagcacagcctacctccagtggtcctctctgaaggccagcgataccgccatgtactactgcgccagcagctacctgagaggactgtggggcggctacttcgatttttggggccagggcacactggtcaccgttagttctacgcgtatccagaaccctgatcctgccgtgtaccagctgcgggatagcaagagcagcgacaagagcgtgtgtctgttcaccgacttcgacagccagaccaacgtgtcccagagcaaggactccgacgtgtacatcaccgataagtgcgtgctggacatgcggagcatggacttcaagagcaactccgccgtggcctggtccaacaagtccgatttcgcctgcgccaacgccttcaacaacagcattatccccgaggacacattcttcccaagccccgagagcagctgcgacgtgaagctggtggaaaagagcttcgagacagacaccaacctgaacttccagatcctgtacgagatcctgctgggcaaggccaccctgtacgccgtgctggtgtctgccctggtgctgatggctatggtcaagcggaaggacagccgggga

SEQ ID NO: 34574 - DNA, 1899 bp, synthetic construct
  source 1..1899: mol_type = other DNA
atggccttaccagtgaccgccttgctcctgccgctggccttgctgctccacgccgccaggccggaactgcaaagcgtgctgacacagcctcctagcgcctctggaacacctggacagagagtgacaatcagctgctccggcagctccagcaacatcggcagcaactacgtgaactggtatcagcagctgcctggcacagcccctaaactgctgatctacggcgactaccagaggccaagcggcgtgccagatagattcagcggcagcaagtctggcacaagcgccagcctggctatctctggactgagaagcgaggacgaggccgactactactgtgccaccagagatgatagcctgagcggcagcgtggtgtttggcacaggcacaaagctgacagtgctgggcctcgagatccagaaccctgatcctgccgtgtaccagctgcgggatagcaagagcagcgacaagagcgtgtgtctgttcaccgacttcgacagccagaccaacgtgtcccagagcaaggactccgacgtgtacatcaccgataagtgcgtgctggacatgcggagcatggacttcaagagcaactccgccgtggcctggtccaacaagtccgatttcgcctgcgccaacgccttcaacaacagcattatccccgaggacacattcttcccaagccccgagagcagctgcgacgtgaagctggtggaaaagagcttcgagacagacaccaacctgaacttccagatcctgtacgagatcctgctgggcaaggccaccctgtacgccgtgctggtgtctgccctggtgctgatggctatggtcaagcggaaggacagccggggacgcgccaagagaagcggatctggcgtgaagcagaccctgaatttcgacctgctgaagctggctggcgacgtggaatccaacccaggccctactagtatggactggatttggcgcatccttttccttgtcggcgctgctaccggcgcgcattccttcgaagaagttcagctggttcagagcggagccgaagtgaagaagcctggcgagagcctgaagattagctgcaaaggcagcggctacggcttcaccagctattggatcggctgggtccgacagatgcctggcaaaggactggaatggatgggcatcattcaccccgacgacagcgacaccaagtacagccctagcttccagggccaagtgaccatcagcgccgacaagagcatcagcacagcctacctccagtggtcctctctgaaggccagcgataccgccatgtactactgcgccagcagctacctgagaggactgtggggcggctacttcgatttttggggccagggcacactggtcaccgttagttctacgcgtgaggacctgaagaacgtgttcccacctgaggtggccgtgttcgagcctagcgaggccgagatcagccacacccagaaagccaccctcgtgtgcctggctaccggcttctaccccgaccatgtggaactgtcttggtgggtcaacggcaaagaggtgcacagcggcgtgtgtaccgacccccagccactgaaagaacagcccgccctgaacgacagccggtactgcctgagcagcagactgagagtgtccgccaccttctggcagaacccccggaaccacttcagatgccaggtgcagttctacggcctgagcgagaacgacgagtggacccaggacagagccaagcccgtgacccagatcgtgtctgccgaagcctggggcagagccgattgcggctttaccagcgagagctaccagcagggcgtgctgagcgccaccaacctgagcgtgatcggcttcagaatcctgctgctgaaagtggccggctttaacctgctgatgaccctgcggctgtggtccagc

SEQ ID NO: 34575 - DNA, 2292 bp, synthetic construct
  source 1..2292: mol_type = other DNA
atggccttaccagtgaccgccttgctcctgccgctggccttgctgctccacgccgccaggccggaagtgcagctggttgaatctggcggaggactggttcagcctggcggatctctgagactgtcttgtgccgccagcggcttcagcttcagcgacttttggatgagctgggtccgacaggcccctggcaaaggacttgaatgggtcgccacaatcagccaggccggcagcgagaaggactacgtggactctgtgaagggcagattcaccatcagccgggacaacgccaagaagtccctgtacctccagatgaacagcctgagagccgaggacaccgccgtgtactattgtgcctctggcgtgtacagcttcgactacagaggccagggcaccctggtcacagtctcttctggtaccggcggaggcggatctggcggcggaggtagcggtggcggaggatctgaattcgaactgcaaagcgtgctgacacagcctcctagcgcctctggaacacctggacagagagtgacaatcagctgctccggcagctccagcaacatcggcagcaactacgtgaactggtatcagcagctgcctggcacagcccctaaactgctgatctacggcgactaccagaggccaagcggcgtgccagatagattcagcggcagcaagtctggcacaagcgccagcctggctatctctggactgagaagcgaggacgaggccgactactactgtgccaccagagatgatagcctgagcggcagcgtggtgtttggcacaggcacaaagctgacagtgctgggcctcgaggacctgaagaacgtgttcccacctgaggtggccgtgttcgagcctagcgaggccgagatcagccacacccagaaagccaccctcgtgtgcctggctaccggcttctaccccgaccatgtggaactgtcttggtgggtcaacggcaaagaggtgcacagcggcgtgtgtaccgacccccagccactgaaagaacagcccgccctgaacgacagccggtactgcctgagcagcagactgagagtgtccgccaccttctggcagaacccccggaaccacttcagatgccaggtgcagttctacggcctgagcgagaacgacgagtggacccaggacagagccaagcccgtgacccagatcgtgtctgccgaagcctggggcagagccgattgcggctttaccagcgagagctaccagcagggcgtgctgagcgccaccaacctgagcgtgatcggcttcagaatcctgctgctgaaagtggccggctttaacctgctgatgaccctgcggctgtggtccagcagggccaagcgatctggatctggagcaacaaacttctcactactcaaacaagcaggtgacgtggaggagaatcccgggcctactagtatggactggatttggcgcatccttttccttgtcggcgctgctaccggcgcgcattccttcgaagaagttcagctggttcagagcggagccgaagtgaagaagcctggcgagagcctgaagattagctgcaaaggcagcggctacggcttcaccagctattggatcggctgggtccgacagatgcctggcaaaggactggaatggatgggcatcattcaccccgacgacagcgacaccaagtacagccctagcttccagggccaagtgaccatcagcgccgacaagagcatcagcacagcctacctccagtggtcctctctgaaggccagcgataccgccatgtactactgcgccagcagctacctgagaggactgtggggcggctacttcgatttttggggccagggcacactggtcaccgttagttctacgcgtatccagaaccctgatcctgccgtgtaccagctgcgggatagcaagagcagcgacaagagcgtgtgtctgttcaccgacttcgacagccagaccaacgtgtcccagagcaaggactccgacgtgtacatcaccgataagtgcgtgctggacatgcggagcatggacttcaagagcaactccgccgtggcctggtccaacaagtccgatttcgcctgcgccaacgccttcaacaacagcattatccccgaggacacattcttcccaagccccgagagcagctgcgacgtgaagctggtggaaaagagcttcgagacagacaccaacctgaacttccagatcctgtacgagatcctgctgggcaaggccaccctgtacgccgtgctggtgtctgccctggtgctgatggctatggtcaagcggaaggacagccgggga

SEQ ID NO: 34576 - DNA, 2304 bp, synthetic construct
  source 1..2304: mol_type = other DNA
atggccttaccagtgaccgccttgctcctgccgctggccttgctgctccacgccgccaggccggaagtgcagctggttgaatctggcggaggactggttcagcctggcggatctctgagactgtcttgtgccgccagcggcttcagcttcagcgacttttggatgagctgggtccgacaggcccctggcaaaggacttgaatgggtcgccacaatcagccaggccggcagcgagaaggactacgtggactctgtgaagggcagattcaccatcagccgggacaacgccaagaagtccctgtacctccagatgaacagcctgagagccgaggacaccgccgtgtactattgtgcctctggcgtgtacagcttcgactacagaggccagggcaccctggtcacagtctcttctggtaccggcggaggcggatctggcggcggaggtagcggtggcggaggatctgaattcgaactgcaaagcgtgctgacacagcctcctagcgcctctggaacacctggacagagagtgacaatcagctgctccggcagctccagcaacatcggcagcaactacgtgaactggtatcagcagctgcctggcacagcccctaaactgctgatctacggcgactaccagaggccaagcggcgtgccagatagattcagcggcagcaagtctggcacaagcgccagcctggctatctctggactgagaagcgaggacgaggccgactactactgtgccaccagagatgatagcctgagcggcagcgtggtgtttggcacaggcacaaagctgacagtgctgggcctcgagatccagaaccctgatcctgccgtgtaccagctgcgggatagcaagagcagcgacaagagcgtgtgtctgttcaccgacttcgacagccagaccaacgtgtcccagagcaaggactccgacgtgtacatcaccgataagtgcgtgctggacatgcggagcatggacttcaagagcaactccgccgtggcctggtccaacaagtccgatttcgcctgcgccaacgccttcaacaacagcattatccccgaggacacattcttcccaagccccgagagcagctgcgacgtgaagctggtggaaaagagcttcgagacagacaccaacctgaacttccagatcctgtacgagatcctgctgggcaaggccaccctgtacgccgtgctggtgtctgccctggtgctgatggctatggtcaagcggaaggacagccggggacgcgccaagagaagcggatctggcgtgaagcagaccctgaatttcgacctgctgaagctggctggcgacgtggaatccaacccaggccctactagtatggactggatttggcgcatccttttccttgtcggcgctgctaccggcgcgcattccttcgaagaagttcagctggttcagagcggagccgaagtgaagaagcctggcgagagcctgaagattagctgcaaaggcagcggctacggcttcaccagctattggatcggctgggtccgacagatgcctggcaaaggactggaatggatgggcatcattcaccccgacgacagcgacaccaagtacagccctagcttccagggccaagtgaccatcagcgccgacaagagcatcagcacagcctacctccagtggtcctctctgaaggccagcgataccgccatgtactactgcgccagcagctacctgagaggactgtggggcggctacttcgatttttggggccagggcacactggtcaccgttagttctacgcgtgaggacctgaagaacgtgttcccacctgaggtggccgtgttcgagcctagcgaggccgagatcagccacacccagaaagccaccctcgtgtgcctggctaccggcttctaccccgaccatgtggaactgtcttggtgggtcaacggcaaagaggtgcacagcggcgtgtgtaccgacccccagccactgaaagaacagcccgccctgaacgacagccggtactgcctgagcagcagactgagagtgtccgccaccttctggcagaacccccggaaccacttcagatgccaggtgcagttctacggcctgagcgagaacgacgagtggacccaggacagagccaagcccgtgacccagatcgtgtctgccgaagcctggggcagagccgattgcggctttaccagcgagagctaccagcagggcgtgctgagcgccaccaacctgagcgtgatcggcttcagaatcctgctgctgaaagtggccggctttaacctgctgatgaccctgcggctgtggtccagc

SEQ ID NO: 34577 - DNA, 2703 bp, synthetic construct
  source 1..2703: mol_type = other DNA
atggccttaccagtgaccgccttgctcctgccgctggccttgctgctccacgccgccaggccggaagtgcagctggttgaatctggcggaggactggttcagcctggcggatctctgagactgtcttgtgccgccagcggcttcagcttcagcgacttttggatgagctgggtccgacaggcccctggcaaaggacttgaatgggtcgccacaatcagccaggccggcagcgagaaggactacgtggactctgtgaagggcagattcaccatcagccgggacaacgccaagaagtccctgtacctccagatgaacagcctgagagccgaggacaccgccgtgtactattgtgcctctggcgtgtacagcttcgactacagaggccagggcaccctggtcacagtctcttctggtaccggcggaggcggatctggcggcggaggtagcggtggcggaggatctgaattcgaactgcaaagcgtgctgacacagcctcctagcgcctctggaacacctggacagagagtgacaatcagctgctccggcagctccagcaacatcggcagcaactacgtgaactggtatcagcagctgcctggcacagcccctaaactgctgatctacggcgactaccagaggccaagcggcgtgccagatagattcagcggcagcaagtctggcacaagcgccagcctggctatctctggactgagaagcgaggacgaggccgactactactgtgccaccagagatgatagcctgagcggcagcgtggtgtttggcacaggcacaaagctgacagtgctgggcctcgaggacctgaagaacgtgttcccacctgaggtggccgtgttcgagcctagcgaggccgagatcagccacacccagaaagccaccctcgtgtgcctggctaccggcttctaccccgaccatgtggaactgtcttggtgggtcaacggcaaagaggtgcacagcggcgtgtgtaccgacccccagccactgaaagaacagcccgccctgaacgacagccggtactgcctgagcagcagactgagagtgtccgccaccttctggcagaacccccggaaccacttcagatgccaggtgcagttctacggcctgagcgagaacgacgagtggacccaggacagagccaagcccgtgacccagatcgtgtctgccgaagcctggggcagagccgattgcggctttaccagcgagagctaccagcagggcgtgctgagcgccaccaacctgagcgtgatcggcttcagaatcctgctgctgaaagtggccggctttaacctgctgatgaccctgcggctgtggtccagcagggccaagcgatctggatctggagcaacaaacttctcactactcaaacaagcaggtgacgtggaggagaatcccgggcctactagtatggactggatttggcgcatccttttccttgtcggcgctgctaccggcgcgcattccgggccccagctccagctgcaagagtctggacctggcctggtcaagcctagcgagacactgagcctgacctgtaccgtgtccggcgatagcatcagcagcggcgattactactggggctggatcagacagcctcctggcaaaggactggaatggatcggccacatctactacagcggcgtgacctactacaaccccagcctgaagtccagagtgaccatcagcgtggacaccagccggaaccagttctccctgaagctgtctagcgtgacagccgccgataccgccgtgtactactgcaccagagaggacagcagcaactggcggagtagaggccagggaacactggtcacagttagctctggatccggcggaggcggaagtggaggcggaggatctggcggcggaggctctttcgaagaagttcagctggttcagagcggagccgaagtgaagaagcctggcgagagcctgaagattagctgcaaaggcagcggctacggcttcaccagctattggatcggctgggtccgacagatgcctggcaaaggactggaatggatgggcatcattcaccccgacgacagcgacaccaagtacagccctagcttccagggccaagtgaccatcagcgccgacaagagcatcagcacagcctacctccagtggtcctctctgaaggccagcgataccgccatgtactactgcgccagcagctacctgagaggactgtggggcggctacttcgatttttggggccagggcacactggtcaccgttagttctacgcgtatccagaaccctgatcctgccgtgtaccagctgcgggatagcaagagcagcgacaagagcgtgtgtctgttcaccgacttcgacagccagaccaacgtgtcccagagcaaggactccgacgtgtacatcaccgataagtgcgtgctggacatgcggagcatggacttcaagagcaactccgccgtggcctggtccaacaagtccgatttcgcctgcgccaacgccttcaacaacagcattatccccgaggacacattcttcccaagccccgagagcagctgcgacgtgaagctggtggaaaagagcttcgagacagacaccaacctgaacttccagatcctgtacgagatcctgctgggcaaggccaccctgtacgccgtgctggtgtctgccctggtgctgatggctatggtcaagcggaaggacagccgggga

SEQ ID NO: 34578 - DNA, 2715 bp, synthetic construct
  source 1..2715: mol_type = other DNA
atggccttaccagtgaccgccttgctcctgccgctggccttgctgctccacgccgccaggccggaagtgcagctggttgaatctggcggaggactggttcagcctggcggatctctgagactgtcttgtgccgccagcggcttcagcttcagcgacttttggatgagctgggtccgacaggcccctggcaaaggacttgaatgggtcgccacaatcagccaggccggcagcgagaaggactacgtggactctgtgaagggcagattcaccatcagccgggacaacgccaagaagtccctgtacctccagatgaacagcctgagagccgaggacaccgccgtgtactattgtgcctctggcgtgtacagcttcgactacagaggccagggcaccctggtcacagtctcttctggtaccggcggaggcggatctggcggcggaggtagcggtggcggaggatctgaattcgaactgcaaagcgtgctgacacagcctcctagcgcctctggaacacctggacagagagtgacaatcagctgctccggcagctccagcaacatcggcagcaactacgtgaactggtatcagcagctgcctggcacagcccctaaactgctgatctacggcgactaccagaggccaagcggcgtgccagatagattcagcggcagcaagtctggcacaagcgccagcctggctatctctggactgagaagcgaggacgaggccgactactactgtgccaccagagatgatagcctgagcggcagcgtggtgtttggcacaggcacaaagctgacagtgctgggcctcgagatccagaaccctgatcctgccgtgtaccagctgcgggatagcaagagcagcgacaagagcgtgtgtctgttcaccgacttcgacagccagaccaacgtgtcccagagcaaggactccgacgtgtacatcaccgataagtgcgtgctggacatgcggagcatggacttcaagagcaactccgccgtggcctggtccaacaagtccgatttcgcctgcgccaacgccttcaacaacagcattatccccgaggacacattcttcccaagccccgagagcagctgcgacgtgaagctggtggaaaagagcttcgagacagacaccaacctgaacttccagatcctgtacgagatcctgctgggcaaggccaccctgtacgccgtgctggtgtctgccctggtgctgatggctatggtcaagcggaaggacagccggggacgcgccaagagaagcggatctggcgtgaagcagaccctgaatttcgacctgctgaagctggctggcgacgtggaatccaacccaggccctactagtatggactggatttggcgcatccttttccttgtcggcgctgctaccggcgcgcattccgggccccagctccagctgcaagagtctggacctggcctggtcaagcctagcgagacactgagcctgacctgtaccgtgtccggcgatagcatcagcagcggcgattactactggggctggatcagacagcctcctggcaaaggactggaatggatcggccacatctactacagcggcgtgacctactacaaccccagcctgaagtccagagtgaccatcagcgtggacaccagccggaaccagttctccctgaagctgtctagcgtgacagccgccgataccgccgtgtactactgcaccagagaggacagcagcaactggcggagtagaggccagggaacactggtcacagttagctctggatccggcggaggcggaagtggaggcggaggatctggcggcggaggctctttcgaagaagttcagctggttcagagcggagccgaagtgaagaagcctggcgagagcctgaagattagctgcaaaggcagcggctacggcttcaccagctattggatcggctgggtccgacagatgcctggcaaaggactggaatggatgggcatcattcaccccgacgacagcgacaccaagtacagccctagcttccagggccaagtgaccatcagcgccgacaagagcatcagcacagcctacctccagtggtcctctctgaaggccagcgataccgccatgtactactgcgccagcagctacctgagaggactgtggggcggctacttcgatttttggggccagggcacactggtcaccgttagttctacgcgtgaggacctgaagaacgtgttcccacctgaggtggccgtgttcgagcctagcgaggccgagatcagccacacccagaaagccaccctcgtgtgcctggctaccggcttctaccccgaccatgtggaactgtcttggtgggtcaacggcaaagaggtgcacagcggcgtgtgtaccgacccccagccactgaaagaacagcccgccctgaacgacagccggtactgcctgagcagcagactgagagtgtccgccaccttctggcagaacccccggaaccacttcagatgccaggtgcagttctacggcctgagcgagaacgacgagtggacccaggacagagccaagcccgtgacccagatcgtgtctgccgaagcctggggcagagccgattgcggctttaccagcgagagctaccagcagggcgtgctgagcgccaccaacctgagcgtgatcggcttcagaatcctgctgctgaaagtggccggctttaacctgctgatgaccctgcggctgtggtccagc

SEQ ID NO: 34579 - DNA, 2199 bp, synthetic construct
  source 1..2199: mol_type = other DNA
atggccttaccagtgaccgccttgctcctgccgctggccttgctgctccacgccgccaggccggaactgcaaagcgtgctgacacagcctcctagcgcctctggaacacctggacagagagtgacaatcagctgctccggcagctccagcaacatcggcagcaactacgtgaactggtatcagcagctgcctggcacagcccctaaactgctgatctacggcgactaccagaggccaagcggcgtgccagatagattcagcggcagcaagtctggcacaagcgccagcctggctatctctggactgagaagcgaggacgaggccgactactactgtgccaccagagatgatagcctgagcggcagcgtggtgtttggcacaggcacaaagctgacagtgctgggcctcgaggacctgaagaacgtgttcccacctgaggtggccgtgttcgagcctagcgaggccgagatcagccacacccagaaagccaccctcgtgtgcctggctaccggcttctaccccgaccatgtggaactgtcttggtgggtcaacggcaaagaggtgcacagcggcgtgtgtaccgacccccagccactgaaagaacagcccgccctgaacgacagccggtactgcctgagcagcagactgagagtgtccgccaccttctggcagaacccccggaaccacttcagatgccaggtgcagttctacggcctgagcgagaacgacgagtggacccaggacagagccaagcccgtgacccagatcgtgtctgccgaagcctggggcagagccgatgatgtgattaagatccactggcaggaaaagaagtccaacaccatcctgggcagccaggaaggcaacaccatgaagaccaacgacacctacatgaagttcagctggctgaccgtgcccgagaagtccctggacaaagaacacagatgcatcgtgcggcacgaaaacaacaagaacggcgtggaccaggaaatcatcttcccacccatcaagaccgatgtgattacaatggaccccaaggacaactgctccaaggacgccaacgataccctgctgctccagctgaccaacaccagcgcctactacatgtacttgttgctgctgctgaagtccgtggtgtacttcgccatcatcacatgctgcctgctgatggctatggtcaagcggaaggacagccggggaagggccaagcgatctggatctggagcaacaaacttctcactactcaaacaagcaggtgacgtggaggagaatcccgggcctactagtatggactggatttggcgcatccttttccttgtcggcgctgctaccggcgcgcattccttcgaagaagttcagctggttcagagcggagccgaagtgaagaagcctggcgagagcctgaagattagctgcaaaggcagcggctacggcttcaccagctattggatcggctgggtccgacagatgcctggcaaaggactggaatggatgggcatcattcaccccgacgacagcgacaccaagtacagccctagcttccagggccaagtgaccatcagcgccgacaagagcatcagcacagcctacctccagtggtcctctctgaaggccagcgataccgccatgtactactgcgccagcagctacctgagaggactgtggggcggctacttcgatttttggggccagggcacactggtcaccgttagttctacgcgtatccagaaccctgatcctgccgtgtaccagctgcgggatagcaagagcagcgacaagagcgtgtgtctgttcaccgacttcgacagccagaccaacgtgtcccagagcaaggactccgacgtgtacatcaccgataagtgcgtgctggacatgcggagcatggacttcaagagcaactccgccgtggcctggtccaacaagtccgatttcgcctgcgccaacgccttcaacaacagcattatccccgaggacacattcttcccaagccccgagagcagcgactccaccgaccacgtgaagcccaaagagacagagaacaccaagcagcccagcaagagctgccacaagcccaaggccatcgtgcacaccgagaaagtgaacatgatgagcctgaccgtgctgggcctgcggatgctgttcgccaaaaccgtggccgtgaacttcctgctgaccgccaagctgttcttcctcctcaccgcc

SEQ ID NO: 34580 - DNA, 2211 bp, synthetic construct
  source 1..2211: mol_type = other DNA
atggccttaccagtgaccgccttgctcctgccgctggccttgctgctccacgccgccaggccggaactgcaaagcgtgctgacacagcctcctagcgcctctggaacacctggacagagagtgacaatcagctgctccggcagctccagcaacatcggcagcaactacgtgaactggtatcagcagctgcctggcacagcccctaaactgctgatctacggcgactaccagaggccaagcggcgtgccagatagattcagcggcagcaagtctggcacaagcgccagcctggctatctctggactgagaagcgaggacgaggccgactactactgtgccaccagagatgatagcctgagcggcagcgtggtgtttggcacaggcacaaagctgacagtgctgggcctcgagatccagaaccctgatcctgccgtgtaccagctgcgggatagcaagagcagcgacaagagcgtgtgtctgttcaccgacttcgacagccagaccaacgtgtcccagagcaaggactccgacgtgtacatcaccgataagtgcgtgctggacatgcggagcatggacttcaagagcaactccgccgtggcctggtccaacaagtccgatttcgcctgcgccaacgccttcaacaacagcattatccccgaggacacattcttcccaagccccgagagcagcgactccaccgaccacgtgaagcccaaagagacagagaacaccaagcagcccagcaagagctgccacaagcccaaggccatcgtgcacaccgagaaagtgaacatgatgagcctgaccgtgctgggcctgcggatgctgttcgccaaaaccgtggccgtgaacttcctgctgaccgccaagctgttcttcctcctcaccgcccgcgccaagagaagcggatctggcgtgaagcagaccctgaatttcgacctgctgaagctggctggcgacgtggaatccaacccaggccctactagtatggactggatttggcgcatccttttccttgtcggcgctgctaccggcgcgcattccttcgaagaagttcagctggttcagagcggagccgaagtgaagaagcctggcgagagcctgaagattagctgcaaaggcagcggctacggcttcaccagctattggatcggctgggtccgacagatgcctggcaaaggactggaatggatgggcatcattcaccccgacgacagcgacaccaagtacagccctagcttccagggccaagtgaccatcagcgccgacaagagcatcagcacagcctacctccagtggtcctctctgaaggccagcgataccgccatgtactactgcgccagcagctacctgagaggactgtggggcggctacttcgatttttggggccagggcacactggtcaccgttagttctacgcgtgaggacctgaagaacgtgttcccacctgaggtggccgtgttcgagcctagcgaggccgagatcagccacacccagaaagccaccctcgtgtgcctggctaccggcttctaccccgaccatgtggaactgtcttggtgggtcaacggcaaagaggtgcacagcggcgtgtgtaccgacccccagccactgaaagaacagcccgccctgaacgacagccggtactgcctgagcagcagactgagagtgtccgccaccttctggcagaacccccggaaccacttcagatgccaggtgcagttctacggcctgagcgagaacgacgagtggacccaggacagagccaagcccgtgacccagatcgtgtctgccgaagcctggggcagagccgatgatgtgattaagatccactggcaggaaaagaagtccaacaccatcctgggcagccaggaaggcaacaccatgaagaccaacgacacctacatgaagttcagctggctgaccgtgcccgagaagtccctggacaaagaacacagatgcatcgtgcggcacgaaaacaacaagaacggcgtggaccaggaaatcatcttcccacccatcaagaccgatgtgattacaatggaccccaaggacaactgctccaaggacgccaacgataccctgctgctccagctgaccaacaccagcgcctactacatgtacttgttgctgctgctgaagtccgtggtgtacttcgccatcatcacatgctgcctgctgatggctatggtcaagcggaaggacagccgggga

SEQ ID NO: 34581 - DNA, 2604 bp, synthetic construct
  source 1..2604: mol_type = other DNA
atggccttaccagtgaccgccttgctcctgccgctggccttgctgctccacgccgccaggccggaagtgcagctggttgaatctggcggaggactggttcagcctggcggatctctgagactgtcttgtgccgccagcggcttcagcttcagcgacttttggatgagctgggtccgacaggcccctggcaaaggacttgaatgggtcgccacaatcagccaggccggcagcgagaaggactacgtggactctgtgaagggcagattcaccatcagccgggacaacgccaagaagtccctgtacctccagatgaacagcctgagagccgaggacaccgccgtgtactattgtgcctctggcgtgtacagcttcgactacagaggccagggcaccctggtcacagtctcttctggtaccggcggaggcggatctggcggcggaggtagcggtggcggaggatctgaattcgaactgcaaagcgtgctgacacagcctcctagcgcctctggaacacctggacagagagtgacaatcagctgctccggcagctccagcaacatcggcagcaactacgtgaactggtatcagcagctgcctggcacagcccctaaactgctgatctacggcgactaccagaggccaagcggcgtgccagatagattcagcggcagcaagtctggcacaagcgccagcctggctatctctggactgagaagcgaggacgaggccgactactactgtgccaccagagatgatagcctgagcggcagcgtggtgtttggcacaggcacaaagctgacagtgctgggcctcgaggacctgaagaacgtgttcccacctgaggtggccgtgttcgagcctagcgaggccgagatcagccacacccagaaagccaccctcgtgtgcctggctaccggcttctaccccgaccatgtggaactgtcttggtgggtcaacggcaaagaggtgcacagcggcgtgtgtaccgacccccagccactgaaagaacagcccgccctgaacgacagccggtactgcctgagcagcagactgagagtgtccgccaccttctggcagaacccccggaaccacttcagatgccaggtgcagttctacggcctgagcgagaacgacgagtggacccaggacagagccaagcccgtgacccagatcgtgtctgccgaagcctggggcagagccgatgatgtgattaagatccactggcaggaaaagaagtccaacaccatcctgggcagccaggaaggcaacaccatgaagaccaacgacacctacatgaagttcagctggctgaccgtgcccgagaagtccctggacaaagaacacagatgcatcgtgcggcacgaaaacaacaagaacggcgtggaccaggaaatcatcttcccacccatcaagaccgatgtgattacaatggaccccaaggacaactgctccaaggacgccaacgataccctgctgctccagctgaccaacaccagcgcctactacatgtacttgttgctgctgctgaagtccgtggtgtacttcgccatcatcacatgctgcctgctgatggctatggtcaagcggaaggacagccggggaagggccaagcgatctggatctggagcaacaaacttctcactactcaaacaagcaggtgacgtggaggagaatcccgggcctactagtatggactggatttggcgcatccttttccttgtcggcgctgctaccggcgcgcattccttcgaagaagttcagctggttcagagcggagccgaagtgaagaagcctggcgagagcctgaagattagctgcaaaggcagcggctacggcttcaccagctattggatcggctgggtccgacagatgcctggcaaaggactggaatggatgggcatcattcaccccgacgacagcgacaccaagtacagccctagcttccagggccaagtgaccatcagcgccgacaagagcatcagcacagcctacctccagtggtcctctctgaaggccagcgataccgccatgtactactgcgccagcagctacctgagaggactgtggggcggctacttcgatttttggggccagggcacactggtcaccgttagttctacgcgtatccagaaccctgatcctgccgtgtaccagctgcgggatagcaagagcagcgacaagagcgtgtgtctgttcaccgacttcgacagccagaccaacgtgtcccagagcaaggactccgacgtgtacatcaccgataagtgcgtgctggacatgcggagcatggacttcaagagcaactccgccgtggcctggtccaacaagtccgatttcgcctgcgccaacgccttcaacaacagcattatccccgaggacacattcttcccaagccccgagagcagcgactccaccgaccacgtgaagcccaaagagacagagaacaccaagcagcccagcaagagctgccacaagcccaaggccatcgtgcacaccgagaaagtgaacatgatgagcctgaccgtgctgggcctgcggatgctgttcgccaaaaccgtggccgtgaacttcctgctgaccgccaagctgttcttcctcctcaccgcc

SEQ ID NO: 34582 - DNA, 2616 bp, synthetic construct
  source 1..2616: mol_type = other DNA
atggccttaccagtgaccgccttgctcctgccgctggccttgctgctccacgccgccaggccggaagtgcagctggttgaatctggcggaggactggttcagcctggcggatctctgagactgtcttgtgccgccagcggcttcagcttcagcgacttttggatgagctgggtccgacaggcccctggcaaaggacttgaatgggtcgccacaatcagccaggccggcagcgagaaggactacgtggactctgtgaagggcagattcaccatcagccgggacaacgccaagaagtccctgtacctccagatgaacagcctgagagccgaggacaccgccgtgtactattgtgcctctggcgtgtacagcttcgactacagaggccagggcaccctggtcacagtctcttctggtaccggcggaggcggatctggcggcggaggtagcggtggcggaggatctgaattcgaactgcaaagcgtgctgacacagcctcctagcgcctctggaacacctggacagagagtgacaatcagctgctccggcagctccagcaacatcggcagcaactacgtgaactggtatcagcagctgcctggcacagcccctaaactgctgatctacggcgactaccagaggccaagcggcgtgccagatagattcagcggcagcaagtctggcacaagcgccagcctggctatctctggactgagaagcgaggacgaggccgactactactgtgccaccagagatgatagcctgagcggcagcgtggtgtttggcacaggcacaaagctgacagtgctgggcctcgagatccagaaccctgatcctgccgtgtaccagctgcgggatagcaagagcagcgacaagagcgtgtgtctgttcaccgacttcgacagccagaccaacgtgtcccagagcaaggactccgacgtgtacatcaccgataagtgcgtgctggacatgcggagcatggacttcaagagcaactccgccgtggcctggtccaacaagtccgatttcgcctgcgccaacgccttcaacaacagcattatccccgaggacacattcttcccaagccccgagagcagcgactccaccgaccacgtgaagcccaaagagacagagaacaccaagcagcccagcaagagctgccacaagcccaaggccatcgtgcacaccgagaaagtgaacatgatgagcctgaccgtgctgggcctgcggatgctgttcgccaaaaccgtggccgtgaacttcctgctgaccgccaagctgttcttcctcctcaccgcccgcgccaagagaagcggatctggcgtgaagcagaccctgaatttcgacctgctgaagctggctggcgacgtggaatccaacccaggccctactagtatggactggatttggcgcatccttttccttgtcggcgctgctaccggcgcgcattccttcgaagaagttcagctggttcagagcggagccgaagtgaagaagcctggcgagagcctgaagattagctgcaaaggcagcggctacggcttcaccagctattggatcggctgggtccgacagatgcctggcaaaggactggaatggatgggcatcattcaccccgacgacagcgacaccaagtacagccctagcttccagggccaagtgaccatcagcgccgacaagagcatcagcacagcctacctccagtggtcctctctgaaggccagcgataccgccatgtactactgcgccagcagctacctgagaggactgtggggcggctacttcgatttttggggccagggcacactggtcaccgttagttctacgcgtgaggacctgaagaacgtgttcccacctgaggtggccgtgttcgagcctagcgaggccgagatcagccacacccagaaagccaccctcgtgtgcctggctaccggcttctaccccgaccatgtggaactgtcttggtgggtcaacggcaaagaggtgcacagcggcgtgtgtaccgacccccagccactgaaagaacagcccgccctgaacgacagccggtactgcctgagcagcagactgagagtgtccgccaccttctggcagaacccccggaaccacttcagatgccaggtgcagttctacggcctgagcgagaacgacgagtggacccaggacagagccaagcccgtgacccagatcgtgtctgccgaagcctggggcagagccgatgatgtgattaagatccactggcaggaaaagaagtccaacaccatcctgggcagccaggaaggcaacaccatgaagaccaacgacacctacatgaagttcagctggctgaccgtgcccgagaagtccctggacaaagaacacagatgcatcgtgcggcacgaaaacaacaagaacggcgtggaccaggaaatcatcttcccacccatcaagaccgatgtgattacaatggaccccaaggacaactgctccaaggacgccaacgataccctgctgctccagctgaccaacaccagcgcctactacatgtacttgttgctgctgctgaagtccgtggtgtacttcgccatcatcacatgctgcctgctgatggctatggtcaagcggaaggacagccgggga

SEQ ID NO: 34583 - DNA, 3015 bp, synthetic construct
  source 1..3015: mol_type = other DNA
atggccttaccagtgaccgccttgctcctgccgctggccttgctgctccacgccgccaggccggaagtgcagctggttgaatctggcggaggactggttcagcctggcggatctctgagactgtcttgtgccgccagcggcttcagcttcagcgacttttggatgagctgggtccgacaggcccctggcaaaggacttgaatgggtcgccacaatcagccaggccggcagcgagaaggactacgtggactctgtgaagggcagattcaccatcagccgggacaacgccaagaagtccctgtacctccagatgaacagcctgagagccgaggacaccgccgtgtactattgtgcctctggcgtgtacagcttcgactacagaggccagggcaccctggtcacagtctcttctggtaccggcggaggcggatctggcggcggaggtagcggtggcggaggatctgaattcgaactgcaaagcgtgctgacacagcctcctagcgcctctggaacacctggacagagagtgacaatcagctgctccggcagctccagcaacatcggcagcaactacgtgaactggtatcagcagctgcctggcacagcccctaaactgctgatctacggcgactaccagaggccaagcggcgtgccagatagattcagcggcagcaagtctggcacaagcgccagcctggctatctctggactgagaagcgaggacgaggccgactactactgtgccaccagagatgatagcctgagcggcagcgtggtgtttggcacaggcacaaagctgacagtgctgggcctcgaggacctgaagaacgtgttcccacctgaggtggccgtgttcgagcctagcgaggccgagatcagccacacccagaaagccaccctcgtgtgcctggctaccggcttctaccccgaccatgtggaactgtcttggtgggtcaacggcaaagaggtgcacagcggcgtgtgtaccgacccccagccactgaaagaacagcccgccctgaacgacagccggtactgcctgagcagcagactgagagtgtccgccaccttctggcagaacccccggaaccacttcagatgccaggtgcagttctacggcctgagcgagaacgacgagtggacccaggacagagccaagcccgtgacccagatcgtgtctgccgaagcctggggcagagccgatgatgtgattaagatccactggcaggaaaagaagtccaacaccatcctgggcagccaggaaggcaacaccatgaagaccaacgacacctacatgaagttcagctggctgaccgtgcccgagaagtccctggacaaagaacacagatgcatcgtgcggcacgaaaacaacaagaacggcgtggaccaggaaatcatcttcccacccatcaagaccgatgtgattacaatggaccccaaggacaactgctccaaggacgccaacgataccctgctgctccagctgaccaacaccagcgcctactacatgtacttgttgctgctgctgaagtccgtggtgtacttcgccatcatcacatgctgcctgctgatggctatggtcaagcggaaggacagccggggaagggccaagcgatctggatctggagcaacaaacttctcactactcaaacaagcaggtgacgtggaggagaatcccgggcctactagtatggactggatttggcgcatccttttccttgtcggcgctgctaccggcgcgcattccgggccccagctccagctgcaagagtctggacctggcctggtcaagcctagcgagacactgagcctgacctgtaccgtgtccggcgatagcatcagcagcggcgattactactggggctggatcagacagcctcctggcaaaggactggaatggatcggccacatctactacagcggcgtgacctactacaaccccagcctgaagtccagagtgaccatcagcgtggacaccagccggaaccagttctccctgaagctgtctagcgtgacagccgccgataccgccgtgtactactgcaccagagaggacagcagcaactggcggagtagaggccagggaacactggtcacagttagctctggatccggcggaggcggaagtggaggcggaggatctggcggcggaggctctttcgaagaagttcagctggttcagagcggagccgaagtgaagaagcctggcgagagcctgaagattagctgcaaaggcagcggctacggcttcaccagctattggatcggctgggtccgacagatgcctggcaaaggactggaatggatgggcatcattcaccccgacgacagcgacaccaagtacagccctagcttccagggccaagtgaccatcagcgccgacaagagcatcagcacagcctacctccagtggtcctctctgaaggccagcgataccgccatgtactactgcgccagcagctacctgagaggactgtggggcggctacttcgatttttggggccagggcacactggtcaccgttagttctacgcgtatccagaaccctgatcctgccgtgtaccagctgcgggatagcaagagcagcgacaagagcgtgtgtctgttcaccgacttcgacagccagaccaacgtgtcccagagcaaggactccgacgtgtacatcaccgataagtgcgtgctggacatgcggagcatggacttcaagagcaactccgccgtggcctggtccaacaagtccgatttcgcctgcgccaacgccttcaacaacagcattatccccgaggacacattcttcccaagccccgagagcagcgactccaccgaccacgtgaagcccaaagagacagagaacaccaagcagcccagcaagagctgccacaagcccaaggccatcgtgcacaccgagaaagtgaacatgatgagcctgaccgtgctgggcctgcggatgctgttcgccaaaaccgtggccgtgaacttcctgctgaccgccaagctgttcttcctcctcaccgcc

SEQ ID NO: 34584 - DNA, 3027 bp, synthetic construct
  source 1..3027: mol_type = other DNA
atggccttaccagtgaccgccttgctcctgccgctggccttgctgctccacgccgccaggccggaagtgcagctggttgaatctggcggaggactggttcagcctggcggatctctgagactgtcttgtgccgccagcggcttcagcttcagcgacttttggatgagctgggtccgacaggcccctggcaaaggacttgaatgggtcgccacaatcagccaggccggcagcgagaaggactacgtggactctgtgaagggcagattcaccatcagccgggacaacgccaagaagtccctgtacctccagatgaacagcctgagagccgaggacaccgccgtgtactattgtgcctctggcgtgtacagcttcgactacagaggccagggcaccctggtcacagtctcttctggtaccggcggaggcggatctggcggcggaggtagcggtggcggaggatctgaattcgaactgcaaagcgtgctgacacagcctcctagcgcctctggaacacctggacagagagtgacaatcagctgctccggcagctccagcaacatcggcagcaactacgtgaactggtatcagcagctgcctggcacagcccctaaactgctgatctacggcgactaccagaggccaagcggcgtgccagatagattcagcggcagcaagtctggcacaagcgccagcctggctatctctggactgagaagcgaggacgaggccgactactactgtgccaccagagatgatagcctgagcggcagcgtggtgtttggcacaggcacaaagctgacagtgctgggcctcgagatccagaaccctgatcctgccgtgtaccagctgcgggatagcaagagcagcgacaagagcgtgtgtctgttcaccgacttcgacagccagaccaacgtgtcccagagcaaggactccgacgtgtacatcaccgataagtgcgtgctggacatgcggagcatggacttcaagagcaactccgccgtggcctggtccaacaagtccgatttcgcctgcgccaacgccttcaacaacagcattatccccgaggacacattcttcccaagccccgagagcagcgactccaccgaccacgtgaagcccaaagagacagagaacaccaagcagcccagcaagagctgccacaagcccaaggccatcgtgcacaccgagaaagtgaacatgatgagcctgaccgtgctgggcctgcggatgctgttcgccaaaaccgtggccgtgaacttcctgctgaccgccaagctgttcttcctcctcaccgcccgcgccaagagaagcggatctggcgtgaagcagaccctgaatttcgacctgctgaagctggctggcgacgtggaatccaacccaggccctactagtatggactggatttggcgcatccttttccttgtcggcgctgctaccggcgcgcattccgggccccagctccagctgcaagagtctggacctggcctggtcaagcctagcgagacactgagcctgacctgtaccgtgtccggcgatagcatcagcagcggcgattactactggggctggatcagacagcctcctggcaaaggactggaatggatcggccacatctactacagcggcgtgacctactacaaccccagcctgaagtccagagtgaccatcagcgtggacaccagccggaaccagttctccctgaagctgtctagcgtgacagccgccgataccgccgtgtactactgcaccagagaggacagcagcaactggcggagtagaggccagggaacactggtcacagttagctctggatccggcggaggcggaagtggaggcggaggatctggcggcggaggctctttcgaagaagttcagctggttcagagcggagccgaagtgaagaagcctggcgagagcctgaagattagctgcaaaggcagcggctacggcttcaccagctattggatcggctgggtccgacagatgcctggcaaaggactggaatggatgggcatcattcaccccgacgacagcgacaccaagtacagccctagcttccagggccaagtgaccatcagcgccgacaagagcatcagcacagcctacctccagtggtcctctctgaaggccagcgataccgccatgtactactgcgccagcagctacctgagaggactgtggggcggctacttcgatttttggggccagggcacactggtcaccgttagttctacgcgtgaggacctgaagaacgtgttcccacctgaggtggccgtgttcgagcctagcgaggccgagatcagccacacccagaaagccaccctcgtgtgcctggctaccggcttctaccccgaccatgtggaactgtcttggtgggtcaacggcaaagaggtgcacagcggcgtgtgtaccgacccccagccactgaaagaacagcccgccctgaacgacagccggtactgcctgagcagcagactgagagtgtccgccaccttctggcagaacccccggaaccacttcagatgccaggtgcagttctacggcctgagcgagaacgacgagtggacccaggacagagccaagcccgtgacccagatcgtgtctgccgaagcctggggcagagccgatgatgtgattaagatccactggcaggaaaagaagtccaacaccatcctgggcagccaggaaggcaacaccatgaagaccaacgacacctacatgaagttcagctggctgaccgtgcccgagaagtccctggacaaagaacacagatgcatcgtgcggcacgaaaacaacaagaacggcgtggaccaggaaatcatcttcccacccatcaagaccgatgtgattacaatggaccccaaggacaactgctccaaggacgccaacgataccctgctgctccagctgaccaacaccagcgcctactacatgtacttgttgctgctgctgaagtccgtggtgtacttcgccatcatcacatgctgcctgctgatggctatggtcaagcggaaggacagccgggga

SEQ ID NO: 34585 - DNA, 2193 bp, synthetic construct
  source 1..2193: mol_type = other DNA
atggccttaccagtgaccgccttgctcctgccgctggccttgctgctccacgccgccaggccggaactgcaaagcgtgctgacacagcctcctagcgcctctggaacacctggacagagagtgacaatcagctgctccggcagctccagcaacatcggcagcaactacgtgaactggtatcagcagctgcctggcacagcccctaaactgctgatctacggcgactaccagaggccaagcggcgtgccagatagattcagcggcagcaagtctggcacaagcgccagcctggctatctctggactgagaagcgaggacgaggccgactactactgtgccaccagagatgatagcctgagcggcagcgtggtgtttggcacaggcacaaagctgacagtgctgggcctcgaggacctgaagaacgtgttcccacctgaggtggccgtgttcgagcctagcgaggccgagatcagccacacccagaaagccaccctcgtgtgcctggctaccggcttctaccccgaccatgtggaactgtcttggtgggtcaacggcaaagaggtgcacagcggcgtgtgtaccgacccccagccactgaaagaacagcccgccctgaacgacagccggtactgcctgagcagcagactgagagtgtccgccaccttctggcagaacccccggaaccacttcagatgccaggtgcagttctacggcctgagcgagaacgacgagtggacccaggacagagccaagcccgtgacccagatcgtgtctgccgaagcctggggcagagccgatgatgtgattaagatccactggcaggaaaagaagtccaacaccatcctgggcagccaggaaggcaacaccatgaagaccaacgacacctacatgaagttcagctggctgaccgtgcccgagaagtccctggacaaagaacacagatgcatcgtgcggcacgaaaacaacaagaacggcgtggaccaggaaatcatcttcccacccatcaagaccgatgtgattacaatggaccccaaggacaactgctccaaggacgccaacgataccctgctgctccagctgaccaacaccagcgcctactacatgtacttgttgctgctgctgaagtccgtggtgtacttcgccatcatcacatgctgcctgctgcggagaaccgccttctgctgcaacggcgagaagtctagggccaagcgatctggatctggagcaacaaacttctcactactcaaacaagcaggtgacgtggaggagaatcccgggcctactagtatggactggatttggcgcatccttttccttgtcggcgctgctaccggcgcgcattccttcgaagaagttcagctggttcagagcggagccgaagtgaagaagcctggcgagagcctgaagattagctgcaaaggcagcggctacggcttcaccagctattggatcggctgggtccgacagatgcctggcaaaggactggaatggatgggcatcattcaccccgacgacagcgacaccaagtacagccctagcttccagggccaagtgaccatcagcgccgacaagagcatcagcacagcctacctccagtggtcctctctgaaggccagcgataccgccatgtactactgcgccagcagctacctgagaggactgtggggcggctacttcgatttttggggccagggcacactggtcaccgttagttctacgcgtatccagaaccctgatcctgccgtgtaccagctgcgggatagcaagagcagcgacaagagcgtgtgtctgttcaccgacttcgacagccagaccaacgtgtcccagagcaaggactccgacgtgtacatcaccgataagtgcgtgctggacatgcggagcatggacttcaagagcaactccgccgtggcctggtccaacaagtccgatttcgcctgcgccaacgccttcaacaacagcattatccccgaggacacattcttcccaagccccgagagcagcgactccaccgaccacgtgaagcccaaagagacagagaacaccaagcagcccagcaagagctgccacaagcccaaggccatcgtgcacaccgagaaagtgaacatgatgagcctgaccgtgctgggcctgcggatgctgttcgccaaaaccgtggccgtgaacttcctgctgaccgccaagctgttcttcctc

SEQ ID NO: 34586 - DNA, 2205 bp, synthetic construct
  source 1..2205: mol_type = other DNA
atggccttaccagtgaccgccttgctcctgccgctggccttgctgctccacgccgccaggccggaactgcaaagcgtgctgacacagcctcctagcgcctctggaacacctggacagagagtgacaatcagctgctccggcagctccagcaacatcggcagcaactacgtgaactggtatcagcagctgcctggcacagcccctaaactgctgatctacggcgactaccagaggccaagcggcgtgccagatagattcagcggcagcaagtctggcacaagcgccagcctggctatctctggactgagaagcgaggacgaggccgactactactgtgccaccagagatgatagcctgagcggcagcgtggtgtttggcacaggcacaaagctgacagtgctgggcctcgagatccagaaccctgatcctgccgtgtaccagctgcgggatagcaagagcagcgacaagagcgtgtgtctgttcaccgacttcgacagccagaccaacgtgtcccagagcaaggactccgacgtgtacatcaccgataagtgcgtgctggacatgcggagcatggacttcaagagcaactccgccgtggcctggtccaacaagtccgatttcgcctgcgccaacgccttcaacaacagcattatccccgaggacacattcttcccaagccccgagagcagcgactccaccgaccacgtgaagcccaaagagacagagaacaccaagcagcccagcaagagctgccacaagcccaaggccatcgtgcacaccgagaaagtgaacatgatgagcctgaccgtgctgggcctgcggatgctgttcgccaaaaccgtggccgtgaacttcctgctgaccgccaagctgttcttcctccgcgccaagagaagcggatctggcgtgaagcagaccctgaatttcgacctgctgaagctggctggcgacgtggaatccaacccaggccctactagtatggactggatttggcgcatccttttccttgtcggcgctgctaccggcgcgcattccttcgaagaagttcagctggttcagagcggagccgaagtgaagaagcctggcgagagcctgaagattagctgcaaaggcagcggctacggcttcaccagctattggatcggctgggtccgacagatgcctggcaaaggactggaatggatgggcatcattcaccccgacgacagcgacaccaagtacagccctagcttccagggccaagtgaccatcagcgccgacaagagcatcagcacagcctacctccagtggtcctctctgaaggccagcgataccgccatgtactactgcgccagcagctacctgagaggactgtggggcggctacttcgatttttggggccagggcacactggtcaccgttagttctacgcgtgaggacctgaagaacgtgttcccacctgaggtggccgtgttcgagcctagcgaggccgagatcagccacacccagaaagccaccctcgtgtgcctggctaccggcttctaccccgaccatgtggaactgtcttggtgggtcaacggcaaagaggtgcacagcggcgtgtgtaccgacccccagccactgaaagaacagcccgccctgaacgacagccggtactgcctgagcagcagactgagagtgtccgccaccttctggcagaacccccggaaccacttcagatgccaggtgcagttctacggcctgagcgagaacgacgagtggacccaggacagagccaagcccgtgacccagatcgtgtctgccgaagcctggggcagagccgatgatgtgattaagatccactggcaggaaaagaagtccaacaccatcctgggcagccaggaaggcaacaccatgaagaccaacgacacctacatgaagttcagctggctgaccgtgcccgagaagtccctggacaaagaacacagatgcatcgtgcggcacgaaaacaacaagaacggcgtggaccaggaaatcatcttcccacccatcaagaccgatgtgattacaatggaccccaaggacaactgctccaaggacgccaacgataccctgctgctccagctgaccaacaccagcgcctactacatgtacttgttgctgctgctgaagtccgtggtgtacttcgccatcatcacatgctgcctgctgcggagaaccgccttctgctgcaacggcgagaagtct

SEQ ID NO: 34587 - DNA, 2598 bp, synthetic construct
  source 1..2598: mol_type = other DNA
atggccttaccagtgaccgccttgctcctgccgctggccttgctgctccacgccgccaggccggaagtgcagctggttgaatctggcggaggactggttcagcctggcggatctctgagactgtcttgtgccgccagcggcttcagcttcagcgacttttggatgagctgggtccgacaggcccctggcaaaggacttgaatgggtcgccacaatcagccaggccggcagcgagaaggactacgtggactctgtgaagggcagattcaccatcagccgggacaacgccaagaagtccctgtacctccagatgaacagcctgagagccgaggacaccgccgtgtactattgtgcctctggcgtgtacagcttcgactacagaggccagggcaccctggtcacagtctcttctggtaccggcggaggcggatctggcggcggaggtagcggtggcggaggatctgaattcgaactgcaaagcgtgctgacacagcctcctagcgcctctggaacacctggacagagagtgacaatcagctgctccggcagctccagcaacatcggcagcaactacgtgaactggtatcagcagctgcctggcacagcccctaaactgctgatctacggcgactaccagaggccaagcggcgtgccagatagattcagcggcagcaagtctggcacaagcgccagcctggctatctctggactgagaagcgaggacgaggccgactactactgtgccaccagagatgatagcctgagcggcagcgtggtgtttggcacaggcacaaagctgacagtgctgggcctcgaggacctgaagaacgtgttcccacctgaggtggccgtgttcgagcctagcgaggccgagatcagccacacccagaaagccaccctcgtgtgcctggctaccggcttctaccccgaccatgtggaactgtcttggtgggtcaacggcaaagaggtgcacagcggcgtgtgtaccgacccccagccactgaaagaacagcccgccctgaacgacagccggtactgcctgagcagcagactgagagtgtccgccaccttctggcagaacccccggaaccacttcagatgccaggtgcagttctacggcctgagcgagaacgacgagtggacccaggacagagccaagcccgtgacccagatcgtgtctgccgaagcctggggcagagccgatgatgtgattaagatccactggcaggaaaagaagtccaacaccatcctgggcagccaggaaggcaacaccatgaagaccaacgacacctacatgaagttcagctggctgaccgtgcccgagaagtccctggacaaagaacacagatgcatcgtgcggcacgaaaacaacaagaacggcgtggaccaggaaatcatcttcccacccatcaagaccgatgtgattacaatggaccccaaggacaactgctccaaggacgccaacgataccctgctgctccagctgaccaacaccagcgcctactacatgtacttgttgctgctgctgaagtccgtggtgtacttcgccatcatcacatgctgcctgctgcggagaaccgccttctgctgcaacggcgagaagtctagggccaagcgatctggatctggagcaacaaacttctcactactcaaacaagcaggtgacgtggaggagaatcccgggcctactagtatggactggatttggcgcatccttttccttgtcggcgctgctaccggcgcgcattccttcgaagaagttcagctggttcagagcggagccgaagtgaagaagcctggcgagagcctgaagattagctgcaaaggcagcggctacggcttcaccagctattggatcggctgggtccgacagatgcctggcaaaggactggaatggatgggcatcattcaccccgacgacagcgacaccaagtacagccctagcttccagggccaagtgaccatcagcgccgacaagagcatcagcacagcctacctccagtggtcctctctgaaggccagcgataccgccatgtactactgcgccagcagctacctgagaggactgtggggcggctacttcgatttttggggccagggcacactggtcaccgttagttctacgcgtatccagaaccctgatcctgccgtgtaccagctgcgggatagcaagagcagcgacaagagcgtgtgtctgttcaccgacttcgacagccagaccaacgtgtcccagagcaaggactccgacgtgtacatcaccgataagtgcgtgctggacatgcggagcatggacttcaagagcaactccgccgtggcctggtccaacaagtccgatttcgcctgcgccaacgccttcaacaacagcattatccccgaggacacattcttcccaagccccgagagcagcgactccaccgaccacgtgaagcccaaagagacagagaacaccaagcagcccagcaagagctgccacaagcccaaggccatcgtgcacaccgagaaagtgaacatgatgagcctgaccgtgctgggcctgcggatgctgttcgccaaaaccgtggccgtgaacttcctgctgaccgccaagctgttcttcctc

SEQ ID NO: 34588 - DNA, 3009 bp, synthetic construct
  source 1..3009: mol_type = other DNA
atggccttaccagtgaccgccttgctcctgccgctggccttgctgctccacgccgccaggccggaagtgcagctggttgaatctggcggaggactggttcagcctggcggatctctgagactgtcttgtgccgccagcggcttcagcttcagcgacttttggatgagctgggtccgacaggcccctggcaaaggacttgaatgggtcgccacaatcagccaggccggcagcgagaaggactacgtggactctgtgaagggcagattcaccatcagccgggacaacgccaagaagtccctgtacctccagatgaacagcctgagagccgaggacaccgccgtgtactattgtgcctctggcgtgtacagcttcgactacagaggccagggcaccctggtcacagtctcttctggtaccggcggaggcggatctggcggcggaggtagcggtggcggaggatctgaattcgaactgcaaagcgtgctgacacagcctcctagcgcctctggaacacctggacagagagtgacaatcagctgctccggcagctccagcaacatcggcagcaactacgtgaactggtatcagcagctgcctggcacagcccctaaactgctgatctacggcgactaccagaggccaagcggcgtgccagatagattcagcggcagcaagtctggcacaagcgccagcctggctatctctggactgagaagcgaggacgaggccgactactactgtgccaccagagatgatagcctgagcggcagcgtggtgtttggcacaggcacaaagctgacagtgctgggcctcgaggacctgaagaacgtgttcccacctgaggtggccgtgttcgagcctagcgaggccgagatcagccacacccagaaagccaccctcgtgtgcctggctaccggcttctaccccgaccatgtggaactgtcttggtgggtcaacggcaaagaggtgcacagcggcgtgtgtaccgacccccagccactgaaagaacagcccgccctgaacgacagccggtactgcctgagcagcagactgagagtgtccgccaccttctggcagaacccccggaaccacttcagatgccaggtgcagttctacggcctgagcgagaacgacgagtggacccaggacagagccaagcccgtgacccagatcgtgtctgccgaagcctggggcagagccgatgatgtgattaagatccactggcaggaaaagaagtccaacaccatcctgggcagccaggaaggcaacaccatgaagaccaacgacacctacatgaagttcagctggctgaccgtgcccgagaagtccctggacaaagaacacagatgcatcgtgcggcacgaaaacaacaagaacggcgtggaccaggaaatcatcttcccacccatcaagaccgatgtgattacaatggaccccaaggacaactgctccaaggacgccaacgataccctgctgctccagctgaccaacaccagcgcctactacatgtacttgttgctgctgctgaagtccgtggtgtacttcgccatcatcacatgctgcctgctgcggagaaccgccttctgctgcaacggcgagaagtctagggccaagcgatctggatctggagcaacaaacttctcactactcaaacaagcaggtgacgtggaggagaatcccgggcctactagtatggactggatttggcgcatccttttccttgtcggcgctgctaccggcgcgcattccgggccccagctccagctgcaagagtctggacctggcctggtcaagcctagcgagacactgagcctgacctgtaccgtgtccggcgatagcatcagcagcggcgattactactggggctggatcagacagcctcctggcaaaggactggaatggatcggccacatctactacagcggcgtgacctactacaaccccagcctgaagtccagagtgaccatcagcgtggacaccagccggaaccagttctccctgaagctgtctagcgtgacagccgccgataccgccgtgtactactgcaccagagaggacagcagcaactggcggagtagaggccagggaacactggtcacagttagctctggatccggcggaggcggaagtggaggcggaggatctggcggcggaggctctttcgaagaagttcagctggttcagagcggagccgaagtgaagaagcctggcgagagcctgaagattagctgcaaaggcagcggctacggcttcaccagctattggatcggctgggtccgacagatgcctggcaaaggactggaatggatgggcatcattcaccccgacgacagcgacaccaagtacagccctagcttccagggccaagtgaccatcagcgccgacaagagcatcagcacagcctacctccagtggtcctctctgaaggccagcgataccgccatgtactactgcgccagcagctacctgagaggactgtggggcggctacttcgatttttggggccagggcacactggtcaccgttagttctacgcgtatccagaaccctgatcctgccgtgtaccagctgcgggatagcaagagcagcgacaagagcgtgtgtctgttcaccgacttcgacagccagaccaacgtgtcccagagcaaggactccgacgtgtacatcaccgataagtgcgtgctggacatgcggagcatggacttcaagagcaactccgccgtggcctggtccaacaagtccgatttcgcctgcgccaacgccttcaacaacagcattatccccgaggacacattcttcccaagccccgagagcagcgactccaccgaccacgtgaagcccaaagagacagagaacaccaagcagcccagcaagagctgccacaagcccaaggccatcgtgcacaccgagaaagtgaacatgatgagcctgaccgtgctgggcctgcggatgctgttcgccaaaaccgtggccgtgaacttcctgctgaccgccaagctgttcttcctc

SEQ ID NO: 34589 - DNA, 1887 bp, synthetic construct
  source 1..1887: mol_type = other DNA
atggccttaccagtgaccgccttgctcctgccgctggccttgctgctccacgccgccaggccggaactgcaaagcgtgctgacacagcctcctagcgcctctggaacacctggacagagagtgacaatcagctgctccggcagctccagcaacatcggcagcaactacgtgaactggtatcagcagctgcctggcacagcccctaaactgctgatctacggcgactaccagaggccaagcggcgtgccagatagattcagcggcagcaagtctggcacaagcgccagcctggctatctctggactgagaagcgaggacgaggccgactactactgtgccaccagagatgatagcctgagcggcagcgtggtgtttggcacaggcacaaagctgacagtgctgggcctcgaggacctgaagaacgtgttcccacctgaggtggccgtgttcgagcctagcgaggccgagatcagccacacccagaaagccaccctcgtgtgcctggctaccggcttctaccccgaccatgtggaactgtcttggtgggtcaacggcaaagaggtgcacagcggcgtgtctaccgacccccagccactgaaagaacagcccgccctgaacgacagccggtactgcctgagcagcagactgagagtgtccgccaccttctggcagaacccccggaaccacttcagatgccaggtgcagttctacggcctgagcgagaacgacgagtggacccaggacagagccaagcccgtgacccagatcgtgtctgccgaagcctggggcagagccgattgcgacgtgaagctggtggaaaagagcttcgagacagacaccaacctgaacttccagaacctgagcgtgatcggcttcagaatcctgctgctgaaagtggccggctttaacctgctgatgaccctgcggctgtggtccagcagggccaagcgatctggatctggagcaacaaacttctcactactcaaacaagcaggtgacgtggaggagaatcccgggcctactagtatggactggatttggcgcatccttttccttgtcggcgctgctaccggcgcgcattccttcgaagaagttcagctggttcagagcggagccgaagtgaagaagcctggcgagagcctgaagattagctgcaaaggcagcggctacggcttcaccagctattggatcggctgggtccgacagatgcctggcaaaggactggaatggatgggcatcattcaccccgacgacagcgacaccaagtacagccctagcttccagggccaagtgaccatcagcgccgacaagagcatcagcacagcctacctccagtggtcctctctgaaggccagcgataccgccatgtactactgcgccagcagctacctgagaggactgtggggcggctacttcgatttttggggccagggcacactggtcaccgttagttctacgcgtatccagaaccctgatcctgccgtgtaccagctgcgggatagcaagagcagcgacaagagcgtgtgtctgttcaccgacttcgacagccagaccaacgtgtcccagagcaaggactccgacgtgtacatcaccgataagaccgtgctggacatgcggagcatggacttcaagagcaactccgccgtggcctggtccaacaagtccgatttcgcctgcgccaacgccttcaacaacagcattatccccgaggacacattcttcccaagccccgagagcagctgcggctttaccagcgagagctaccagcagggcgtgctgagcgccaccatcctgtacgagatcctgctgggcaaggccaccctgtacgccgtgctggtgtctgccctggtgctgatggctatggtcaagcggaaggacagccgggga

SEQ ID NO: 34590 - DNA, 1887 bp, synthetic construct
  source 1..1887: mol_type = other DNA
atggccttaccagtgaccgccttgctcctgccgctggccttgctgctccacgccgccaggccggaactgcaaagcgtgctgacacagcctcctagcgcctctggaacacctggacagagagtgacaatcagctgctccggcagctccagcaacatcggcagcaactacgtgaactggtatcagcagctgcctggcacagcccctaaactgctgatctacggcgactaccagaggccaagcggcgtgccagatagattcagcggcagcaagtctggcacaagcgccagcctggctatctctggactgagaagcgaggacgaggccgactactactgtgccaccagagatgatagcctgagcggcagcgtggtgtttggcacaggcacaaagctgacagtgctgggcctcgaggacctgaagaacgtgttcccacctgaggtggccgtgttcgagcctagcgaggccgagatcagccacacccagaaagccaccctcgtgtgcctggctaccggcttctaccccgaccatgtggaactgtcttggtgggtcaacggcaaagaggtgcacagcggcgtgtctaccgacccccagccactgaaagaacagcccgccctgaacgacagccggtactgcctgagcagcagactgagagtgtccgccaccttctggcagaacccccggaaccacttcagatgccaggtgcagttctacggcctgagcgagaacgacgagtggacccaggacagagccaagcccgtgacccagatcgtgtctgccgaagcctggggcagagccgattgcggctttaccagcgagagctaccagcagggcgtgctgagcgccaccaacctgagcgtgatcggcttcagaatcctgctgctgaaagtggccggctttaacctgctgatgaccctgcggctgtggtccagcagggccaagcgatctggatctggagcaacaaacttctcactactcaaacaagcaggtgacgtggaggagaatcccgggcctactagtatggactggatttggcgcatccttttccttgtcggcgctgctaccggcgcgcattccttcgaagaagttcagctggttcagagcggagccgaagtgaagaagcctggcgagagcctgaagattagctgcaaaggcagcggctacggcttcaccagctattggatcggctgggtccgacagatgcctggcaaaggactggaatggatgggcatcattcaccccgacgacagcgacaccaagtacagccctagcttccagggccaagtgaccatcagcgccgacaagagcatcagcacagcctacctccagtggtcctctctgaaggccagcgataccgccatgtactactgcgccagcagctacctgagaggactgtggggcggctacttcgatttttggggccagggcacactggtcaccgttagttctacgcgtatccagaaccctgatcctgccgtgtaccagctgcgggatagcaagagcagcgacaagagcgtgtgtctgttcaccgacttcgacagccagaccaacgtgtcccagagcaaggactccgacgtgtacatcaccgataagaccgtgctggacatgcggagcatggacttcaagagcaactccgccgtggcctggtccaacaagtccgatttcgcctgcgccaacgccttcaacaacagcattatccccgaggacacattcttcccaagccccgagagcagctgcgacgtgaagctggtggaaaagagcttcgagacagacaccaacctgaacttccagatcctgtacgagatcctgctgggcaaggccaccctgtacgccgtgctggtgtctgccctggtgctgatggctatggtcaagcggaaggacagccgggga

SEQ ID NO: 34591 - DNA, 2199 bp, synthetic construct
  source 1..2199: mol_type = other DNA
atggccttaccagtgaccgccttgctcctgccgctggccttgctgctccacgccgccaggccggaactgcaaagcgtgctgacacagcctcctagcgcctctggaacacctggacagagagtgacaatcagctgctccggcagctccagcaacatcggcagcaactacgtgaactggtatcagcagctgcctggcacagcccctaaactgctgatctacggcgactaccagaggccaagcggcgtgccagatagattcagcggcagcaagtctggcacaagcgccagcctggctatctctggactgagaagcgaggacgaggccgactactactgtgccaccagagatgatagcctgagcggcagcgtggtgtttggcacaggcacaaagctgacagtgctgggcctcgaggacctgaagaacgtgttcccacctgaggtggccgtgttcgagcctagcgaggccgagatcagccacacccagaaagccaccctcgtgtgcctggctaccggcttctaccccgaccatgtggaactgtcttggtgggtcaacggcaaagaggtgcacagcggcgtgtctaccgacccccagccactgaaagaacagcccgccctgaacgacagccggtactgcctgagcagcagactgagagtgtccgccaccttctggcagaacccccggaaccacttcagatgccaggtgcagttctacggcctgagcgagaacgacgagtggacccaggacagagccaagcccgtgacccagatcgtgtctgccgaagcctggggcagagccgatgatgtgattaagatccactggcaggaaaagaagtccaacaccatcctgggcagccaggaaggcaacaccatgaagaccaacgacacctacatgaagttcagctggctgaccgtgcccgagaagtccctggacaaagaacacagatgcatcgtgcggcacgaaaacaacaagaacggcgtggaccaggaaatcatcttcccacccatcaagaccgatgtgattacaatggaccccaaggacaactgctccaaggacgccaacgataccctgctgctccagctgaccaacaccagcgcctactacatgtacttgttgctgctgctgaagtccgtggtgtacttcgccatcatcacatgctgcctgctgatggctatggtcaagcggaaggacagccggggaagggccaagcgatctggatctggagcaacaaacttctcactactcaaacaagcaggtgacgtggaggagaatcccgggcctactagtatggactggatttggcgcatccttttccttgtcggcgctgctaccggcgcgcattccttcgaagaagttcagctggttcagagcggagccgaagtgaagaagcctggcgagagcctgaagattagctgcaaaggcagcggctacggcttcaccagctattggatcggctgggtccgacagatgcctggcaaaggactggaatggatgggcatcattcaccccgacgacagcgacaccaagtacagccctagcttccagggccaagtgaccatcagcgccgacaagagcatcagcacagcctacctccagtggtcctctctgaaggccagcgataccgccatgtactactgcgccagcagctacctgagaggactgtggggcggctacttcgatttttggggccagggcacactggtcaccgttagttctacgcgtatccagaaccctgatcctgccgtgtaccagctgcgggatagcaagagcagcgacaagagcgtgtgtctgttcaccgacttcgacagccagaccaacgtgtcccagagcaaggactccgacgtgtacatcaccgataagaccgtgctggacatgcggagcatggacttcaagagcaactccgccgtggcctggtccaacaagtccgatttcgcctgcgccaacgccttcaacaacagcattatccccgaggacacattcttcccaagccccgagagcagcgactccaccgaccacgtgaagcccaaagagacagagaacaccaagcagcccagcaagagctgccacaagcccaaggccatcgtgcacaccgagaaagtgaacatgatgagcctgaccgtgctgggcctgcggatgctgttcgccaaaaccgtggccgtgaacttcctgctgaccgccaagctgttcttcctcctcaccgcc

SEQ ID NO: 34592 - DNA, 2193 bp, synthetic construct
  source 1..2193: mol_type = other DNA
atggccttaccagtgaccgccttgctcctgccgctggccttgctgctccacgccgccaggccggaactgcaaagcgtgctgacacagcctcctagcgcctctggaacacctggacagagagtgacaatcagctgctccggcagctccagcaacatcggcagcaactacgtgaactggtatcagcagctgcctggcacagcccctaaactgctgatctacggcgactaccagaggccaagcggcgtgccagatagattcagcggcagcaagtctggcacaagcgccagcctggctatctctggactgagaagcgaggacgaggccgactactactgtgccaccagagatgatagcctgagcggcagcgtggtgtttggcacaggcacaaagctgacagtgctgggcctcgaggacctgaagaacgtgttcccacctgaggtggccgtgttcgagcctagcgaggccgagatcagccacacccagaaagccaccctcgtgtgcctggctaccggcttctaccccgaccatgtggaactgtcttggtgggtcaacggcaaagaggtgcacagcggcgtgtctaccgacccccagccactgaaagaacagcccgccctgaacgacagccggtactgcctgagcagcagactgagagtgtccgccaccttctggcagaacccccggaaccacttcagatgccaggtgcagttctacggcctgagcgagaacgacgagtggacccaggacagagccaagcccgtgacccagatcgtgtctgccgaagcctggggcagagccgatgatgtgattaagatccactggcaggaaaagaagtccaacaccatcctgggcagccaggaaggcaacaccatgaagaccaacgacacctacatgaagttcagctggctgaccgtgcccgagaagtccctggacaaagaacacagatgcatcgtgcggcacgaaaacaacaagaacggcgtggaccaggaaatcatcttcccacccatcaagaccgatgtgattacaatggaccccaaggacaactgctccaaggacgccaacgataccctgctgctccagctgaccaacaccagcgcctactacatgtacttgttgctgctgctgaagtccgtggtgtacttcgccatcatcacatgctgcctgctgcggagaaccgccttctgctgcaacggcgagaagtctagggccaagcgatctggatctggagcaacaaacttctcactactcaaacaagcaggtgacgtggaggagaatcccgggcctactagtatggactggatttggcgcatccttttccttgtcggcgctgctaccggcgcgcattccttcgaagaagttcagctggttcagagcggagccgaagtgaagaagcctggcgagagcctgaagattagctgcaaaggcagcggctacggcttcaccagctattggatcggctgggtccgacagatgcctggcaaaggactggaatggatgggcatcattcaccccgacgacagcgacaccaagtacagccctagcttccagggccaagtgaccatcagcgccgacaagagcatcagcacagcctacctccagtggtcctctctgaaggccagcgataccgccatgtactactgcgccagcagctacctgagaggactgtggggcggctacttcgatttttggggccagggcacactggtcaccgttagttctacgcgtatccagaaccctgatcctgccgtgtaccagctgcgggatagcaagagcagcgacaagagcgtgtgtctgttcaccgacttcgacagccagaccaacgtgtcccagagcaaggactccgacgtgtacatcaccgataagaccgtgctggacatgcggagcatggacttcaagagcaactccgccgtggcctggtccaacaagtccgatttcgcctgcgccaacgccttcaacaacagcattatccccgaggacacattcttcccaagccccgagagcagcgactccaccgaccacgtgaagcccaaagagacagagaacaccaagcagcccagcaagagctgccacaagcccaaggccatcgtgcacaccgagaaagtgaacatgatgagcctgaccgtgctgggcctgcggatgctgttcgccaaaaccgtggccgtgaacttcctgctgaccgccaagctgttcttcctc

SEQ ID NO: 34593 - DNA, 2625 bp, synthetic construct
  source 1..2625: mol_type = other DNA
atggccttaccagtgaccgccttgctcctgccgctggccttgctgctccacgccgccaggccgctcgaggaggacctgaagaacgtgttcccacctgaggtggccgtgttcgagcctagcgaggccgagatcagccacacccagaaagccaccctcgtgtgcctggctaccggcttctaccccgaccatgtggaactgtcttggtgggtcaacggcaaagaggtgcacagcggcgtgtgtaccgacccccagccactgaaagaacagcccgccctgaacgacagccggtactgcctgagcagcagactgagagtgtccgccaccttctggcagaacccccggaaccacttcagatgccaggtgcagttctacggcctgagcgagaacgacgagtggacccaggacagagccaagcccgtgacccagatcgtgtctgccgaagcctggggcagagccgattgcggctttaccagcgagagctaccagcagggcgtgctgagcgccaccaacctgagcgtgatcggcttcagaatcctgctgctgaaagtggccggctttaacctgctgatgaccctgcggctgtggtccagcagggccaagcgatctggatctggagcaacaaacttctcactactcaaacaagcaggtgacgtggaggagaatcccgggcctactagcatggccttaccagtgaccgccttgctcctgccgctggccttgctgctccacgccgccaggccggaactgcaaagcgtgctgacacagcctcctagcgcctctggaacacctggacagagagtgacaatcagctgctccggcagctccagcaacatcggcagcaactacgtgaactggtatcagcagctgcctggcacagcccctaaactgctgatctacggcgactaccagaggccaagcggcgtgccagatagattcagcggcagcaagtctggcacaagcgccagcctggctatctctggactgagaagcgaggacgaggccgactactactgtgccaccagagatgatagcctgagcggcagcgtggtgtttggcacaggcacaaagctgacagtgctgggcggcggaggcggaagtggaggcggaggatctggcggcggaggctctgaagttcagctggttcagagcggagccgaagtgaagaagcctggcgagagcctgaagattagctgcaaaggcagcggctacggcttcaccagctattggatcggctgggtccgacagatgcctggcaaaggactggaatggatgggcatcattcaccccgacgacagcgacaccaagtacagccctagcttccagggccaagtgaccatcagcgccgacaagagcatcagcacagcctacctccagtggtcctctctgaaggccagcgataccgccatgtactactgcgccagcagctacctgagaggactgtggggcggctacttcgatttttggggccagggcacactggtcaccgttagttctacgcgtatccagaaccctgatcctgccgtgtaccagctgcgggatagcaagagcagcgacaagagcgtgtgtctgttcaccgacttcgacagccagaccaacgtgtcccagagcaaggactccgacgtgtacatcaccgataagtgcgtgctggacatgcggagcatggacttcaagagcaactccgccgtggcctggtccaacaagtccgatttcgcctgcgccaacgccttcaacaacagcattatccccgaggacacattcttcccaagccccgagagcagctgcgacgtgaagctggtggaaaagagcttcgagacagacaccaacctgaacttccagatcctgtacgaggtgatcggcttcagaatcctgctgctgaaagtggccggctttaacctgctgatgaccctgcggctgtggtccagccgcgccaagagaagcggatctggcgtgaagcagaccctgaatttcgacctgctgaagctggctggcgacgtggaatccaacccaggcccttctagaggccatatgaccgagtacaagcccacggtgcgcctcgccacccgcgacgacgtccccagggccgtacgcaccctcgccgccgcgttcgccgactaccccgccacgcgccacaccgtcgatccggaccgccacatcgagcgggtcaccgagctgcaagaactcttcctcacgcgcgtcgggctcgacatcggcaaggtgtgggtcgcggacgacggcgccgcggtggcggtctggaccacgccggagagcgtcgaagcgggggcggtgttcgccgagatcggcccgcgcatggccgagttgagcggttcccggctggccgcgcagcaacagatggaaggcctcctggcgccgcaccggcccaaggagcccgcgtggttcctggccaccgtcggcgtctcgcccgaccaccagggcaagggtctgggcagcgccgtcgtgctccccggagtggaggcggccgagcgcgccggggtgcccgccttcctggagacctccgcgccccgcaacctccccttctacgagcggctcggcttcaccgtcaccgccgacgtcgaggtgcccgaaggaccgcgcacctggtgcatgacccgcaagcccggtgcctga

SEQ ID NO: 34594 - DNA, 2625 bp, synthetic construct
  source 1..2625: mol_type = other DNA
atggccttaccagtgaccgccttgctcctgccgctggccttgctgctccacgccgccaggccgctcgagatccagaaccctgatcctgccgtgtaccagctgcgggatagcaagagcagcgacaagagcgtgtgtctgttcaccgacttcgacagccagaccaacgtgtcccagagcaaggactccgacgtgtacatcaccgataagtgcgtgctggacatgcggagcatggacttcaagagcaactccgccgtggcctggtccaacaagtccgatttcgcctgcgccaacgccttcaacaacagcattatccccgaggacacattcttcccaagccccgagagcagctgcgacgtgaagctggtggaaaagagcttcgagacagacaccaacctgaacttccagatcctgtacgaggtgatcggcttcagaatcctgctgctgaaagtggccggctttaacctgctgatgaccctgcggctgtggtccagcagggccaagcgatctggatctggagcaacaaacttctcactactcaaacaagcaggtgacgtggaggagaatcccgggcctactagcatggccttaccagtgaccgccttgctcctgccgctggccttgctgctccacgccgccaggccggaactgcaaagcgtgctgacacagcctcctagcgcctctggaacacctggacagagagtgacaatcagctgctccggcagctccagcaacatcggcagcaactacgtgaactggtatcagcagctgcctggcacagcccctaaactgctgatctacggcgactaccagaggccaagcggcgtgccagatagattcagcggcagcaagtctggcacaagcgccagcctggctatctctggactgagaagcgaggacgaggccgactactactgtgccaccagagatgatagcctgagcggcagcgtggtgtttggcacaggcacaaagctgacagtgctgggcggcggaggcggaagtggaggcggaggatctggcggcggaggctctgaagttcagctggttcagagcggagccgaagtgaagaagcctggcgagagcctgaagattagctgcaaaggcagcggctacggcttcaccagctattggatcggctgggtccgacagatgcctggcaaaggactggaatggatgggcatcattcaccccgacgacagcgacaccaagtacagccctagcttccagggccaagtgaccatcagcgccgacaagagcatcagcacagcctacctccagtggtcctctctgaaggccagcgataccgccatgtactactgcgccagcagctacctgagaggactgtggggcggctacttcgatttttggggccagggcacactggtcaccgttagttctacgcgtgaggacctgaagaacgtgttcccacctgaggtggccgtgttcgagcctagcgaggccgagatcagccacacccagaaagccaccctcgtgtgcctggctaccggcttctaccccgaccatgtggaactgtcttggtgggtcaacggcaaagaggtgcacagcggcgtgtgtaccgacccccagccactgaaagaacagcccgccctgaacgacagccggtactgcctgagcagcagactgagagtgtccgccaccttctggcagaacccccggaaccacttcagatgccaggtgcagttctacggcctgagcgagaacgacgagtggacccaggacagagccaagcccgtgacccagatcgtgtctgccgaagcctggggcagagccgattgcggctttaccagcgagagctaccagcagggcgtgctgagcgccaccaacctgagcgtgatcggcttcagaatcctgctgctgaaagtggccggctttaacctgctgatgaccctgcggctgtggtccagccgcgccaagagaagcggatctggcgtgaagcagaccctgaatttcgacctgctgaagctggctggcgacgtggaatccaacccaggcccttctagaggccatatgaccgagtacaagcccacggtgcgcctcgccacccgcgacgacgtccccagggccgtacgcaccctcgccgccgcgttcgccgactaccccgccacgcgccacaccgtcgatccggaccgccacatcgagcgggtcaccgagctgcaagaactcttcctcacgcgcgtcgggctcgacatcggcaaggtgtgggtcgcggacgacggcgccgcggtggcggtctggaccacgccggagagcgtcgaagcgggggcggtgttcgccgagatcggcccgcgcatggccgagttgagcggttcccggctggccgcgcagcaacagatggaaggcctcctggcgccgcaccggcccaaggagcccgcgtggttcctggccaccgtcggcgtctcgcccgaccaccagggcaagggtctgggcagcgccgtcgtgctccccggagtggaggcggccgagcgcgccggggtgcccgccttcctggagacctccgcgccccgcaacctccccttctacgagcggctcggcttcaccgtcaccgccgacgtcgaggtgcccgaaggaccgcgcacctggtgcatgacccgcaagcccggtgcctga

SEQ ID NO: 34595 - DNA, 2625 bp, synthetic construct; identical to SEQ ID NO: 34593
  source 1..2625: mol_type = other DNA

SEQ ID NO: 34596 - DNA, 2949 bp, synthetic construct
  source 1..2949: mol_type = other DNA
atggccttaccagtgaccgccttgctcctgccgctggccttgctgctccacgccgccaggccgctcgaggaggacctgaagaacgtgttcccacctgaggtggccgtgttcgagcctagcgaggccgagatcagccacacccagaaagccaccctcgtgtgcctggctaccggcttctaccccgaccatgtggaactgtcttggtgggtcaacggcaaagaggtgcacagcggcgtgtctaccgacccccagccactgaaagaacagcccgccctgaacgacagccggtactgcctgagcagcagactgagagtgtccgccaccttctggcagaacccccggaaccacttcagatgccaggtgcagttctacggcctgagcgagaacgacgagtggacccaggacagagccaagcccgtgacccagatcgtgtctgccgaagcctggggcagagccgatgatgtgattaagatccactggcaggaaaagaagtccaacaccatcctgggcagccaggaaggcaacaccatgaagaccaacgacacctacatgaagttcagctggctgaccgtgcccgagaagtccctggacaaagaacacagatgcatcgtgcggcacgaaaacaacaagaacggcgtggaccaggaaatcatcttcccacccatcaagaccgatgtgattacaatggaccccaaggacaactgctccaaggacgccaacgataccctgctgctccagctgaccaacaccagcgcctactacatgtacttgttgctgctgctgaagtccgtggtgtacttcgccatcatcacatgctgcctgctgatggctatggtcaagcggaaggacagccggggaagggccaagcgatctggatctggagcaacaaacttctcactactcaaacaagcaggtgacgtggaggagaatcccgggcctactagcatggccttaccagtgaccgccttgctcctgccgctggccttgctgctccacgccgccaggccggaactgcaaagcgtgctgacacagcctcctagcgcctctggaacacctggacagagagtgacaatcagctgctccggcagctccagcaacatcggcagcaactacgtgaactggtatcagcagctgcctggcacagcccctaaactgctgatctacggcgactaccagaggccaagcggcgtgccagatagattcagcggcagcaagtctggcacaagcgccagcctggctatctctggactgagaagcgaggacgaggccgactactactgtgccaccagagatgatagcctgagcggcagcgtggtgtttggcacaggcacaaagctgacagtgctgggcggcggaggcggaagtggaggcggaggatctggcggcggaggctctgaagttcagctggttcagagcggagccgaagtgaagaagcctggcgagagcctgaagattagctgcaaaggcagcggctacggcttcaccagctattggatcggctgggtccgacagatgcctggcaaaggactggaatggatgggcatcattcaccccgacgacagcgacaccaagtacagccctagcttccagggccaagtgaccatcagcgccgacaagagcatcagcacagcctacctccagtggtcctctctgaaggccagcgataccgccatgtactactgcgccagcagctacctgagaggactgtggggcggctacttcgatttttggggccagggcacactggtcaccgttagttctacgcgtatccagaaccctgatcctgccgtgtaccagctgcgggatagcaagagcagcgacaagagcgtgtgtctgttcaccgacttcgacagccagaccaacgtgtcccagagcaaggactccgacgtgtacatcaccgataagaccgtgctggacatgcggagcatggacttcaagagcaactccgccgtggcctggtccaacaagtccgatttcgcctgcgccaacgccttcaacaacagcattatccccgaggacacattcttcccaagccccgagagcagcgactccaccgaccacgtgaagcccaaagagacagagaacaccaagcagcccagcaagagctgccacaagcccaaggccatcgtgcacaccgagaaagtgaacatgatgagcctgaccgtgctgggcctgcggatgctgttcgccaaaaccgtggccgtgaacttcctgctgaccgccaagctgttcttcctcctcaccgcccgcgccaagagaagcggatctggcgtgaagcagaccctgaatttcgacctgctgaagctggctggcgacgtggaatccaacccaggcccttctagaggccatatgaccgagtacaagcccacggtgcgcctcgccacccgcgacgacgtccccagggccgtacgcaccctcgccgccgcgttcgccgactaccccgccacgcgccacaccgtcgatccggaccgccacatcgagcgggtcaccgagctgcaagaactcttcctcacgcgcgtcgggctcgacatcggcaaggtgtgggtcgcggacgacggcgccgcggtggcggtctggaccacgccggagagcgtcgaagcgggggcggtgttcgccgagatcggcccgcgcatggccgagttgagcggttcccggctggccgcgcagcaacagatggaaggcctcctggcgccgcaccggcccaaggagcccgcgtggttcctggccaccgtcggcgtctcgcccgaccaccagggcaagggtctgggcagcgccgtcgtgctccccggagtggaggcggccgagcgcgccggggtgcccgccttcctggagacctccgcgccccgcaacctccccttctacgagcggctcggcttcaccgtcaccgccgacgtcgaggtgcccgaaggaccgcgcacctggtgcatgacccgcaagcccggtgcctga

SEQ ID NO: 34597 - DNA, 2949 bp, synthetic construct
  source 1..2949: mol_type = other DNA
atggccttaccagtgaccgccttgctcctgccgctggccttgctgctccacgccgccaggccgctcgagatccagaaccctgatcctgccgtgtaccagctgcgggatagcaagagcagcgacaagagcgtgtgtctgttcaccgacttcgacagccagaccaacgtgtcccagagcaaggactccgacgtgtacatcaccgataagaccgtgctggacatgcggagcatggacttcaagagcaactccgccgtggcctggtccaacaagtccgatttcgcctgcgccaacgccttcaacaacagcattatccccgaggacacattcttcccaagccccgagagcagcgactccaccgaccacgtgaagcccaaagagacagagaacaccaagcagcccagcaagagctgccacaagcccaaggccatcgtgcacaccgagaaagtgaacatgatgagcctgaccgtgctgggcctgcggatgctgttcgccaaaaccgtggccgtgaacttcctgctgaccgccaagctgttcttcctcctcaccgccagggccaagcgatctggatctggagcaacaaacttctcactactcaaacaagcaggtgacgtggaggagaatcccgggcctactagcatggccttaccagtgaccgccttgctcctgccgctggccttgctgctccacgccgccaggccggaactgcaaagcgtgctgacacagcctcctagcgcctctggaacacctggacagagagtgacaatcagctgctccggcagctccagcaacatcggcagcaactacgtgaactggtatcagcagctgcctggcacagcccctaaactgctgatctacggcgactaccagaggccaagcggcgtgccagatagattcagcggcagcaagtctggcacaagcgccagcctggctatctctggactgagaagcgaggacgaggccgactactactgtgccaccagagatgatagcctgagcggcagcgtggtgtttggcacaggcacaaagctgacagtgctgggcggcggaggcggaagtggaggcggaggatctggcggcggaggctctgaagttcagctggttcagagcggagccgaagtgaagaagcctggcgagagcctgaagattagctgcaaaggcagcggctacggcttcaccagctattggatcggctgggtccgacagatgcctggcaaaggactggaatggatgggcatcattcaccccgacgacagcgacaccaagtacagccctagcttccagggccaagtgaccatcagcgccgacaagagcatcagcacagcctacctccagtggtcctctctgaaggccagcgataccgccatgtactactgcgccagcagctacctgagaggactgtggggcggctacttcgatttttggggccagggcacactggtcaccgttagttctacgcgtgaggacctgaagaacgtgttcccacctgaggtggccgtgttcgagcctagcgaggccgagatcagccacacccagaaagccaccctcgtgtgcctggctaccggcttctaccccgaccatgtggaactgtcttggtgggtcaacggcaaagaggtgcacagcggcgtgtctaccgacccccagccactgaaagaacagcccgccctgaacgacagccggtactgcctgagcagcagactgagagtgtccgccaccttctggcagaacccccggaaccacttcagatgccaggtgcagttctacggcctgagcgagaacgacgagtggacccaggacagagccaagcccgtgacccagatcgtgtctgccgaagcctggggcagagccgatgatgtgattaagatccactggcaggaaaagaagtccaacaccatcctgggcagccaggaaggcaacaccatgaagaccaacgacacctacatgaagttcagctggctgaccgtgcccgagaagtccctggacaaagaacacagatgcatcgtgcggcacgaaaacaacaagaacggcgtggaccaggaaatcatcttcccacccatcaagaccgatgtgattacaatggaccccaaggacaactgctccaaggacgccaacgataccctgctgctccagctgaccaacaccagcgcctactacatgtacttgttgctgctgctgaagtccgtggtgtacttcgccatcatcacatgctgcctgctgatggctatggtcaagcggaaggacagccggggacgcgccaagagaagcggatctggcgtgaagcagaccctgaatttcgacctgctgaagctggctggcgacgtggaatccaacccaggcccttctagaggccatatgaccgagtacaagcccacggtgcgcctcgccacccgcgacgacgtccccagggccgtacgcaccctcgccgccgcgttcgccgactaccccgccacgcgccacaccgtcgatccggaccgccacatcgagcgggtcaccgagctgcaagaactcttcctcacgcgcgtcgggctcgacatcggcaaggtgtgggtcgcggacgacggcgccgcggtggcggtctggaccacgccggagagcgtcgaagcgggggcggtgttcgccgagatcggcccgcgcatggccgagttgagcggttcccggctggccgcgcagcaacagatggaaggcctcctggcgccgcaccggcccaaggagcccgcgtggttcctggccaccgtcggcgtctcgcccgaccaccagggcaagggtctgggcagcgccgtcgtgctccccggagtggaggcggccgagcgcgccggggtgcccgccttcctggagacctccgcgccccgcaacctccccttctacgagcggctcggcttcaccgtcaccgccgacgtcgaggtgcccgaaggaccgcgcacctggtgcatgacccgcaagcccggtgcctga

SEQ ID NO: 34598 - DNA, 2943 bp, synthetic construct
  source 1..2943: mol_type = other DNA
atggccttaccagtgaccgccttgctcctgccgctggccttgctgctccacgccgccaggccgctcgaggaggacctgaagaacgtgttcccacctgaggtggccgtgttcgagcctagcgaggccgagatcagccacacccagaaagccaccctcgtgtgcctggctaccggcttctaccccgaccatgtggaactgtcttggtgggtcaacggcaaagaggtgcacagcggcgtgtgtaccgacccccagccactgaaagaacagcccgccctgaacgacagccggtactgcctgagcagcagactgagagtgtccgccaccttctggcagaacccccggaaccacttcagatgccaggtgcagttctacggcctgagcgagaacgacgagtggacccaggacagagccaagcccgtgacccagatcgtgtctgccgaagcctggggcagagccgatgatgtgattaagatccactggcaggaaaagaagtccaacaccatcctgggcagccaggaaggcaacaccatgaagaccaacgacacctacatgaagttcagctggctgaccgtgcccgagaagtccctggacaaagaacacagatgcatcgtgcggcacgaaaacaacaagaacggcgtggaccaggaaatcatcttcccacccatcaagaccgatgtgattacaatggaccccaaggacaactgctccaaggacgccaacgataccctgctgctccagctgaccaacaccagcgcctactacatgtacttgttgctgctgctgaagtccgtggtgtacttcgccatcatcacatgctgcctgctgcggagaaccgccttctgctgcaacggcgagaagtctagggccaagcgatctggatctggagcaacaaacttctcactactcaaacaagcaggtgacgtggaggagaatcccgggcctactagcatggccttaccagtgaccgccttgctcctgccgctggccttgctgctccacgccgccaggccggaactgcaaagcgtgctgacacagcctcctagcgcctctggaacacctggacagagagtgacaatcagctgctccggcagctccagcaacatcggcagcaactacgtgaactggtatcagcagctgcctggcacagcccctaaactgctgatctacggcgactaccagaggccaagcggcgtgccagatagattcagcggcagcaagtctggcacaagcgccagcctggctatctctggactgagaagcgaggacgaggccgactactactgtgccaccagagatgatagcctgagcggcagcgtggtgtttggcacaggcacaaagctgacagtgctgggcggcggaggcggaagtggaggcggaggatctggcggcggaggctctgaagttcagctggttcagagcggagccgaagtgaagaagcctggcgagagcctgaagattagctgcaaaggcagcggctacggcttcaccagctattggatcggctgggtccgacagatgcctggcaaaggactggaatggatgggcatcattcaccccgacgacagcgacaccaagtacagccctagcttccagggccaagtgaccatcagcgccgacaagagcatcagcacagcctacctccagtggtcctctctgaaggccagcgataccgccatgtactactgcgccagcagctacctgagaggactgtggggcggctacttcgatttttggggccagggcacactggtcaccgttagttctacgcgtatccagaaccctgatcctgccgtgtaccagctgcgggatagcaagagcagcgacaagagcgtgtgtctgttcaccgacttcgacagccagaccaacgtgtcccagagcaaggactccgacgtgtacatcaccgataagtgcgtgctggacatgcggagcatggacttcaagagcaactccgccgtggcctggtccaacaagtccgatttcgcctgcgccaacgccttcaacaacagcattatccccgaggacacattcttcccaagccccgagagcagcgactccaccgaccacgtgaagcccaaagagacagagaacaccaagcagcccagcaagagctgccacaagcccaaggccatcgtgcacaccgagaaagtgaacatgatgagcctgaccgtgctgggcctgcggatgctgttcgccaaaaccgtggccgtgaacttcctgctgaccgccaagctgttcttcctccgcgccaagagaagcggatctggcgtgaagcagaccctgaatttcgacctgctgaagctggctggcgacgtggaatccaacccaggcccttctagaggccatatgaccgagtacaagcccacggtgcgcctcgccacccgcgacgacgtccccagggccgtacgcaccctcgccgccgcgttcgccgactaccccgccacgcgccacaccgtcgatccggaccgccacatcgagcgggtcaccgagctgcaagaactcttcctcacgcgcgtcgggctcgacatcggcaaggtgtgggtcgcggacgacggcgccgcggtggcggtctggaccacgccggagagcgtcgaagcgggggcggtgttcgccgagatcggcccgcgcatggccgagttgagcggttcccggctggccgcgcagcaacagatggaaggcctcctggcgccgcaccggcccaaggagcccgcgtggttcctggccaccgtcggcgtctcgcccgaccaccagggcaagggtctgggcagcgccgtcgtgctccccggagtggaggcggccgagcgcgccggggtgcccgccttcctggagacctccgcgccccgcaacctccccttctacgagcggctcggcttcaccgtcaccgccgacgtcgaggtgcccgaaggaccgcgcacctggtgcatgacccgcaagcccggtgcctga

SEQ ID NO: 34599 - DNA, 2943 bp, synthetic construct
  source 1..2943: mol_type = other DNA
atggccttaccagtgaccgccttgctcctgccgctggccttgctgctccacgccgccaggccgctcgagatccagaaccctgatcctgccgtgtaccagctgcgggatagcaagagcagcgacaagagcgtgtgtctgttcaccgacttcgacagccagaccaacgtgtcccagagcaaggactccgacgtgtacatcaccgataagtgcgtgctggacatgcggagcatggacttcaagagcaactccgccgtggcctggtccaacaagtccgatttcgcctgcgccaacgccttcaacaacagcattatccccgaggacacattcttcccaagccccgagagcagcgactccaccgaccacgtgaagcccaaagagacagagaacaccaagcagcccagcaagagctgccacaagcccaaggccatcgtgcacaccgagaaagtgaacatgatgagcctgaccgtgctgggcctgcggatgctgttcgccaaaaccgtggccgtgaacttcctgctgaccgccaagctgttcttcctcagggccaagcgatctggatctggagcaacaaacttctcactactcaaacaagcaggtgacgtggaggagaatcccgggcctactagcatggccttaccagtgaccgccttgctcctgccgctggccttgctgctccacgccgccaggccggaactgcaaagcgtgctgacacagcctcctagcgcctctggaacacctggacagagagtgacaatcagctgctccggcagctccagcaacatcggcagcaactacgtgaactggtatcagcagctgcctggcacagcccctaaactgctgatctacggcgactaccagaggccaagcggcgtgccagatagattcagcggcagcaagtctggcacaagcgccagcctggctatctctggactgagaagcgaggacgaggccgactactactgtgccaccagagatgatagcctgagcggcagcgtggtgtttggcacaggcacaaagctgacagtgctgggcggcggaggcggaagtggaggcggaggatctggcggcggaggctctgaagttcagctggttcagagcggagccgaagtgaagaagcctggcgagagcctgaagattagctgcaaaggcagcggctacggcttcaccagctattggatcggctgggtccgacagatgcctggcaaaggactggaatggatgggcatcattcaccccgacgacagcgacaccaagtacagccctagcttccagggccaagtgaccatcagcgccgacaagagcatcagcacagcctacctccagtggtcctctctgaaggccagcgataccgccatgtactactgcgccagcagctacctgagaggactgtggggcggctacttcgatttttggggccagggcacactggtcaccgttagttctacgcgtgaggacctgaagaacgtgttcccacctgaggtggccgtgttcgagcctagcgaggccgagatcagccacacccagaaagccaccctcgtgtgcctggctaccggcttctaccccgaccatgtggaactgtcttggtgggtcaacggcaaagaggtgcacagcggcgtgtgtaccgacccccagccactgaaagaacagcccgccctgaacgacagccggtactgcctgagcagcagactgagagtgtccgccaccttctggcagaacccccggaaccacttcagatgccaggtgcagttctacggcctgagcgagaacgacgagtggacccaggacagagccaagcccgtgacccagatcgtgtctgccgaagcctggggcagagccgatgatgtgattaagatccactggcaggaaaagaagtccaacaccatcctgggcagccaggaaggcaacaccatgaagaccaacgacacctacatgaagttcagctggctgaccgtgcccgagaagtccctggacaaagaacacagatgcatcgtgcggcacgaaaacaacaagaacggcgtggaccaggaaatcatcttcccacccatcaagaccgatgtgattacaatggaccccaaggacaactgctccaaggacgccaacgataccctgctgctccagctgaccaacaccagcgcctactacatgtacttgttgctgctgctgaagtccgtggtgtacttcgccatcatcacatgctgcctgctgcggagaaccgccttctgctgcaacggcgagaagtctcgcgccaagagaagcggatctggcgtgaagcagaccctgaatttcgacctgctgaagctggctggcgacgtggaatccaacccaggcccttctagaggccatatgaccgagtacaagcccacggtgcgcctcgccacccgcgacgacgtccccagggccgtacgcaccctcgccgccgcgttcgccgactaccccgccacgcgccacaccgtcgatccggaccgccacatcgagcgggtcaccgagctgcaagaactcttcctcacgcgcgtcgggctcgacatcggcaaggtgtgggtcgcggacgacggcgccgcggtggcggtctggaccacgccggagagcgtcgaagcgggggcggtgttcgccgagatcggcccgcgcatggccgagttgagcggttcccggctggccgcgcagcaacagatggaaggcctcctggcgccgcaccggcccaaggagcccgcgtggttcctggccaccgtcggcgtctcgcccgaccaccagggcaagggtctgggcagcgccgtcgtgctccccggagtggaggcggccgagcgcgccggggtgcccgccttcctggagacctccgcgccccgcaacctccccttctacgagcggctcggcttcaccgtcaccgccgacgtcgaggtgcccgaaggaccgcgcacctggtgcatgacccgcaagcccggtgcctga

SEQ ID NO: 34600 - DNA, 2943 bp, synthetic construct
  source 1..2943: mol_type = other DNA
atggccttaccagtgaccgccttgctcctgccgctggccttgctgctccacgccgccaggccgctcgaggaggacctgaagaacgtgttcccacctgaggtggccgtgttcgagcctagcgaggccgagatcagccacacccagaaagccaccctcgtgtgcctggctaccggcttctaccccgaccatgtggaactgtcttggtgggtcaacggcaaagaggtgcacagcggcgtgtctaccgacccccagccactgaaagaacagcccgccctgaacgacagccggtactgcctgagcagcagactgagagtgtccgccaccttctggcagaacccccggaaccacttcagatgccaggtgcagttctacggcctgagcgagaacgacgagtggacccaggacagagccaagcccgtgacccagatcgtgtctgccgaagcctggggcagagccgatgatgtgattaagatccactggcaggaaaagaagtccaacaccatcctgggcagccaggaaggcaacaccatgaagaccaacgacacctacatgaagttcagctggctgaccgtgcccgagaagtccctggacaaagaacacagatgcatcgtgcggcacgaaaacaacaagaacggcgtggaccaggaaatcatcttcccacccatcaagaccgatgtgattacaatggaccccaaggacaactgctccaaggacgccaacgataccctgctgctccagctgaccaacaccagcgcctactacatgtacttgttgctgctgctgaagtccgtggtgtacttcgccatcatcacatgctgcctgctgcggagaaccgccttctgctgcaacggcgagaagtctagggccaagcgatctggatctggagcaacaaacttctcactactcaaacaagcaggtgacgtggaggagaatcccgggcctactagcatggccttaccagtgaccgccttgctcctgccgctggccttgctgctccacgccgccaggccggaactgcaaagcgtgctgacacagcctcctagcgcctctggaacacctggacagagagtgacaatcagctgctccggcagctccagcaacatcggcagcaactacgtgaactggtatcagcagctgcctggcacagcccctaaactgctgatctacggcgactaccagaggccaagcggcgtgccagatagattcagcggcagcaagtctggcacaagcgccagcctggctatctctggactgagaagcgaggacgaggccgactactactgtgccaccagagatgatagcctgagcggcagcgtggtgtttggcacaggcacaaagctgacagtgctgggcggcggaggcggaagtggaggcggaggatctggcggcggaggctctgaagttcagctggttcagagcggagccgaagtgaagaagcctggcgagagcctgaagattagctgcaaaggcagcggctacggcttcaccagctattggatcggctgggtccgacagatgcctggcaaaggactggaatggatgggcatcattcaccccgacgacagcgacaccaagtacagccctagcttccagggccaagtgaccatcagcgccgacaagagcatcagcacagcctacctccagtggtcctctctgaaggccagcgataccgccatgtactactgcgccagcagctacctgagaggactgtggggcggctacttcgatttttggggccagggcacactggtcaccgttagttctacgcgtatccagaaccctgatcctgccgtgtaccagctgcgggatagcaagagcagcgacaagagcgtgtgtctgttcaccgacttcgacagccagaccaacgtgtcccagagcaaggactccgacgtgtacatcaccgataagaccgtgctggacatgcggagcatggacttcaagagcaactccgccgtggcctggtccaacaagtccgatttcgcctgcgccaacgccttcaacaacagcattatccccgaggacacattcttcccaagccccgagagcagcgactccaccgaccacgtgaagcccaaagagacagagaacaccaagcagcccagcaagagctgccacaagcccaaggccatcgtgcacaccgagaaagtgaacatgatgagcctgaccgtgctgggcctgcggatgctgttcgccaaaaccgtggccgtgaacttcctgctgaccgccaagctgttcttcctccgcgccaagagaagcggatctggcgtgaagcagaccctgaatttcgacctgctgaagctggctggcgacgtggaatccaacccaggcccttctagaggccatatgaccgagtacaagcccacggtgcgcctcgccacccgcgacgacgtccccagggccgtacgcaccctcgccgccgcgttcgccgactaccccgccacgcgccacaccgtcgatccggaccgccacatcgagcgggtcaccgagctgcaagaactcttcctcacgcgcgtcgggctcgacatcggcaaggtgtgggtcgcggacgacggcgccgcggtggcggtctggaccacgccggagagcgtcgaagcgggggcggtgttcgccgagatcggcccgcgcatggccgagttgagcggttcccggctggccgcgcagcaacagatggaaggcctcctggcgccgcaccggcccaaggagcccgcgtggttcctggccaccgtcggcgtctcgcccgaccaccagggcaagggtctgggcagcgccgtcgtgctccccggagtggaggcggccgagcgcgccggggtgcccgccttcctggagacctccgcgccccgcaacctccccttctacgagcggctcggcttcaccgtcaccgccgacgtcgaggtgcccgaaggaccgcgcacctggtgcatgacccgcaagcccggtgcctga

SEQ ID NO: 34601 - DNA, 2943 bp, synthetic construct
  source 1..2943: mol_type = other DNA
atggccttaccagtgaccgccttgctcctgccgctggccttgctgctccacgccgccaggccgctcgagatccagaaccctgatcctgccgtgtaccagctgcgggatagcaagagcagcgacaagagcgtgtgtctgttcaccgacttcgacagccagaccaacgtgtcccagagcaaggactccgacgtgtacatcaccgataagaccgtgctggacatgcggagcatggacttcaagagcaactccgccgtggcctggtccaacaagtccgatttcgcctgcgccaacgccttcaacaacagcattatccccgaggacacattcttcccaagccccgagagcagcgactccaccgaccacgtgaagcccaaagagacagagaacaccaagcagcccagcaagagctgccacaagcccaaggccatcgtgcacaccgagaaagtgaacatgatgagcctgaccgtgctgggcctgcggatgctgttcgccaaaaccgtggccgtgaacttcctgctgaccgccaagctgttcttcctcagggccaagcgatctggatctggagcaacaaacttctcactactcaaacaagcaggtgacgtggaggagaatcccgggcctactagcatggccttaccagtgaccgccttgctcctgccgctggccttgctgctccacgccgccaggccggaactgcaaagcgtgctgacacagcctcctagcgcctctggaacacctggacagagagtgacaatcagctgctccggcagctccagcaacatcggcagcaactacgtgaactggtatcagcagctgcctggcacagcccctaaactgctgatctacggcgactaccagaggccaagcggcgtgccagatagattcagcggcagcaagtctggcacaagcgccagcctggctatctctggactgagaagcgaggacgaggccgactactactgtgccaccagagatgatagcctgagcggcagcgtggtgtttggcacaggcacaaagctgacagtgctgggcggcggaggcggaagtggaggcggaggatctggcggcggaggctctgaagttcagctggttcagagcggagccgaagtgaagaagcctggcgagagcctgaagattagctgcaaaggcagcggctacggcttcaccagctattggatcggctgggtccgacagatgcctggcaaaggactggaatggatgggcatcattcaccccgacgacagcgacaccaagtacagccctagcttccagggccaagtgaccatcagcgccgacaagagcatcagcacagcctacctccagtggtcctctctgaaggccagcgataccgccatgtactactgcgccagcagctacctgagaggactgtggggcggctacttcgatttttggggccagggcacactggtcaccgttagttctacgcgtgaggacctgaagaacgtgttcccacctgaggtggccgtgttcgagcctagcgaggccgagatcagccacacccagaaagccaccctcgtgtgcctggctaccggcttctaccccgaccatgtggaactgtcttggtgggtcaacggcaaagaggtgcacagcggcgtgtctaccgacccccagccactgaaagaacagcccgccctgaacgacagccggtactgcctgagcagcagactgagagtgtccgccaccttctggcagaacccccggaaccacttcagatgccaggtgcagttctacggcctgagcgagaacgacgagtggacccaggacagagccaagcccgtgacccagatcgtgtctgccgaagcctggggcagagccgatgatgtgattaagatccactggcaggaaaagaagtccaacaccatcctgggcagccaggaaggcaacaccatgaagaccaacgacacctacatgaagttcagctggctgaccgtgcccgagaagtccctggacaaagaacacagatgcatcgtgcggcacgaaaacaacaagaacggcgtggaccaggaaatcatcttcccacccatcaagaccgatgtgattacaatggaccccaaggacaactgctccaaggacgccaacgataccctgctgctccagctgaccaacaccagcgcctactacatgtacttgttgctgctgctgaagtccgtggtgtacttcgccatcatcacatgctgcctgctgcggagaaccgccttctgctgcaacggcgagaagtctcgcgccaagagaagcggatctggcgtgaagcagaccctgaatttcgacctgctgaagctggctggcgacgtggaatccaacccaggcccttctagaggccatatgaccgagtacaagcccacggtgcgcctcgccacccgcgacgacgtccccagggccgtacgcaccctcgccgccgcgttcgccgactaccccgccacgcgccacaccgtcgatccggaccgccacatcgagcgggtcaccgagctgcaagaactcttcctcacgcgcgtcgggctcgacatcggcaaggtgtgggtcgcggacgacggcgccgcggtggcggtctggaccacgccggagagcgtcgaagcgggggcggtgttcgccgagatcggcccgcgcatggccgagttgagcggttcccggctggccgcgcagcaacagatggaaggcctcctggcgccgcaccggcccaaggagcccgcgtggttcctggccaccgtcggcgtctcgcccgaccaccagggcaagggtctgggcagcgccgtcgtgctccccggagtggaggcggccgagcgcgccggggtgcccgccttcctggagacctccgcgccccgcaacctccccttctacgagcggctcggcttcaccgtcaccgccgacgtcgaggtgcccgaaggaccgcgcacctggtgcatgacccgcaagcccggtgcctga

SEQ ID NO: 34602 - DNA, 2637 bp, synthetic construct
  source 1..2637: mol_type = other DNA
atggccttaccagtgaccgccttgctcctgccgctggccttgctgctccacgccgccaggccgctcgaggaggacctgaagaacgtgttcccacctgaggtggccgtgttcgagcctagcaaggccgagatcgcccacacccagaaagccaccctcgtgtgcctggctaccggcttctaccccgaccatgtggaactgtcttggtgggtcaacggcaaagaggtgcacagcggcgtgtgtaccgacccccagccactgaaagaacagcccgccctgaacgacagccggtactgcctgagcagcagactgagagtgtccgccaccttctggcagaacccccggaaccacttcagatgccaggtgcagttctacggcctgagcgagaacgacgagtggacccaggacagagccaagcccgtgacccagatcgtgtctgccgaagcctggggcagagccgattgcggcatcaccagcgccagctaccaccagggcgtgctgagcgccaccatcctgtacgagatcctgctgggcaaggccaccctgtacgccgtgctggtgtctgccctggtgctgatggctatggtcaagcggaaggacagccggggaagggccaagcgatctggatctggagcaacaaacttctcactactcaaacaagcaggtgacgtggaggagaatcccgggcctactagcatggccttaccagtgaccgccttgctcctgccgctggccttgctgctccacgccgccaggccggaactgcaaagcgtgctgacacagcctcctagcgcctctggaacacctggacagagagtgacaatcagctgctccggcagctccagcaacatcggcagcaactacgtgaactggtatcagcagctgcctggcacagcccctaaactgctgatctacggcgactaccagaggccaagcggcgtgccagatagattcagcggcagcaagtctggcacaagcgccagcctggctatctctggactgagaagcgaggacgaggccgactactactgtgccaccagagatgatagcctgagcggcagcgtggtgtttggcacaggcacaaagctgacagtgctgggcggcggaggcggaagtggaggcggaggatctggcggcggaggctctgaagttcagctggttcagagcggagccgaagtgaagaagcctggcgagagcctgaagattagctgcaaaggcagcggctacggcttcaccagctattggatcggctgggtccgacagatgcctggcaaaggactggaatggatgggcatcattcaccccgacgacagcgacaccaagtacagccctagcttccagggccaagtgaccatcagcgccgacaagagcatcagcacagcctacctccagtggtcctctctgaaggccagcgataccgccatgtactactgcgccagcagctacctgagaggactgtggggcggctacttcgatttttggggccagggcacactggtcaccgttagttctacgcgtatccagaaccctgatcctgccgtgtaccagctgcgggatagcaagagcagcgacaagagcgtgtgtctgttcaccgacttcgacagccagaccaacgtgtcccagagcaaggactccgacgtgtacatcaccgataagtgcgtgctggacatgcggagcatggacttcaagagcaactccgccgtggcctggtccaacaagtccgatttcgcctgcgccaacgccttcaacaacagcattatccccgaggacacattcttcccaagcagcgacgtgccctgcgacgtgaagctggtggaaaagagcttcgagacagacaccaacctgaacttccagaacctgagcgtgatcggcttcagaatcctgctgctgaaagtggccggctttaacctgctgatgaccctgcggctgtggtccagccgcgccaagagaagcggatctggcgtgaagcagaccctgaatttcgacctgctgaagctggctggcgacgtggaatccaacccaggcccttctagaggccatatgaccgagtacaagcccacggtgcgcctcgccacccgcgacgacgtccccagggccgtacgcaccctcgccgccgcgttcgccgactaccccgccacgcgccacaccgtcgatccggaccgccacatcgagcgggtcaccgagctgcaagaactcttcctcacgcgcgtcgggctcgacatcggcaaggtgtgggtcgcggacgacggcgccgcggtggcggtctggaccacgccggagagcgtcgaagcgggggcggtgttcgccgagatcggcccgcgcatggccgagttgagcggttcccggctggccgcgcagcaacagatggaaggcctcctggcgccgcaccggcccaaggagcccgcgtggttcctggccaccgtcggcgtctcgcccgaccaccagggcaagggtctgggcagcgccgtcgtgctccccggagtggaggcggccgagcgcgccggggtgcccgccttcctggagacctccgcgccccgcaacctccccttctacgagcggctcggcttcaccgtcaccgccgacgtcgaggtgcccgaaggaccgcgcacctggtgcatgacccgcaagcccggtgcctga

SEQ ID NO: 34603 - DNA, 2637 bp, synthetic construct
  source 1..2637: mol_type = other DNA
atggccttaccagtgaccgccttgctcctgccgctggccttgctgctccacgccgccaggccgctcgagatccagaaccctgatcctgccgtgtaccagctgcgggatagcaagagcagcgacaagagcgtgtgtctgttcaccgacttcgacagccagaccaacgtgtcccagagcaaggactccgacgtgtacatcaccgataagtgcgtgctggacatgcggagcatggacttcaagagcaactccgccgtggcctggtccaacaagtccgatttcgcctgcgccaacgccttcaacaacagcattatccccgaggacacattcttcccaagcagcgacgtgccctgcgacgtgaagctggtggaaaagagcttcgagacagacaccaacctgaacttccagaacctgagcgtgatcggcttcagaatcctgctgctgaaagtggccggctttaacctgctgatgaccctgcggctgtggtccagcagggccaagcgatctggatctggagcaacaaacttctcactactcaaacaagcaggtgacgtggaggagaatcccgggcctactagcatggccttaccagtgaccgccttgctcctgccgctggccttgctgctccacgccgccaggccggaactgcaaagcgtgctgacacagcctcctagcgcctctggaacacctggacagagagtgacaatcagctgctccggcagctccagcaacatcggcagcaactacgtgaactggtatcagcagctgcctggcacagcccctaaactgctgatctacggcgactaccagaggccaagcggcgtgccagatagattcagcggcagcaagtctggcacaagcgccagcctggctatctctggactgagaagcgaggacgaggccgactactactgtgccaccagagatgatagcctgagcggcagcgtggtgtttggcacaggcacaaagctgacagtgctgggcggcggaggcggaagtggaggcggaggatctggcggcggaggctctgaagttcagctggttcagagcggagccgaagtgaagaagcctggcgagagcctgaagattagctgcaaaggcagcggctacggcttcaccagctattggatcggctgggtccgacagatgcctggcaaaggactggaatggatgggcatcattcaccccgacgacagcgacaccaagtacagccctagcttccagggccaagtgaccatcagcgccgacaagagcatcagcacagcctacctccagtggtcctctctgaaggccagcgataccgccatgtactactgcgccagcagctacctgagaggactgtggggcggctacttcgatttttggggccagggcacactggtcaccgttagttctacgcgtgaggacctgaagaacgtgttcccacctgaggtggccgtgttcgagcctagcaaggccgagatcgcccacacccagaaagccaccctcgtgtgcctggctaccggcttctaccccgaccatgtggaactgtcttggtgggtcaacggcaaagaggtgcacagcggcgtgtgtaccgacccccagccactgaaagaacagcccgccctgaacgacagccggtactgcctgagcagcagactgagagtgtccgccaccttctggcagaacccccggaaccacttcagatgccaggtgcagttctacggcctgagcgagaacgacgagtggacccaggacagagccaagcccgtgacccagatcgtgtctgccgaagcctggggcagagccgattgcggcatcaccagcgccagctaccaccagggcgtgctgagcgccaccatcctgtacgagatcctgctgggcaaggccaccctgtacgccgtgctggtgtctgccctggtgctgatggctatggtcaagcggaaggacagccggggacgcgccaagagaagcggatctggcgtgaagcagaccctgaatttcgacctgctgaagctggctggcgacgtggaatccaacccaggcccttctagaggccatatgaccgagtacaagcccacggtgcgcctcgccacccgcgacgacgtccccagggccgtacgcaccctcgccgccgcgttcgccgactaccccgccacgcgccacaccgtcgatccggaccgccacatcgagcgggtcaccgagctgcaagaactcttcctcacgcgcgtcgggctcgacatcggcaaggtgtgggtcgcggacgacggcgccgcggtggcggtctggaccacgccggagagcgtcgaagcgggggcggtgttcgccgagatcggcccgcgcatggccgagttgagcggttcccggctggccgcgcagcaacagatggaaggcctcctggcgccgcaccggcccaaggagcccgcgtggttcctggccaccgtcggcgtctcgcccgaccaccagggcaagggtctgggcagcgccgtcgtgctccccggagtggaggcggccgagcgcgccggggtgcccgccttcctggagacctccgcgccccgcaacctccccttctacgagcggctcggcttcaccgtcaccgccgacgtcgaggtgcccgaaggaccgcgcacctggtgcatgacccgcaagcccggtgcctga

SEQ ID NO: 34604 - DNA, 2316 bp, synthetic construct
  source 1..2316: mol_type = other DNA
atggccttaccagtgaccgccttgctcctgccgctggccttgctgctccacgccgccaggccgctcgagcagagttttgggttgttggaccctaaattgtgctatctgttggacggaatcctgttcatttacggagtgatcctgaccgcattgttcctgcgggttaagttttccagatccgcagacgcacccgcttaccaacaagggcagaaccaactctacaatgaacttaatttggggcggagggaagagtacgacgttctggacaaaaggaggggacgagatcccgagatgggcggaaagcctcagcgaaggaagaatccgcaagaggggctttataacgaactccagaaagataaaatggcagaagcctatagtgagattgggatgaagggagaaaggaggaggggtaaaggtcacgatgggttgtaccaaggattgagcacagccactaaagatacctatgatgcgctccacatgcaggccctgccgccaagaagggccaagcgatctggatctggagcaacaaacttctcactactcaaacaagcaggtgacgtggaggagaatcccgggcctactagcatggccttaccagtgaccgccttgctcctgccgctggccttgctgctccacgccgccaggccggaactgcaaagcgtgctgacacagcctcctagcgcctctggaacacctggacagagagtgacaatcagctgctccggcagctccagcaacatcggcagcaactacgtgaactggtatcagcagctgcctggcacagcccctaaactgctgatctacggcgactaccagaggccaagcggcgtgccagatagattcagcggcagcaagtctggcacaagcgccagcctggctatctctggactgagaagcgaggacgaggccgactactactgtgccaccagagatgatagcctgagcggcagcgtggtgtttggcacaggcacaaagctgacagtgctgggcggcggaggcggaagtggaggcggaggatctggcggcggaggctctgaagttcagctggttcagagcggagccgaagtgaagaagcctggcgagagcctgaagattagctgcaaaggcagcggctacggcttcaccagctattggatcggctgggtccgacagatgcctggcaaaggactggaatggatgggcatcattcaccccgacgacagcgacaccaagtacagccctagcttccagggccaagtgaccatcagcgccgacaagagcatcagcacagcctacctccagtggtcctctctgaaggccagcgataccgccatgtactactgcgccagcagctacctgagaggactgtggggcggctacttcgatttttggggccagggcacactggtcaccgttagttctacgcgtgagctgggagagcctcagctgtgctatatcctggacgccatcctgtttctgtacggcatcgtgctgaccctgctgtactgccggctgaagatccaagtgcggaaggccgccatcaccagctacgagaaatccgacggcgtgtacaccggcctgagcaccagaaatcaagagacatacgagacactgaagcacgaaaagcctccacaacgcgccaagagaagcggatctggcgtgaagcagaccctgaatttcgacctgctgaagctggctggcgacgtggaatccaacccaggcccttctagaggccatatgaccgagtacaagcccacggtgcgcctcgccacccgcgacgacgtccccagggccgtacgcaccctcgccgccgcgttcgccgactaccccgccacgcgccacaccgtcgatccggaccgccacatcgagcgggtcaccgagctgcaagaactcttcctcacgcgcgtcgggctcgacatcggcaaggtgtgggtcgcggacgacggcgccgcggtggcggtctggaccacgccggagagcgtcgaagcgggggcggtgttcgccgagatcggcccgcgcatggccgagttgagcggttcccggctggccgcgcagcaacagatggaaggcctcctggcgccgcaccggcccaaggagcccgcgtggttcctggccaccgtcggcgtctcgcccgaccaccagggcaagggtctgggcagcgccgtcgtgctccccggagtggaggcggccgagcgcgccggggtgcccgccttcctggagacctccgcgccccgcaacctccccttctacgagcggctcggcttcaccgtcaccgccgacgtcgaggtgcccgaaggaccgcgcacctggtgcatgacccgcaagcccggtgcctga

SEQ ID NO: 34605 - DNA, 2949 bp, synthetic construct; identical to SEQ ID NO: 34596
  source 1..2949: mol_type = other DNA

SEQ ID NO: 34606 - DNA, 2949 bp, synthetic construct; identical to SEQ ID NO: 34597
  source 1..2949: mol_type = other DNA

SEQ ID NO: 34607 - DNA, 2946 bp, synthetic construct
  source 1..2946: mol_type = other DNA
atggccttaccagtgaccgccttgctcctgccgctggccttgctgctccacgccgccaggccgctcgaggaggaggacctgaagaacgtgttcccacctgaggtggccgtgttcgagcctagcgaggccgagatcagccacacccagaaagccaccctcgtgtgcctggctaccggcttctaccccgaccatgtggaactgtcttggtgggtcaacggcaaagaggtgcacagcggcgtgtgtaccgacccccagccactgaaagaacagcccgccctgaacgacagccggtactgcctgagcagcagactgagagtgtccgccaccttctggcagaacccccggaaccacttcagatgccaggtgcagttctacggcctgagcgagaacgacgagtggacccaggacagagccaagcccgtgacccagatcgtgtctgccgaagcctggggcagagccgatgatgtgattaagatccactggcaggaaaagaagtccaacaccatcctgggcagccaggaaggcaacaccatgaagaccaacgacacctacatgaagttcagctggctgaccgtgcccgagaagtccctggacaaagaacacagatgcatcgtgcggcacgaaaacaacaagaacggcgtggaccaggaaatcatcttcccacccatcaagaccgatgtgattacaatggaccccaaggacaactgctccaaggacgccaacgataccctgctgctccagctgaccaacaccagcgcctactacatgtacttgttgctgctgctgaagtccgtggtgtacttcgccatcatcacatgctgcctgctgcggagaaccgccttctgctgcaacggcgagaagtctagggccaagcgatctggatctggagcaacaaacttctcactactcaaacaagcaggtgacgtggaggagaatcccgggcctactagcatggccttaccagtgaccgccttgctcctgccgctggccttgctgctccacgccgccaggccggaactgcaaagcgtgctgacacagcctcctagcgcctctggaacacctggacagagagtgacaatcagctgctccggcagctccagcaacatcggcagcaactacgtgaactggtatcagcagctgcctggcacagcccctaaactgctgatctacggcgactaccagaggccaagcggcgtgccagatagattcagcggcagcaagtctggcacaagcgccagcctggctatctctggactgagaagcgaggacgaggccgactactactgtgccaccagagatgatagcctgagcggcagcgtggtgtttggcacaggcacaaagctgacagtgctgggcggcggaggcggaagtggaggcggaggatctggcggcggaggctctgaagttcagctggttcagagcggagccgaagtgaagaagcctggcgagagcctgaagattagctgcaaaggcagcggctacggcttcaccagctattggatcggctgggtccgacagatgcctggcaaaggactggaatggatgggcatcattcaccccgacgacagcgacaccaagtacagccctagcttccagggccaagtgaccatcagcgccgacaagagcatcagcacagcctacctccagtggtcctctctgaaggccagcgataccgccatgtactactgcgccagcagctacctgagaggactgtggggcggctacttcgatttttggggccagggcacactggtcaccgttagttctacgcgtatccagaaccctgatcctgccgtgtaccagctgcgggatagcaagagcagcgacaagagcgtgtgtctgttcaccgacttcgacagccagaccaacgtgtcccagagcaaggactccgacgtgtacatcaccgataagtgcgtgctggacatgcggagcatggacttcaagagcaactccgccgtggcctggtccaacaagtccgatttcgcctgcgccaacgccttcaacaacagcattatccccgaggacacattcttcccaagccccgagagcagcgactccaccgaccacgtgaagcccaaagagacagagaacaccaagcagcccagcaagagctgccacaagcccaaggccatcgtgcacaccgagaaagtgaacatgatgagcctgaccgtgctgggcctgcggatgctgttcgccaaaaccgtggccgtgaacttcctgctgaccgccaagctgttcttcctccgcgccaagagaagcggatctggcgtgaagcagaccctgaatttcgacctgctgaagctggctggcgacgtggaatccaacccaggcccttctagaggccatatgaccgagtacaagcccacggtgcgcctcgccacccgcgacgacgtccccagggccgtacgcaccctcgccgccgcgttcgccgactaccccgccacgcgccacaccgtcgatccggaccgccacatcgagcgggtcaccgagctgcaagaactcttcctcacgcgcgtcgggctcgacatcggcaaggtgtgggtcgcggacgacggcgccgcggtggcggtctggaccacgccggagagcgtcgaagcgggggcggtgttcgccgagatcggcccgcgcatggccgagttgagcggttcccggctggccgcgcagcaacagatggaaggcctcctggcgccgcaccggcccaaggagcccgcgtggttcctggccaccgtcggcgtctcgcccgaccaccagggcaagggtctgggcagcgccgtcgtgctccccggagtggaggcggccgagcgcgccggggtgcccgccttcctggagacctccgcgccccgcaacctccccttctacgagcggctcggcttcaccgtcaccgccgacgtcgaggtgcccgaaggaccgcgcacctggtgcatgacccgcaagcccggtgcctga

SEQ ID NO: 34608 - DNA, 2946 bp, synthetic construct
  source 1..2946: mol_type = other DNA
atggccttaccagtgaccgccttgctcctgccgctggccttgctgctccacgccgccaggccgctcgagatccagaaccctgatcctgccgtgtaccagctgcgggatagcaagagcagcgacaagagcgtgtgtctgttcaccgacttcgacagccagaccaacgtgtcccagagcaaggactccgacgtgtacatcaccgataagtgcgtgctggacatgcggagcatggacttcaagagcaactccgccgtggcctggtccaacaagtccgatttcgcctgcgccaacgccttcaacaacagcattatccccgaggacacattcttcccaagccccgagagcagcgactccaccgaccacgtgaagcccaaagagacagagaacaccaagcagcccagcaagagctgccacaagcccaaggccatcgtgcacaccgagaaagtgaacatgatgagcctgaccgtgctgggcctgcggatgctgttcgccaaaaccgtggccgtgaacttcctgctgaccgccaagctgttcttcctcagggccaagcgatctggatctggagcaacaaacttctcactactcaaacaagcaggtgacgtggaggagaatcccgggcctactagcatggccttaccagtgaccgccttgctcctgccgctggccttgctgctccacgccgccaggccggaactgcaaagcgtgctgacacagcctcctagcgcctctggaacacctggacagagagtgacaatcagctgctccggcagctccagcaacatcggcagcaactacgtgaactggtatcagcagctgcctggcacagcccctaaactgctgatctacggcgactaccagaggccaagcggcgtgccagatagattcagcggcagcaagtctggcacaagcgccagcctggctatctctggactgagaagcgaggacgaggccgactactactgtgccaccagagatgatagcctgagcggcagcgtggtgtttggcacaggcacaaagctgacagtgctgggcggcggaggcggaagtggaggcggaggatctggcggcggaggctctgaagttcagctggttcagagcggagccgaagtgaagaagcctggcgagagcctgaagattagctgcaaaggcagcggctacggcttcaccagctattggatcggctgggtccgacagatgcctggcaaaggactggaatggatgggcatcattcaccccgacgacagcgacaccaagtacagccctagcttccagggccaagtgaccatcagcgccgacaagagcatcagcacagcctacctccagtggtcctctctgaaggccagcgataccgccatgtactactgcgccagcagctacctgagaggactgtggggcggctacttcgatttttggggccagggcacactggtcaccgttagttctacgcgtgaggaggacctgaagaacgtgttcccacctgaggtggccgtgttcgagcctagcgaggccgagatcagccacacccagaaagccaccctcgtgtgcctggctaccggcttctaccccgaccatgtggaactgtcttggtgggtcaacggcaaagaggtgcacagcggcgtgtgtaccgacccccagccactgaaagaacagcccgccctgaacgacagccggtactgcctgagcagcagactgagagtgtccgccaccttctggcagaacccccggaaccacttcagatgccaggtgcagttctacggcctgagcgagaacgacgagtggacccaggacagagccaagcccgtgacccagatcgtgtctgccgaagcctggggcagagccgatgatgtgattaagatccactggcaggaaaagaagtccaacaccatcctgggcagccaggaaggcaacaccatgaagaccaacgacacctacatgaagttcagctggctgaccgtgcccgagaagtccctggacaaagaacacagatgcatcgtgcggcacgaaaacaacaagaacggcgtggaccaggaaatcatcttcccacccatcaagaccgatgtgattacaatggaccccaaggacaactgctccaaggacgccaacgataccctgctgctccagctgaccaacaccagcgcctactacatgtacttgttgctgctgctgaagtccgtggtgtacttcgccatcatcacatgctgcctgctgcggagaaccgccttctgctgcaacggcgagaagtctcgcgccaagagaagcggatctggcgtgaagcagaccctgaatttcgacctgctgaagctggctggcgacgtggaatccaacccaggcccttctagaggccatatgaccgagtacaagcccacggtgcgcctcgccacccgcgacgacgtccccagggccgtacgcaccctcgccgccgcgttcgccgactaccccgccacgcgccacaccgtcgatccggaccgccacatcgagcgggtcaccgagctgcaagaactcttcctcacgcgcgtcgggctcgacatcggcaaggtgtgggtcgcggacgacggcgccgcggtggcggtctggaccacgccggagagcgtcgaagcgggggcggtgttcgccgagatcggcccgcgcatggccgagttgagcggttcccggctggccgcgcagcaacagatggaaggcctcctggcgccgcaccggcccaaggagcccgcgtggttcctggccaccgtcggcgtctcgcccgaccaccagggcaagggtctgggcagcgccgtcgtgctccccggagtggaggcggccgagcgcgccggggtgcccgccttcctggagacctccgcgccccgcaacctccccttctacgagcggctcggcttcaccgtcaccgccgacgtcgaggtgcccgaaggaccgcgcacctggtgcatgacccgcaagcccggtgcctga

SEQ ID NO: 34609 - DNA, 2637 bp, synthetic construct
  source 1..2637: mol_type = other DNA
atggccttaccagtgaccgccttgctcctgccgctggccttgctgctccacgccgccaggccgctcgaggaggacctgaagaacgtgttcccacctgaggtggccgtgttcgagcctagcgaggccgagatcagccacacccagaaagccaccctcgtgtgcctggctaccggcttctaccccgaccatgtggaactgtcttggtgggtcaacggcaaagaggtgcacagcggcgtgtctaccgacccccagccactgaaagaacagcccgccctgaacgacagccggtactgcctgagcagcagactgagagtgtccgccaccttctggcagaacccccggaaccacttcagatgccaggtgcagttctacggcctgagcgagaacgacgagtggacccaggacagagccaagcccgtgacccagatcgtgtctgccgaagcctggggcagagccgattgcggctttaccagcgagagctaccagcagggcgtgctgagcgccaccaacctgagcgtgatcggcttcagaatcctgctgctgaaagtggccggctttaacctgctgatgaccctgcggctgtggtccagcagggccaagcgatctggatctggagcaacaaacttctcactactcaaacaagcaggtgacgtggaggagaatcccgggcctactagcatggccttaccagtgaccgccttgctcctgccgctggccttgctgctccacgccgccaggccggaactgcaaagcgtgctgacacagcctcctagcgcctctggaacacctggacagagagtgacaatcagctgctccggcagctccagcaacatcggcagcaactacgtgaactggtatcagcagctgcctggcacagcccctaaactgctgatctacggcgactaccagaggccaagcggcgtgccagatagattcagcggcagcaagtctggcacaagcgccagcctggctatctctggactgagaagcgaggacgaggccgactactactgtgccaccagagatgatagcctgagcggcagcgtggtgtttggcacaggcacaaagctgacagtgctgggcggcggaggcggaagtggaggcggaggatctggcggcggaggctctgaagttcagctggttcagagcggagccgaagtgaagaagcctggcgagagcctgaagattagctgcaaaggcagcggctacggcttcaccagctattggatcggctgggtccgacagatgcctggcaaaggactggaatggatgggcatcattcaccccgacgacagcgacaccaagtacagccctagcttccagggccaagtgaccatcagcgccgacaagagcatcagcacagcctacctccagtggtcctctctgaaggccagcgataccgccatgtactactgcgccagcagctacctgagaggactgtggggcggctacttcgatttttggggccagggcacactggtcaccgttagttctacgcgtatccagaaccctgatcctgccgtgtaccagctgcgggatagcaagagcagcgacaagagcgtgtgtctgttcaccgacttcgacagccagaccaacgtgtcccagagcaaggactccgacgtgtacatcaccgataagaccgtgctggacatgcggagcatggacttcaagagcaactccgccgtggcctggtccaacaagtccgatttcgcctgcgccaacgccttcaacaacagcattatccccgaggacacattcttcccaagccccgagagcagctgcgacgtgaagctggtggaaaagagcttcgagacagacaccaacctgaacttccagatcctgtacgagatcctgctgggcaaggccaccctgtacgccgtgctggtgtctgccctggtgctgatggctatggtcaagcggaaggacagccggggacgcgccaagagaagcggatctggcgtgaagcagaccctgaatttcgacctgctgaagctggctggcgacgtggaatccaacccaggcccttctagaggccatatgaccgagtacaagcccacggtgcgcctcgccacccgcgacgacgtccccagggccgtacgcaccctcgccgccgcgttcgccgactaccccgccacgcgccacaccgtcgatccggaccgccacatcgagcgggtcaccgagctgcaagaactcttcctcacgcgcgtcgggctcgacatcggcaaggtgtgggtcgcggacgacggcgccgcggtggcggtctggaccacgccggagagcgtcgaagcgggggcggtgttcgccgagatcggcccgcgcatggccgagttgagcggttcccggctggccgcgcagcaacagatggaaggcctcctggcgccgcaccggcccaaggagcccgcgtggttcctggccaccgtcggcgtctcgcccgaccaccagggcaagggtctgggcagcgccgtcgtgctccccggagtggaggcggccgagcgcgccggggtgcccgccttcctggagacctccgcgccccgcaacctccccttctacgagcggctcggcttcaccgtcaccgccgacgtcgaggtgcccgaaggaccgcgcacctggtgcatgacccgcaagcccggtgcctga

SEQ ID NO: 34610 - DNA, 2637 bp, synthetic construct
  source 1..2637: mol_type = other DNA
atggccttaccagtgaccgccttgctcctgccgctggccttgctgctccacgccgccaggccgctcgagatccagaaccctgatcctgccgtgtaccagctgcgggatagcaagagcagcgacaagagcgtgtgtctgttcaccgacttcgacagccagaccaacgtgtcccagagcaaggactccgacgtgtacatcaccgataagaccgtgctggacatgcggagcatggacttcaagagcaactccgccgtggcctggtccaacaagtccgatttcgcctgcgccaacgccttcaacaacagcattatccccgaggacacattcttcccaagccccgagagcagctgcgacgtgaagctggtggaaaagagcttcgagacagacaccaacctgaacttccagatcctgtacgagatcctgctgggcaaggccaccctgtacgccgtgctggtgtctgccctggtgctgatggctatggtcaagcggaaggacagccggggaagggccaagcgatctggatctggagcaacaaacttctcactactcaaacaagcaggtgacgtggaggagaatcccgggcctactagcatggccttaccagtgaccgccttgctcctgccgctggccttgctgctccacgccgccaggccggaactgcaaagcgtgctgacacagcctcctagcgcctctggaacacctggacagagagtgacaatcagctgctccggcagctccagcaacatcggcagcaactacgtgaactggtatcagcagctgcctggcacagcccctaaactgctgatctacggcgactaccagaggccaagcggcgtgccagatagattcagcggcagcaagtctggcacaagcgccagcctggctatctctggactgagaagcgaggacgaggccgactactactgtgccaccagagatgatagcctgagcggcagcgtggtgtttggcacaggcacaaagctgacagtgctgggcggcggaggcggaagtggaggcggaggatctggcggcggaggctctgaagttcagctggttcagagcggagccgaagtgaagaagcctggcgagagcctgaagattagctgcaaaggcagcggctacggcttcaccagctattggatcggctgggtccgacagatgcctggcaaaggactggaatggatgggcatcattcaccccgacgacagcgacaccaagtacagccctagcttccagggccaagtgaccatcagcgccgacaagagcatcagcacagcctacctccagtggtcctctctgaaggccagcgataccgccatgtactactgcgccagcagctacctgagaggactgtggggcggctacttcgatttttggggccagggcacactggtcaccgttagttctacgcgtgaggacctgaagaacgtgttcccacctgaggtggccgtgttcgagcctagcgaggccgagatcagccacacccagaaagccaccctcgtgtgcctggctaccggcttctaccccgaccatgtggaactgtcttggtgggtcaacggcaaagaggtgcacagcggcgtgtctaccgacccccagccactgaaagaacagcccgccctgaacgacagccggtactgcctgagcagcagactgagagtgtccgccaccttctggcagaacccccggaaccacttcagatgccaggtgcagttctacggcctgagcgagaacgacgagtggacccaggacagagccaagcccgtgacccagatcgtgtctgccgaagcctggggcagagccgattgcggctttaccagcgagagctaccagcagggcgtgctgagcgccaccaacctgagcgtgatcggcttcagaatcctgctgctgaaagtggccggctttaacctgctgatgaccctgcggctgtggtccagccgcgccaagagaagcggatctggcgtgaagcagaccctgaatttcgacctgctgaagctggctggcgacgtggaatccaacccaggcccttctagaggccatatgaccgagtacaagcccacggtgcgcctcgccacccgcgacgacgtccccagggccgtacgcaccctcgccgccgcgttcgccgactaccccgccacgcgccacaccgtcgatccggaccgccacatcgagcgggtcaccgagctgcaagaactcttcctcacgcgcgtcgggctcgacatcggcaaggtgtgggtcgcggacgacggcgccgcggtggcggtctggaccacgccggagagcgtcgaagcgggggcggtgttcgccgagatcggcccgcgcatggccgagttgagcggttcccggctggccgcgcagcaacagatggaaggcctcctggcgccgcaccggcccaaggagcccgcgtggttcctggccaccgtcggcgtctcgcccgaccaccagggcaagggtctgggcagcgccgtcgtgctccccggagtggaggcggccgagcgcgccggggtgcccgccttcctggagacctccgcgccccgcaacctccccttctacgagcggctcggcttcaccgtcaccgccgacgtcgaggtgcccgaaggaccgcgcacctggtgcatgacccgcaagcccggtgcctga

SEQ ID NO: 34611 - DNA, 2637 bp, synthetic construct
  source 1..2637: mol_type = other DNA
atggccttaccagtgaccgccttgctcctgccgctggccttgctgctccacgccgccaggccgctcgaggaggacctgaagaacgtgttcccacctgaggtggccgtgttcgagcctagcgaggccgagatcagccacacccagaaagccaccctcgtgtgcctggctaccggcttctaccccgaccatgtggaactgtcttggtgggtcaacggcaaagaggtgcacagcggcgtgtgtaccgacccccagccactgaaagaacagcccgccctgaacgacagccggtactgcctgagcagcagactgagagtgtccgccaccttctggcagaacccccggaaccacttcagatgccaggtgcagttctacggcctgagcgagaacgacgagtggacccaggacagagccaagcccgtgacccagatcgtgtctgccgaagcctggggcagagccgattgcgacgtgaagctggtggaaaagagcttcgagacagacaccaacctgaacttccagaacctgagcgtgatcggcttcagaatcctgctgctgaaagtggccggctttaacctgctgatgaccctgcggctgtggtccagcagggccaagcgatctggatctggagcaacaaacttctcactactcaaacaagcaggtgacgtggaggagaatcccgggcctactagcatggccttaccagtgaccgccttgctcctgccgctggccttgctgctccacgccgccaggccggaactgcaaagcgtgctgacacagcctcctagcgcctctggaacacctggacagagagtgacaatcagctgctccggcagctccagcaacatcggcagcaactacgtgaactggtatcagcagctgcctggcacagcccctaaactgctgatctacggcgactaccagaggccaagcggcgtgccagatagattcagcggcagcaagtctggcacaagcgccagcctggctatctctggactgagaagcgaggacgaggccgactactactgtgccaccagagatgatagcctgagcggcagcgtggtgtttggcacaggcacaaagctgacagtgctgggcggcggaggcggaagtggaggcggaggatctggcggcggaggctctgaagttcagctggttcagagcggagccgaagtgaagaagcctggcgagagcctgaagattagctgcaaaggcagcggctacggcttcaccagctattggatcggctgggtccgacagatgcctggcaaaggactggaatggatgggcatcattcaccccgacgacagcgacaccaagtacagccctagcttccagggccaagtgaccatcagcgccgacaagagcatcagcacagcctacctccagtggtcctctctgaaggccagcgataccgccatgtactactgcgccagcagctacctgagaggactgtggggcggctacttcgatttttggggccagggcacactggtcaccgttagttctacgcgtatccagaaccctgatcctgccgtgtaccagctgcgggatagcaagagcagcgacaagagcgtgtgtctgttcaccgacttcgacagccagaccaacgtgtcccagagcaaggactccgacgtgtacatcaccgataagtgcgtgctggacatgcggagcatggacttcaagagcaactccgccgtggcctggtccaacaagtccgatttcgcctgcgccaacgccttcaacaacagcattatccccgaggacacattcttcccaagccccgagagcagctgcggctttaccagcgagagctaccagcagggcgtgctgagcgccaccatcctgtacgagatcctgctgggcaaggccaccctgtacgccgtgctggtgtctgccctggtgctgatggctatggtcaagcggaaggacagccggggacgcgccaagagaagcggatctggcgtgaagcagaccctgaatttcgacctgctgaagctggctggcgacgtggaatccaacccaggcccttctagaggccatatgaccgagtacaagcccacggtgcgcctcgccacccgcgacgacgtccccagggccgtacgcaccctcgccgccgcgttcgccgactaccccgccacgcgccacaccgtcgatccggaccgccacatcgagcgggtcaccgagctgcaagaactcttcctcacgcgcgtcgggctcgacatcggcaaggtgtgggtcgcggacgacggcgccgcggtggcggtctggaccacgccggagagcgtcgaagcgggggcggtgttcgccgagatcggcccgcgcatggccgagttgagcggttcccggctggccgcgcagcaacagatggaaggcctcctggcgccgcaccggcccaaggagcccgcgtggttcctggccaccgtcggcgtctcgcccgaccaccagggcaagggtctgggcagcgccgtcgtgctccccggagtggaggcggccgagcgcgccggggtgcccgccttcctggagacctccgcgccccgcaacctccccttctacgagcggctcggcttcaccgtcaccgccgacgtcgaggtgcccgaaggaccgcgcacctggtgcatgacccgcaagcccggtgcctga

SEQ ID NO: 34612 - DNA, 2637 bp, synthetic construct
  source 1..2637: mol_type = other DNA
atggccttaccagtgaccgccttgctcctgccgctggccttgctgctccacgccgccaggccgctcgaggaggacctgaagaacgtgttcccacctgaggtggccgtgttcgagcctagcgaggccgagatcagccacacccagaaagccaccctcgtgtgcctggctaccggcttctaccccgaccatgtggaactgtcttggtgggtcaacggcaaagaggtgcacagcggcgtgtctaccgacccccagccactgaaagaacagcccgccctgaacgacagccggtactgcctgagcagcagactgagagtgtccgccaccttctggcagaacccccggaaccacttcagatgccaggtgcagttctacggcctgagcgagaacgacgagtggacccaggacagagccaagcccgtgacccagatcgtgtctgccgaagcctggggcagagccgattgcgacgtgaagctggtggaaaagagcttcgagacagacaccaacctgaacttccagaacctgagcgtgatcggcttcagaatcctgctgctgaaagtggccggctttaacctgctgatgaccctgcggctgtggtccagcagggccaagcgatctggatctggagcaacaaacttctcactactcaaacaagcaggtgacgtggaggagaatcccgggcctactagcatggccttaccagtgaccgccttgctcctgccgctggccttgctgctccacgccgccaggccggaactgcaaagcgtgctgacacagcctcctagcgcctctggaacacctggacagagagtgacaatcagctgctccggcagctccagcaacatcggcagcaactacgtgaactggtatcagcagctgcctggcacagcccctaaactgctgatctacggcgactaccagaggccaagcggcgtgccagatagattcagcggcagcaagtctggcacaagcgccagcctggctatctctggactgagaagcgaggacgaggccgactactactgtgccaccagagatgatagcctgagcggcagcgtggtgtttggcacaggcacaaagctgacagtgctgggcggcggaggcggaagtggaggcggaggatctggcggcggaggctctgaagttcagctggttcagagcggagccgaagtgaagaagcctggcgagagcctgaagattagctgcaaaggcagcggctacggcttcaccagctattggatcggctgggtccgacagatgcctggcaaaggactggaatggatgggcatcattcaccccgacgacagcgacaccaagtacagccctagcttccagggccaagtgaccatcagcgccgacaagagcatcagcacagcctacctccagtggtcctctctgaaggccagcgataccgccatgtactactgcgccagcagctacctgagaggactgtggggcggctacttcgatttttggggccagggcacactggtcaccgttagttctacgcgtatccagaaccctgatcctgccgtgtaccagctgcgggatagcaagagcagcgacaagagcgtgtgtctgttcaccgacttcgacagccagaccaacgtgtcccagagcaaggactccgacgtgtacatcaccgataagaccgtgctggacatgcggagcatggacttcaagagcaactccgccgtggcctggtccaacaagtccgatttcgcctgcgccaacgccttcaacaacagcattatccccgaggacacattcttcccaagccccgagagcagctgcggctttaccagcgagagctaccagcagggcgtgctgagcgccaccatcctgtacgagatcctgctgggcaaggccaccctgtacgccgtgctggtgtctgccctggtgctgatggctatggtcaagcggaaggacagccggggacgcgccaagagaagcggatctggcgtgaagcagaccctgaatttcgacctgctgaagctggctggcgacgtggaatccaacccaggcccttctagaggccatatgaccgagtacaagcccacggtgcgcctcgccacccgcgacgacgtccccagggccgtacgcaccctcgccgccgcgttcgccgactaccccgccacgcgccacaccgtcgatccggaccgccacatcgagcgggtcaccgagctgcaagaactcttcctcacgcgcgtcgggctcgacatcggcaaggtgtgggtcgcggacgacggcgccgcggtggcggtctggaccacgccggagagcgtcgaagcgggggcggtgttcgccgagatcggcccgcgcatggccgagttgagcggttcccggctggccgcgcagcaacagatggaaggcctcctggcgccgcaccggcccaaggagcccgcgtggttcctggccaccgtcggcgtctcgcccgaccaccagggcaagggtctgggcagcgccgtcgtgctccccggagtggaggcggccgagcgcgccggggtgcccgccttcctggagacctccgcgccccgcaacctccccttctacgagcggctcggcttcaccgtcaccgccgacgtcgaggtgcccgaaggaccgcgcacctggtgcatgacccgcaagcccggtgcctga

SEQ ID NO: 34613 - DNA, 2946 bp, synthetic construct
  source 1..2946: mol_type = other DNA
atggccttaccagtgaccgccttgctcctgccgctggccttgctgctccacgccgccaggccgctcgaggaggaggacctgaagaacgtgttcccacctgaggtggccgtgttcgagcctagcgaggccgagatcagccacacccagaaagccaccctcgtgtgcctggctaccggcttctaccccgaccatgtggaactgtcttggtgggtcaacggcaaagaggtgcacagcggcgtgtctaccgacccccagccactgaaagaacagcccgccctgaacgacagccggtactgcctgagcagcagactgagagtgtccgccaccttctggcagaacccccggaaccacttcagatgccaggtgcagttctacggcctgagcgagaacgacgagtggacccaggacagagccaagcccgtgacccagatcgtgtctgccgaagcctggggcagagccgatgatgtgattaagatccactggcaggaaaagaagtccaacaccatcctgggcagccaggaaggcaacaccatgaagaccaacgacacctacatgaagttcagctggctgaccgtgcccgagaagtccctggacaaagaacacagatgcatcgtgcggcacgaaaacaacaagaacggcgtggaccaggaaatcatcttcccacccatcaagaccgatgtgattacaatggaccccaaggacaactgctccaaggacgccaacgataccctgctgctccagctgaccaacaccagcgcctactacatgtacttgttgctgctgctgaagtccgtggtgtacttcgccatcatcacatgctgcctgctgcggagaaccgccttctgctgcaacggcgagaagtctagggccaagcgatctggatctggagcaacaaacttctcactactcaaacaagcaggtgacgtggaggagaatcccgggcctactagcatggccttaccagtgaccgccttgctcctgccgctggccttgctgctccacgccgccaggccggaactgcaaagcgtgctgacacagcctcctagcgcctctggaacacctggacagagagtgacaatcagctgctccggcagctccagcaacatcggcagcaactacgtgaactggtatcagcagctgcctggcacagcccctaaactgctgatctacggcgactaccagaggccaagcggcgtgccagatagattcagcggcagcaagtctggcacaagcgccagcctggctatctctggactgagaagcgaggacgaggccgactactactgtgccaccagagatgatagcctgagcggcagcgtggtgtttggcacaggcacaaagctgacagtgctgggcggcggaggcggaagtggaggcggaggatctggcggcggaggctctgaagttcagctggttcagagcggagccgaagtgaagaagcctggcgagagcctgaagattagctgcaaaggcagcggctacggcttcaccagctattggatcggctgggtccgacagatgcctggcaaaggactggaatggatgggcatcattcaccccgacgacagcgacaccaagtacagccctagcttccagggccaagtgaccatcagcgccgacaagagcatcagcacagcctacctccagtggtcctctctgaaggccagcgataccgccatgtactactgcgccagcagctacctgagaggactgtggggcggctacttcgatttttggggccagggcacactggtcaccgttagttctacgcgtatccagaaccctgatcctgccgtgtaccagctgcgggatagcaagagcagcgacaagagcgtgtgtctgttcaccgacttcgacagccagaccaacgtgtcccagagcaaggactccgacgtgtacatcaccgataagaccgtgctggacatgcggagcatggacttcaagagcaactccgccgtggcctggtccaacaagtccgatttcgcctgcgccaacgccttcaacaacagcattatccccgaggacacattcttcccaagccccgagagcagcgactccaccgaccacgtgaagcccaaagagacagagaacaccaagcagcccagcaagagctgccacaagcccaaggccatcgtgcacaccgagaaagtgaacatgatgagcctgaccgtgctgggcctgcggatgctgttcgccaaaaccgtggccgtgaacttcctgctgaccgccaagctgttcttcctccgcgccaagagaagcggatctggcgtgaagcagaccctgaatttcgacctgctgaagctggctggcgacgtggaatccaacccaggcccttctagaggccatatgaccgagtacaagcccacggtgcgcctcgccacccgcgacgacgtccccagggccgtacgcaccctcgccgccgcgttcgccgactaccccgccacgcgccacaccgtcgatccggaccgccacatcgagcgggtcaccgagctgcaagaactcttcctcacgcgcgtcgggctcgacatcggcaaggtgtgggtcgcggacgacggcgccgcggtggcggtctggaccacgccggagagcgtcgaagcgggggcggtgttcgccgagatcggcccgcgcatggccgagttgagcggttcccggctggccgcgcagcaacagatggaaggcctcctggcgccgcaccggcccaaggagcccgcgtggttcctggccaccgtcggcgtctcgcccgaccaccagggcaagggtctgggcagcgccgtcgtgctccccggagtggaggcggccgagcgcgccggggtgcccgccttcctggagacctccgcgccccgcaacctccccttctacgagcggctcggcttcaccgtcaccgccgacgtcgaggtgcccgaaggaccgcgcacctggtgcatgacccgcaagcccggtgcctga

SEQ ID NO: 34614 - DNA, 2637 bp, synthetic construct
  source 1..2637: mol_type = other DNA
atggccttaccagtgaccgccttgctcctgccgctggccttgctgctccacgccgccaggccgctcgaggaggacctgaagaacgtgttcccacctgaggtggccgtgttcgagcctagcgaggccgagatcagccacacccagaaagccaccctcgtgtgcctggctaccggcttctaccccgaccatgtggaactgtcttggtgggtcaacggcaaagaggtgcacagcggcgtgtgtaccgacccccagccactgaaagaacagcccgccctgaacgacagccggtactgcctgagcagcagactgagagtgtccgccaccttctggcagaacccccggaaccacttcagatgccaggtgcagttctacggcctgagcgagaacgacgagtggacccaggacagagccaagcccgtgacccagatcgtgtctgccgaagcctggggcagagccgattgcggctttaccagcgagagctaccagcagggcgtgctgagcgccaccaacctgagcgtgatcggcttcagaatcctgctgctgaaagtggccggctttaacctgctgatgaccctgcggctgtggtccagcagggccaagcgatctggatctggagcaacaaacttctcactactcaaacaagcaggtgacgtggaggagaatcccgggcctactagcatggccttaccagtgaccgccttgctcctgccgctggccttgctgctccacgccgccaggccggaactgcaaagcgtgctgacacagcctcctagcgcctctggaacacctggacagagagtgacaatcagctgctccggcagctccagcaacatcggcagcaactacgtgaactggtatcagcagctgcctggcacagcccctaaactgctgatctacggcgactaccagaggccaagcggcgtgccagatagattcagcggcagcaagtctggcacaagcgccagcctggctatctctggactgagaagcgaggacgaggccgactactactgtgccaccagagatgatagcctgagcggcagcgtggtgtttggcacaggcacaaagctgacagtgctgggcggcggaggcggaagtggaggcggaggatctggcggcggaggctctgaagttcagctggttcagagcggagccgaagtgaagaagcctggcgagagcctgaagattagctgcaaaggcagcggctacggcttcaccagctattggatcggctgggtccgacagatgcctggcaaaggactggaatggatgggcatcattcaccccgacgacagcgacaccaagtacagccctagcttccagggccaagtgaccatcagcgccgacaagagcatcagcacagcctacctccagtggtcctctctgaaggccagcgataccgccatgtactactgcgccagcagctacctgagaggactgtggggcggctacttcgatttttggggccagggcacactggtcaccgttagttctacgcgtatccagaaccctgatcctgccgtgtaccagctgcgggatagcaagagcagcgacaagagcgtgtgtctgttcaccgacttcgacagccagaccaacgtgtcccagagcaaggactccgacgtgtacatcaccgataagtgcgtgctggacatgcggagcatggacttcaagagcaactccgccgtggcctggtccaacaagtccgatttcgcctgcgccaacgccttcaacaacagcattatccccgaggacacattcttcccaagccccgagagcagctgcgacgtgaagctggtggaaaagagcttcgagacagacaccaacctgaacttccagatcctgtacgagatcctgctgggcaaggccaccctgtacgccgtgctggtgtctgccctggtgctgatggctatggtcaagcggaaggacagccggggacgcgccaagagaagcggatctggcgtgaagcagaccctgaatttcgacctgctgaagctggctggcgacgtggaatccaacccaggcccttctagaggccatatgaccgagtacaagcccacggtgcgcctcgccacccgcgacgacgtccccagggccgtacgcaccctcgccgccgcgttcgccgactaccccgccacgcgccacaccgtcgatccggaccgccacatcgagcgggtcaccgagctgcaagaactcttcctcacgcgcgtcgggctcgacatcggcaaggtgtgggtcgcggacgacggcgccgcggtggcggtctggaccacgccggagagcgtcgaagcgggggcggtgttcgccgagatcggcccgcgcatggccgagttgagcggttcccggctggccgcgcagcaacagatggaaggcctcctggcgccgcaccggcccaaggagcccgcgtggttcctggccaccgtcggcgtctcgcccgaccaccagggcaagggtctgggcagcgccgtcgtgctccccggagtggaggcggccgagcgcgccggggtgcccgccttcctggagacctccgcgccccgcaacctccccttctacgagcggctcggcttcaccgtcaccgccgacgtcgaggtgcccgaaggaccgcgcacctggtgcatgacccgcaagcccggtgcctga

SEQ ID NO: 34615 - DNA, 2724 bp, synthetic construct
  source 1..2724: mol_type = other DNA
atggccttaccagtgaccgccttgctcctgccgctggccttgctgctccacgccgccaggccgctcgaggaggaggacctgaagaacgtgttcccacctgaggtggccgtgttcgagcctagcgaggccgagatcagccacacccagaaagccaccctcgtgtgcctggctaccggcttctaccccgaccatgtggaactgtcttggtgggtcaacggcaaagaggtgcacagcggcgtgtgtaccgacccccagccactgaaagaacagcccgccctgaacgacagccggtactgcctgagcagcagactgagagtgtccgccaccttctggcagaacccccggaaccacttcagatgccaggtgcagttctacggcctgagcgagaacgacgagtggacccaggacagagccaagcccgtgacccagatcgtgtctgccgaagcctggggcagagccgattgcggctttaccagcgagagctaccagcagggcgtgctgagcgccaccaacctgagcgtgatcggcttcagaatcctgctgctgaaagtggccggctttaacctgctgatgaccctgcggctgtggtccagcagggccaagcgatctggatctggagcaacaaacttctcactactcaaacaagcaggtgacgtggaggagaatcccgggcctactagcatggccttaccagtgaccgccttgctcctgccgctggccttgctgctccacgccgccaggccggaactgcaaagcgtgctgacacagcctcctagcgcctctggaacacctggacagagagtgacaatcagctgctccggcagctccagcaacatcggcagcaactacgtgaactggtatcagcagctgcctggcacagcccctaaactgctgatctacggcgactaccagaggccaagcggcgtgccagatagattcagcggcagcaagtctggcacaagcgccagcctggctatctctggactgagaagcgaggacgaggccgactactactgtgccaccagagatgatagcctgagcggcagcgtggtgtttggcacaggcacaaagctgacagtgctgggcggcggaggcggaagtggaggcggaggatctggcggcggaggctctgaagttcagctggttcagagcggagccgaagtgaagaagcctggcgagagcctgaagattagctgcaaaggcagcggctacggcttcaccagctattggatcggctgggtccgacagatgcctggcaaaggactggaatggatgggcatcattcaccccgacgacagcgacaccaagtacagccctagcttccagggccaagtgaccatcagcgccgacaagagcatcagcacagcctacctccagtggtcctctctgaaggccagcgataccgccatgtactactgcgccagcagctacctgagaggactgtggggcggctacttcgatttttggggccagggcacactggtcaccgttagttctacgcgtggacagcctaaggccaatcctaccgtgacactgttccctccaagcagcgaagaactccaggccaacaaggccacacttgtgtgcctgatctccgacttctaccctggggctgtgacagtggcttggaaggccgatggatctcctgtgaaagccggcgtggaaaccaccaagccatccaagcagagcaacaacaaatacgccgccagctcctacctgagcctgacacctgagcagtggaagtcccacagatcctacagctgccaagtgacccacgaaggcagcaccgtggaaaagacagtggcccctacagagtgcagccccatcaagaccgatgtgattacaatggaccccaaggacaactgctccaaggacgccaacgataccctgctgctccagctgaccaacaccagcgcctactacatgtacttgttgctgctgctgaagtccgtggtgtacttcgccatcatcacatgctgcctgctgcggagaaccgccttctgctgcaacggcgagaagtctcgcgccaagagaagcggatctggcgtgaagcagaccctgaatttcgacctgctgaagctggctggcgacgtggaatccaacccaggcccttctagaggccatatgaccgagtacaagcccacggtgcgcctcgccacccgcgacgacgtccccagggccgtacgcaccctcgccgccgcgttcgccgactaccccgccacgcgccacaccgtcgatccggaccgccacatcgagcgggtcaccgagctgcaagaactcttcctcacgcgcgtcgggctcgacatcggcaaggtgtgggtcgcggacgacggcgccgcggtggcggtctggaccacgccggagagcgtcgaagcgggggcggtgttcgccgagatcggcccgcgcatggccgagttgagcggttcccggctggccgcgcagcaacagatggaaggcctcctggcgccgcaccggcccaaggagcccgcgtggttcctggccaccgtcggcgtctcgcccgaccaccagggcaagggtctgggcagcgccgtcgtgctccccggagtggaggcggccgagcgcgccggggtgcccgccttcctggagacctccgcgccccgcaacctccccttctacgagcggctcggcttcaccgtcaccgccgacgtcgaggtgcccgaaggaccgcgcacctggtgcatgacccgcaagcccggtgcctga

SEQ ID NO: 34616 - DNA, 2724 bp, synthetic construct
  source 1..2724: mol_type = other DNA
atggccttaccagtgaccgccttgctcctgccgctggccttgctgctccacgccgccaggccgctcgagggacagcctaaggccaatcctaccgtgacactgttccctccaagcagcgaagaactccaggccaacaaggccacacttgtgtgcctgatctccgacttctaccctggggctgtgacagtggcttggaaggccgatggatctcctgtgaaagccggcgtggaaaccaccaagccatccaagcagagcaacaacaaatacgccgccagctcctacctgagcctgacacctgagcagtggaagtcccacagatcctacagctgccaagtgacccacgaaggcagcaccgtggaaaagacagtggcccctacagagtgcagccccatcaagaccgatgtgattacaatggaccccaaggacaactgctccaaggacgccaacgataccctgctgctccagctgaccaacaccagcgcctactacatgtacttgttgctgctgctgaagtccgtggtgtacttcgccatcatcacatgctgcctgctgcggagaaccgccttctgctgcaacggcgagaagtctagggccaagcgatctggatctggagcaacaaacttctcactactcaaacaagcaggtgacgtggaggagaatcccgggcctactagcatggccttaccagtgaccgccttgctcctgccgctggccttgctgctccacgccgccaggccggaactgcaaagcgtgctgacacagcctcctagcgcctctggaacacctggacagagagtgacaatcagctgctccggcagctccagcaacatcggcagcaactacgtgaactggtatcagcagctgcctggcacagcccctaaactgctgatctacggcgactaccagaggccaagcggcgtgccagatagattcagcggcagcaagtctggcacaagcgccagcctggctatctctggactgagaagcgaggacgaggccgactactactgtgccaccagagatgatagcctgagcggcagcgtggtgtttggcacaggcacaaagctgacagtgctgggcggcggaggcggaagtggaggcggaggatctggcggcggaggctctgaagttcagctggttcagagcggagccgaagtgaagaagcctggcgagagcctgaagattagctgcaaaggcagcggctacggcttcaccagctattggatcggctgggtccgacagatgcctggcaaaggactggaatggatgggcatcattcaccccgacgacagcgacaccaagtacagccctagcttccagggccaagtgaccatcagcgccgacaagagcatcagcacagcctacctccagtggtcctctctgaaggccagcgataccgccatgtactactgcgccagcagctacctgagaggactgtggggcggctacttcgatttttggggccagggcacactggtcaccgttagttctacgcgtgaggaggacctgaagaacgtgttcccacctgaggtggccgtgttcgagcctagcgaggccgagatcagccacacccagaaagccaccctcgtgtgcctggctaccggcttctaccccgaccatgtggaactgtcttggtgggtcaacggcaaagaggtgcacagcggcgtgtgtaccgacccccagccactgaaagaacagcccgccctgaacgacagccggtactgcctgagcagcagactgagagtgtccgccaccttctggcagaacccccggaaccacttcagatgccaggtgcagttctacggcctgagcgagaacgacgagtggacccaggacagagccaagcccgtgacccagatcgtgtctgccgaagcctggggcagagccgattgcggctttaccagcgagagctaccagcagggcgtgctgagcgccaccaacctgagcgtgatcggcttcagaatcctgctgctgaaagtggccggctttaacctgctgatgaccctgcggctgtggtccagccgcgccaagagaagcggatctggcgtgaagcagaccctgaatttcgacctgctgaagctggctggcgacgtggaatccaacccaggcccttctagaggccatatgaccgagtacaagcccacggtgcgcctcgccacccgcgacgacgtccccagggccgtacgcaccctcgccgccgcgttcgccgactaccccgccacgcgccacaccgtcgatccggaccgccacatcgagcgggtcaccgagctgcaagaactcttcctcacgcgcgtcgggctcgacatcggcaaggtgtgggtcgcggacgacggcgccgcggtggcggtctggaccacgccggagagcgtcgaagcgggggcggtgttcgccgagatcggcccgcgcatggccgagttgagcggttcccggctggccgcgcagcaacagatggaaggcctcctggcgccgcaccggcccaaggagcccgcgtggttcctggccaccgtcggcgtctcgcccgaccaccagggcaagggtctgggcagcgccgtcgtgctccccggagtggaggcggccgagcgcgccggggtgcccgccttcctggagacctccgcgccccgcaacctccccttctacgagcggctcggcttcaccgtcaccgccgacgtcgaggtgcccgaaggaccgcgcacctggtgcatgacccgcaagcccggtgcctga

SEQ ID NO: 34617 - DNA, 2715 bp, synthetic construct
  source 1..2715: mol_type = other DNA
atggccttaccagtgaccgccttgctcctgccgctggccttgctgctccacgccgccaggccgctcgaggaggcctctacaaagggaccctccgtgtttcctctggctcccagcagcaagtctacaagcggaggaacagccgctctgggctgcctggtcaaggattactttcccgagcctgtgaccgtgtcctggaatagcggagcactgacaagcggcgtgcacacctttccagccgtgctgcaaagcagcggcctgtactctctgagcagcgtggtcacagtgcctagctctagcctgggcacccagacctacatctgcaatgtgaaccacaagcctagcaacaccaaggtggacaagagagtggaacccaagagctgtcccatcaagaccgatgtgattacaatggaccccaaggacaactgctccaaggacgccaacgataccctgctgctccagctgaccaacaccagcgcctactacatgtacttgttgctgctgctgaagtccgtggtgtacttcgccatcatcacatgctgcctgctgcggagaaccgccttctgctgcaacggcgagaagtctagggccaagcgatctggatctggagcaacaaacttctcactactcaaacaagcaggtgacgtggaggagaatcccgggcctactagcatggccttaccagtgaccgccttgctcctgccgctggccttgctgctccacgccgccaggccggaactgcaaagcgtgctgacacagcctcctagcgcctctggaacacctggacagagagtgacaatcagctgctccggcagctccagcaacatcggcagcaactacgtgaactggtatcagcagctgcctggcacagcccctaaactgctgatctacggcgactaccagaggccaagcggcgtgccagatagattcagcggcagcaagtctggcacaagcgccagcctggctatctctggactgagaagcgaggacgaggccgactactactgtgccaccagagatgatagcctgagcggcagcgtggtgtttggcacaggcacaaagctgacagtgctgggcggcggaggcggaagtggaggcggaggatctggcggcggaggctctgaagttcagctggttcagagcggagccgaagtgaagaagcctggcgagagcctgaagattagctgcaaaggcagcggctacggcttcaccagctattggatcggctgggtccgacagatgcctggcaaaggactggaatggatgggcatcattcaccccgacgacagcgacaccaagtacagccctagcttccagggccaagtgaccatcagcgccgacaagagcatcagcacagcctacctccagtggtcctctctgaaggccagcgataccgccatgtactactgcgccagcagctacctgagaggactgtggggcggctacttcgatttttggggccagggcacactggtcaccgttagttctacgcgtggacagcctaaggccaatcctaccgtgacactgttccctccaagcagcgaagaactccaggccaacaaggccacacttgtgtgcctgatctccgacttctaccctggggctgtgacagtggcttggaaggccgatggatctcctgtgaaagccggcgtggaaaccaccaagccatccaagcagagcaacaacaaatacgccgccagctcctacctgagcctgacacctgagcagtggaagtcccacagatcctacagctgccaagtgacccacgaaggcagcaccgtggaaaagacagtggcccctacagagtgcagcgaagtgaaaaccgactccaccgaccacgtgaagcccaaagagacagagaacaccaagcagcccagcaagagctgccacaagcccaaggccatcgtgcacaccgagaaagtgaacatgatgagcctgaccgtgctgggcctgcggatgctgttcgccaaaaccgtggccgtgaacttcctgctgaccgccaagctgttcttcctccgcgccaagagaagcggatctggcgtgaagcagaccctgaatttcgacctgctgaagctggctggcgacgtggaatccaacccaggcccttctagaggccatatgaccgagtacaagcccacggtgcgcctcgccacccgcgacgacgtccccagggccgtacgcaccctcgccgccgcgttcgccgactaccccgccacgcgccacaccgtcgatccggaccgccacatcgagcgggtcaccgagctgcaagaactcttcctcacgcgcgtcgggctcgacatcggcaaggtgtgggtcgcggacgacggcgccgcggtggcggtctggaccacgccggagagcgtcgaagcgggggcggtgttcgccgagatcggcccgcgcatggccgagttgagcggttcccggctggccgcgcagcaacagatggaaggcctcctggcgccgcaccggcccaaggagcccgcgtggttcctggccaccgtcggcgtctcgcccgaccaccagggcaagggtctgggcagcgccgtcgtgctccccggagtggaggcggccgagcgcgccggggtgcccgccttcctggagacctccgcgccccgcaacctccccttctacgagcggctcggcttcaccgtcaccgccgacgtcgaggtgcccgaaggaccgcgcacctggtgcatgacccgcaagcccggtgcctga

SEQ ID NO: 34618 - DNA, 2649 bp, synthetic construct
  source 1..2649: mol_type = other DNA
atggccttaccagtgaccgccttgctcctgccgctggccttgctgctccacgccgccaggccgctcgaggaggcctctacaaagggaccctccgtgtttcctctggctcccagcagcaagtctacaagcggaggaacagccgctctgggctgcctggtcaaggattactttcccgagcctgtgaccgtgtcctggaatagcggagcactgacaagcggcgtgcacacctttccagccgtgctgcaaagcagcggcctgtactctctgagcagcgtggtcacagtgcctagctctagcctgggcacccagacctacatctgcaatgtgaaccacaagcctagcaacaccaaggtggacaagagagtggaacccaagagctgtggcagagccgattgcggctttaccagcgagagctaccagcagggcgtgctgagcgccaccatcctgtacgagatcctgctgggcaaggccaccctgtacgccgtgctggtgtctgccctggtgctgatggctatggtcaagcggaaggacagccggggaagggccaagcgatctggatctggagcaacaaacttctcactactcaaacaagcaggtgacgtggaggagaatcccgggcctactagcatggccttaccagtgaccgccttgctcctgccgctggccttgctgctccacgccgccaggccggaactgcaaagcgtgctgacacagcctcctagcgcctctggaacacctggacagagagtgacaatcagctgctccggcagctccagcaacatcggcagcaactacgtgaactggtatcagcagctgcctggcacagcccctaaactgctgatctacggcgactaccagaggccaagcggcgtgccagatagattcagcggcagcaagtctggcacaagcgccagcctggctatctctggactgagaagcgaggacgaggccgactactactgtgccaccagagatgatagcctgagcggcagcgtggtgtttggcacaggcacaaagctgacagtgctgggcggcggaggcggaagtggaggcggaggatctggcggcggaggctctgaagttcagctggttcagagcggagccgaagtgaagaagcctggcgagagcctgaagattagctgcaaaggcagcggctacggcttcaccagctattggatcggctgggtccgacagatgcctggcaaaggactggaatggatgggcatcattcaccccgacgacagcgacaccaagtacagccctagcttccagggccaagtgaccatcagcgccgacaagagcatcagcacagcctacctccagtggtcctctctgaaggccagcgataccgccatgtactactgcgccagcagctacctgagaggactgtggggcggctacttcgatttttggggccagggcacactggtcaccgttagttctacgcgtggacagcctaaggccaatcctaccgtgacactgttccctccaagcagcgaagaactccaggccaacaaggccacacttgtgtgcctgatctccgacttctaccctggggctgtgacagtggcttggaaggccgatggatctcctgtgaaagccggcgtggaaaccaccaagccatccaagcagagcaacaacaaatacgccgccagctcctacctgagcctgacacctgagcagtggaagtcccacagatcctacagctgccaagtgacccacgaaggcagcaccgtggaaaagacagtggcccctacagagtgcagcatccccgaggacacattcttcccaagccccgagagcagctgcgacgtgaagctggtggaaaagagcttcgagacagacaccaacctgaacttccagaacctgagcgtgatcggcttcagaatcctgctgctgaaagtggccggctttaacctgctgatgaccctgcggctgtggtccagccgcgccaagagaagcggatctggcgtgaagcagaccctgaatttcgacctgctgaagctggctggcgacgtggaatccaacccaggcccttctagaggccatatgaccgagtacaagcccacggtgcgcctcgccacccgcgacgacgtccccagggccgtacgcaccctcgccgccgcgttcgccgactaccccgccacgcgccacaccgtcgatccggaccgccacatcgagcgggtcaccgagctgcaagaactcttcctcacgcgcgtcgggctcgacatcggcaaggtgtgggtcgcggacgacggcgccgcggtggcggtctggaccacgccggagagcgtcgaagcgggggcggtgttcgccgagatcggcccgcgcatggccgagttgagcggttcccggctggccgcgcagcaacagatggaaggcctcctggcgccgcaccggcccaaggagcccgcgtggttcctggccaccgtcggcgtctcgcccgaccaccagggcaagggtctgggcagcgccgtcgtgctccccggagtggaggcggccgagcgcgccggggtgcccgccttcctggagacctccgcgccccgcaacctccccttctacgagcggctcggcttcaccgtcaccgccgacgtcgaggtgcccgaaggaccgcgcacctggtgcatgacccgcaagcccggtgcctga

SEQ ID NO: 34619 - DNA, 2649 bp, synthetic construct
  source 1..2649: mol_type = other DNA
atggccttaccagtgaccgccttgctcctgccgctggccttgctgctccacgccgccaggccgctcgaggaggcctctacaaagggaccctccgtgtttcctctggctcccagcagcaagtctacaagcggaggaacagccgctctgggctgcctggtcaaggattactttcccgagcctgtgaccgtgtcctggaatagcggagcactgacaagcggcgtgcacacctttccagccgtgctgcaaagcagcggcctgtactctctgagcagcgtggtcacagtgcctagctctagcctgggcacccagacctacatctgcaatgtgaaccacaagcctagcaacaccaaggtggacaagagagtggaacccaagagctgtatccccgaggacacattcttcccaagccccgagagcagctgcgacgtgaagctggtggaaaagagcttcgagacagacaccaacctgaacttccagaacctgagcgtgatcggcttcagaatcctgctgctgaaagtggccggctttaacctgctgatgaccctgcggctgtggtccagcagggccaagcgatctggatctggagcaacaaacttctcactactcaaacaagcaggtgacgtggaggagaatcccgggcctactagcatggccttaccagtgaccgccttgctcctgccgctggccttgctgctccacgccgccaggccggaactgcaaagcgtgctgacacagcctcctagcgcctctggaacacctggacagagagtgacaatcagctgctccggcagctccagcaacatcggcagcaactacgtgaactggtatcagcagctgcctggcacagcccctaaactgctgatctacggcgactaccagaggccaagcggcgtgccagatagattcagcggcagcaagtctggcacaagcgccagcctggctatctctggactgagaagcgaggacgaggccgactactactgtgccaccagagatgatagcctgagcggcagcgtggtgtttggcacaggcacaaagctgacagtgctgggcggcggaggcggaagtggaggcggaggatctggcggcggaggctctgaagttcagctggttcagagcggagccgaagtgaagaagcctggcgagagcctgaagattagctgcaaaggcagcggctacggcttcaccagctattggatcggctgggtccgacagatgcctggcaaaggactggaatggatgggcatcattcaccccgacgacagcgacaccaagtacagccctagcttccagggccaagtgaccatcagcgccgacaagagcatcagcacagcctacctccagtggtcctctctgaaggccagcgataccgccatgtactactgcgccagcagctacctgagaggactgtggggcggctacttcgatttttggggccagggcacactggtcaccgttagttctacgcgtggacagcctaaggccaatcctaccgtgacactgttccctccaagcagcgaagaactccaggccaacaaggccacacttgtgtgcctgatctccgacttctaccctggggctgtgacagtggcttggaaggccgatggatctcctgtgaaagccggcgtggaaaccaccaagccatccaagcagagcaacaacaaatacgccgccagctcctacctgagcctgacacctgagcagtggaagtcccacagatcctacagctgccaagtgacccacgaaggcagcaccgtggaaaagacagtggcccctacagagtgcagcggcagagccgattgcggctttaccagcgagagctaccagcagggcgtgctgagcgccaccatcctgtacgagatcctgctgggcaaggccaccctgtacgccgtgctggtgtctgccctggtgctgatggctatggtcaagcggaaggacagccggggacgcgccaagagaagcggatctggcgtgaagcagaccctgaatttcgacctgctgaagctggctggcgacgtggaatccaacccaggcccttctagaggccatatgaccgagtacaagcccacggtgcgcctcgccacccgcgacgacgtccccagggccgtacgcaccctcgccgccgcgttcgccgactaccccgccacgcgccacaccgtcgatccggaccgccacatcgagcgggtcaccgagctgcaagaactcttcctcacgcgcgtcgggctcgacatcggcaaggtgtgggtcgcggacgacggcgccgcggtggcggtctggaccacgccggagagcgtcgaagcgggggcggtgttcgccgagatcggcccgcgcatggccgagttgagcggttcccggctggccgcgcagcaacagatggaaggcctcctggcgccgcaccggcccaaggagcccgcgtggttcctggccaccgtcggcgtctcgcccgaccaccagggcaagggtctgggcagcgccgtcgtgctccccggagtggaggcggccgagcgcgccggggtgcccgccttcctggagacctccgcgccccgcaacctccccttctacgagcggctcggcttcaccgtcaccgccgacgtcgaggtgcccgaaggaccgcgcacctggtgcatgacccgcaagcccggtgcctga

SEQ ID NO: 34620 - DNA, 1887 bp, synthetic construct
  source 1..1887: mol_type = other DNA
atggccttaccagtgaccgccttgctcctgccgctggccttgctgctccacgccgccaggccggaactgcaaagcgtgctgacacagcctcctagcgcctctggaacacctggacagagagtgacaatcagctgctccggcagctccagcaacatcggcagcaactacgtgaactggtatcagcagctgcctggcacagcccctaaactgctgatctacggcgactaccagaggccaagcggcgtgccagatagattcagcggcagcaagtctggcacaagcgccagcctggctatctctggactgagaagcgaggacgaggccgactactactgtgccaccagagatgatagcctgagcggcagcgtggtgtttggcacaggcacaaagctgacagtgctgggcctcgaggacctgaagaacgtgttcccacctgaggtggccgtgttcgagcctagcgaggccgagatcagccacacccagaaagccaccctcgtgtgcctggctaccggcttctaccccgaccatgtggaactgtcttggtgggtcaacggcaaagaggtgcacagcggcgtgtgtaccgacccccagccactgaaagaacagcccgccctgaacgacagccggtactgcctgagcagcagactgagagtgtccgccaccttctggcagaacccccggaaccacttcagatgccaggtgcagttctacggcctgagcgagaacgacgagtggacccaggacagagccaagcccgtgacccagatcgtgtctgccgaagcctggggcagagccgatagcggctttaccagcgagagctaccagcagggcgtgctgagcgccaccatcctgtacgagatcctgctgggcaaggccaccctgtacgccgtgctggtgtctgccctggtgctgatggctatggtcaagcggaaggacagccggggaagggccaagcgatctggatctggagcaacaaacttctcactactcaaacaagcaggtgacgtggaggagaatcccgggcctactagtatggactggatttggcgcatccttttccttgtcggcgctgctaccggcgcgcattccttcgaagaagttcagctggttcagagcggagccgaagtgaagaagcctggcgagagcctgaagattagctgcaaaggcagcggctacggcttcaccagctattggatcggctgggtccgacagatgcctggcaaaggactggaatggatgggcatcattcaccccgacgacagcgacaccaagtacagccctagcttccagggccaagtgaccatcagcgccgacaagagcatcagcacagcctacctccagtggtcctctctgaaggccagcgataccgccatgtactactgcgccagcagctacctgagaggactgtggggcggctacttcgatttttggggccagggcacactggtcaccgttagttctacgcgtatccagaaccctgatcctgccgtgtaccagctgcgggatagcaagagcagcgacaagagcgtgtgtctgttcaccgacttcgacagccagaccaacgtgtcccagagcaaggactccgacgtgtacatcaccgataagtgcgtgctggacatgcggagcatggacttcaagagcaactccgccgtggcctggtccaacaagtccgatttcgcctgcgccaacgccttcaacaacagcattatccccgaggacacattcttcccaagccccgagagcagcagcgacgtgaagctggtggaaaagagcttcgagacagacaccaacctgaacttccagaacctgagcgtgatcggcttcagaatcctgctgctgaaagtggccggctttaacctgctgatgaccctgcggctgtggtccagc

SEQ ID NO: 34621 - DNA, 2727 bp, synthetic construct
  source 1..2727: mol_type = other DNA
atggccttaccagtgaccgccttgctcctgccgctggccttgctgctccacgccgccaggccggaggttcagctgcttgagtctggcggaggactggttcaacctggcggaagcctgagactgtcttgtgccgcctctggcagaaccttcagcatgggctggtatagacaggcccctggcaagggcctcgaatttgtgtctgccatcacatacagcggcggcagcccttactacgccgattctgtgaagggcagattcaccatcagccgggacaacagcaagaacaccgtgtacctccagatgaacagcctgagagccgaggacaccgccgtgtactactgtgccgccaatccaacctacggcagcgactggaatgccgagaattggggccagggcacactggtcacagtgtctagtggtaccggcggaggcggatctggcggcggaggtagcggtggcggaggatctgaattcgaactgcaaagcgtgctgacacagcctcctagcgcctctggaacacctggacagagagtgacaatcagctgctccggcagctccagcaacatcggcagcaactacgtgaactggtatcagcagctgcctggcacagcccctaaactgctgatctacggcgactaccagaggccaagcggcgtgccagatagattcagcggcagcaagtctggcacaagcgccagcctggctatctctggactgagaagcgaggacgaggccgactactactgtgccaccagagatgatagcctgagcggcagcgtggtgtttggcacaggcacaaagctgacagtgctgggcctcgagatccagaaccctgatcctgccgtgtaccagctgcgggatagcaagagcagcgacaagagcgtgtgtctgttcaccgacttcgacagccagaccaacgtgtcccagagcaaggactccgacgtgtacatcaccgataagtgcgtgctggacatgcggagcatggacttcaagagcaactccgccgtggcctggtccaacaagtccgatttcgcctgcgccaacgccttcaacaacagcattatccccgaggacacattcttcccaagcagcgacgtgccctgcgacgtgaagctggtggaaaagagcttcgagacagacaccaacctgaacttccagaacctgagcgtgatcggcttcagaatcctgctgctgaaagtggccggctttaacctgctgatgaccctgcggctgtggtccagccgcgccaagagaagcggatctggcgtgaagcagaccctgaatttcgacctgctgaagctggctggcgacgtggaatccaacccaggccctactagtaccatggactggatttggcgcatccttttccttgtcggcgctgctaccggcacccattccgggcccgaagtgcaactggttgaatccggtggcggcctggtgcaacccggcggatctctcagacttagctgtgccgcctccggcagaaccttcacaatgggatggtacaggcaggctccagggaaagagagagagttcgtcgccgccatctctctgtctcccacactggcctactacgccgactctgtgaaaggccggttcaccatctccagagataatagcaagaacaccgtggtgctgcaaatgaactctctgagagccgaggatacagccctgtactattgtgccgctgaccggaagtccgtgatgagcatcagacccgattactggggacagggcacactggtcacagtgtctagtggatccggcggcggaggatctggcggaggcggatctgggggcggaggctctttcgaagaagttcagctggttcagagcggagccgaagtgaagaagcctggcgagagcctgaagattagctgcaaaggcagcggctacggcttcaccagctattggatcggctgggtccgacagatgcctggcaaaggactggaatggatgggcatcattcaccccgacgacagcgacaccaagtacagccctagcttccagggccaagtgaccatcagcgccgacaagagcatcagcacagcctacctccagtggtcctctctgaaggccagcgataccgccatgtactactgcgccagcagctacctgagaggactgtggggcggctacttcgatttttggggccagggcacactggtcaccgttagttctacgcgtgaggacctgaagaacgtgttcccacctgaggtggccgtgttcgagcctagcaaggccgagatcgcccacacccagaaagccaccctcgtgtgcctggctaccggcttctaccccgaccatgtggaactgtcttggtgggtcaacggcaaagaggtgcacagcggcgtgtgtaccgacccccagccactgaaagaacagcccgccctgaacgacagccggtactgcctgagcagcagactgagagtgtccgccaccttctggcagaacccccggaaccacttcagatgccaggtgcagttctacggcctgagcgagaacgacgagtggacccaggacagagccaagcccgtgacccagatcgtgtctgccgaagcctggggcagagccgattgcggcatcaccagcgccagctaccaccagggcgtgctgagcgccaccatcctgtacgagatcctgctgggcaaggccaccctgtacgccgtgctggtgtctgccctggtgctgatggctatggtcaagcggaaggacagccggggataa

SEQ ID NO: 34622 - DNA, 2727 bp, synthetic construct
  source 1..2727: mol_type = other DNA
atggccttaccagtgaccgccttgctcctgccgctggccttgctgctccacgccgccaggccggaagtgcagctggttgaatctggcggaggactggttcaggctggcggatctctgagactgtcttgtgccgccagcggcagaacctttagcatgggctggtttagacaggcccctggcaaagagagagagttcgtcgccgccatcacatactctggcggcagcccttactacgccgactctgtgaagggcagattcaccatcagccgggacaacgccaagaacaccgtgtacctccagatgaacagcctgaagcctgaggacaccgccgtgtactactgcgccgccaatccaacatacggcagcgactggaacgccgagaattggggccagggaacccaagtgacagtgtctagcggtaccggcggaggcggatctggcggcggaggtagcggtggcggaggatctgaattcgaactgcaaagcgtgctgacacagcctcctagcgcctctggaacacctggacagagagtgacaatcagctgctccggcagctccagcaacatcggcagcaactacgtgaactggtatcagcagctgcctggcacagcccctaaactgctgatctacggcgactaccagaggccaagcggcgtgccagatagattcagcggcagcaagtctggcacaagcgccagcctggctatctctggactgagaagcgaggacgaggccgactactactgtgccaccagagatgatagcctgagcggcagcgtggtgtttggcacaggcacaaagctgacagtgctgggcctcgagatccagaaccctgatcctgccgtgtaccagctgcgggatagcaagagcagcgacaagagcgtgtgtctgttcaccgacttcgacagccagaccaacgtgtcccagagcaaggactccgacgtgtacatcaccgataagtgcgtgctggacatgcggagcatggacttcaagagcaactccgccgtggcctggtccaacaagtccgatttcgcctgcgccaacgccttcaacaacagcattatccccgaggacacattcttcccaagcagcgacgtgccctgcgacgtgaagctggtggaaaagagcttcgagacagacaccaacctgaacttccagaacctgagcgtgatcggcttcagaatcctgctgctgaaagtggccggctttaacctgctgatgaccctgcggctgtggtccagccgcgccaagagaagcggatctggcgtgaagcagaccctgaatttcgacctgctgaagctggctggcgacgtggaatccaacccaggccctactagtaccatggactggatttggcgcatccttttccttgtcggcgctgctaccggcgcccattccgggcccgaagtgcaactggttgaatccggtggcggcctggtgcaacccggcggatctctcagacttagctgtgccgcctccggcagaaccttcacaatgggatggtacaggcaggctccagggaaagagagagagttcgtcgccgccatctctctgtctcccacactggcctactacgccgactctgtgaaaggccggttcaccatctccagagataatagcaagaacaccgtggtgctgcaaatgaactctctgagagccgaggatacagccctgtactattgtgccgctgaccggaagtccgtgatgagcatcagacccgattactggggacagggcacactggtcacagtgtctagtggatccggcggcggaggatctggcggaggcggatctgggggcggaggctctttcgaagaagttcagctggttcagagcggagccgaagtgaagaagcctggcgagagcctgaagattagctgcaaaggcagcggctacggcttcaccagctattggatcggctgggtccgacagatgcctggcaaaggactggaatggatgggcatcattcaccccgacgacagcgacaccaagtacagccctagcttccagggccaagtgaccatcagcgccgacaagagcatcagcacagcctacctccagtggtcctctctgaaggccagcgataccgccatgtactactgcgccagcagctacctgagaggactgtggggcggctacttcgatttttggggccagggcacactggtcaccgttagttctacgcgtgaggacctgaagaacgtgttcccacctgaggtggccgtgttcgagcctagcaaggccgagatcgcccacacccagaaagccaccctcgtgtgcctggctaccggcttctaccccgaccatgtggaactgtcttggtgggtcaacggcaaagaggtgcacagcggcgtgtgtaccgacccccagccactgaaagaacagcccgccctgaacgacagccggtactgcctgagcagcagactgagagtgtccgccaccttctggcagaacccccggaaccacttcagatgccaggtgcagttctacggcctgagcgagaacgacgagtggacccaggacagagccaagcccgtgacccagatcgtgtctgccgaagcctggggcagagccgattgcggcatcaccagcgccagctaccaccagggcgtgctgagcgccaccatcctgtacgagatcctgctgggcaaggccaccctgtacgccgtgctggtgtctgccctggtgctgatggctatggtcaagcggaaggacagccggggataa

SEQ ID NO: 34623 - DNA, 2718 bp, synthetic construct
  source 1..2718: mol_type = other DNA
atggccttaccagtgaccgccttgctcctgccgctggccttgctgctccacgccgccaggccggaagtgcagctggttgaatctggcggaggactggttcaggctggcggatctctgagactgtcttgtgccgccagcggcagaacctttagcatgggctggtttagacaggcccctggcaaagagagagagttcgtcgccgccatcacatactctggcggcagcccttactacgccgactctgtgaagggcagattcaccatcagccgggacaacgccaagaacaccgtgtacctccagatgaacagcctgaagcctgaggacaccgccgtgtactactgcgccgccaatccaacatacggcagcgactggaacgccgagaattggggccagggaacccaagtgacagtgtctagcggtaccggcggaggcggatctggcggcggaggtagcggtggcggaggatctgaattcgaactgcaaagcgtgctgacacagcctcctagcgcctctggaacacctggacagagagtgacaatcagctgctccggcagctccagcaacatcggcagcaactacgtgaactggtatcagcagctgcctggcacagcccctaaactgctgatctacggcgactaccagaggccaagcggcgtgccagatagattcagcggcagcaagtctggcacaagcgccagcctggctatctctggactgagaagcgaggacgaggccgactactactgtgccaccagagatgatagcctgagcggcagcgtggtgtttggcacaggcacaaagctgacagtgctgggcctcgaggacctgaagaacgtgttcccacctgaggtggccgtgttcgagcctagcgaggccgagatcagccacacccagaaagccaccctcgtgtgcctggctaccggcttctaccccgaccatgtggaactgtcttggtgggtcaacggcaaagaggtgcacagcggcgtgtgtaccgacccccagccactgaaagaacagcccgccctgaacgacagccggtactgcctgagcagcagactgagagtgtccgccaccttctggcagaacccccggaaccacttcagatgccaggtgcagttctacggcctgagcgagaacgacgagtggacccaggacagagccaagcccgtgacccagatcgtgtctgccgaagcctggggcagagccgattgcggctttaccagcgagagctaccagcagggcgtgctgagcgccaccatcctgtacgagatcctgctgggcaaggccaccctgtacgccgtgctggtgtctgccctggtgctgatggctatggtcaagcggaaggacagccggggaagggccaagcgatctggatctggagcaacaaacttctcactactcaaacaagcaggtgacgtggaggagaatcccgggcctactagtgccaccatggactggatttggcgcatccttttccttgtcggcgctgctaccggcgcccattccgggcccgaagtgcaactggttgaatccggtggcggcctggtgcaagcaggcggatctctcagacttagctgtgccgcctccggcagaaccttcacaatgggatggtttaggcaggctccagggaaagagagagagttcgtcgccgccatctctctgtctcccacactggcctactacgccgactctgtgaaaggccggttcaccatctccagagataatgccaagaacaccgtggtgctgcaaatgaactctctgaaacccgaggatacagccctgtactattgtgccgctgaccggaagtccgtgatgagcatcagacccgattactggggacagggcacacaagtcacagtgtcctctggatccggcggcggaggatctggcggaggcggatctgggggcggaggctctttcgaagaagttcagctggttcagagcggagccgaagtgaagaagcctggcgagagcctgaagattagctgcaaaggcagcggctacggcttcaccagctattggatcggctgggtccgacagatgcctggcaaaggactggaatggatgggcatcattcaccccgacgacagcgacaccaagtacagccctagcttccagggccaagtgaccatcagcgccgacaagagcatcagcacagcctacctccagtggtcctctctgaaggccagcgataccgccatgtactactgcgccagcagctacctgagaggactgtggggcggctacttcgatttttggggccagggcacactggtcaccgttagttctacgcgtatccagaaccctgatcctgccgtgtaccagctgcgggatagcaagagcagcgacaagagcgtgtgtctgttcaccgacttcgacagccagaccaacgtgtcccagagcaaggactccgacgtgtacatcaccgataagtgcgtgctggacatgcggagcatggacttcaagagcaactccgccgtggcctggtccaacaagtccgatttcgcctgcgccaacgccttcaacaacagcattatccccgaggacacattcttcccaagccccgagagcagctgcgacgtgaagctggtggaaaagagcttcgagacagacaccaacctgaacttccagaacctgagcgtgatcggcttcagaatcctgctgctgaaagtggccggctttaacctgctgatgaccctgcggctgtggtccagctaa

SEQ ID NO: 34624 - DNA, 2331 bp, synthetic construct
  source 1..2331: mol_type = other DNA
atggccttaccagtgaccgccttgctcctgccgctggccttgctgctccacgccgccaggccggaagtgcagctggttgaatctggcggaggactggttcagcctggcggatctctgagactgagctgtgaagccagcggcttcgccagcgacgattacatcatcggctggttcagacaggcccctggcaaagagagagagggcgtcagctgcatcagctctaagtacgccaacaccgtgtacaccgacagcgtgaagggcagattcagactgagcagaggcaccgccaagaataccgtgtacctccagatgagcgccctgaagcctgaggataccgccgtgtactactgcgctatggacagccgcagagtgacatgccctgagatcagcaccatgcaccggaacttcgattcttggggccagggcacactggtcacagtgtcatctggtaccggcggaggcggatctggcggcggaggtagcggtggcggaggatctgaattcgaactgcaaagcgtgctgacacagcctcctagcgcctctggaacacctggacagagagtgacaatcagctgctccggcagctccagcaacatcggcagcaactacgtgaactggtatcagcagctgcctggcacagcccctaaactgctgatctacggcgactaccagaggccaagcggcgtgccagatagattcagcggcagcaagtctggcacaagcgccagcctggctatctctggactgagaagcgaggacgaggccgactactactgtgccaccagagatgatagcctgagcggcagcgtggtgtttggcacaggcacaaagctgacagtgctgggcctcgaggacctgaagaacgtgttcccacctgaggtggccgtgttcgagcctagcaaggccgagatcgcccacacccagaaagccaccctcgtgtgcctggctaccggcttctaccccgaccatgtggaactgtcttggtgggtcaacggcaaagaggtgcacagcggcgtgtgtaccgacccccagccactgaaagaacagcccgccctgaacgacagccggtactgcctgagcagcagactgagagtgtccgccaccttctggcagaacccccggaaccacttcagatgccaggtgcagttctacggcctgagcgagaacgacgagtggacccaggacagagccaagcccgtgacccagatcgtgtctgccgaagcctggggcagagccgattgcggcatcaccagcgccagctaccaccagggcgtgctgagcgccaccatcctgtacgagatcctgctgggcaaggccaccctgtacgccgtgctggtgtctgccctggtgctgatggctatggtcaagcggaaggacagccggggaagggccaagcgatctggatctggagcaacaaacttctcactactcaaacaagcaggtgacgtggaggagaatcccgggcctactagtatggactggatttggcgcatccttttccttgtcggcgctgctaccggcgcgcattccttcgaagaagttcagctggttcagagcggagccgaagtgaagaagcctggcgagagcctgaagattagctgcaaaggcagcggctacggcttcaccagctattggatcggctgggtccgacagatgcctggcaaaggactggaatggatgggcatcattcaccccgacgacagcgacaccaagtacagccctagcttccagggccaagtgaccatcagcgccgacaagagcatcagcacagcctacctccagtggtcctctctgaaggccagcgataccgccatgtactactgcgccagcagctacctgagaggactgtggggcggctacttcgatttttggggccagggcacactggtcaccgttagttctacgcgtatccagaaccctgatcctgccgtgtaccagctgcgggatagcaagagcagcgacaagagcgtgtgtctgttcaccgacttcgacagccagaccaacgtgtcccagagcaaggactccgacgtgtacatcaccgataagtgcgtgctggacatgcggagcatggacttcaagagcaactccgccgtggcctggtccaacaagtccgatttcgcctgcgccaacgccttcaacaacagcattatccccgaggacacattcttcccaagcagcgacgtgccctgcgacgtgaagctggtggaaaagagcttcgagacagacaccaacctgaacttccagaacctgagcgtgatcggcttcagaatcctgctgctgaaagtggccggctttaacctgctgatgaccctgcggctgtggtccagctaa

SEQ ID NO: 34625 - DNA, 2304 bp, synthetic construct
  source 1..2304: mol_type = other DNA
atggccttaccagtgaccgccttgctcctgccgctggccttgctgctccacgccgccaggccggaactgcaaagcgtgctgacacagcctcctagcgcctctggaacacctggacagagagtgacaatcagctgctccggcagctccagcaacatcggcagcaactacgtgaactggtatcagcagctgcctggcacagcccctaaactgctgatctacggcgactaccagaggccaagcggcgtgccagatagattcagcggcagcaagtctggcacaagcgccagcctggctatctctggactgagaagcgaggacgaggccgactactactgtgccaccagagatgatagcctgagcggcagcgtggtgtttggcacaggcacaaagctgacagtgctgggcctcgaggacctgaagaacgtgttcccacctgaggtggccgtgttcgagcctagcgaggccgagatcagccacacccagaaagccaccctcgtgtgcctggctaccggcttctaccccgaccatgtggaactgtcttggtgggtcaacggcaaagaggtgcacagcggcgtgtgtaccgacccccagccactgaaagaacagcccgccctgaacgacagccggtactgcctgagcagcagactgagagtgtccgccaccttctggcagaacccccggaaccacttcagatgccaggtgcagttctacggcctgagcgagaacgacgagtggacccaggacagagccaagcccgtgacccagatcgtgtctgccgaagcctggggcagagccgattgcggctttaccagcgagagctaccagcagggcgtgctgagcgccaccatcctgtacgagatcctgctgggcaaggccaccctgtacgccgtgctggtgtctgccctggtgctgatggctatggtcaagcggaaggacagccggggaagggccaagcgatctggatctggagcaacaaacttctcactactcaaacaagcaggtgacgtggaggagaatcccgggcctactagtaccatggactggatttggcgcatccttttccttgtcggcgctgctaccggcgcccattccgggcccgaagtgcaactggttgaatccggtggcggcctggtgcaacccggcggatctctcagacttagctgtgccgcctccggcagaaccttcacaatgggatggtacaggcaggctccagggaaagagagagagttcgtcgccgccatctctctgtctcccacactggcctactacgccgactctgtgaaaggccggttcaccatctccagagataatagcaagaacaccgtggtgctgcaaatgaactctctgagagccgaggatacagccctgtactattgtgccgctgaccggaagtccgtgatgagcatcagacccgattactggggacagggcacactggtcacagtgtctagtggatccggcggcggaggatctggcggaggcggatctgggggcggaggctctttcgaagaagttcagctggttcagagcggagccgaagtgaagaagcctggcgagagcctgaagattagctgcaaaggcagcggctacggcttcaccagctattggatcggctgggtccgacagatgcctggcaaaggactggaatggatgggcatcattcaccccgacgacagcgacaccaagtacagccctagcttccagggccaagtgaccatcagcgccgacaagagcatcagcacagcctacctccagtggtcctctctgaaggccagcgataccgccatgtactactgcgccagcagctacctgagaggactgtggggcggctacttcgatttttggggccagggcacactggtcaccgttagttctacgcgtatccagaaccctgatcctgccgtgtaccagctgcgggatagcaagagcagcgacaagagcgtgtgtctgttcaccgacttcgacagccagaccaacgtgtcccagagcaaggactccgacgtgtacatcaccgataagtgcgtgctggacatgcggagcatggacttcaagagcaactccgccgtggcctggtccaacaagtccgatttcgcctgcgccaacgccttcaacaacagcattatccccgaggacacattcttcccaagccccgagagcagctgcgacgtgaagctggtggaaaagagcttcgagacagacaccaacctgaacttccagaacctgagcgtgatcggcttcagaatcctgctgctgaaagtggccggctttaacctgctgatgaccctgcggctgtggtccagctaa

SEQ ID NO: 34626 - DNA, 2322 bp, synthetic construct
  source 1..2322: mol_type = other DNA
atggccttaccagtgaccgccttgctcctgccgctggccttgctgctccacgccgccaggccggaactgcaaagcgtgctgacacagcctcctagcgcctctggaacacctggacagagagtgacaatcagctgctccggcagctccagcaacatcggcagcaactacgtgaactggtatcagcagctgcctggcacagcccctaaactgctgatctacggcgactaccagaggccaagcggcgtgccagatagattcagcggcagcaagtctggcacaagcgccagcctggctatctctggactgagaagcgaggacgaggccgactactactgtgccaccagagatgatagcctgagcggcagcgtggtgtttggcacaggcacaaagctgacagtgctgggcctcgaggacctgaagaacgtgttcccacctgaggtggccgtgttcgagcctagcgaggccgagatcagccacacccagaaagccaccctcgtgtgcctggctaccggcttctaccccgaccatgtggaactgtcttggtgggtcaacggcaaagaggtgcacagcggcgtgtgtaccgacccccagccactgaaagaacagcccgccctgaacgacagccggtactgcctgagcagcagactgagagtgtccgccaccttctggcagaacccccggaaccacttcagatgccaggtgcagttctacggcctgagcgagaacgacgagtggacccaggacagagccaagcccgtgacccagatcgtgtctgccgaagcctggggcagagccgattgcggctttaccagcgagagctaccagcagggcgtgctgagcgccaccatcctgtacgagatcctgctgggcaaggccaccctgtacgccgtgctggtgtctgccctggtgctgatggctatggtcaagcggaaggacagccggggaagggccaagcgatctggatctggagcaacaaacttctcactactcaaacaagcaggtgacgtggaggagaatcccgggcctactagtaccatggactggatttggcgcatccttttccttgtcggcgctgctaccggcgcccattccgggccccaggtgcagctggttgaatctggcggaggactggttcagcctggcggatctctgagactgtcttgtgccgccagcggcaacatcaacagcagaaactgcatgggctggttcagacaggcccctggcaagggaagagaaggcgtggcagctatcggccaagtgaccggcagaacctactacgtggacagcgtgaagggcagattcaccatcagcctggacaacagcaagaacaccctgtacctccagatgaacagcctgagagccgaggacaccgccgtgtactattgtgctgctgcccctggctgtctgctgtctgcacttagaagcgccgactacagaaactggggccagggcacactggtcaccgtttcttctggatccggcggcggaggatctggcggaggcggatctgggggcggaggctctttcgaagaagttcagctggttcagagcggagccgaagtgaagaagcctggcgagagcctgaagattagctgcaaaggcagcggctacggcttcaccagctattggatcggctgggtccgacagatgcctggcaaaggactggaatggatgggcatcattcaccccgacgacagcgacaccaagtacagccctagcttccagggccaagtgaccatcagcgccgacaagagcatcagcacagcctacctccagtggtcctctctgaaggccagcgataccgccatgtactactgcgccagcagctacctgagaggactgtggggcggctacttcgatttttggggccagggcacactggtcaccgttagttctacgcgtatccagaaccctgatcctgccgtgtaccagctgcgggatagcaagagcagcgacaagagcgtgtgtctgttcaccgacttcgacagccagaccaacgtgtcccagagcaaggactccgacgtgtacatcaccgataagtgcgtgctggacatgcggagcatggacttcaagagcaactccgccgtggcctggtccaacaagtccgatttcgcctgcgccaacgccttcaacaacagcattatccccgaggacacattcttcccaagccccgagagcagctgcgacgtgaagctggtggaaaagagcttcgagacagacaccaacctgaacttccagaacctgagcgtgatcggcttcagaatcctgctgctgaaagtggccggctttaacctgctgatgaccctgcggctgtggtccagc

SEQ ID NO: 34627 - DNA, 2325 bp, synthetic construct
  source 1..2325: mol_type = other DNA
atggccttaccagtgaccgccttgctcctgccgctggccttgctgctccacgccgccaggccggaactgcaaagcgtgctgacacagcctcctagcgcctctggaacacctggacagagagtgacaatcagctgctccggcagctccagcaacatcggcagcaactacgtgaactggtatcagcagctgcctggcacagcccctaaactgctgatctacggcgactaccagaggccaagcggcgtgccagatagattcagcggcagcaagtctggcacaagcgccagcctggctatctctggactgagaagcgaggacgaggccgactactactgtgccaccagagatgatagcctgagcggcagcgtggtgtttggcacaggcacaaagctgacagtgctgggcctcgaggacctgaagaacgtgttcccacctgaggtggccgtgttcgagcctagcgaggccgagatcagccacacccagaaagccaccctcgtgtgcctggctaccggcttctaccccgaccatgtggaactgtcttggtgggtcaacggcaaagaggtgcacagcggcgtgtgtaccgacccccagccactgaaagaacagcccgccctgaacgacagccggtactgcctgagcagcagactgagagtgtccgccaccttctggcagaacccccggaaccacttcagatgccaggtgcagttctacggcctgagcgagaacgacgagtggacccaggacagagccaagcccgtgacccagatcgtgtctgccgaagcctggggcagagccgattgcggctttaccagcgagagctaccagcagggcgtgctgagcgccaccatcctgtacgagatcctgctgggcaaggccaccctgtacgccgtgctggtgtctgccctggtgctgatggctatggtcaagcggaaggacagccggggaagggccaagcgatctggatctggagcaacaaacttctcactactcaaacaagcaggtgacgtggaggagaatcccgggcctactagtaccatggactggatttggcgcatccttttccttgtcggcgctgctaccggcgcccattccgggccccaggtgcagctggttgaatctggcggaggatctgttcaggctggcggctctctgagactgtcttgtggcgcttccggcaacatcagcagcagaaactgcatgggctggttcagacaggcccctggcaaagagagagaaggcgttgccgccatcggacaagtgaccggcagatcctactacgtggacagcgtgaagggcagattcaccatcagcctggacaacgccaagaacaccctgtacctccagatgaacacactgaagcccgaggacaccgccatgtactactgtgctgctgcccctggctgtctgctgtctgcacttagaagcgccgactacagaaactggggccagggaacccaagtgacagtgtctagtggatccggcggcggaggatctggcggaggcggatctgggggcggaggctctttcgaagaagttcagctggttcagagcggagccgaagtgaagaagcctggcgagagcctgaagattagctgcaaaggcagcggctacggcttcaccagctattggatcggctgggtccgacagatgcctggcaaaggactggaatggatgggcatcattcaccccgacgacagcgacaccaagtacagccctagcttccagggccaagtgaccatcagcgccgacaagagcatcagcacagcctacctccagtggtcctctctgaaggccagcgataccgccatgtactactgcgccagcagctacctgagaggactgtggggcggctacttcgatttttggggccagggcacactggtcaccgttagttctacgcgtatccagaaccctgatcctgccgtgtaccagctgcgggatagcaagagcagcgacaagagcgtgtgtctgttcaccgacttcgacagccagaccaacgtgtcccagagcaaggactccgacgtgtacatcaccgataagtgcgtgctggacatgcggagcatggacttcaagagcaactccgccgtggcctggtccaacaagtccgatttcgcctgcgccaacgccttcaacaacagcattatccccgaggacacattcttcccaagccccgagagcagctgcgacgtgaagctggtggaaaagagcttcgagacagacaccaacctgaacttccagaacctgagcgtgatcggcttcagaatcctgctgctgaaagtggccggctttaacctgctgatgaccctgcggctgtggtccagctaa

SEQ ID NO: 34628 - DNA, 2748 bp, synthetic construct
  source 1..2748: mol_type = other DNA
atggccttaccagtgaccgccttgctcctgccgctggccttgctgctccacgccgccaggccggaagtgcagctggttgaatctggcggaggactggttcaggctggcggatctctgagactgtcttgtgccgccagcggcagaacctttagcatgggctggtttagacaggcccctggcaaagagagagagttcgtcgccgccatcacatactctggcggcagcccttactacgccgactctgtgaagggcagattcaccatcagccgggacaacgccaagaacaccgtgtacctccagatgaacagcctgaagcctgaggacaccgccgtgtactactgcgccgccaatccaacatacggcagcgactggaacgccgagaattggggccagggaacccaagtgacagtgtctagcggtaccggcggaggcggatctggcggcggaggtagcggtggcggaggatctgaattcgaactgcaaagcgtgctgacacagcctcctagcgcctctggaacacctggacagagagtgacaatcagctgctccggcagctccagcaacatcggcagcaactacgtgaactggtatcagcagctgcctggcacagcccctaaactgctgatctacggcgactaccagaggccaagcggcgtgccagatagattcagcggcagcaagtctggcacaagcgccagcctggctatctctggactgagaagcgaggacgaggccgactactactgtgccaccagagatgatagcctgagcggcagcgtggtgtttggcacaggcacaaagctgacagtgctgggcctcgagatccagaaccctgatcctgccgtgtaccagctgcgggatagcaagagcagcgacaagagcgtgtgtctgttcaccgacttcgacagccagaccaacgtgtcccagagcaaggactccgacgtgtacatcaccgataagtgcgtgctggacatgcggagcatggacttcaagagcaactccgccgtggcctggtccaacaagtccgatttcgcctgcgccaacgccttcaacaacagcattatccccgaggacacattcttcccaagcagcgacgtgccctgcgacgtgaagctggtggaaaagagcttcgagacagacaccaacctgaacttccagaacctgagcgtgatcggcttcagaatcctgctgctgaaagtggccggctttaacctgctgatgaccctgcggctgtggtccagccgcgccaagagaagcggatctggcgtgaagcagaccctgaatttcgacctgctgaagctggctggcgacgtggaatccaacccaggccctactagtaccatggactggatttggcgcatccttttccttgtcggcgctgctaccggcgcccattccgggccccaggtgcagctggttgaatctggcggaggatctgttcaggctggcggctctctgagactgtcttgtggcgcttccggcaacatcagcagcagaaactgcatgggctggttcagacaggcccctggcaaagagagagaaggcgttgccgccatcggacaagtgaccggcagatcctactacgtggacagcgtgaagggcagattcaccatcagcctggacaacgccaagaacaccctgtacctccagatgaacacactgaagcccgaggacaccgccatgtactactgtgctgctgcccctggctgtctgctgtctgcacttagaagcgccgactacagaaactggggccagggaacccaagtgacagtgtctagtggatccggcggcggaggatctggcggaggcggatctgggggcggaggctctttcgaagaagttcagctggttcagagcggagccgaagtgaagaagcctggcgagagcctgaagattagctgcaaaggcagcggctacggcttcaccagctattggatcggctgggtccgacagatgcctggcaaaggactggaatggatgggcatcattcaccccgacgacagcgacaccaagtacagccctagcttccagggccaagtgaccatcagcgccgacaagagcatcagcacagcctacctccagtggtcctctctgaaggccagcgataccgccatgtactactgcgccagcagctacctgagaggactgtggggcggctacttcgatttttggggccagggcacactggtcaccgttagttctacgcgtgaggacctgaagaacgtgttcccacctgaggtggccgtgttcgagcctagcaaggccgagatcgcccacacccagaaagccaccctcgtgtgcctggctaccggcttctaccccgaccatgtggaactgtcttggtgggtcaacggcaaagaggtgcacagcggcgtgtgtaccgacccccagccactgaaagaacagcccgccctgaacgacagccggtactgcctgagcagcagactgagagtgtccgccaccttctggcagaacccccggaaccacttcagatgccaggtgcagttctacggcctgagcgagaacgacgagtggacccaggacagagccaagcccgtgacccagatcgtgtctgccgaagcctggggcagagccgattgcggcatcaccagcgccagctaccaccagggcgtgctgagcgccaccatcctgtacgagatcctgctgggcaaggccaccctgtacgccgtgctggtgtctgccctggtgctgatggctatggtcaagcggaaggacagccggggataa

SEQ ID NO: 34629 - DNA, 2739 bp, synthetic construct
  source 1..2739: mol_type = other DNA
atggccttaccagtgaccgccttgctcctgccgctggccttgctgctccacgccgccaggccgcaggtgcagctggttgaatctggcggaggatctgttcaggctggcggctctctgagactgtcttgtggcgcttccggcaacatcagcagcagaaactgcatgggctggttcagacaggcccctggcaaagagagagaaggcgttgccgccatcggacaagtgaccggcagatcctactacgtggacagcgtgaagggcagattcaccatcagcctggacaacgccaagaacaccctgtacctccagatgaacacactgaagcccgaggacaccgccatgtactactgtgctgctgcccctggctgtctgctgtctgcacttagaagcgccgactacagaaactggggccagggaacccaagtgacagtgtctagtggtaccggcggaggcggatctggcggcggaggtagcggtggcggaggatctgaattcgaactgcaaagcgtgctgacacagcctcctagcgcctctggaacacctggacagagagtgacaatcagctgctccggcagctccagcaacatcggcagcaactacgtgaactggtatcagcagctgcctggcacagcccctaaactgctgatctacggcgactaccagaggccaagcggcgtgccagatagattcagcggcagcaagtctggcacaagcgccagcctggctatctctggactgagaagcgaggacgaggccgactactactgtgccaccagagatgatagcctgagcggcagcgtggtgtttggcacaggcacaaagctgacagtgctgggcctcgaggacctgaagaacgtgttcccacctgaggtggccgtgttcgagcctagcgaggccgagatcagccacacccagaaagccaccctcgtgtgcctggctaccggcttctaccccgaccatgtggaactgtcttggtgggtcaacggcaaagaggtgcacagcggcgtgtgtaccgacccccagccactgaaagaacagcccgccctgaacgacagccggtactgcctgagcagcagactgagagtgtccgccaccttctggcagaacccccggaaccacttcagatgccaggtgcagttctacggcctgagcgagaacgacgagtggacccaggacagagccaagcccgtgacccagatcgtgtctgccgaagcctggggcagagccgattgcggctttaccagcgagagctaccagcagggcgtgctgagcgccaccatcctgtacgagatcctgctgggcaaggccaccctgtacgccgtgctggtgtctgccctggtgctgatggctatggtcaagcggaaggacagccggggaagggccaagcgatctggatctggagcaacaaacttctcactactcaaacaagcaggtgacgtggaggagaatcccgggcctactagtgccaccatggactggatttggcgcatccttttccttgtcggcgctgctaccggcgcccattccgggcccgaagtgcaactggttgaatccggtggcggcctggtgcaagcaggcggatctctcagacttagctgtgccgcctccggcagaaccttcacaatgggatggtttaggcaggctccagggaaagagagagagttcgtcgccgccatctctctgtctcccacactggcctactacgccgactctgtgaaaggccggttcaccatctccagagataatgccaagaacaccgtggtgctgcaaatgaactctctgaaacccgaggatacagccctgtactattgtgccgctgaccggaagtccgtgatgagcatcagacccgattactggggacagggcacacaagtcacagtgtcctctggatccggcggcggaggatctggcggaggcggatctgggggcggaggctctttcgaagaagttcagctggttcagagcggagccgaagtgaagaagcctggcgagagcctgaagattagctgcaaaggcagcggctacggcttcaccagctattggatcggctgggtccgacagatgcctggcaaaggactggaatggatgggcatcattcaccccgacgacagcgacaccaagtacagccctagcttccagggccaagtgaccatcagcgccgacaagagcatcagcacagcctacctccagtggtcctctctgaaggccagcgataccgccatgtactactgcgccagcagctacctgagaggactgtggggcggctacttcgatttttggggccagggcacactggtcaccgttagttctacgcgtatccagaaccctgatcctgccgtgtaccagctgcgggatagcaagagcagcgacaagagcgtgtgtctgttcaccgacttcgacagccagaccaacgtgtcccagagcaaggactccgacgtgtacatcaccgataagtgcgtgctggacatgcggagcatggacttcaagagcaactccgccgtggcctggtccaacaagtccgatttcgcctgcgccaacgccttcaacaacagcattatccccgaggacacattcttcccaagccccgagagcagctgcgacgtgaagctggtggaaaagagcttcgagacagacaccaacctgaacttccagaacctgagcgtgatcggcttcagaatcctgctgctgaaagtggccggctttaacctgctgatgaccctgcggctgtggtccagctaa

SEQ ID NO: 34630 - DNA, 2328 bp, synthetic construct
  source 1..2328: mol_type = other DNA
atggccttaccagtgaccgccttgctcctgccgctggccttgctgctccacgccgccaggccgcaggtgcagctggttgaatctggcggaggatctgttcaggctggcggctctctgagactgtcttgtggcgcttccggcaacatcagcagcagaaactgcatgggctggttcagacaggcccctggcaaagagagagaaggcgttgccgccatcggacaagtgaccggcagatcctactacgtggacagcgtgaagggcagattcaccatcagcctggacaacgccaagaacaccctgtacctccagatgaacacactgaagcccgaggacaccgccatgtactactgtgctgctgcccctggctgtctgctgtctgcacttagaagcgccgactacagaaactggggccagggaacccaagtgacagtgtctagtggtaccggcggaggcggatctggcggcggaggtagcggtggcggaggatctgaattcgaactgcaaagcgtgctgacacagcctcctagcgcctctggaacacctggacagagagtgacaatcagctgctccggcagctccagcaacatcggcagcaactacgtgaactggtatcagcagctgcctggcacagcccctaaactgctgatctacggcgactaccagaggccaagcggcgtgccagatagattcagcggcagcaagtctggcacaagcgccagcctggctatctctggactgagaagcgaggacgaggccgactactactgtgccaccagagatgatagcctgagcggcagcgtggtgtttggcacaggcacaaagctgacagtgctgggcctcgaggacctgaagaacgtgttcccacctgaggtggccgtgttcgagcctagcgaggccgagatcagccacacccagaaagccaccctcgtgtgcctggctaccggcttctaccccgaccatgtggaactgtcttggtgggtcaacggcaaagaggtgcacagcggcgtgtgtaccgacccccagccactgaaagaacagcccgccctgaacgacagccggtactgcctgagcagcagactgagagtgtccgccaccttctggcagaacccccggaaccacttcagatgccaggtgcagttctacggcctgagcgagaacgacgagtggacccaggacagagccaagcccgtgacccagatcgtgtctgccgaagcctggggcagagccgattgcggctttaccagcgagagctaccagcagggcgtgctgagcgccaccatcctgtacgagatcctgctgggcaaggccaccctgtacgccgtgctggtgtctgccctggtgctgatggctatggtcaagcggaaggacagccggggaagggccaagcgatctggatctggagcaacaaacttctcactactcaaacaagcaggtgacgtggaggagaatcccgggcctactagtgccaccatggactggatttggcgcatccttttccttgtcggcgctgctaccggcgcccattccttcgaagaagttcagctggttcagagcggagccgaagtgaagaagcctggcgagagcctgaagattagctgcaaaggcagcggctacggcttcaccagctattggatcggctgggtccgacagatgcctggcaaaggactggaatggatgggcatcattcaccccgacgacagcgacaccaagtacagccctagcttccagggccaagtgaccatcagcgccgacaagagcatcagcacagcctacctccagtggtcctctctgaaggccagcgataccgccatgtactactgcgccagcagctacctgagaggactgtggggcggctacttcgatttttggggccagggcacactggtcaccgttagttctacgcgtatccagaaccctgatcctgccgtgtaccagctgcgggatagcaagagcagcgacaagagcgtgtgtctgttcaccgacttcgacagccagaccaacgtgtcccagagcaaggactccgacgtgtacatcaccgataagtgcgtgctggacatgcggagcatggacttcaagagcaactccgccgtggcctggtccaacaagtccgatttcgcctgcgccaacgccttcaacaacagcattatccccgaggacacattcttcccaagccccgagagcagctgcgacgtgaagctggtggaaaagagcttcgagacagacaccaacctgaacttccagaacctgagcgtgatcggcttcagaatcctgctgctgaaagtggccggctttaacctgctgatgaccctgcggctgtggtccagctaa

SEQ ID NO: 34631 - DNA, 2328 bp, synthetic construct
  source 1..2328: mol_type = other DNA
atggccttaccagtgaccgccttgctcctgccgctggccttgctgctccacgccgccaggccgcaagttcagctggtggaaagcggtggtggcgttgtgcaacctggtggaagtctgaggctgagctgtgccgcttctggcctgagctttagcacctacactgtggcctggttcaggcaggctcccggaaagggtcttgaaggcgtggccgccattccttacaccagccagcacatggtgtacacagacagcgtcagaggccggttcaccatcagcagagacaactccaagaatacgctctatctccagatgaactctctgcgcgccgaagatacagccgtgtattactgcgccaccgacagacggcctggcacctctatgctggctatcaacggctacaacagatggggacagggaaccaccgtgaccgtgtcatctggtaccggcggaggcggatctggcggcggaggtagcggtggcggaggatctgaattcgaactgcaaagcgtgctgacacagcctcctagcgcctctggaacacctggacagagagtgacaatcagctgctccggcagctccagcaacatcggcagcaactacgtgaactggtatcagcagctgcctggcacagcccctaaactgctgatctacggcgactaccagaggccaagcggcgtgccagatagattcagcggcagcaagtctggcacaagcgccagcctggctatctctggactgagaagcgaggacgaggccgactactactgtgccaccagagatgatagcctgagcggcagcgtggtgtttggcacaggcacaaagctgacagtgctgggcctcgaggacctgaagaacgtgttcccacctgaggtggccgtgttcgagcctagcgaggccgagatcagccacacccagaaagccaccctcgtgtgcctggctaccggcttctaccccgaccatgtggaactgtcttggtgggtcaacggcaaagaggtgcacagcggcgtgtgtaccgacccccagccactgaaagaacagcccgccctgaacgacagccggtactgcctgagcagcagactgagagtgtccgccaccttctggcagaacccccggaaccacttcagatgccaggtgcagttctacggcctgagcgagaacgacgagtggacccaggacagagccaagcccgtgacccagatcgtgtctgccgaagcctggggcagagccgattgcggctttaccagcgagagctaccagcagggcgtgctgagcgccaccatcctgtacgagatcctgctgggcaaggccaccctgtacgccgtgctggtgtctgccctggtgctgatggctatggtcaagcggaaggacagccggggaagggccaagcgatctggatctggagcaacaaacttctcactactcaaacaagcaggtgacgtggaggagaatcccgggcctactagtgccaccatggactggatttggcgcatccttttccttgtcggcgctgctaccggcgcccattccttcgaagaagttcagctggttcagagcggagccgaagtgaagaagcctggcgagagcctgaagattagctgcaaaggcagcggctacggcttcaccagctattggatcggctgggtccgacagatgcctggcaaaggactggaatggatgggcatcattcaccccgacgacagcgacaccaagtacagccctagcttccagggccaagtgaccatcagcgccgacaagagcatcagcacagcctacctccagtggtcctctctgaaggccagcgataccgccatgtactactgcgccagcagctacctgagaggactgtggggcggctacttcgatttttggggccagggcacactggtcaccgttagttctacgcgtatccagaaccctgatcctgccgtgtaccagctgcgggatagcaagagcagcgacaagagcgtgtgtctgttcaccgacttcgacagccagaccaacgtgtcccagagcaaggactccgacgtgtacatcaccgataagtgcgtgctggacatgcggagcatggacttcaagagcaactccgccgtggcctggtccaacaagtccgatttcgcctgcgccaacgccttcaacaacagcattatccccgaggacacattcttcccaagccccgagagcagctgcgacgtgaagctggtggaaaagagcttcgagacagacaccaacctgaacttccagaacctgagcgtgatcggcttcagaatcctgctgctgaaagtggccggctttaacctgctgatgaccctgcggctgtggtccagctaa

SEQ ID NO: 34632 - DNA, 2325 bp, synthetic construct
  source 1..2325: mol_type = other DNA
atggccttaccagtgaccgccttgctcctgccgctggccttgctgctccacgccgccaggccggaactgcaaagcgtgctgacacagcctcctagcgcctctggaacacctggacagagagtgacaatcagctgctccggcagctccagcaacatcggcagcaactacgtgaactggtatcagcagctgcctggcacagcccctaaactgctgatctacggcgactaccagaggccaagcggcgtgccagatagattcagcggcagcaagtctggcacaagcgccagcctggctatctctggactgagaagcgaggacgaggccgactactactgtgccaccagagatgatagcctgagcggcagcgtggtgtttggcacaggcacaaagctgacagtgctgggcctcgaggacctgaagaacgtgttcccacctgaggtggccgtgttcgagcctagcgaggccgagatcagccacacccagaaagccaccctcgtgtgcctggctaccggcttctaccccgaccatgtggaactgtcttggtgggtcaacggcaaagaggtgcacagcggcgtgtgtaccgacccccagccactgaaagaacagcccgccctgaacgacagccggtactgcctgagcagcagactgagagtgtccgccaccttctggcagaacccccggaaccacttcagatgccaggtgcagttctacggcctgagcgagaacgacgagtggacccaggacagagccaagcccgtgacccagatcgtgtctgccgaagcctggggcagagccgattgcggctttaccagcgagagctaccagcagggcgtgctgagcgccaccatcctgtacgagatcctgctgggcaaggccaccctgtacgccgtgctggtgtctgccctggtgctgatggctatggtcaagcggaaggacagccggggaagggccaagcgatctggatctggagcaacaaacttctcactactcaaacaagcaggtgacgtggaggagaatcccgggcctactagtaccatggactggatttggcgcatccttttccttgtcggcgctgctaccggcgcccattccgggccccaagttcagctggtggaaagcggtggtggcgttgtgcaacctggtggaagtctgaggctgagctgtgccgcttctggcctgagctttagcacctacactgtggcctggttcaggcaggctcccggaaagggtcttgaaggcgtggccgccattccttacaccagccagcacatggtgtacacagacagcgtcagaggccggttcaccatcagcagagacaactccaagaatacgctctatctccagatgaactctctgcgcgccgaagatacagccgtgtattactgcgccaccgacagacggcctggcacctctatgctggctatcaacggctacaacagatggggacagggaaccaccgtgaccgtgtcatctggatccggcggcggaggatctggcggaggcggatctgggggcggaggctctttcgaagaagttcagctggttcagagcggagccgaagtgaagaagcctggcgagagcctgaagattagctgcaaaggcagcggctacggcttcaccagctattggatcggctgggtccgacagatgcctggcaaaggactggaatggatgggcatcattcaccccgacgacagcgacaccaagtacagccctagcttccagggccaagtgaccatcagcgccgacaagagcatcagcacagcctacctccagtggtcctctctgaaggccagcgataccgccatgtactactgcgccagcagctacctgagaggactgtggggcggctacttcgatttttggggccagggcacactggtcaccgttagttctacgcgtatccagaaccctgatcctgccgtgtaccagctgcgggatagcaagagcagcgacaagagcgtgtgtctgttcaccgacttcgacagccagaccaacgtgtcccagagcaaggactccgacgtgtacatcaccgataagtgcgtgctggacatgcggagcatggacttcaagagcaactccgccgtggcctggtccaacaagtccgatttcgcctgcgccaacgccttcaacaacagcattatccccgaggacacattcttcccaagccccgagagcagctgcgacgtgaagctggtggaaaagagcttcgagacagacaccaacctgaacttccagaacctgagcgtgatcggcttcagaatcctgctgctgaaagtggccggctttaacctgctgatgaccctgcggctgtggtccagctaa

SEQ ID NO: 34633 - DNA, 2331 bp, synthetic construct
  source 1..2331: mol_type = other DNA
atggccttaccagtgaccgccttgctcctgccgctggccttgctgctccacgccgccaggccggaactgcaaagcgtgctgacacagcctcctagcgcctctggaacacctggacagagagtgacaatcagctgctccggcagctccagcaacatcggcagcaactacgtgaactggtatcagcagctgcctggcacagcccctaaactgctgatctacggcgactaccagaggccaagcggcgtgccagatagattcagcggcagcaagtctggcacaagcgccagcctggctatctctggactgagaagcgaggacgaggccgactactactgtgccaccagagatgatagcctgagcggcagcgtggtgtttggcacaggcacaaagctgacagtgctgggcctcgaggacctgaagaacgtgttcccacctgaggtggccgtgttcgagcctagcgaggccgagatcagccacacccagaaagccaccctcgtgtgcctggctaccggcttctaccccgaccatgtggaactgtcttggtgggtcaacggcaaagaggtgcacagcggcgtgtgtaccgacccccagccactgaaagaacagcccgccctgaacgacagccggtactgcctgagcagcagactgagagtgtccgccaccttctggcagaacccccggaaccacttcagatgccaggtgcagttctacggcctgagcgagaacgacgagtggacccaggacagagccaagcccgtgacccagatcgtgtctgccgaagcctggggcagagccgattgcggctttaccagcgagagctaccagcagggcgtgctgagcgccaccatcctgtacgagatcctgctgggcaaggccaccctgtacgccgtgctggtgtctgccctggtgctgatggctatggtcaagcggaaggacagccggggaagggccaagcgatctggatctggagcaacaaacttctcactactcaaacaagcaggtgacgtggaggagaatcccgggcctactagtaccatggactggatttggcgcatccttttccttgtcggcgctgctaccggcgcccattccgggcccgaggtgcagctggttgaatctggcggaggatctgttcaggctggcggctctctgagactgtcttgtgccgccagcggctacacctacagcatcaactgcatgggctggttcagacaggcccctggcaaagagagagaaggcgttgccgccatctctaccggcggaggcagaaccgattaccgggattctgtgaagggcagattcaccatcagccaggacaacgccaagaacaccgtgtacctccagatgaacagcctgaagcctgaggacaccgccatgtactactgtgccggcaagaccacctatcctggctacggatgtggcctgggcagaagcgcctacaattattggggccagggcacccaagtgaccgtgtcatctggatccggcggcggaggatctggcggaggcggatctgggggcggaggctctttcgaagaagttcagctggttcagagcggagccgaagtgaagaagcctggcgagagcctgaagattagctgcaaaggcagcggctacggcttcaccagctattggatcggctgggtccgacagatgcctggcaaaggactggaatggatgggcatcattcaccccgacgacagcgacaccaagtacagccctagcttccagggccaagtgaccatcagcgccgacaagagcatcagcacagcctacctccagtggtcctctctgaaggccagcgataccgccatgtactactgcgccagcagctacctgagaggactgtggggcggctacttcgatttttggggccagggcacactggtcaccgttagttctacgcgtatccagaaccctgatcctgccgtgtaccagctgcgggatagcaagagcagcgacaagagcgtgtgtctgttcaccgacttcgacagccagaccaacgtgtcccagagcaaggactccgacgtgtacatcaccgataagtgcgtgctggacatgcggagcatggacttcaagagcaactccgccgtggcctggtccaacaagtccgatttcgcctgcgccaacgccttcaacaacagcattatccccgaggacacattcttcccaagccccgagagcagctgcgacgtgaagctggtggaaaagagcttcgagacagacaccaacctgaacttccagaacctgagcgtgatcggcttcagaatcctgctgctgaaagtggccggctttaacctgctgatgaccctgcggctgtggtccagctaa

SEQ ID NO: 34634 - DNA, 1887 bp, synthetic construct
  source 1..1887: mol_type = other DNA
atggccttaccagtgaccgccttgctcctgccgctggccttgctgctccacgccgccaggccggaactgcaaagcgtgctgacacagcctcctagcgcctctggaacacctggacagagagtgacaatcagctgctccggcagctccagcaacatcggcagcaactacgtgaactggtatcagcagctgcctggcacagcccctaaactgctgatctacggcgactaccagaggccaagcggcgtgccagatagattcagcggcagcaagtctggcacaagcgccagcctggctatctctggactgagaagcgaggacgaggccgactactactgtgccaccagagatgatagcctgagcggcagcgtggtgtttggcacaggcacaaagctgacagtgctgggcctcgaggacctgaagcacgtgttcccacctgaggtggccgtgttcgagcctagcgacgccgagatctggcacacccagaaagccaccctcgtgtgcctggctaccggcttctaccccgaccatgtggaactgtcttggtgggtcaacggcaaagaggtgcacagcggcgtgtctaccgacccccagccactgaaagaacagcccgccctgaacgacagccggtactgcctgagcagcagactgagagtgtccgccaccttctggcagaacccccggaaccacttcagatgccaggtgcagttctacggcctgagcgagaacgacgagtggacccaggacagagccaagcccgtgacccagatcgtgtctgccgaagcctggggcagagccgattgcggctttaccagcgagagctaccagcagggcgtgctgagcgccaccatcctgtacgagatcctgctgggcaaggccaccctgtacgccgtgctggtgtctgccctggtgctgatggctatggtcaagcggaaggacagccggggaagggccaagcgatctggatctggagcaacaaacttctcactactcaaacaagcaggtgacgtggaggagaatcccgggcctactagtatggactggatttggcgcatccttttccttgtcggcgctgctaccggcgcgcattccttcgaagaagttcagctggttcagagcggagccgaagtgaagaagcctggcgagagcctgaagattagctgcaaaggcagcggctacggcttcaccagctattggatcggctgggtccgacagatgcctggcaaaggactggaatggatgggcatcattcaccccgacgacagcgacaccaagtacagccctagcttccagggccaagtgaccatcagcgccgacaagagcatcagcacagcctacctccagtggtcctctctgaaggccagcgataccgccatgtactactgcgccagcagctacctgagaggactgtggggcggctacttcgatttttggggccagggcacactggtcaccgttagttctacgcgtatccagaaccctgatcctgccgtgtaccagctgcgggatagcaagagcagcgacaagagcgtgtgtctgttcaccgacttcgacagccagaccaacgtgtcccagagcaaggactccgacgtgtacatcaccgataagaccgtgctggacatgcggagcatggacttcaagagcaactccgccgtggcctggtccagcaagtccgatttcgcctgcgccaacgccttcaacaacagcattatccccgaggacacattcttcccaagccccgagatggcctgcgacgtgaagctggtggaaaagagcttcgagacagacaccaacctgaacttccagaacctgctcgtgatctggctgagaatcctgctgctgaaagtggccggctttaacctgctgatgaccctgcggctgtggtccagc

SEQ ID NO: 34635 - DNA, 1887 bp, synthetic construct
  source 1..1887: mol_type = other DNA
atggccttaccagtgaccgccttgctcctgccgctggccttgctgctccacgccgccaggccggaactgcaaagcgtgctgacacagcctcctagcgcctctggaacacctggacagagagtgacaatcagctgctccggcagctccagcaacatcggcagcaactacgtgaactggtatcagcagctgcctggcacagcccctaaactgctgatctacggcgactaccagaggccaagcggcgtgccagatagattcagcggcagcaagtctggcacaagcgccagcctggctatctctggactgagaagcgaggacgaggccgactactactgtgccaccagagatgatagcctgagcggcagcgtggtgtttggcacaggcacaaagctgacagtgctgggcctcgaggacctgaagcacgtgttcccacctgaggtggccgtgttcgagcctagcgacgccgagatctggcacacccagaaagccaccctcgtgtgcctggctaccggcttctaccccgaccatgtggaactgtcttggtgggtcaacggcaaagaggtgcacagcggcgtgtctaccgacccccagccactgaaagaacagcccgccctgaacgacagccggtactgcctgagcagcagactgagagtgtccgccaccttctggcagaacccccggaaccacttcagatgccaggtgcagttctacggcctgagcgagaacgacgagtggacccaggacagagccaagcccgtgacccagatcgtgtctgccgaagcctggggcagagccgattgcggctttaccagcgagagctaccagcagggcgtgctgagcgccaccatcctgtacgagatcctgctgggcaaggccaccctgtacgccgtgctggtgtctgccctggtgctgatggctatggtcaagcggaaggacagccggggaagggccaagcgatctggatctggagcaacaaacttctcactactcaaacaagcaggtgacgtggaggagaatcccgggcctactagtatggactggatttggcgcatccttttccttgtcggcgctgctaccggcgcgcattccttcgaagaagttcagctggttcagagcggagccgaagtgaagaagcctggcgagagcctgaagattagctgcaaaggcagcggctacggcttcaccagctattggatcggctgggtccgacagatgcctggcaaaggactggaatggatgggcatcattcaccccgacgacagcgacaccaagtacagccctagcttccagggccaagtgaccatcagcgccgacaagagcatcagcacagcctacctccagtggtcctctctgaaggccagcgataccgccatgtactactgcgccagcagctacctgagaggactgtggggcggctacttcgatttttggggccagggcacactggtcaccgttagttctacgcgtatccagaaccctgatcctgccgtgtaccagctgcgggatagcaagagcagcgacaagagcgtgtgtctgttcaccgacttcgacagccagaccaacgtgtcccagagcaaggactccgacgtgtacatcaccgataagaccgtgctggacatgcggagcatggacttcaagagcaactccgccgtggcctggtccaccaagtccgatttcgcctgcgccaacgccttcaacaacagcattatccccgaggacacattcttcccaagccccgaggtggtgtgcgacgtgaagctggtggaaaagagcttcgagacagacaccaacctgaacttccagaacctggtggtgatcggcgccagaatcctgctgctgaaagtggccggctttaacctgctgatgaccctgcggctgtggtccagc

SEQ ID NO: 34636 - DNA, 1887 bp, synthetic construct
  source 1..1887: mol_type = other DNA
atggccttaccagtgaccgccttgctcctgccgctggccttgctgctccacgccgccaggccggaactgcaaagcgtgctgacacagcctcctagcgcctctggaacacctggacagagagtgacaatcagctgctccggcagctccagcaacatcggcagcaactacgtgaactggtatcagcagctgcctggcacagcccctaaactgctgatctacggcgactaccagaggccaagcggcgtgccagatagattcagcggcagcaagtctggcacaagcgccagcctggctatctctggactgagaagcgaggacgaggccgactactactgtgccaccagagatgatagcctgagcggcagcgtggtgtttggcacaggcacaaagctgacagtgctgggcctcgaggacctgaagaacgtgttcccacctgaggtggccgtgttcgagcctagcaaggccgagatcagcagaacccagaaagccaccctcgtgtgcctggctaccggcttctaccctcctcatgtggaactgtcttggtgggtcaacggcaaagaggtgcacgacggcgtgtgtaccgacccccagccactgaaagaacagcccgccctgaacgacagccggtactgcctgagcagcagactgagagtgtccgccaccttctggcagaacccccggaaccacttcagatgccaggtgcagttctacggcctgagcgagaacgacgagtggacccaggacagagccaagcccgtgacccagatcgtgtctgccgaagcctggggcagagccgattgcggctttaccagcgagagctaccagcagggcgtgctgagcgccaccatcctgtacgagatcctgctgggcaaggccaccctgtacgccgtgctggtgtctgccctggtgctgatggctatggtcaagcggaaggacagccggggaagggccaagcgatctggatctggagcaacaaacttctcactactcaaacaagcaggtgacgtggaggagaatcccgggcctactagtatggactggatttggcgcatccttttccttgtcggcgctgctaccggcgcgcattccttcgaagaagttcagctggttcagagcggagccgaagtgaagaagcctggcgagagcctgaagattagctgcaaaggcagcggctacggcttcaccagctattggatcggctgggtccgacagatgcctggcaaaggactggaatggatgggcatcattcaccccgacgacagcgacaccaagtacagccctagcttccagggccaagtgaccatcagcgccgacaagagcatcagcacagcctacctccagtggtcctctctgaaggccagcgataccgccatgtactactgcgccagcagctacctgagaggactgtggggcggctacttcgatttttggggccagggcacactggtcaccgttagttctacgcgtatccagaaccctgatcctgccgtgtaccagctgcgggatagcaagagcagcgacaagttcgtgtgtctgttcaccgacttcgacagccagatcaacgtgtcccagagcaaggactccgacgtgtacatcaccgataagtgcgtgctggacatgcggagcatggacttcaagagcaactccgccgtggcctggtccaacaagtccgatttcacctgcgccaacgccttcaacaacagcattatccccgaggacacattcttcccaagccccgagagcagctgcgacgtgaagctggtggaaaagagcttcgagacagacaccaacctgaacttccagaacctgagcgtgatcggcttcagaatcctgctgctgaaagtggccggctttaacctgctgatgaccctgcggctgtggtccagc

SEQ ID NO: 34637 - DNA, 2313 bp, synthetic construct
  source 1..2313: mol_type = other DNA
atggccttaccagtgaccgccttgctcctgccgctggccttgctgctccacgccgccaggccggaactgcaaagcgtgctgacacagcctcctagcgcctctggaacacctggacagagagtgacaatcagctgctccggcagctccagcaacatcggcagcaactacgtgaactggtatcagcagctgcctggcacagcccctaaactgctgatctacggcgactaccagaggccaagcggcgtgccagatagattcagcggcagcaagtctggcacaagcgccagcctggctatctctggactgagaagcgaggacgaggccgactactactgtgccaccagagatgatagcctgagcggcagcgtggtgtttggcacaggcacaaagctgacagtgctgggcctcgaggacctgaagaacgtgttcccacctgaggtggccgtgttcgagcctagcgaggccgagatcagccacacccagaaagccaccctcgtgtgcctggctaccggcttctaccccgaccatgtggaactgtcttggtgggtcaacggcaaagaggtgcacagcggcgtgtgtaccgacccccagccactgaaagaacagcccgccctgaacgacagccggtactgcctgagcagcagactgagagtgtccgccaccttctggcagaacccccggaaccacttcagatgccaggtgcagttctacggcctgagcgagaacgacgagtggacccaggacagagccaagcccgtgacccagatcgtgtctgccgaagcctggggcagagccgattgcggctttaccagcgagagctaccagcagggcgtgctgagcgccaccatcctgtacgagatcctgctgggcaaggccaccctgtacgccgtgctggtgtctgccctggtgctgatggctatggtcaagcggaaggacagccggggaagggccaagcgatctggatctggagcaacaaacttctcactactcaaacaagcaggtgacgtggaggagaatcccgggcctactagtaccatggactggatttggcgcatccttttccttgtcggcgctgctaccggcgcccattccgggccccaggtgcagctccaagaaagcggacccggactggttaagccctctcagaccctgtctctgacctgcacagttagcggagccagcattaccacaggcgagtattattggaattggtttcggcagccaccaggcaaggggcttgagtggatgggtgctattgctgcctctggcagcaccacctactctcccagctttgagagcagaacctccatcagccgggacacctccaaaaaccagttctctctgaagctgtcctccgtgaccgctgctgacaccgccgtctattattgtggccggtctttcggcgtggcagctgtgaccacaggacagaacagaggccagggaacacttgtgaccgtgtcctctggatccggcggcggaggatctggcggaggcggatctgggggcggaggctctttcgaagaagttcagctggttcagagcggagccgaagtgaagaagcctggcgagagcctgaagattagctgcaaaggcagcggctacggcttcaccagctattggatcggctgggtccgacagatgcctggcaaaggactggaatggatgggcatcattcaccccgacgacagcgacaccaagtacagccctagcttccagggccaagtgaccatcagcgccgacaagagcatcagcacagcctacctccagtggtcctctctgaaggccagcgataccgccatgtactactgcgccagcagctacctgagaggactgtggggcggctacttcgatttttggggccagggcacactggtcaccgttagttctacgcgtatccagaaccctgatcctgccgtgtaccagctgcgggatagcaagagcagcgacaagagcgtgtgtctgttcaccgacttcgacagccagaccaacgtgtcccagagcaaggactccgacgtgtacatcaccgataagtgcgtgctggacatgcggagcatggacttcaagagcaactccgccgtggcctggtccaacaagtccgatttcgcctgcgccaacgccttcaacaacagcattatccccgaggacacattcttcccaagccccgagagcagctgcgacgtgaagctggtggaaaagagcttcgagacagacaccaacctgaacttccagaacctgagcgtgatcggcttcagaatcctgctgctgaaagtggccggctttaacctgctgatgaccctgcggctgtggtccagc

SEQ ID NO: 34638 - DNA, 2736 bp, synthetic construct
  source 1..2736: mol_type = other DNA
atggccttaccagtgaccgccttgctcctgccgctggccttgctgctccacgccgccaggccgcaggttcagctgcaagagtctggccctggcctggtcaagcctagccaaacactgagcctgacctgtaccgtgtctggcggctctatcaccaccggcgagttctactggaactggttcagacagcctcctggcaaaggactggaatggatgggagccattgccgccagcggcagcacaacatacagccctagcttcgagagccggaccagcatcagcagagacaccagcaagaatcagttcagcctgaagctgagcagcgtgacagccgccgatacagccgtgtattactgcggcagatcctttggagtggccgccgtgacaaccggccagaatagaggacagggcaccctggtcacagtgtctagcggtaccggcggaggcggatctggcggcggaggtagcggtggcggaggatctgaattcgaactgcaaagcgtgctgacacagcctcctagcgcctctggaacacctggacagagagtgacaatcagctgctccggcagctccagcaacatcggcagcaactacgtgaactggtatcagcagctgcctggcacagcccctaaactgctgatctacggcgactaccagaggccaagcggcgtgccagatagattcagcggcagcaagtctggcacaagcgccagcctggctatctctggactgagaagcgaggacgaggccgactactactgtgccaccagagatgatagcctgagcggcagcgtggtgtttggcacaggcacaaagctgacagtgctgggcctcgagatccagaaccctgatcctgccgtgtaccagctgcgggatagcaagagcagcgacaagagcgtgtgtctgttcaccgacttcgacagccagaccaacgtgtcccagagcaaggactccgacgtgtacatcaccgataagtgcgtgctggacatgcggagcatggacttcaagagcaactccgccgtggcctggtccaacaagtccgatttcgcctgcgccaacgccttcaacaacagcattatccccgaggacacattcttcccaagcagcgacgtgccctgcgacgtgaagctggtggaaaagagcttcgagacagacaccaacctgaacttccagaacctgagcgtgatcggcttcagaatcctgctgctgaaagtggccggctttaacctgctgatgaccctgcggctgtggtccagccgcgccaagagaagcggatctggcgtgaagcagaccctgaatttcgacctgctgaagctggctggcgacgtggaatccaacccaggccctactagtaccatggactggatttggcgcatccttttccttgtcggcgctgctaccggcgcccattccgggcccgaagtgcaactggttgaatccggtggcggcctggtgcaacccggcggatctctcagacttagctgtgccgcctccggcagaaccttcacaatgggatggtacaggcaggctccagggaaagagagagagttcgtcgccgccatctctctgtctcccacactggcctactacgccgactctgtgaaaggccggttcaccatctccagagataatagcaagaacaccgtggtgctgcaaatgaactctctgagagccgaggatacagccctgtactattgtgccgctgaccggaagtccgtgatgagcatcagacccgattactggggacagggcacactggtcacagtgtctagtggatccggcggcggaggatctggcggaggcggatctgggggcggaggctctttcgaagaagttcagctggttcagagcggagccgaagtgaagaagcctggcgagagcctgaagattagctgcaaaggcagcggctacggcttcaccagctattggatcggctgggtccgacagatgcctggcaaaggactggaatggatgggcatcattcaccccgacgacagcgacaccaagtacagccctagcttccagggccaagtgaccatcagcgccgacaagagcatcagcacagcctacctccagtggtcctctctgaaggccagcgataccgccatgtactactgcgccagcagctacctgagaggactgtggggcggctacttcgatttttggggccagggcacactggtcaccgttagttctacgcgtgaggacctgaagaacgtgttcccacctgaggtggccgtgttcgagcctagcaaggccgagatcgcccacacccagaaagccaccctcgtgtgcctggctaccggcttctaccccgaccatgtggaactgtcttggtgggtcaacggcaaagaggtgcacagcggcgtgtgtaccgacccccagccactgaaagaacagcccgccctgaacgacagccggtactgcctgagcagcagactgagagtgtccgccaccttctggcagaacccccggaaccacttcagatgccaggtgcagttctacggcctgagcgagaacgacgagtggacccaggacagagccaagcccgtgacccagatcgtgtctgccgaagcctggggcagagccgattgcggcatcaccagcgccagctaccaccagggcgtgctgagcgccaccatcctgtacgagatcctgctgggcaaggccaccctgtacgccgtgctggtgtctgccctggtgctgatggctatggtcaagcggaaggacagccgggga

SEQ ID NO: 34639 - DNA, 2325 bp, synthetic construct
  source 1..2325: mol_type = other DNA
atggccttaccagtgaccgccttgctcctgccgctggccttgctgctccacgccgccaggccgcaggttcagctgcaagagtctggccctggcctggtcaagcctagccaaacactgagcctgacctgtaccgtgtctggcggctctatcaccaccggcgagttctactggaactggttcagacagcctcctggcaaaggactggaatggatgggagccattgccgccagcggcagcacaacatacagccctagcttcgagagccggaccagcatcagcagagacaccagcaagaatcagttcagcctgaagctgagcagcgtgacagccgccgatacagccgtgtattactgcggcagatcctttggagtggccgccgtgacaaccggccagaatagaggacagggcaccctggtcacagtgtctagcggtaccggcggaggcggatctggcggcggaggtagcggtggcggaggatctgaattcgaactgcaaagcgtgctgacacagcctcctagcgcctctggaacacctggacagagagtgacaatcagctgctccggcagctccagcaacatcggcagcaactacgtgaactggtatcagcagctgcctggcacagcccctaaactgctgatctacggcgactaccagaggccaagcggcgtgccagatagattcagcggcagcaagtctggcacaagcgccagcctggctatctctggactgagaagcgaggacgaggccgactactactgtgccaccagagatgatagcctgagcggcagcgtggtgtttggcacaggcacaaagctgacagtgctgggcctcgagatccagaaccctgatcctgccgtgtaccagctgcgggatagcaagagcagcgacaagagcgtgtgtctgttcaccgacttcgacagccagaccaacgtgtcccagagcaaggactccgacgtgtacatcaccgataagtgcgtgctggacatgcggagcatggacttcaagagcaactccgccgtggcctggtccaacaagtccgatttcgcctgcgccaacgccttcaacaacagcattatccccgaggacacattcttcccaagcagcgacgtgccctgcgacgtgaagctggtggaaaagagcttcgagacagacaccaacctgaacttccagaacctgagcgtgatcggcttcagaatcctgctgctgaaagtggccggctttaacctgctgatgaccctgcggctgtggtccagccgcgccaagagaagcggatctggcgtgaagcagaccctgaatttcgacctgctgaagctggctggcgacgtggaatccaacccaggccctactagtaccatggactggatttggcgcatccttttccttgtcggcgctgctaccggcgcccattccttcgaagaagttcagctggttcagagcggagccgaagtgaagaagcctggcgagagcctgaagattagctgcaaaggcagcggctacggcttcaccagctattggatcggctgggtccgacagatgcctggcaaaggactggaatggatgggcatcattcaccccgacgacagcgacaccaagtacagccctagcttccagggccaagtgaccatcagcgccgacaagagcatcagcacagcctacctccagtggtcctctctgaaggccagcgataccgccatgtactactgcgccagcagctacctgagaggactgtggggcggctacttcgatttttggggccagggcacactggtcaccgttagttctacgcgtgaggacctgaagaacgtgttcccacctgaggtggccgtgttcgagcctagcaaggccgagatcgcccacacccagaaagccaccctcgtgtgcctggctaccggcttctaccccgaccatgtggaactgtcttggtgggtcaacggcaaagaggtgcacagcggcgtgtgtaccgacccccagccactgaaagaacagcccgccctgaacgacagccggtactgcctgagcagcagactgagagtgtccgccaccttctggcagaacccccggaaccacttcagatgccaggtgcagttctacggcctgagcgagaacgacgagtggacccaggacagagccaagcccgtgacccagatcgtgtctgccgaagcctggggcagagccgattgcggcatcaccagcgccagctaccaccagggcgtgctgagcgccaccatcctgtacgagatcctgctgggcaaggccaccctgtacgccgtgctggtgtctgccctggtgctgatggctatggtcaagcggaaggacagccgggga

SEQ ID NO: 34640 - DNA, 2724 bp, synthetic construct
  source 1..2724: mol_type = other DNA
atggccttaccagtgaccgccttgctcctgccgctggccttgctgctccacgccgccaggccggaagtgcagctggttgaatctggcggaggactggttcaggctggcggatctctgagactgtcttgtgccgccagcggcagaacctttagcatgggctggtttagacaggcccctggcaaagagagagagttcgtcgccgccatcacatactctggcggcagcccttactacgccgactctgtgaagggcagattcaccatcagccgggacaacgccaagaacaccgtgtacctccagatgaacagcctgaagcctgaggacaccgccgtgtactactgcgccgccaatccaacatacggcagcgactggaacgccgagaattggggccagggaacccaagtgacagtgtctagcggtaccggcggaggcggatctggcggcggaggtagcggtggcggaggatctgaattcgaactgcaaagcgtgctgacacagcctcctagcgcctctggaacacctggacagagagtgacaatcagctgctccggcagctccagcaacatcggcagcaactacgtgaactggtatcagcagctgcctggcacagcccctaaactgctgatctacggcgactaccagaggccaagcggcgtgccagatagattcagcggcagcaagtctggcacaagcgccagcctggctatctctggactgagaagcgaggacgaggccgactactactgtgccaccagagatgatagcctgagcggcagcgtggtgtttggcacaggcacaaagctgacagtgctgggcctcgaggacctgaagaacgtgttcccacctgaggtggccgtgttcgagcctagcgaggccgagatcagccacacccagaaagccaccctcgtgtgcctggctaccggcttctaccccgaccatgtggaactgtcttggtgggtcaacggcaaagaggtgcacagcggcgtgtgtaccgacccccagccactgaaagaacagcccgccctgaacgacagccggtactgcctgagcagcagactgagagtgtccgccaccttctggcagaacccccggaaccacttcagatgccaggtgcagttctacggcctgagcgagaacgacgagtggacccaggacagagccaagcccgtgacccagatcgtgtctgccgaagcctggggcagagccgattgcggctttaccagcgagagctaccagcagggcgtgctgagcgccaccatcctgtacgagatcctgctgggcaaggccaccctgtacgccgtgctggtgtctgccctggtgctgatggctatggtcaagcggaaggacagccggggaagggccaagcgatctggatctggagcaacaaacttctcactactcaaacaagcaggtgacgtggaggagaatcccgggcctactagtaccatggactggatttggcgcatccttttccttgtcggcgctgctaccggcgcccattccgggccccaggtgcagctccaagaaagcggacccggactggttaagccctctcagaccctgtctctgacctgcacagttagcggagccagcattaccacaggcgagtattattggaattggtttcggcagccaccaggcaaggggcttgagtggatgggtgctattgctgcctctggcagcaccacctactctcccagctttgagagcagaacctccatcagccgggacacctccaaaaaccagttctctctgaagctgtcctccgtgaccgctgctgacaccgccgtctattattgtggccggtctttcggcgtggcagctgtgaccacaggacagaacagaggccagggaacacttgtgaccgtgtcctctggatccggcggcggaggatctggcggaggcggatctgggggcggaggctctttcgaagaagttcagctggttcagagcggagccgaagtgaagaagcctggcgagagcctgaagattagctgcaaaggcagcggctacggcttcaccagctattggatcggctgggtccgacagatgcctggcaaaggactggaatggatgggcatcattcaccccgacgacagcgacaccaagtacagccctagcttccagggccaagtgaccatcagcgccgacaagagcatcagcacagcctacctccagtggtcctctctgaaggccagcgataccgccatgtactactgcgccagcagctacctgagaggactgtggggcggctacttcgatttttggggccagggcacactggtcaccgttagttctacgcgtatccagaaccctgatcctgccgtgtaccagctgcgggatagcaagagcagcgacaagagcgtgtgtctgttcaccgacttcgacagccagaccaacgtgtcccagagcaaggactccgacgtgtacatcaccgataagtgcgtgctggacatgcggagcatggacttcaagagcaactccgccgtggcctggtccaacaagtccgatttcgcctgcgccaacgccttcaacaacagcattatccccgaggacacattcttcccaagccccgagagcagctgcgacgtgaagctggtggaaaagagcttcgagacagacaccaacctgaacttccagaacctgagcgtgatcggcttcagaatcctgctgctgaaagtggccggctttaacctgctgatgaccctgcggctgtggtccagc

SEQ ID NO: 34641 - DNA, 2745 bp, synthetic construct
  source 1..2745: mol_type = other DNA
atggccttaccagtgaccgccttgctcctgccgctggccttgctgctccacgccgccaggccggaagtgcagctggttgaatctggcggaggactggttcaggctggcggatctctgagactgtcttgtgccgccagcggcagaacctttagcatgggctggtttagacaggcccctggcaaagagagagagttcgtcgccgccatcacatactctggcggcagcccttactacgccgactctgtgaagggcagattcaccatcagccgggacaacgccaagaacaccgtgtacctccagatgaacagcctgaagcctgaggacaccgccgtgtactactgcgccgccaatccaacatacggcagcgactggaacgccgagaattggggccagggaacccaagtgacagtgtctagcggtaccggcggaggcggatctggcggcggaggtagcggtggcggaggatctgaattcgaactgcaaagcgtgctgacacagcctcctagcgcctctggaacacctggacagagagtgacaatcagctgctccggcagctccagcaacatcggcagcaactacgtgaactggtatcagcagctgcctggcacagcccctaaactgctgatctacggcgactaccagaggccaagcggcgtgccagatagattcagcggcagcaagtctggcacaagcgccagcctggctatctctggactgagaagcgaggacgaggccgactactactgtgccaccagagatgatagcctgagcggcagcgtggtgtttggcacaggcacaaagctgacagtgctgggcctcgagatccagaaccctgatcctgccgtgtaccagctgcgggatagcaagagcagcgacaagagcgtgtgtctgttcaccgacttcgacagccagaccaacgtgtcccagagcaaggactccgacgtgtacatcaccgataagtgcgtgctggacatgcggagcatggacttcaagagcaactccgccgtggcctggtccaacaagtccgatttcgcctgcgccaacgccttcaacaacagcattatccccgaggacacattcttcccaagcagcgacgtgccctgcgacgtgaagctggtggaaaagagcttcgagacagacaccaacctgaacttccagaacctgagcgtgatcggcttcagaatcctgctgctgaaagtggccggctttaacctgctgatgaccctgcggctgtggtccagccgcgccaagagaagcggatctggcgtgaagcagaccctgaatttcgacctgctgaagctggctggcgacgtggaatccaacccaggccctactagtaccatggactggatttggcgcatccttttccttgtcggcgctgctaccggcgcccattccgggccccaggtgcagctggttgaatctggcggaggactggttcagcctggcggatctctgagactgtcttgtgccgccagcggcaacatcaacagcagaaactgcatgggctggttcagacaggcccctggcaagggaagagaaggcgtggcagctatcggccaagtgaccggcagaacctactacgtggacagcgtgaagggcagattcaccatcagcctggacaacagcaagaacaccctgtacctccagatgaacagcctgagagccgaggacaccgccgtgtactattgtgctgctgcccctggctgtctgctgtctgcacttagaagcgccgactacagaaactggggccagggcacactggtcaccgtttcttctggatccggcggcggaggatctggcggaggcggatctgggggcggaggctctttcgaagaagttcagctggttcagagcggagccgaagtgaagaagcctggcgagagcctgaagattagctgcaaaggcagcggctacggcttcaccagctattggatcggctgggtccgacagatgcctggcaaaggactggaatggatgggcatcattcaccccgacgacagcgacaccaagtacagccctagcttccagggccaagtgaccatcagcgccgacaagagcatcagcacagcctacctccagtggtcctctctgaaggccagcgataccgccatgtactactgcgccagcagctacctgagaggactgtggggcggctacttcgatttttggggccagggcacactggtcaccgttagttctacgcgtgaggacctgaagaacgtgttcccacctgaggtggccgtgttcgagcctagcaaggccgagatcgcccacacccagaaagccaccctcgtgtgcctggctaccggcttctaccccgaccatgtggaactgtcttggtgggtcaacggcaaagaggtgcacagcggcgtgtgtaccgacccccagccactgaaagaacagcccgccctgaacgacagccggtactgcctgagcagcagactgagagtgtccgccaccttctggcagaacccccggaaccacttcagatgccaggtgcagttctacggcctgagcgagaacgacgagtggacccaggacagagccaagcccgtgacccagatcgtgtctgccgaagcctggggcagagccgattgcggcatcaccagcgccagctaccaccagggcgtgctgagcgccaccatcctgtacgagatcctgctgggcaaggccaccctgtacgccgtgctggtgtctgccctggtgctgatggctatggtcaagcggaaggacagccgggga

SEQ ID NO: 34642 - DNA, 2733 bp, synthetic construct
  source 1..2733: mol_type = other DNA
atggccttaccagtgaccgccttgctcctgccgctggccttgctgctccacgccgccaggccggaagtgcagctggttgaatctggcggaggactggttcaggctggcggatctctgagactgtcttgtgccgccagcggcagaacctttagcatgggctggtttagacaggcccctggcaaagagagagagttcgtcgccgccatcacatactctggcggcagcccttactacgccgactctgtgaagggcagattcaccatcagccgggacaacgccaagaacaccgtgtacctccagatgaacagcctgaagcctgaggacaccgccgtgtactactgcgccgccaatccaacatacggcagcgactggaacgccgagaattggggccagggaacccaagtgacagtgtctagcggtaccggcggaggcggatctggcggcggaggtagcggtggcggaggatctgaattcgaactgcaaagcgtgctgacacagcctcctagcgcctctggaacacctggacagagagtgacaatcagctgctccggcagctccagcaacatcggcagcaactacgtgaactggtatcagcagctgcctggcacagcccctaaactgctgatctacggcgactaccagaggccaagcggcgtgccagatagattcagcggcagcaagtctggcacaagcgccagcctggctatctctggactgagaagcgaggacgaggccgactactactgtgccaccagagatgatagcctgagcggcagcgtggtgtttggcacaggcacaaagctgacagtgctgggcctcgaggacctgaagaacgtgttcccacctgaggtggccgtgttcgagcctagcgaggccgagatcagccacacccagaaagccaccctcgtgtgcctggctaccggcttctaccccgaccatgtggaactgtcttggtgggtcaacggcaaagaggtgcacagcggcgtgtgtaccgacccccagccactgaaagaacagcccgccctgaacgacagccggtactgcctgagcagcagactgagagtgtccgccaccttctggcagaacccccggaaccacttcagatgccaggtgcagttctacggcctgagcgagaacgacgagtggacccaggacagagccaagcccgtgacccagatcgtgtctgccgaagcctggggcagagccgattgcggctttaccagcgagagctaccagcagggcgtgctgagcgccaccatcctgtacgagatcctgctgggcaaggccaccctgtacgccgtgctggtgtctgccctggtgctgatggctatggtcaagcggaaggacagccggggaagggccaagcgatctggatctggagcaacaaacttctcactactcaaacaagcaggtgacgtggaggagaatcccgggcctactagtaccatggactggatttggcgcatccttttccttgtcggcgctgctaccggcgcccattccgggccccaggtgcagctggttgaatctggcggaggactggttcagcctggcggatctctgagactgtcttgtgccgccagcggcaacatcaacagcagaaactgcatgggctggttcagacaggcccctggcaagggaagagaaggcgtggcagctatcggccaagtgaccggcagaacctactacgtggacagcgtgaagggcagattcaccatcagcctggacaacagcaagaacaccctgtacctccagatgaacagcctgagagccgaggacaccgccgtgtactattgtgctgctgcccctggctgtctgctgtctgcacttagaagcgccgactacagaaactggggccagggcacactggtcaccgtttcttctggatccggcggcggaggatctggcggaggcggatctgggggcggaggctctttcgaagaagttcagctggttcagagcggagccgaagtgaagaagcctggcgagagcctgaagattagctgcaaaggcagcggctacggcttcaccagctattggatcggctgggtccgacagatgcctggcaaaggactggaatggatgggcatcattcaccccgacgacagcgacaccaagtacagccctagcttccagggccaagtgaccatcagcgccgacaagagcatcagcacagcctacctccagtggtcctctctgaaggccagcgataccgccatgtactactgcgccagcagctacctgagaggactgtggggcggctacttcgatttttggggccagggcacactggtcaccgttagttctacgcgtatccagaaccctgatcctgccgtgtaccagctgcgggatagcaagagcagcgacaagagcgtgtgtctgttcaccgacttcgacagccagaccaacgtgtcccagagcaaggactccgacgtgtacatcaccgataagtgcgtgctggacatgcggagcatggacttcaagagcaactccgccgtggcctggtccaacaagtccgatttcgcctgcgccaacgccttcaacaacagcattatccccgaggacacattcttcccaagccccgagagcagctgcgacgtgaagctggtggaaaagagcttcgagacagacaccaacctgaacttccagaacctgagcgtgatcggcttcagaatcctgctgctgaaagtggccggctttaacctgctgatgaccctgcggctgtggtccagc

SEQ ID NO: 34643 - DNA, 2733 bp, synthetic construct
  source 1..2733: mol_type = other DNA
atggccttaccagtgaccgccttgctcctgccgctggccttgctgctccacgccgccaggccggaagtgcaactggttgaatccggtggcggcctggtgcaagcaggcggatctctcagacttagctgtgccgcctccggcagaaccttcacaatgggatggtttaggcaggctccagggaaagagagagagttcgtcgccgccatctctctgtctcccacactggcctactacgccgactctgtgaaaggccggttcaccatctccagagataatgccaagaacaccgtggtgctgcaaatgaactctctgaaacccgaggatacagccctgtactattgtgccgctgaccggaagtccgtgatgagcatcagacccgattactggggacagggcacacaagtcacagtgtcctctggtaccggcggaggcggatctggcggcggaggtagcggtggcggaggatctgaattcgaactgcaaagcgtgctgacacagcctcctagcgcctctggaacacctggacagagagtgacaatcagctgctccggcagctccagcaacatcggcagcaactacgtgaactggtatcagcagctgcctggcacagcccctaaactgctgatctacggcgactaccagaggccaagcggcgtgccagatagattcagcggcagcaagtctggcacaagcgccagcctggctatctctggactgagaagcgaggacgaggccgactactactgtgccaccagagatgatagcctgagcggcagcgtggtgtttggcacaggcacaaagctgacagtgctgggcctcgaggacctgaagaacgtgttcccacctgaggtggccgtgttcgagcctagcgaggccgagatcagccacacccagaaagccaccctcgtgtgcctggctaccggcttctaccccgaccatgtggaactgtcttggtgggtcaacggcaaagaggtgcacagcggcgtgtgtaccgacccccagccactgaaagaacagcccgccctgaacgacagccggtactgcctgagcagcagactgagagtgtccgccaccttctggcagaacccccggaaccacttcagatgccaggtgcagttctacggcctgagcgagaacgacgagtggacccaggacagagccaagcccgtgacccagatcgtgtctgccgaagcctggggcagagccgattgcggctttaccagcgagagctaccagcagggcgtgctgagcgccaccatcctgtacgagatcctgctgggcaaggccaccctgtacgccgtgctggtgtctgccctggtgctgatggctatggtcaagcggaaggacagccggggaagggccaagcgatctggatctggagcaacaaacttctcactactcaaacaagcaggtgacgtggaggagaatcccgggcctactagtaccatggactggatttggcgcatccttttccttgtcggcgctgctaccggcgcccattccgggccccaggtgcagctggttgaatctggcggaggactggttcagcctggcggatctctgagactgtcttgtgccgccagcggcaacatcaacagcagaaactgcatgggctggttcagacaggcccctggcaagggaagagaaggcgtggcagctatcggccaagtgaccggcagaacctactacgtggacagcgtgaagggcagattcaccatcagcctggacaacagcaagaacaccctgtacctccagatgaacagcctgagagccgaggacaccgccgtgtactattgtgctgctgcccctggctgtctgctgtctgcacttagaagcgccgactacagaaactggggccagggcacactggtcaccgtttcttctggatccggcggcggaggatctggcggaggcggatctgggggcggaggctctttcgaagaagttcagctggttcagagcggagccgaagtgaagaagcctggcgagagcctgaagattagctgcaaaggcagcggctacggcttcaccagctattggatcggctgggtccgacagatgcctggcaaaggactggaatggatgggcatcattcaccccgacgacagcgacaccaagtacagccctagcttccagggccaagtgaccatcagcgccgacaagagcatcagcacagcctacctccagtggtcctctctgaaggccagcgataccgccatgtactactgcgccagcagctacctgagaggactgtggggcggctacttcgatttttggggccagggcacactggtcaccgttagttctacgcgtatccagaaccctgatcctgccgtgtaccagctgcgggatagcaagagcagcgacaagagcgtgtgtctgttcaccgacttcgacagccagaccaacgtgtcccagagcaaggactccgacgtgtacatcaccgataagtgcgtgctggacatgcggagcatggacttcaagagcaactccgccgtggcctggtccaacaagtccgatttcgcctgcgccaacgccttcaacaacagcattatccccgaggacacattcttcccaagccccgagagcagctgcgacgtgaagctggtggaaaagagcttcgagacagacaccaacctgaacttccagaacctgagcgtgatcggcttcagaatcctgctgctgaaagtggccggctttaacctgctgatgaccctgcggctgtggtccagc

SEQ ID NO: 34644 - DNA, 2745 bp, synthetic construct
  source 1..2745: mol_type = other DNA
atggccttaccagtgaccgccttgctcctgccgctggccttgctgctccacgccgccaggccgcaggttcagctgcaagagtctggccctggcctggtcaagcctagccaaacactgagcctgacctgtaccgtgtctggcggctctatcaccaccggcgagttctactggaactggttcagacagcctcctggcaaaggactggaatggatgggagccattgccgccagcggcagcacaacatacagccctagcttcgagagccggaccagcatcagcagagacaccagcaagaatcagttcagcctgaagctgagcagcgtgacagccgccgatacagccgtgtattactgcggcagatcctttggagtggccgccgtgacaaccggccagaatagaggacagggcaccctggtcacagtgtctagcggtaccggcggaggcggatctggcggcggaggtagcggtggcggaggatctgaattcgaactgcaaagcgtgctgacacagcctcctagcgcctctggaacacctggacagagagtgacaatcagctgctccggcagctccagcaacatcggcagcaactacgtgaactggtatcagcagctgcctggcacagcccctaaactgctgatctacggcgactaccagaggccaagcggcgtgccagatagattcagcggcagcaagtctggcacaagcgccagcctggctatctctggactgagaagcgaggacgaggccgactactactgtgccaccagagatgatagcctgagcggcagcgtggtgtttggcacaggcacaaagctgacagtgctgggcctcgaggacctgaagaacgtgttcccacctgaggtggccgtgttcgagcctagcgaggccgagatcagccacacccagaaagccaccctcgtgtgcctggctaccggcttctaccccgaccatgtggaactgtcttggtgggtcaacggcaaagaggtgcacagcggcgtgtgtaccgacccccagccactgaaagaacagcccgccctgaacgacagccggtactgcctgagcagcagactgagagtgtccgccaccttctggcagaacccccggaaccacttcagatgccaggtgcagttctacggcctgagcgagaacgacgagtggacccaggacagagccaagcccgtgacccagatcgtgtctgccgaagcctggggcagagccgattgcggctttaccagcgagagctaccagcagggcgtgctgagcgccaccatcctgtacgagatcctgctgggcaaggccaccctgtacgccgtgctggtgtctgccctggtgctgatggctatggtcaagcggaaggacagccggggaagggccaagcgatctggatctggagcaacaaacttctcactactcaaacaagcaggtgacgtggaggagaatcccgggcctactagtaccatggactggatttggcgcatccttttccttgtcggcgctgctaccggcgcccattccgggccccaggtgcagctggttgaatctggcggaggactggttcagcctggcggatctctgagactgtcttgtgccgccagcggcaacatcaacagcagaaactgcatgggctggttcagacaggcccctggcaagggaagagaaggcgtggcagctatcggccaagtgaccggcagaacctactacgtggacagcgtgaagggcagattcaccatcagcctggacaacagcaagaacaccctgtacctccagatgaacagcctgagagccgaggacaccgccgtgtactattgtgctgctgcccctggctgtctgctgtctgcacttagaagcgccgactacagaaactggggccagggcacactggtcaccgtttcttctggatccggcggcggaggatctggcggaggcggatctgggggcggaggctctttcgaagaagttcagctggttcagagcggagccgaagtgaagaagcctggcgagagcctgaagattagctgcaaaggcagcggctacggcttcaccagctattggatcggctgggtccgacagatgcctggcaaaggactggaatggatgggcatcattcaccccgacgacagcgacaccaagtacagccctagcttccagggccaagtgaccatcagcgccgacaagagcatcagcacagcctacctccagtggtcctctctgaaggccagcgataccgccatgtactactgcgccagcagctacctgagaggactgtggggcggctacttcgatttttggggccagggcacactggtcaccgttagttctacgcgtatccagaaccctgatcctgccgtgtaccagctgcgggatagcaagagcagcgacaagagcgtgtgtctgttcaccgacttcgacagccagaccaacgtgtcccagagcaaggactccgacgtgtacatcaccgataagtgcgtgctggacatgcggagcatggacttcaagagcaactccgccgtggcctggtccaacaagtccgatttcgcctgcgccaacgccttcaacaacagcattatccccgaggacacattcttcccaagccccgagagcagctgcgacgtgaagctggtggaaaagagcttcgagacagacaccaacctgaacttccagaacctgagcgtgatcggcttcagaatcctgctgctgaaagtggccggctttaacctgctgatgaccctgcggctgtggtccagc

SEQ ID NO: 34645 - DNA, 1473 bp, synthetic construct
  source 1..1473: mol_type = other DNA
atggccttaccagtgaccgccttgctcctgccgctggccttgctgctccacgccgccaggccggacttcgtgatgacacagagccctgatagcctggccgtgtctctcggcgagcgagtgaccatgagctgcaagtctagccagagcctgctgaacagcggcaaccagaagaactacctgacctggtatcagcagaagcccggccagcctcctaagctgctgatctactgggccagcaccagagaaagcggcgtgcccgatagattttctggctctggcagcggcaccgacttcaccctgacaatttctagcctgcaagccgaggacgtggccgtgtactactgccagaacgactacagctacccctacaccttcggccagggcaccaagctggaaatcaaaggcggaggcggaagtggaggcggaggatctggcggcggaggctctgaagtgcaactggttcagagcggagccgagctgaagaaacctggggccagcgtgaaggtgtcctgtaaagccagcggctacacctttaccgactactacatgaaatgggtccgacaggccccaggccagggactcgaatggatcggcgatattatccccagcaacggggccaccttctacaaccagaaattcaagggccgcgtgaccatcaccgtggacaagagcacaagcaccgcctacatggaactgagcagcctgagaagcgaggacaccgccgtgtattattgcgccagaagccatctgctgcgggccagttggttcgcctattggggacagggaaccctggtcaccgttagctctacgcgtaaaattgaagttatgtatcctcctccttacctagacaatgagaagagcaatggaaccattatccatgtgaaagggaaacacctttgtccaagtcccctatttcccggaccttctaagcccttttgggtgctggtggtggttgggggagtcctggcttgctatagcttgctagtaacagtggcctttattattttctgggtgaggagtaagaggagcaggctcctgcacagtgactacatgaacatgactccacgccgccccggacccacccgcaagcattaccagccctatgccccaccacgcgacttcgcagcctatcgctccagagtgaagttcagcaggagcgcagacgcccccgcgtaccagcagggccagaaccagctctataacgagctcaatctaggacgaagagaggagtacgatgttttggacaagagacgtggccgggaccctgagatggggggaaagccgagaaggaagaaccctcaggaaggcctgtacaatgaactgcagaaagataagatggcggaggcctacagtgagattgggatgaaaggcgagcgccggaggggcaaggggcacgatggcctttaccagggtctcagtacagccaccaaggacacctacgacgcccttcacatgcaggccctgccccctcgc

SEQ ID NO: 34646 - DNA, 1491 bp, synthetic construct
  source 1..1491: mol_type = other DNA
atggccttaccagtgaccgccttgctcctgccgctggccttgctgctccacgccgccaggccggacttcgtgatgacacagagccctgatagcctggccgtgtctctcggcgagcgagtgaccatgagctgcaagtctagccagagcctgctgaacagcggcaaccagaagaactacctgacctggtatcagcagaagcccggccagcctcctaagctgctgatctactgggccagcaccagagaaagcggcgtgcccgatagattttctggctctggcagcggcaccgacttcaccctgacaatttctagcctgcaagccgaggacgtggccgtgtactactgccagaacgactacagctacccctacaccttcggccagggcaccaagctggaaatcaaaggcggaggcggaagtggaggcggaggatctggcggcggaggctctgaagtgcaactggttcagagcggagccgagctgaagaaacctggggccagcgtgaaggtgtcctgtaaagccagcggctacacctttaccgactactacatgaaatgggtccgacaggccccaggccagggactcgaatggatcggcgatattatccccagcaacggggccaccttctacaaccagaaattcaagggccgcgtgaccatcaccgtggacaagagcacaagcaccgcctacatggaactgagcagcctgagaagcgaggacaccgccgtgtattattgcgccagaagccatctgctgcgggccagttggttcgcctattggggacagggaaccctggtcaccgttagctctacgcgtgcgaagcccaccacgacgccagcgccgcgaccaccaacaccggcgcccaccatcgcgtcgcagcccctgtccctgcgcccagaggcgtgccggccagcggcggggggcgcagtgcacacgagggggctggacttcgcctgtgacatctacatctgggcgcccttggccgggacttgtggggtccttctcctgtcactggttatcaccctttactgcaaacggggcagaaagaaactcctgtatatattcaaacaaccatttatgagaccagtacaaactactcaagaggaagatggctgtagctgccgatttccagaagaagaagaaggaggatgtgaactgagagtgaagttcagcaggagcgcagacgcccccgcgtaccagcagggccagaaccagctctataacgagctgaatctaggacgaagagaggagtacgatgttttggacaagagacgtggccgggaccctgagatggggggaaagccgagaaggaagaaccctcaggaaggcctgtacaatgaactgcagaaagataagatggcggaggcctacagtgagattgggatgaaaggcgagcgccggaggggcaaggggcacgatggcctttaccagggtctcagtacagccaccaaggacacctacgacgcccttcacatgcaggccctgccccctcgc

SEQ ID NO: 34647 - DNA, 1491 bp, synthetic construct
  source 1..1491: mol_type = other DNA
atggccttaccagtgaccgccttgctcctgccgctggccttgctgctccacgccgccaggccggaagtgcaactggttcagagcggagccgagctgaagaaacctggggccagcgtgaaggtgtcctgtaaagccagcggctacacctttaccgactactacatgaaatgggtccgacaggccccaggccagggactcgaatggatcggcgatattatccccagcaacggggccaccttctacaaccagaaattcaagggccgcgtgaccatcaccgtggacaagagcacaagcaccgcctacatggaactgagcagcctgagaagcgaggacaccgccgtgtattattgcgccagaagccatctgctgcgggccagttggttcgcctattggggacagggaaccctggtcaccgttagctctggcggaggcggaagtggaggcggaggatctggcggcggaggctctgacttcgtgatgacacagagccctgatagcctggccgtgtctctcggcgagcgagtgaccatgagctgcaagtctagccagagcctgctgaacagcggcaaccagaagaactacctgacctggtatcagcagaagcccggccagcctcctaagctgctgatctactgggccagcaccagagaaagcggcgtgcccgatagattttctggctctggcagcggcaccgacttcaccctgacaatttctagcctgcaagccgaggacgtggccgtgtactactgccagaacgactacagctacccctacaccttcggccagggcaccaagctggaaatcaaaacgcgtgcgaagcccaccacgacgccagcgccgcgaccaccaacaccggcgcccaccatcgcgtcgcagcccctgtccctgcgcccagaggcgtgccggccagcggcggggggcgcagtgcacacgagggggctggacttcgcctgtgacatctacatctgggcgcccttggccgggacttgtggggtccttctcctgtcactggttatcaccctttactgcaaacggggcagaaagaaactcctgtatatattcaaacaaccatttatgagaccagtacaaactactcaagaggaagatggctgtagctgccgatttccagaagaagaagaaggaggatgtgaactgagagtgaagttcagcaggagcgcagacgcccccgcgtaccagcagggccagaaccagctctataacgagctgaatctaggacgaagagaggagtacgatgttttggacaagagacgtggccgggaccctgagatggggggaaagccgagaaggaagaaccctcaggaaggcctgtacaatgaactgcagaaagataagatggcggaggcctacagtgagattgggatgaaaggcgagcgccggaggggcaaggggcacgatggcctttaccagggtctcagtacagccaccaaggacacctacgacgcccttcacatgcaggccctgccccctcgc

SEQ ID NO: 34648 - DNA, 1890 bp, synthetic construct
  source 1..1890: mol_type = other DNA
atggccttaccagtgaccgccttgctcctgccgctggccttgctgctccacgccgccaggccggacttcgtgatgacacagagccctgatagcctggccgtgtctctcggcgagcgagtgaccatgagctgcaagtctagccagagcctgctgaacagcggcaaccagaagaactacctgacctggtatcagcagaagcccggccagcctcctaagctgctgatctactgggccagcaccagagaaagcggcgtgcccgatagattttctggctctggcagcggcaccgacttcaccctgacaatttctagcctgcaagccgaggacgtggccgtgtactactgccagaacgactacagctacccctacaccttcggccagggcaccaagctggaaatcaaactcgagatccagaaccctgatcctgccgtgtaccagctgcgggatagcaagagcagcgacaagagcgtgtgtctgttcaccgacttcgacagccagaccaacgtgtcccagagcaaggactccgacgtgtacatcaccgataagtgcgtgctggacatgcggagcatggacttcaagagcaactccgccgtggcctggtccaacaagtccgatttcgcctgcgccaacgccttcaacaacagcattatccccgaggacacattcttcccaagcagcgacgtgccctgcgacgtgaagctggtggaaaagagcttcgagacagacaccaacctgaacttccagaacctgagcgtgatcggcttcagaatcctgctgctgaaagtggccggctttaacctgctgatgaccctgcggctgtggtccagccgcgccaagagaagcggatctggcgtgaagcagaccctgaatttcgacctgctgaagctggctggcgacgtggaatccaacccaggccctactagtatggactggatttggcgcatccttttccttgtcggcgctgctaccggcgcgcattccttcgaagaagtgcaactggttcagagcggagccgagctgaagaaacctggggccagcgtgaaggtgtcctgtaaagccagcggctacacctttaccgactactacatgaaatgggtccgacaggccccaggccagggactcgaatggatcggcgatattatccccagcaacggggccaccttctacaaccagaaattcaagggccgcgtgaccatcaccgtggacaagagcacaagcaccgcctacatggaactgagcagcctgagaagcgaggacaccgccgtgtattattgcgccagaagccatctgctgcgggccagttggttcgcctattggggacagggaaccctggtcaccgttagctctacgcgtgaggacctgaagaacgtgttcccacctgaggtggccgtgttcgagcctagcaaggccgagatcgcccacacccagaaagccaccctcgtgtgcctggctaccggcttctaccccgaccatgtggaactgtcttggtgggtcaacggcaaagaggtgcacagcggcgtgtgtaccgacccccagccactgaaagaacagcccgccctgaacgacagccggtactgcctgagcagcagactgagagtgtccgccaccttctggcagaacccccggaaccacttcagatgccaggtgcagttctacggcctgagcgagaacgacgagtggacccaggacagagccaagcccgtgacccagatcgtgtctgccgaagcctggggcagagccgattgcggcatcaccagcgccagctaccaccagggcgtgctgagcgccaccatcctgtacgagatcctgctgggcaaggccaccctgtacgccgtgctggtgtctgccctggtgctgatggctatggtcaagcggaaggacagccgggga

SEQ ID NO: 34649 - DNA, 1878 bp, synthetic construct
  source 1..1878: mol_type = other DNA
atggccttaccagtgaccgccttgctcctgccgctggccttgctgctccacgccgccaggccggacttcgtgatgacacagagccctgatagcctggccgtgtctctcggcgagcgagtgaccatgagctgcaagtctagccagagcctgctgaacagcggcaaccagaagaactacctgacctggtatcagcagaagcccggccagcctcctaagctgctgatctactgggccagcaccagagaaagcggcgtgcccgatagattttctggctctggcagcggcaccgacttcaccctgacaatttctagcctgcaagccgaggacgtggccgtgtactactgccagaacgactacagctacccctacaccttcggccagggcaccaagctggaaatcaaactcgaggacctgaagaacgtgttcccacctgaggtggccgtgttcgagcctagcaaggccgagatcgcccacacccagaaagccaccctcgtgtgcctggctaccggcttctaccccgaccatgtggaactgtcttggtgggtcaacggcaaagaggtgcacagcggcgtgtgtaccgacccccagccactgaaagaacagcccgccctgaacgacagccggtactgcctgagcagcagactgagagtgtccgccaccttctggcagaacccccggaaccacttcagatgccaggtgcagttctacggcctgagcgagaacgacgagtggacccaggacagagccaagcccgtgacccagatcgtgtctgccgaagcctggggcagagccgattgcggcatcaccagcgccagctaccaccagggcgtgctgagcgccaccatcctgtacgagatcctgctgggcaaggccaccctgtacgccgtgctggtgtctgccctggtgctgatggctatggtcaagcggaaggacagccggggaagggccaagcgatctggatctggagcaacaaacttctcactactcaaacaagcaggtgacgtggaggagaatcccgggcctactagtatggactggatttggcgcatccttttccttgtcggcgctgctaccggcgcgcattccttcgaagaagtgcaactggttcagagcggagccgagctgaagaaacctggggccagcgtgaaggtgtcctgtaaagccagcggctacacctttaccgactactacatgaaatgggtccgacaggccccaggccagggactcgaatggatcggcgatattatccccagcaacggggccaccttctacaaccagaaattcaagggccgcgtgaccatcaccgtggacaagagcacaagcaccgcctacatggaactgagcagcctgagaagcgaggacaccgccgtgtattattgcgccagaagccatctgctgcgggccagttggttcgcctattggggacagggaaccctggtcaccgttagctctacgcgtatccagaaccctgatcctgccgtgtaccagctgcgggatagcaagagcagcgacaagagcgtgtgtctgttcaccgacttcgacagccagaccaacgtgtcccagagcaaggactccgacgtgtacatcaccgataagtgcgtgctggacatgcggagcatggacttcaagagcaactccgccgtggcctggtccaacaagtccgatttcgcctgcgccaacgccttcaacaacagcattatccccgaggacacattcttcccaagcagcgacgtgccctgcgacgtgaagctggtggaaaagagcttcgagacagacaccaacctgaacttccagaacctgagcgtgatcggcttcagaatcctgctgctgaaagtggccggctttaacctgctgatgaccctgcggctgtggtccagc

SEQ ID NO: 34650 - DNA, 1878 bp, synthetic construct
  source 1..1878: mol_type = other DNA
atggccttaccagtgaccgccttgctcctgccgctggccttgctgctccacgccgccaggccggacttcgtgatgacacagagccctgatagcctggccgtgtctctcggcgagcgagtgaccatgagctgcaagtctagccagagcctgctgaacagcggcaaccagaagaactacctgacctggtatcagcagaagcccggccagcctcctaagctgctgatctactgggccagcaccagagaaagcggcgtgcccgatagattttctggctctggcagcggcaccgacttcaccctgacaatttctagcctgcaagccgaggacgtggccgtgtactactgccagaacgactacagctacccctacaccttcggccagggcaccaagctggaaatcaaactcgaggacctgaagaacgtgttcccacctgaggtggccgtgttcgagcctagcgaggccgagatcagccacacccagaaagccaccctcgtgtgcctggctaccggcttctaccccgaccatgtggaactgtcttggtgggtcaacggcaaagaggtgcacagcggcgtgtgtaccgacccccagccactgaaagaacagcccgccctgaacgacagccggtactgcctgagcagcagactgagagtgtccgccaccttctggcagaacccccggaaccacttcagatgccaggtgcagttctacggcctgagcgagaacgacgagtggacccaggacagagccaagcccgtgacccagatcgtgtctgccgaagcctggggcagagccgattgcggctttaccagcgagagctaccagcagggcgtgctgagcgccaccatcctgtacgagatcctgctgggcaaggccaccctgtacgccgtgctggtgtctgccctggtgctgatggctatggtcaagcggaaggacagccggggaagggccaagcgatctggatctggagcaacaaacttctcactactcaaacaagcaggtgacgtggaggagaatcccgggcctactagtatggactggatttggcgcatccttttccttgtcggcgctgctaccggcgcgcattccttcgaagaagtgcaactggttcagagcggagccgagctgaagaaacctggggccagcgtgaaggtgtcctgtaaagccagcggctacacctttaccgactactacatgaaatgggtccgacaggccccaggccagggactcgaatggatcggcgatattatccccagcaacggggccaccttctacaaccagaaattcaagggccgcgtgaccatcaccgtggacaagagcacaagcaccgcctacatggaactgagcagcctgagaagcgaggacaccgccgtgtattattgcgccagaagccatctgctgcgggccagttggttcgcctattggggacagggaaccctggtcaccgttagctctacgcgtatccagaaccctgatcctgccgtgtaccagctgcgggatagcaagagcagcgacaagagcgtgtgtctgttcaccgacttcgacagccagaccaacgtgtcccagagcaaggactccgacgtgtacatcaccgataagtgcgtgctggacatgcggagcatggacttcaagagcaactccgccgtggcctggtccaacaagtccgatttcgcctgcgccaacgccttcaacaacagcattatccccgaggacacattcttcccaagccccgagagcagctgcgacgtgaagctggtggaaaagagcttcgagacagacaccaacctgaacttccagaacctgagcgtgatcggcttcagaatcctgctgctgaaagtggccggctttaacctgctgatgaccctgcggctgtggtccagc

SEQ ID NO: 34651 - DNA, 1890 bp, synthetic construct
  source 1..1890: mol_type = other DNA
atggccttaccagtgaccgccttgctcctgccgctggccttgctgctccacgccgccaggccggacttcgtgatgacacagagccctgatagcctggccgtgtctctcggcgagcgagtgaccatgagctgcaagtctagccagagcctgctgaacagcggcaaccagaagaactacctgacctggtatcagcagaagcccggccagcctcctaagctgctgatctactgggccagcaccagagaaagcggcgtgcccgatagattttctggctctggcagcggcaccgacttcaccctgacaatttctagcctgcaagccgaggacgtggccgtgtactactgccagaacgactacagctacccctacaccttcggccagggcaccaagctggaaatcaaactcgagatccagaaccctgatcctgccgtgtaccagctgcgggatagcaagagcagcgacaagagcgtgtgtctgttcaccgacttcgacagccagaccaacgtgtcccagagcaaggactccgacgtgtacatcaccgataagtgcgtgctggacatgcggagcatggacttcaagagcaactccgccgtggcctggtccaacaagtccgatttcgcctgcgccaacgccttcaacaacagcattatccccgaggacacattcttcccaagccccgagagcagctgcgacgtgaagctggtggaaaagagcttcgagacagacaccaacctgaacttccagaacctgagcgtgatcggcttcagaatcctgctgctgaaagtggccggctttaacctgctgatgaccctgcggctgtggtccagccgcgccaagagaagcggatctggcgtgaagcagaccctgaatttcgacctgctgaagctggctggcgacgtggaatccaacccaggccctactagtatggactggatttggcgcatccttttccttgtcggcgctgctaccggcgcgcattccttcgaagaagtgcaactggttcagagcggagccgagctgaagaaacctggggccagcgtgaaggtgtcctgtaaagccagcggctacacctttaccgactactacatgaaatgggtccgacaggccccaggccagggactcgaatggatcggcgatattatccccagcaacggggccaccttctacaaccagaaattcaagggccgcgtgaccatcaccgtggacaagagcacaagcaccgcctacatggaactgagcagcctgagaagcgaggacaccgccgtgtattattgcgccagaagccatctgctgcgggccagttggttcgcctattggggacagggaaccctggtcaccgttagctctacgcgtgaggacctgaagaacgtgttcccacctgaggtggccgtgttcgagcctagcgaggccgagatcagccacacccagaaagccaccctcgtgtgcctggctaccggcttctaccccgaccatgtggaactgtcttggtgggtcaacggcaaagaggtgcacagcggcgtgtgtaccgacccccagccactgaaagaacagcccgccctgaacgacagccggtactgcctgagcagcagactgagagtgtccgccaccttctggcagaacccccggaaccacttcagatgccaggtgcagttctacggcctgagcgagaacgacgagtggacccaggacagagccaagcccgtgacccagatcgtgtctgccgaagcctggggcagagccgattgcggctttaccagcgagagctaccagcagggcgtgctgagcgccaccatcctgtacgagatcctgctgggcaaggccaccctgtacgccgtgctggtgtctgccctggtgctgatggctatggtcaagcggaaggacagccgggga

SEQ ID NO: 34652 - DNA, 1926 bp, synthetic construct
  source 1..1926: mol_type = other DNA
atggccttaccagtgaccgccttgctcctgccgctggccttgctgctccacgccgccaggccgctcgaggaggacctgaagaacgtgttcccacctgaggtggccgtgttcgagcctagcaaggccgagatcgcccacacccagaaagccaccctcgtgtgcctggctaccggcttctaccccgaccatgtggaactgtcttggtgggtcaacggcaaagaggtgcacagcggcgtgtgtaccgacccccagccactgaaagaacagcccgccctgaacgacagccggtactgcctgagcagcagactgagagtgtccgccaccttctggcagaacccccggaaccacttcagatgccaggtgcagttctacggcctgagcgagaacgacgagtggacccaggacagagccaagcccgtgacccagatcgtgtctgccgaagcctggggcagagccgattgcggcatcaccagcgccagctaccaccagggcgtgctgagcgccaccatcctgtacgagatcctgctgggcaaggccaccctgtacgccgtgctggtgtctgccctggtgctgatggctatggtcaagcggaaggacagccggggaagggccaagcgatctggatctggagcaacaaacttctcactactcaaacaagcaggtgacgtggaggagaatcccgggcctactagcatggccttaccagtgaccgccttgctcctgccgctggccttgctgctccacgccgccaggccggacttcgtgatgacacagagccctgatagcctggccgtgtctctcggcgagcgagtgaccatgagctgcaagtctagccagagcctgctgaacagcggcaaccagaagaactacctgacctggtatcagcagaagcccggccagcctcctaagctgctgatctactgggccagcaccagagaaagcggcgtgcccgatagattttctggctctggcagcggcaccgacttcaccctgacaatttctagcctgcaagccgaggacgtggccgtgtactactgccagaacgactacagctacccctacaccttcggccagggcaccaagctggaaatcaaaggcggaggcggaagtggaggcggaggatctggcggcggaggctctgaagtgcaactggttcagagcggagccgagctgaagaaacctggggccagcgtgaaggtgtcctgtaaagccagcggctacacctttaccgactactacatgaaatgggtccgacaggccccaggccagggactcgaatggatcggcgatattatccccagcaacggggccaccttctacaaccagaaattcaagggccgcgtgaccatcaccgtggacaagagcacaagcaccgcctacatggaactgagcagcctgagaagcgaggacaccgccgtgtattattgcgccagaagccatctgctgcgggccagttggttcgcctattggggacagggaaccctggtcaccgttagctctacgcgtatccagaaccctgatcctgccgtgtaccagctgcgggatagcaagagcagcgacaagagcgtgtgtctgttcaccgacttcgacagccagaccaacgtgtcccagagcaaggactccgacgtgtacatcaccgataagtgcgtgctggacatgcggagcatggacttcaagagcaactccgccgtggcctggtccaacaagtccgatttcgcctgcgccaacgccttcaacaacagcattatccccgaggacacattcttcccaagcagcgacgtgccctgcgacgtgaagctggtggaaaagagcttcgagacagacaccaacctgaacttccagaacctgagcgtgatcggcttcagaatcctgctgctgaaagtggccggctttaacctgctgatgaccctgcggctgtggtccagc

SEQ ID NO: 34653 - DNA, 1947 bp, synthetic construct
  source 1..1947: mol_type = other DNA
atggccttaccagtgaccgccttgctcctgccgctggccttgctgctccacgccgccaggccgctcgagggctccggcgatcgccctgatcctgccgtgtaccagctgcgggatagcaagagcagcgacaagagcgtgtgtctgttcaccgacttcgacagccagaccaacgtgtcccagagcaaggactccgacgtgtacatcaccgataagtgcgtgctggacatgcggagcatggacttcaagagcaactccgccgtggcctggtccaacaagtccgatttcgcctgcgccaacgccttcaacaacagcattatccccgaggacacattcttcccaagccccgagagcagctgcgacgtgaagctggtggaaaagagcttcgagacagacaccaacctgaacttccagaacctgagcgtgatcggcttcagaatcctgctgctgaaagtggccggctttaacctgctgatgaccctgcggctgtggtccagctctagtcgcgccaagagaagcggatctggcgtgaagcagaccctgaatttcgacctgctgaagctggctggcgacgtggaatccaacccaggccccactagcatggccttaccagtgaccgccttgctcctgccgctggccttgctgctccacgccgccaggccggacttcgtgatgacacagagccctgatagcctggccgtgtctctcggcgagcgagtgaccatgagctgcaagtctagccagagcctgctgaacagcggcaaccagaagaactacctgacctggtatcagcagaagcccggccagcctcctaagctgctgatctactgggccagcaccagagaaagcggcgtgcccgatagattttctggctctggcagcggcaccgacttcaccctgacaatttctagcctgcaagccgaggacgtggccgtgtactactgccagaacgactacagctacccctacaccttcggccagggcaccaagctggaaatcaaaggcggaggcggaagtggaggcggaggatctggcggcggaggctctgaagtgcaactggttcagagcggagccgagctgaagaaacctggggccagcgtgaaggtgtcctgtaaagccagcggctacacctttaccgactactacatgaaatgggtccgacaggccccaggccagggactcgaatggatcggcgatattatccccagcaacggggccaccttctacaaccagaaattcaagggccgcgtgaccatcaccgtggacaagagcacaagcaccgcctacatggaactgagcagcctgagaagcgaggacaccgccgtgtattattgcgccagaagccatctgctgcgggccagttggttcgcctattggggacagggaaccctggtcaccgttagctctacgcgtgaggacctgaagaacgtgttcccacctgaggtggccgtgttcgagcctagcgaggccgagatcagccacacccagaaagccaccctcgtgtgcctggctaccggcttctaccccgaccatgtggaactgtcttggtgggtcaacggcaaagaggtgcacagcggcgtgtgtaccgacccccagccactgaaagaacagcccgccctgaacgacagccggtactgcctgagcagcagactgagagtgtccgccaccttctggcagaacccccggaaccacttcagatgccaggtgcagttctacggcctgagcgagaacgacgagtggacccaggacagagccaagcccgtgacccagatcgtgtctgccgaagcctggggcagagccgattgcggctttaccagcgagagctaccagcagggcgtgctgagcgccaccatcctgtacgagatcctgctgggcaaggccaccctgtacgccgtgctggtgtctgccctggtgctgatggctatggtcaagcggaaggacagccgggga

SEQ ID NO: 34654 - DNA, 1878 bp, synthetic construct
  source 1..1878: mol_type = other DNA
atggccttaccagtgaccgccttgctcctgccgctggccttgctgctccacgccgccaggccggacttcgtgatgacacagagccctgatagcctggccgtgtctctcggcgagcgagtgaccatgagctgcaagtctagccagagcctgctgaacagcggcaaccagaagaactacctgacctggtatcagcagaagcccggccagcctcctaagctgctgatctactgggccagcaccagagaaagcggcgtgcccgatagattttctggctctggcagcggcaccgacttcaccctgacaatttctagcctgcaagccgaggacgtggccgtgtactactgccagaacgactacagctacccctacaccttcggccagggcaccaagctggaaatcaaactcgaggacctgaagaacgtgttcccacctgaggtggccgtgttcgagcctagcgaggccgagatcagccacacccagaaagccaccctcgtgtgcctggctaccggcttctaccccgaccatgtggaactgtcttggtgggtcaacggcaaagaggtgcacagcggcgtgtctaccgacccccagccactgaaagaacagcccgccctgaacgacagccggtactgcctgagcagcagactgagagtgtccgccaccttctggcagaacccccggaaccacttcagatgccaggtgcagttctacggcctgagcgagaacgacgagtggacccaggacagagccaagcccgtgacccagatcgtgtctgccgaagcctggggcagagccgattgcggctttaccagcgagagctaccagcagggcgtgctgagcgccaccatcctgtacgagatcctgctgggcaaggccaccctgtacgccgtgctggtgtctgccctggtgctgatggctatggtcaagcggaaggacagccggggaagggccaagcgatctggatctggagcaacaaacttctcactactcaaacaagcaggtgacgtggaggagaatcccgggcctactagtatggactggatttggcgcatccttttccttgtcggcgctgctaccggcgcgcattccttcgaagaagtgcaactggttcagagcggagccgagctgaagaaacctggggccagcgtgaaggtgtcctgtaaagccagcggctacacctttaccgactactacatgaaatgggtccgacaggccccaggccagggactcgaatggatcggcgatattatccccagcaacggggccaccttctacaaccagaaattcaagggccgcgtgaccatcaccgtggacaagagcacaagcaccgcctacatggaactgagcagcctgagaagcgaggacaccgccgtgtattattgcgccagaagccatctgctgcgggccagttggttcgcctattggggacagggaaccctggtcaccgttagctctacgcgtatccagaaccctgatcctgccgtgtaccagctgcgggatagcaagagcagcgacaagagcgtgtgtctgttcaccgacttcgacagccagaccaacgtgtcccagagcaaggactccgacgtgtacatcaccgataagaccgtgctggacatgcggagcatggacttcaagagcaactccgccgtggcctggtccaacaagtccgatttcgcctgcgccaacgccttcaacaacagcattatccccgaggacacattcttcccaagccccgagagcagctgcgacgtgaagctggtggaaaagagcttcgagacagacaccaacctgaacttccagaacctgagcgtgatcggcttcagaatcctgctgctgaaagtggccggctttaacctgctgatgaccctgcggctgtggtccagc

SEQ ID NO: 34655 - DNA, 1902 bp, synthetic construct
  source 1..1902: mol_type = other DNA
atggccttaccagtgaccgccttgctcctgccgctggccttgctgctccacgccgccaggccggacttcgtgatgacacagagccctgatagcctggccgtgtctctcggcgagcgagtgaccatgagctgcaagtctagccagagcctgctgaacagcggcaaccagaagaactacctgacctggtatcagcagaagcccggccagcctcctaagctgctgatctactgggccagcaccagagaaagcggcgtgcccgatagattttctggctctggcagcggcaccgacttcaccctgacaatttctagcctgcaagccgaggacgtggccgtgtactactgccagaacgactacagctacccctacaccttcggccagggcaccaagctggaaatcaaactcgaggacaagcagctggacgccgacgtgtcccccaagcctaccatcttcctgccctctatcgccgagacaaagctccagaaggccggcacctacctgtgcctgctggaaaagttcttcccagatgtgattaagatccactggcaggaaaagaagtccaacaccatcctgggcagccaggaaggcaacaccatgaagaccaacgacacctacatgaagttcagctggctgaccgtgcccgagaagtccctggacaaagaacacagatgcatcgtgcggcacgaaaacaacaagaacggcgtggaccaggaaatcatcttcccacccatcaagaccgatgtgattacaatggaccccaaggacaactgctccaaggacgccaacgataccctgctgctccagctgaccaacaccagcgcctactacatgtacttgttgctgctgctgaagtccgtggtgtacttcgccatcatcacatgctgcctgctgcggagaaccgccttctgctgcaacggcgagaagtctagggccaagcgatctggatctggagcaacaaacttctcactactcaaacaagcaggtgacgtggaggagaatcccgggcctactagtatggactggatttggcgcatccttttccttgtcggcgctgctaccggcgcgcattccttcgaagaagtgcaactggttcagagcggagccgagctgaagaaacctggggccagcgtgaaggtgtcctgtaaagccagcggctacacctttaccgactactacatgaaatgggtccgacaggccccaggccagggactcgaatggatcggcgatattatccccagcaacggggccaccttctacaaccagaaattcaagggccgcgtgaccatcaccgtggacaagagcacaagcaccgcctacatggaactgagcagcctgagaagcgaggacaccgccgtgtattattgcgccagaagccatctgctgcgggccagttggttcgcctattggggacagggaaccctggtcaccgttagctctacgcgtagccagcctcacaccaagcccagcgtgttcgtgatgaagaacggcaccaacgtggcctgcctcgtgaaagagttctaccccaaggacatcaggatcaacctggtgtccagcaagaagatcaccgagttcgaccccgccatcgtgatctcccccagcggcaagtacaacgccgtgaagctggggaagtacgaggacagcaacagcgtgacctgctccgtgcagcacgacaacaagaccgtgcacagcaccgactttgaagtgaaaaccgactccaccgaccacgtgaagcccaaagagacagagaacaccaagcagcccagcaagagctgccacaagcccaaggccatcgtgcacaccgagaaagtgaacatgatgagcctgaccgtgctgggcctgcggatgctgttcgccaaaaccgtggccgtgaacttcctgctgaccgccaagctgttcttcctc

SEQ ID NO: 34656 - DNA, 1902 bp, synthetic construct
  source 1..1902: mol_type = other DNA
atggccttaccagtgaccgccttgctcctgccgctggccttgctgctccacgccgccaggccggacttcgtgatgacacagagccctgatagcctggccgtgtctctcggcgagcgagtgaccatgagctgcaagtctagccagagcctgctgaacagcggcaaccagaagaactacctgacctggtatcagcagaagcccggccagcctcctaagctgctgatctactgggccagcaccagagaaagcggcgtgcccgatagattttctggctctggcagcggcaccgacttcaccctgacaatttctagcctgcaagccgaggacgtggccgtgtactactgccagaacgactacagctacccctacaccttcggccagggcaccaagctggaaatcaaactcgagagccagcctcacaccaagcccagcgtgttcgtgatgaagaacggcaccaacgtggcctgcctcgtgaaagagttctaccccaaggacatcaggatcaacctggtgtccagcaagaagatcaccgagttcgaccccgccatcgtgatctcccccagcggcaagtacaacgccgtgaagctggggaagtacgaggacagcaacagcgtgacctgctccgtgcagcacgacaacaagaccgtgcacagcaccgactttgaagtgaaaaccgactccaccgaccacgtgaagcccaaagagacagagaacaccaagcagcccagcaagagctgccacaagcccaaggccatcgtgcacaccgagaaagtgaacatgatgagcctgaccgtgctgggcctgcggatgctgttcgccaaaaccgtggccgtgaacttcctgctgaccgccaagctgttcttcctcagggccaagcgatctggatctggagcaacaaacttctcactactcaaacaagcaggtgacgtggaggagaatcccgggcctactagtatggactggatttggcgcatccttttccttgtcggcgctgctaccggcgcgcattccttcgaagaagtgcaactggttcagagcggagccgagctgaagaaacctggggccagcgtgaaggtgtcctgtaaagccagcggctacacctttaccgactactacatgaaatgggtccgacaggccccaggccagggactcgaatggatcggcgatattatccccagcaacggggccaccttctacaaccagaaattcaagggccgcgtgaccatcaccgtggacaagagcacaagcaccgcctacatggaactgagcagcctgagaagcgaggacaccgccgtgtattattgcgccagaagccatctgctgcgggccagttggttcgcctattggggacagggaaccctggtcaccgttagctctacgcgtgacaagcagctggacgccgacgtgtcccccaagcctaccatcttcctgccctctatcgccgagacaaagctccagaaggccggcacctacctgtgcctgctggaaaagttcttcccagatgtgattaagatccactggcaggaaaagaagtccaacaccatcctgggcagccaggaaggcaacaccatgaagaccaacgacacctacatgaagttcagctggctgaccgtgcccgagaagtccctggacaaagaacacagatgcatcgtgcggcacgaaaacaacaagaacggcgtggaccaggaaatcatcttcccacccatcaagaccgatgtgattacaatggaccccaaggacaactgctccaaggacgccaacgataccctgctgctccagctgaccaacaccagcgcctactacatgtacttgttgctgctgctgaagtccgtggtgtacttcgccatcatcacatgctgcctgctgcggagaaccgccttctgctgcaacggcgagaagtct

SEQ ID NO: 34657 - DNA, 1947 bp, synthetic construct
  source 1..1947: mol_type = other DNA
atggccttaccagtgaccgccttgctcctgccgctggccttgctgctccacgccgccaggccgctcgaggacaagcagctggacgccgacgtgtcccccaagcctaccatcttcctgccctctatcgccgagacaaagctccagaaggccggcacctacctgtgcctgctggaaaagttcttcccagatgtgattaagatccactggcaggaaaagaagtccaacaccatcctgggcagccaggaaggcaacaccatgaagaccaacgacacctacatgaagttcagctggctgaccgtgcccgagaagtccctggacaaagaacacagatgcatcgtgcggcacgaaaacaacaagaacggcgtggaccaggaaatcatcttcccacccatcaagaccgatgtgattacaatggaccccaaggacaactgctccaaggacgccaacgataccctgctgctccagctgaccaacaccagcgcctactacatgtacttgttgctgctgctgaagtccgtggtgtacttcgccatcatcacatgctgcctgctgcggagaaccgccttctgctgcaacggcgagaagtctagggccaagcgatctggatctggagcaacaaacttctcactactcaaacaagcaggtgacgtggaggagaatcccgggcctactagcatggccttaccagtgaccgccttgctcctgccgctggccttgctgctccacgccgccaggccggacttcgtgatgacacagagccctgatagcctggccgtgtctctcggcgagcgagtgaccatgagctgcaagtctagccagagcctgctgaacagcggcaaccagaagaactacctgacctggtatcagcagaagcccggccagcctcctaagctgctgatctactgggccagcaccagagaaagcggcgtgcccgatagattttctggctctggcagcggcaccgacttcaccctgacaatttctagcctgcaagccgaggacgtggccgtgtactactgccagaacgactacagctacccctacaccttcggccagggcaccaagctggaaatcaaaggcggaggcggaagtggaggcggaggatctggcggcggaggctctgaagtgcaactggttcagagcggagccgagctgaagaaacctggggccagcgtgaaggtgtcctgtaaagccagcggctacacctttaccgactactacatgaaatgggtccgacaggccccaggccagggactcgaatggatcggcgatattatccccagcaacggggccaccttctacaaccagaaattcaagggccgcgtgaccatcaccgtggacaagagcacaagcaccgcctacatggaactgagcagcctgagaagcgaggacaccgccgtgtattattgcgccagaagccatctgctgcgggccagttggttcgcctattggggacagggaaccctggtcaccgttagctctacgcgtagccagcctcacaccaagcccagcgtgttcgtgatgaagaacggcaccaacgtggcctgcctcgtgaaagagttctaccccaaggacatcaggatcaacctggtgtccagcaagaagatcaccgagttcgaccccgccatcgtgatctcccccagcggcaagtacaacgccgtgaagctggggaagtacgaggacagcaacagcgtgacctgctccgtgcagcacgacaacaagaccgtgcacagcaccgactttgaagtgaaaaccgactccaccgaccacgtgaagcccaaagagacagagaacaccaagcagcccagcaagagctgccacaagcccaaggccatcgtgcacaccgagaaagtgaacatgatgagcctgaccgtgctgggcctgcggatgctgttcgccaaaaccgtggccgtgaacttcctgctgaccgccaagctgttcttcctc

SEQ ID NO: 34658 - DNA, 2409 bp, synthetic construct
  source 1..2409: mol_type = other DNA
atggccttaccagtgaccgccttgctcctgccgctggccttgctgctccacgccgccaggccggacttcgtgatgacacagagccctgatagcctggccgtgtctctcggcgagcgagtgaccatgagctgcaagtctagccagagcctgctgaacagcggcaaccagaagaactacctgacctggtatcagcagaagcccggccagcctcctaagctgctgatctactgggccagcaccagagaaagcggcgtgcccgatagattttctggctctggcagcggcaccgacttcaccctgacaatttctagcctgcaagccgaggacgtggccgtgtactactgccagaacgactacagctacccctacaccttcggccagggcaccaagctggaaatcaaaggacagcctaaggccaatcctaccgtgacactgttccctccaagcagcgaagaactccaggccaacaaggccacacttgtgtgcctgatctccgacttctaccctggggctgtgacagtggcttggaaggccgatggatctcctgtgaaagccggcgtggaaaccaccaagccatccaagcagagcaacaacaaatacgccgccagctcctacctgagcctgacacctgagcagtggaagtcccacagatcctacagctgccaagtgacccacgaaggcagcaccgtggaaaagacagtggcccctacagagtgcagcggatcccagagcttcggcctgctggaccccaagctgtgctacctgctggatggcatcctgttcatctacggcgtgatcctgaccgccctgttcctgagagtgaagttcagcagaagcgccgacgcccctgcctaccagcagggacagaaccaactgtacaacgagctgaacctgggcagacgggaagagtacgacgtgctggacaagcggagaggcagggaccctgagatgggcggaaagccccagcggagaaagaacccccaggaaggactgtataacgaactccagaaagacaagatggccgaagcctacagcgagatcggcatgaagggcgagcggagaagaggcaagggccacgatggcctgtaccagggcctgagcaccgccaccaaggacacctatgacgccctgcacatgcaggccctgcctccaagaagggccaagcgatctggatctggagcaacaaacttctcactactcaaacaagcaggtgacgtggaggagaatcccgggcctactagtatggactggatttggcgcatccttttccttgtcggcgctgctaccggcgcgcattccttcgaagaagtgcaactggttcagagcggagccgagctgaagaaacctggggccagcgtgaaggtgtcctgtaaagccagcggctacacctttaccgactactacatgaaatgggtccgacaggccccaggccagggactcgaatggatcggcgatattatccccagcaacggggccaccttctacaaccagaaattcaagggccgcgtgaccatcaccgtggacaagagcacaagcaccgcctacatggaactgagcagcctgagaagcgaggacaccgccgtgtattattgcgccagaagccatctgctgcgggccagttggttcgcctattggggacagggaaccctggtcaccgttagctctgcctctacaaagggaccctccgtgtttcctctggctcccagcagcaagtctacaagcggaggaacagccgctctgggctgcctggtcaaggattactttcccgagcctgtgaccgtgtcctggaatagcggagcactgacaagcggcgtgcacacctttccagccgtgctgcaaagcagcggcctgtactctctgagcagcgtggtcacagtgcctagctctagcctgggcacccagacctacatctgcaatgtgaaccacaagcctagcaacaccaaggtggacaagagagtggaacccaagagctgtggtacccagagttttgggttgttggaccctaaattgtgctatctgttggacggaatcctgttcatttacggagtgatcctgaccgcattgttcctgcgggttaagttttccagatccgcagacgcacccgcttaccaacaagggcagaaccaactctacaatgaacttaatttggggcggagggaagagtacgacgttctggacaaaaggaggggacgagatcccgagatgggcggaaagcctcagcgaaggaagaatccgcaagaggggctttataacgaactccagaaagataaaatggcagaagcctatagtgagattgggatgaagggagaaaggaggaggggtaaaggtcacgatgggttgtaccaaggattgagcacagccactaaagatacctatgatgcgctccacatgcaggccctgccgccaaga

SEQ ID NO: 34659 - DNA, 2466 bp, synthetic construct
  source 1..2466: mol_type = other DNA
atggccttaccagtgaccgccttgctcctgccgctggccttgctgctccacgccgccaggccggacttcgtgatgacacagagccctgatagcctggccgtgtctctcggcgagcgagtgaccatgagctgcaagtctagccagagcctgctgaacagcggcaaccagaagaactacctgacctggtatcagcagaagcccggccagcctcctaagctgctgatctactgggccagcaccagagaaagcggcgtgcccgatagattttctggctctggcagcggcaccgacttcaccctgacaatttctagcctgcaagccgaggacgtggccgtgtactactgccagaacgactacagctacccctacaccttcggccagggcaccaagctggaaatcaaactcgaggacctgaagaacgtgttcccacctgaggtggccgtgttcgagcctagcgaggccgagatcagccacacccagaaagccaccctcgtgtgcctggctaccggcttctaccccgaccatgtggaactgtcttggtgggtcaacggcaaagaggtgcacagcggcgtgtctaccgacccccagccactgaaagaacagcccgccctgaacgacagccggtactgcctgagcagcagactgagagtgtccgccaccttctggcagaacccccggaaccacttcagatgccaggtgcagttctacggcctgagcgagaacgacgagtggacccaggacagagccaagcccgtgacccagatcgtgtctgccgaagcctggggcagagccgattgcggatcccagagcttcggcctgctggaccccaagctgtgctacctgctggatggcatcctgttcatctacggcgtgatcctgaccgccctgttcctgagagtgaagttcagcagaagcgccgacgcccctgcctaccagcagggacagaaccaactgtacaacgagctgaacctgggcagacgggaagagtacgacgtgctggacaagcggagaggcagggaccctgagatgggcggaaagccccagcggagaaagaacccccaggaaggactgtataacgaactccagaaagacaagatggccgaagcctacagcgagatcggcatgaagggcgagcggagaagaggcaagggccacgatggcctgtaccagggcctgagcaccgccaccaaggacacctatgacgccctgcacatgcaggccctgcctccaagaagggccaagcgatctggatctggagcaacaaacttctcactactcaaacaagcaggtgacgtggaggagaatcccgggcctactagtatggactggatttggcgcatccttttccttgtcggcgctgctaccggcgcgcattccttcgaagaagtgcaactggttcagagcggagccgagctgaagaaacctggggccagcgtgaaggtgtcctgtaaagccagcggctacacctttaccgactactacatgaaatgggtccgacaggccccaggccagggactcgaatggatcggcgatattatccccagcaacggggccaccttctacaaccagaaattcaagggccgcgtgaccatcaccgtggacaagagcacaagcaccgcctacatggaactgagcagcctgagaagcgaggacaccgccgtgtattattgcgccagaagccatctgctgcgggccagttggttcgcctattggggacagggaaccctggtcaccgttagctctacgcgtatccagaaccctgatcctgccgtgtaccagctgcgggatagcaagagcagcgacaagagcgtgtgtctgttcaccgacttcgacagccagaccaacgtgtcccagagcaaggactccgacgtgtacatcaccgataagaccgtgctggacatgcggagcatggacttcaagagcaactccgccgtggcctggtccaacaagtccgatttcgcctgcgccaacgccttcaacaacagcattatccccgaggacacattcttcccaagccccgagagcagctgcggtacccagagttttgggttgttggaccctaaattgtgctatctgttggacggaatcctgttcatttacggagtgatcctgaccgcattgttcctgcgggttaagttttccagatccgcagacgcacccgcttaccaacaagggcagaaccaactctacaatgaacttaatttggggcggagggaagagtacgacgttctggacaaaaggaggggacgagatcccgagatgggcggaaagcctcagcgaaggaagaatccgcaagaggggctttataacgaactccagaaagataaaatggcagaagcctatagtgagattgggatgaagggagaaaggaggaggggtaaaggtcacgatgggttgtaccaaggattgagcacagccactaaagatacctatgatgcgctccacatgcaggccctgccgccaaga

SEQ ID NO: 34660 - DNA, 2592 bp, synthetic construct
  source 1..2592: mol_type = other DNA
atggccttaccagtgaccgccttgctcctgccgctggccttgctgctccacgccgccaggccggacttcgtgatgacacagagccctgatagcctggccgtgtctctcggcgagcgagtgaccatgagctgcaagtctagccagagcctgctgaacagcggcaaccagaagaactacctgacctggtatcagcagaagcccggccagcctcctaagctgctgatctactgggccagcaccagagaaagcggcgtgcccgatagattttctggctctggcagcggcaccgacttcaccctgacaatttctagcctgcaagccgaggacgtggccgtgtactactgccagaacgactacagctacccctacaccttcggccagggcaccaagctggaaatcaaactcgaggaggacctgaagaacgtgttcccacctgaggtggccgtgttcgagcctagcgaggccgagatcagccacacccagaaagccaccctcgtgtgcctggctaccggcttctaccccgaccatgtggaactgtcttggtgggtcaacggcaaagaggtgcacagcggcgtgtctaccgacccccagccactgaaagaacagcccgccctgaacgacagccggtactgcctgagcagcagactgagagtgtccgccaccttctggcagaacccccggaaccacttcagatgccaggtgcagttctacggcctgagcgagaacgacgagtggacccaggacagagccaagcccgtgacccagatcgtgtctgccgaagcctggggcagagccgattgcggatcccagagcttcggcctgctggaccccaagctgtgctacctgctggatggcatcctgttcatctacggcgtgatcctgaccgccctgttcctgagagtgaagttcagcagaagcgccgacgcccctgcctaccagcagggacagaaccaactgtacaacgagctgaacctgggcagacgggaagagtacgacgtgctggacaagcggagaggcagggaccctgagatgggcggaaagccccagcggagaaagaacccccaggaaggactgtataacgaactccagaaagacaagatggccgaagcctacagcgagatcggcatgaagggcgagcggagaagaggcaagggccacgatggcctgtaccagggcctgagcaccgccaccaaggacacctatgacgccctgcacatgcaggccctgcctccaagaagggccaagcgatctggatctggagcaacaaacttctcactactcaaacaagcaggtgacgtggaggagaatcccgggcctactagtatggactggatttggcgcatccttttccttgtcggcgctgctaccggcgcgcattccttcgaagaagtgcaactggttcagagcggagccgagctgaagaaacctggggccagcgtgaaggtgtcctgtaaagccagcggctacacctttaccgactactacatgaaatgggtccgacaggccccaggccagggactcgaatggatcggcgatattatccccagcaacggggccaccttctacaaccagaaattcaagggccgcgtgaccatcaccgtggacaagagcacaagcaccgcctacatggaactgagcagcctgagaagcgaggacaccgccgtgtattattgcgccagaagccatctgctgcgggccagttggttcgcctattggggacagggaaccctggtcaccgttagctctacgcgtatccagaaccctgatcctgccgtgtaccagctgcgggatagcaagagcagcgacaagagcgtgtgtctgttcaccgacttcgacagccagaccaacgtgtcccagagcaaggactccgacgtgtacatcaccgataagaccgtgctggacatgcggagcatggacttcaagagcaactccgccgtggcctggtccaacaagtccgatttcgcctgcgccaacgccttcaacaacagcattatccccgaggacacattcttcccaagccccgagagcagctgcggtacccagagttttgggttgttggaccctaaattgtgctatctgttggacggaatcctgttcatttacggagtgatcctgaccgcattgttcctgaggagcaagcggtcacggctgctccacagcgattacatgaatatgacaccacgaagaccgggtcctactcgcaaacactaccaaccctacgcacctccccgcgactttgcagcgtaccgatctcgggttaagttttccagatccgcagacgcacccgcttaccaacaagggcagaaccaactctacaatgaacttaatttggggcggagggaagagtacgacgttctggacaaaaggaggggacgagatcccgagatgggcggaaagcctcagcgaaggaagaatccgcaagaggggctttataacgaactccagaaagataaaatggcagaagcctatagtgagattgggatgaagggagaaaggaggaggggtaaaggtcacgatgggttgtaccaaggattgagcacagccactaaagatacctatgatgcgctccacatgcaggccctgccgccaaga

SEQ ID NO: 34661 - DNA, 2721 bp, synthetic construct
  source 1..2721: mol_type = other DNA
atggccttaccagtgaccgccttgctcctgccgctggccttgctgctccacgccgccaggccggacttcgtgatgacacagagccctgatagcctggccgtgtctctcggcgagcgagtgaccatgagctgcaagtctagccagagcctgctgaacagcggcaaccagaagaactacctgacctggtatcagcagaagcccggccagcctcctaagctgctgatctactgggccagcaccagagaaagcggcgtgcccgatagattttctggctctggcagcggcaccgacttcaccctgacaatttctagcctgcaagccgaggacgtggccgtgtactactgccagaacgactacagctacccctacaccttcggccagggcaccaagctggaaatcaaactcgaggaggacctgaagaacgtgttcccacctgaggtggccgtgttcgagcctagcgaggccgagatcagccacacccagaaagccaccctcgtgtgcctggctaccggcttctaccccgaccatgtggaactgtcttggtgggtcaacggcaaagaggtgcacagcggcgtgtctaccgacccccagccactgaaagaacagcccgccctgaacgacagccggtactgcctgagcagcagactgagagtgtccgccaccttctggcagaacccccggaaccacttcagatgccaggtgcagttctacggcctgagcgagaacgacgagtggacccaggacagagccaagcccgtgacccagatcgtgtctgccgaagcctggggcagagccgattgcggatcccagagcttcggcctgctggaccccaagctgtgctacctgctggatggcatcctgttcatctacggcgtgatcctgaccgccctgttcctgaaacggggcagaaagaaactcctgtatatattcaaacaaccatttatgagaccagtacaaactactcaagaggaagatggctgtagctgccgatttccagaagaagaagaaggaggatgtgaactgagagtgaagttcagcagaagcgccgacgcccctgcctaccagcagggacagaaccaactgtacaacgagctgaacctgggcagacgggaagagtacgacgtgctggacaagcggagaggcagggaccctgagatgggcggaaagccccagcggagaaagaacccccaggaaggactgtataacgaactccagaaagacaagatggccgaagcctacagcgagatcggcatgaagggcgagcggagaagaggcaagggccacgatggcctgtaccagggcctgagcaccgccaccaaggacacctatgacgccctgcacatgcaggccctgcctccaagaagggccaagcgatctggatctggagcaacaaacttctcactactcaaacaagcaggtgacgtggaggagaatcccgggcctactagtatggactggatttggcgcatccttttccttgtcggcgctgctaccggcgcgcattccttcgaagaagtgcaactggttcagagcggagccgagctgaagaaacctggggccagcgtgaaggtgtcctgtaaagccagcggctacacctttaccgactactacatgaaatgggtccgacaggccccaggccagggactcgaatggatcggcgatattatccccagcaacggggccaccttctacaaccagaaattcaagggccgcgtgaccatcaccgtggacaagagcacaagcaccgcctacatggaactgagcagcctgagaagcgaggacaccgccgtgtattattgcgccagaagccatctgctgcgggccagttggttcgcctattggggacagggaaccctggtcaccgttagctctacgcgtatccagaaccctgatcctgccgtgtaccagctgcgggatagcaagagcagcgacaagagcgtgtgtctgttcaccgacttcgacagccagaccaacgtgtcccagagcaaggactccgacgtgtacatcaccgataagaccgtgctggacatgcggagcatggacttcaagagcaactccgccgtggcctggtccaacaagtccgatttcgcctgcgccaacgccttcaacaacagcattatccccgaggacacattcttcccaagccccgagagcagctgcggtacccagagttttgggttgttggaccctaaattgtgctatctgttggacggaatcctgttcatttacggagtgatcctgaccgcattgttcctgaagagaggccggaagaagctgctgtacatcttcaagcagcctttcatgcggcccgtgcagaccacccaggaagaggacggctgctcctgccggttccccgaggaagaagaaggcggctgcgagctgcgggttaagttttccagatccgcagacgcacccgcttaccaacaagggcagaaccaactctacaatgaacttaatttggggcggagggaagagtacgacgttctggacaaaaggaggggacgagatcccgagatgggcggaaagcctcagcgaaggaagaatccgcaagaggggctttataacgaactccagaaagataaaatggcagaagcctatagtgagattgggatgaagggagaaaggaggaggggtaaaggtcacgatgggttgtaccaaggattgagcacagccactaaagatacctatgatgcgctccacatgcaggccctgccgccaaga

SEQ ID NO: 34662 - DNA, 1782 bp, synthetic construct
  source 1..1782: mol_type = other DNA
atggccttaccagtgaccgccttgctcctgccgctggccttgctgctccacgccgccaggccggacttcgtgatgacacagagccctgatagcctggccgtgtctctcggcgagcgagtgaccatgagctgcaagtctagccagagcctgctgaacagcggcaaccagaagaactacctgacctggtatcagcagaagcccggccagcctcctaagctgctgatctactgggccagcaccagagaaagcggcgtgcccgatagattttctggctctggcagcggcaccgacttcaccctgacaatttctagcctgcaagccgaggacgtggccgtgtactactgccagaacgactacagctacccctacaccttcggccagggcaccaagctggaaatcaaactcgagcagagcttcggcctgctggaccccaagctgtgctacctgctggatggcatcctgttcatctacggcgtgatcctgaccgccctgttcctgagagtgaagttcagcagaagcgccgacgcccctgcctaccagcagggacagaaccaactgtacaacgagctgaacctgggcagacgggaagagtacgacgtgctggacaagcggagaggcagggaccctgagatgggcggaaagccccagcggagaaagaacccccaggaaggactgtataacgaactccagaaagacaagatggccgaagcctacagcgagatcggcatgaagggcgagcggagaagaggcaagggccacgatggcctgtaccagggcctgagcaccgccaccaaggacacctatgacgccctgcacatgcaggccctgcctccaagaagggccaagcgatctggatctggagcaacaaacttctcactactcaaacaagcaggtgacgtggaggagaatcccgggcctactagtatggactggatttggcgcatccttttccttgtcggcgctgctaccggcgcgcattccttcgaagaagtgcaactggttcagagcggagccgagctgaagaaacctggggccagcgtgaaggtgtcctgtaaagccagcggctacacctttaccgactactacatgaaatgggtccgacaggccccaggccagggactcgaatggatcggcgatattatccccagcaacggggccaccttctacaaccagaaattcaagggccgcgtgaccatcaccgtggacaagagcacaagcaccgcctacatggaactgagcagcctgagaagcgaggacaccgccgtgtattattgcgccagaagccatctgctgcgggccagttggttcgcctattggggacagggaaccctggtcaccgttagctctacgcgtcagagttttgggttgttggaccctaaattgtgctatctgttggacggaatcctgttcatttacggagtgatcctgaccgcattgttcctgcgggttaagttttccagatccgcagacgcacccgcttaccaacaagggcagaaccaactctacaatgaacttaatttggggcggagggaagagtacgacgttctggacaaaaggaggggacgagatcccgagatgggcggaaagcctcagcgaaggaagaatccgcaagaggggctttataacgaactccagaaagataaaatggcagaagcctatagtgagattgggatgaagggagaaaggaggaggggtaaaggtcacgatgggttgtaccaaggattgagcacagccactaaagatacctatgatgcgctccacatgcaggccctgccgccaaga

SEQ ID NO: 34663 - DNA, 1956 bp, synthetic construct
  source 1..1956: mol_type = other DNA
atggccttaccagtgaccgccttgctcctgccgctggccttgctgctccacgccgccaggccggacttcgtgatgacacagagccctgatagcctggccgtgtctctcggcgagcgagtgaccatgagctgcaagtctagccagagcctgctgaacagcggcaaccagaagaactacctgacctggtatcagcagaagcccggccagcctcctaagctgctgatctactgggccagcaccagagaaagcggcgtgcccgatagattttctggctctggcagcggcaccgacttcaccctgacaatttctagcctgcaagccgaggacgtggccgtgtactactgccagaacgactacagctacccctacaccttcggccagggcaccaagctggaaatcaaactcgagggacagcctaaggccaatcctaccgtgacactgttccctccaagcagcgaagaactccaggccaacaaggccacacttgtgtgcctgatctccgacttctaccctggggctgtgacagtggcttggaaggccgatggatctcctgtgaaagccggcgtggaaaccaccaagccatccaagcagagcaacaacaaatacgccgccagctcctacctgagcctgacacctgagcagtggaagtcccacagatcctacagctgccaagtgacccacgaaggcagcaccgtggaaaagacagtggcccctacagagtgcagccccatcaagaccgatgtgattacaatggaccccaaggacaactgctccaaggacgccaacgataccctgctgctccagctgaccaacaccagcgcctactacatgtacttgttgctgctgctgaagtccgtggtgtacttcgccatcatcacatgctgcctgctgcggagaaccgccttctgctgcaacggcgagaagtctagggccaagcgatctggatctggagcaacaaacttctcactactcaaacaagcaggtgacgtggaggagaatcccgggcctactagtatggactggatttggcgcatccttttccttgtcggcgctgctaccggcgcgcattccttcgaagaagtgcaactggttcagagcggagccgagctgaagaaacctggggccagcgtgaaggtgtcctgtaaagccagcggctacacctttaccgactactacatgaaatgggtccgacaggccccaggccagggactcgaatggatcggcgatattatccccagcaacggggccaccttctacaaccagaaattcaagggccgcgtgaccatcaccgtggacaagagcacaagcaccgcctacatggaactgagcagcctgagaagcgaggacaccgccgtgtattattgcgccagaagccatctgctgcgggccagttggttcgcctattggggacagggaaccctggtcaccgttagctctacgcgtgcctctacaaagggaccctccgtgtttcctctggctcccagcagcaagtctacaagcggaggaacagccgctctgggctgcctggtcaaggattactttcccgagcctgtgaccgtgtcctggaatagcggagcactgacaagcggcgtgcacacctttccagccgtgctgcaaagcagcggcctgtactctctgagcagcgtggtcacagtgcctagctctagcctgggcacccagacctacatctgcaatgtgaaccacaagcctagcaacaccaaggtggacaagagagtggaacccaagagctgtgaagtgaaaaccgactccaccgaccacgtgaagcccaaagagacagagaacaccaagcagcccagcaagagctgccacaagcccaaggccatcgtgcacaccgagaaagtgaacatgatgagcctgaccgtgctgggcctgcggatgctgttcgccaaaaccgtggccgtgaacttcctgctgaccgccaagctgttcttcctc

SEQ ID NO: 34664 - DNA, 1890 bp, synthetic construct
  source 1..1890: mol_type = other DNA
atggccttaccagtgaccgccttgctcctgccgctggccttgctgctccacgccgccaggccggacttcgtgatgacacagagccctgatagcctggccgtgtctctcggcgagcgagtgaccatgagctgcaagtctagccagagcctgctgaacagcggcaaccagaagaactacctgacctggtatcagcagaagcccggccagcctcctaagctgctgatctactgggccagcaccagagaaagcggcgtgcccgatagattttctggctctggcagcggcaccgacttcaccctgacaatttctagcctgcaagccgaggacgtggccgtgtactactgccagaacgactacagctacccctacaccttcggccagggcaccaagctggaaatcaaactcgagggacagcctaaggccaatcctaccgtgacactgttccctccaagcagcgaagaactccaggccaacaaggccacacttgtgtgcctgatctccgacttctaccctggggctgtgacagtggcttggaaggccgatggatctcctgtgaaagccggcgtggaaaccaccaagccatccaagcagagcaacaacaaatacgccgccagctcctacctgagcctgacacctgagcagtggaagtcccacagatcctacagctgccaagtgacccacgaaggcagcaccgtggaaaagacagtggcccctacagagtgcagcggcagagccgattgcggcatcaccagcgccagctaccaccagggcgtgctgagcgccaccatcctgtacgagatcctgctgggcaaggccaccctgtacgccgtgctggtgtctgccctggtgctgatggctatggtcaagcggaaggacagccggggaagggccaagcgatctggatctggagcaacaaacttctcactactcaaacaagcaggtgacgtggaggagaatcccgggcctactagtatggactggatttggcgcatccttttccttgtcggcgctgctaccggcgcgcattccttcgaagaagtgcaactggttcagagcggagccgagctgaagaaacctggggccagcgtgaaggtgtcctgtaaagccagcggctacacctttaccgactactacatgaaatgggtccgacaggccccaggccagggactcgaatggatcggcgatattatccccagcaacggggccaccttctacaaccagaaattcaagggccgcgtgaccatcaccgtggacaagagcacaagcaccgcctacatggaactgagcagcctgagaagcgaggacaccgccgtgtattattgcgccagaagccatctgctgcgggccagttggttcgcctattggggacagggaaccctggtcaccgttagctctacgcgtgcctctacaaagggaccctccgtgtttcctctggctcccagcagcaagtctacaagcggaggaacagccgctctgggctgcctggtcaaggattactttcccgagcctgtgaccgtgtcctggaatagcggagcactgacaagcggcgtgcacacctttccagccgtgctgcaaagcagcggcctgtactctctgagcagcgtggtcacagtgcctagctctagcctgggcacccagacctacatctgcaatgtgaaccacaagcctagcaacaccaaggtggacaagagagtggaacccaagagctgtatccccgaggacacattcttcccaagcagcgacgtgccctgcgacgtgaagctggtggaaaagagcttcgagacagacaccaacctgaacttccagaacctgagcgtgatcggcttcagaatcctgctgctgaaagtggccggctttaacctgctgatgaccctgcggctgtggtccagc

SEQ ID NO: 34665 - DNA, 1890 bp, synthetic construct
  source 1..1890: mol_type = other DNA
atggccttaccagtgaccgccttgctcctgccgctggccttgctgctccacgccgccaggccggacttcgtgatgacacagagccctgatagcctggccgtgtctctcggcgagcgagtgaccatgagctgcaagtctagccagagcctgctgaacagcggcaaccagaagaactacctgacctggtatcagcagaagcccggccagcctcctaagctgctgatctactgggccagcaccagagaaagcggcgtgcccgatagattttctggctctggcagcggcaccgacttcaccctgacaatttctagcctgcaagccgaggacgtggccgtgtactactgccagaacgactacagctacccctacaccttcggccagggcaccaagctggaaatcaaactcgagggacagcctaaggccaatcctaccgtgacactgttccctccaagcagcgaagaactccaggccaacaaggccacacttgtgtgcctgatctccgacttctaccctggggctgtgacagtggcttggaaggccgatggatctcctgtgaaagccggcgtggaaaccaccaagccatccaagcagagcaacaacaaatacgccgccagctcctacctgagcctgacacctgagcagtggaagtcccacagatcctacagctgccaagtgacccacgaaggcagcaccgtggaaaagacagtggcccctacagagtgcagcggcagagccgattgcggctttaccagcgagagctaccagcagggcgtgctgagcgccaccatcctgtacgagatcctgctgggcaaggccaccctgtacgccgtgctggtgtctgccctggtgctgatggctatggtcaagcggaaggacagccggggaagggccaagcgatctggatctggagcaacaaacttctcactactcaaacaagcaggtgacgtggaggagaatcccgggcctactagtatggactggatttggcgcatccttttccttgtcggcgctgctaccggcgcgcattccttcgaagaagtgcaactggttcagagcggagccgagctgaagaaacctggggccagcgtgaaggtgtcctgtaaagccagcggctacacctttaccgactactacatgaaatgggtccgacaggccccaggccagggactcgaatggatcggcgatattatccccagcaacggggccaccttctacaaccagaaattcaagggccgcgtgaccatcaccgtggacaagagcacaagcaccgcctacatggaactgagcagcctgagaagcgaggacaccgccgtgtattattgcgccagaagccatctgctgcgggccagttggttcgcctattggggacagggaaccctggtcaccgttagctctacgcgtgcctctacaaagggaccctccgtgtttcctctggctcccagcagcaagtctacaagcggaggaacagccgctctgggctgcctggtcaaggattactttcccgagcctgtgaccgtgtcctggaatagcggagcactgacaagcggcgtgcacacctttccagccgtgctgcaaagcagcggcctgtactctctgagcagcgtggtcacagtgcctagctctagcctgggcacccagacctacatctgcaatgtgaaccacaagcctagcaacaccaaggtggacaagagagtggaacccaagagctgtatccccgaggacacattcttcccaagccccgagagcagctgcgacgtgaagctggtggaaaagagcttcgagacagacaccaacctgaacttccagaacctgagcgtgatcggcttcagaatcctgctgctgaaagtggccggctttaacctgctgatgaccctgcggctgtggtccagc

SEQ ID NO: 34666 - DNA, 1368 bp, synthetic construct
  source 1..1368: mol_type = other DNA
atggccttaccagtgaccgccttgctcctgccgctggccttgctgctccacgccgccaggccggacttcgtgatgacacagagccctgatagcctggccgtgtctctcggcgagcgagtgaccatgagctgcaagtctagccagagcctgctgaacagcggcaaccagaagaactacctgacctggtatcagcagaagcccggccagcctcctaagctgctgatctactgggccagcaccagagaaagcggcgtgcccgatagattttctggctctggcagcggcaccgacttcaccctgacaatttctagcctgcaagccgaggacgtggccgtgtactactgccagaacgactacagctacccctacaccttcggccagggcaccaagctggaaatcaaaggcggaggcggaagtggaggcggaggatctggcggcggaggctctgaagtgcaactggttcagagcggagccgagctgaagaaacctggggccagcgtgaaggtgtcctgtaaagccagcggctacacctttaccgactactacatgaaatgggtccgacaggccccaggccagggactcgaatggatcggcgatattatccccagcaacggggccaccttctacaaccagaaattcaagggccgcgtgaccatcaccgtggacaagagcacaagcaccgcctacatggaactgagcagcctgagaagcgaggacaccgccgtgtattattgcgccagaagccatctgctgcgggccagttggttcgcctattggggacagggaaccctggtcaccgttagctctacgcgtgacggtaacgaggagatgggaggaatcactcaaaccccttacaaagtctcaatttcaggaacaactgttatccttacatgtccccagtatcctggcagcgagatcctttggcagcataacgacaagaatatagggggagatgaagacgataagaatatcggatctgacgaggatcacttgagcctgaaagagttctccgagcttgaacaaagcggatattatgtgtgctatccgcgcgggtcaaagccggaagacgctaacttttacctttatctccgagccagagtgtgcgaaaattgcatggaaatggacgttatgtccgttgctacaatagttatcgtagatatatgcatcacgggtggactgcttctgctggtttattattggtccaagaatagaaaggccaaagctaaacccgtgaccagaggcgctggcgcaggcggaaggcaaaggggacaaaacaaagaacggccaccaccagtgccaaatccagattatgagcctattcggaaaggacagagggacctgtactctggcctgaatcagagaagaatc

SEQ ID NO: 34667 - DNA, 1263 bp, synthetic construct
  source 1..1263: mol_type = other DNA
atggccttaccagtgaccgccttgctcctgccgctggccttgctgctccacgccgccaggccggacttcgtgatgacacagagccctgatagcctggccgtgtctctcggcgagcgagtgaccatgagctgcaagtctagccagagcctgctgaacagcggcaaccagaagaactacctgacctggtatcagcagaagcccggccagcctcctaagctgctgatctactgggccagcaccagagaaagcggcgtgcccgatagattttctggctctggcagcggcaccgacttcaccctgacaatttctagcctgcaagccgaggacgtggccgtgtactactgccagaacgactacagctacccctacaccttcggccagggcaccaagctggaaatcaaaggcggaggcggaagtggaggcggaggatctggcggcggaggctctgaagtgcaactggttcagagcggagccgagctgaagaaacctggggccagcgtgaaggtgtcctgtaaagccagcggctacacctttaccgactactacatgaaatgggtccgacaggccccaggccagggactcgaatggatcggcgatattatccccagcaacggggccaccttctacaaccagaaattcaagggccgcgtgaccatcaccgtggacaagagcacaagcaccgcctacatggaactgagcagcctgagaagcgaggacaccgccgtgtattattgcgccagaagccatctgctgcgggccagttggttcgcctattggggacagggaaccctggtcaccgttagctctacgcgtttcaagatccccatcgaggaactggaagatcgggtgttcgtgaactgcaacacctctatcacctgggtggaaggcaccgtgggaacactgctgagcgacatcaccagactggacctcggcaagcggattctggaccctcggggcatctacagatgcaacggcaccgacatctacaaggacaaagaaagcaccgtgcaggtccactacagaatgtgccagtcctgcgtggaactggaccctgctacagtggccggcatcatcgtgaccgatgtgatcgctactctgctgctggctctgggagtgttctgcttcgccggacacgaaacaggcagactgtctggcgctgccgatacacaggccctgctgagaaacgaccaagtgtatcagcccctgcgcgacagagatgatgcccagtattctcacctcggcggcaactgggctagaaacaag

SEQ ID NO: 34668 - DNA, 1293 bp, synthetic construct
  source 1..1293: mol_type = other DNA
atggccttaccagtgaccgccttgctcctgccgctggccttgctgctccacgccgccaggccggacttcgtgatgacacagagccctgatagcctggccgtgtctctcggcgagcgagtgaccatgagctgcaagtctagccagagcctgctgaacagcggcaaccagaagaactacctgacctggtatcagcagaagcccggccagcctcctaagctgctgatctactgggccagcaccagagaaagcggcgtgcccgatagattttctggctctggcagcggcaccgacttcaccctgacaatttctagcctgcaagccgaggacgtggccgtgtactactgccagaacgactacagctacccctacaccttcggccagggcaccaagctggaaatcaaaggcggaggcggaagtggaggcggaggatctggcggcggaggctctgaagtgcaactggttcagagcggagccgagctgaagaaacctggggccagcgtgaaggtgtcctgtaaagccagcggctacacctttaccgactactacatgaaatgggtccgacaggccccaggccagggactcgaatggatcggcgatattatccccagcaacggggccaccttctacaaccagaaattcaagggccgcgtgaccatcaccgtggacaagagcacaagcaccgcctacatggaactgagcagcctgagaagcgaggacaccgccgtgtattattgcgccagaagccatctgctgcgggccagttggttcgcctattggggacagggaaccctggtcaccgttagctctacgcgtcagagcatcaagggcaaccacctggtcaaggtgtacgactaccaagaggacggcagcgtgctgctgacatgtgatgccgaggccaagaacatcacctggtttaaggacggcaagatgatcggcttcctgaccgaggacaagaagaagtggaacctgggcagcaacgctaaggaccccagaggcatgtatcagtgcaagggcagccagaacaagagcaagcccctccaggtgtactaccggatgtgccagaactgcatcgagctgaacgccgctaccatcagcggctttctgttcgccgagatcgtgtccatcttcgtgctggccgtgggcgtgtactttatcgctggacaggatggcgtgcggcagagcagagcttccgataagcaaaccctgctgcctaacgaccagctgtaccagcctctgaaggacagagaggacgaccagtacagccacctccagggcaatcagctgagaagaaac

SEQ ID NO: 34669 - DNA, 1242 bp, synthetic construct
  source 1..1242: mol_type = other DNA
atggccttaccagtgaccgccttgctcctgccgctggccttgctgctccacgccgccaggccggacttcgtgatgacacagagccctgatagcctggccgtgtctctcggcgagcgagtgaccatgagctgcaagtctagccagagcctgctgaacagcggcaaccagaagaactacctgacctggtatcagcagaagcccggccagcctcctaagctgctgatctactgggccagcaccagagaaagcggcgtgcccgatagattttctggctctggcagcggcaccgacttcaccctgacaatttctagcctgcaagccgaggacgtggccgtgtactactgccagaacgactacagctacccctacaccttcggccagggcaccaagctggaaatcaaaggcggaggcggaagtggaggcggaggatctggcggcggaggctctgaagtgcaactggttcagagcggagccgagctgaagaaacctggggccagcgtgaaggtgtcctgtaaagccagcggctacacctttaccgactactacatgaaatgggtccgacaggccccaggccagggactcgaatggatcggcgatattatccccagcaacggggccaccttctacaaccagaaattcaagggccgcgtgaccatcaccgtggacaagagcacaagcaccgcctacatggaactgagcagcctgagaagcgaggacaccgccgtgtattattgcgccagaagccatctgctgcgggccagttggttcgcctattggggacagggaaccctggtcaccgttagctctacgcgtcagagttttgggttgttggaccctaaattgtgctatctgttggacggaatcctgttcatttacggagtgatcctgaccgcattgttcctgcgggttaagttttccagatccgcagacgcacccgcttaccaacaagggcagaaccaactctacaatgaacttaatttggggcggagggaagagtacgacgttctggacaaaaggaggggacgagatcccgagatgggcggaaagcctcagcgaaggaagaatccgcaagaggggctttataacgaactccagaaagataaaatggcagaagcctatagtgagattgggatgaagggagaaaggaggaggggtaaaggtcacgatgggttgtaccaaggattgagcacagccactaaagatacctatgatgcgctccacatgcaggccctgccgccaaga

SEQ ID NO: 34670 - DNA, 1527 bp, synthetic construct
  source 1..1527: mol_type = other DNA
atggccttaccagtgaccgccttgctcctgccgctggccttgctgctccacgccgccaggccggacttcgtgatgacacagagccctgatagcctggccgtgtctctcggcgagcgagtgaccatgagctgcaagtctagccagagcctgctgaacagcggcaaccagaagaactacctgacctggtatcagcagaagcccggccagcctcctaagctgctgatctactgggccagcaccagagaaagcggcgtgcccgatagattttctggctctggcagcggcaccgacttcaccctgacaatttctagcctgcaagccgaggacgtggccgtgtactactgccagaacgactacagctacccctacaccttcggccagggcaccaagctggaaatcaaaggcggaggcggaagtggaggcggaggatctggcggcggaggctctgaagtgcaactggttcagagcggagccgagctgaagaaacctggggccagcgtgaaggtgtcctgtaaagccagcggctacacctttaccgactactacatgaaatgggtccgacaggccccaggccagggactcgaatggatcggcgatattatccccagcaacggggccaccttctacaaccagaaattcaagggccgcgtgaccatcaccgtggacaagagcacaagcaccgcctacatggaactgagcagcctgagaagcgaggacaccgccgtgtattattgcgccagaagccatctgctgcgggccagttggttcgcctattggggacagggaaccctggtcaccgttagctctacgcgtggaatgaggactgaggatcttcccaaagctgtcgtctttctcgaaccccaatggtatcgggtgctcgaaaaagactctgtgacactgaaatgccaaggggcctactctcccgaggacaactccacacagtggtttcataatgagtccctcatcagctctcaggccagctcttatttcattgatgccgctacagtggacgactccggcgagtatcggtgtcagaccaatctgtctacactgtctgaccccgtgcagcttgaggtccacattggatggttgctcttgcaagccccacgctgggttttcaaagaggaagatccaatccatctgcggtgccacagctggaaaaacaccgctctccacaaagtcacatacctgcaaaatggcaaaggacgcaaatacttccatcacaattccgatttttacattccgaaggctaccctgaaagacagcggcagctatttctgccggggactcgtcggctccaagaatgtgtcctccgaaaccgtgaatatcacgattacccaaggactggctgtgcctacaatctctagcttctttccgcctggataccaagtctccttctgtcttgtgatggtcctcctgtttgctgtggacacaggactgtacttttccgtgaaaacgaacatccgcagctccacacgcgattggaaagatcacaagtttaaatggcgcaaagatccccaggacaag

SEQ ID NO: 34671 - DNA, 1452 bp, synthetic construct; identical to SEQ ID NO: 1486
  source 1..1452: mol_type = other DNA

SEQ ID NO: 34672 - DNA, 1455 bp, synthetic construct; identical to SEQ ID NO: 1205
  source 1..1455: mol_type = other DNA

SEQ ID NO: 34673 - DNA, 2187 bp, synthetic construct
  source 1..2187: mol_type = other DNA
atggccttaccagtgaccgccttgctcctgccgctggccttgctgctccacgccgccaggccggacttcgtgatgacacagagccctgatagcctggccgtgtctctcggcgagcgagtgaccatgagctgcaagtctagccagagcctgctgaacagcggcaaccagaagaactacctgacctggtatcagcagaagcccggccagcctcctaagctgctgatctactgggccagcaccagagaaagcggcgtgcccgatagattttctggctctggcagcggcaccgacttcaccctgacaatttctagcctgcaagccgaggacgtggccgtgtactactgccagaacgactacagctacccctacaccttcggccagggcaccaagctggaaatcaaactcgagggacagcctaaggccaatcctaccgtgacactgttccctccaagcagcgaagaactccaggccaacaaggccacacttgtgtgcctgatctccgacttctaccctggggctgtgacagtggcttggaaggccgatggatctcctgtgaaagccggcgtggaaaccaccaagccatccaagcagagcaacaacaaatacgccgccagctcctacctgagcctgacacctgagcagtggaagtcccacagatcctacagctgccaagtgacccacgaaggcagcaccgtggaaaagacagtggcccctacagagtgcagcggatcccagagcttcggcctgctggaccccaagctgtgctacctgctggatggcatcctgttcatctacggcgtgatcctgaccgccctgttcctgagagtgaagttcagcagaagcgccgacgcccctgcctaccagcagggacagaaccaactgtacaacgagctgaacctgggcagacgggaagagtacgacgtgctggacaagcggagaggcagggaccctgagatgggcggaaagccccagcggagaaagaacccccaggaaggactgtataacgaactccagaaagacaagatggccgaagcctacagcgagatcggcatgaagggcgagcggagaagaggcaagggccacgatggcctgtaccagggcctgagcaccgccaccaaggacacctatgacgccctgcacatgcaggccctgcctccaagaagggccaagcgatctggatctggagcaacaaacttctcactactcaaacaagcaggtgacgtggaggagaatcccgggcctactagtatggactggatttggcgcatccttttccttgtcggcgctgctaccggcgcgcattccttcgaagaagtgcaactggttcagagcggagccgagctgaagaaacctggggccagcgtgaaggtgtcctgtaaagccagcggctacacctttaccgactactacatgaaatgggtccgacaggccccaggccagggactcgaatggatcggcgatattatccccagcaacggggccaccttctacaaccagaaattcaagggccgcgtgaccatcaccgtggacaagagcacaagcaccgcctacatggaactgagcagcctgagaagcgaggacaccgccgtgtattattgcgccagaagccatctgctgcgggccagttggttcgcctattggggacagggaaccctggtcaccgttagctctacgcgtgcctctacaaagggaccctccgtgtttcctctggctcccagcagcaagtctacaagcggaggaacagccgctctgggctgcctggtcaaggattactttcccgagcctgtgaccgtgtcctggaatagcggagcactgacaagcggcgtgcacacctttccagccgtgctgcaaagcagcggcctgtactctctgagcagcgtggtcacagtgcctagctctagcctgggcacccagacctacatctgcaatgtgaaccacaagcctagcaacaccaaggtggacaagagagtggaacccaagagctgtggtaccatcactcaaggtttggcagtgtcaaccatctcatcattctttccacctggctaccaagtgtccttctgcctggtcatggtgctgctgttcgccgtggataccggcctgtacttcagcgtcaagaccaacatccggtccagcaccagagactggaaggaccacaagttcaagtggcggaaggaccctcaggacaag

SEQ ID NO: 34674 - DNA, 2232 bp, synthetic construct
  source 1..2232: mol_type = other DNA
atggccttaccagtgaccgccttgctcctgccgctggccttgctgctccacgccgccaggccggacttcgtgatgacacagagccctgatagcctggccgtgtctctcggcgagcgagtgaccatgagctgcaagtctagccagagcctgctgaacagcggcaaccagaagaactacctgacctggtatcagcagaagcccggccagcctcctaagctgctgatctactgggccagcaccagagaaagcggcgtgcccgatagattttctggctctggcagcggcaccgacttcaccctgacaatttctagcctgcaagccgaggacgtggccgtgtactactgccagaacgactacagctacccctacaccttcggccagggcaccaagctggaaatcaaactcgaggacctgaagaacgtgttcccacctgaggtggccgtgttcgagcctagcgaggccgagatcagccacacccagaaagccaccctcgtgtgcctggctaccggcttctaccccgaccatgtggaactgtcttggtgggtcaacggcaaagaggtgcacagcggcgtgtctaccgacccccagccactgaaagaacagcccgccctgaacgacagccggtactgcctgagcagcagactgagagtgtccgccaccttctggcagaacccccggaaccacttcagatgccaggtgcagttctacggcctgagcgagaacgacgagtggacccaggacagagccaagcccgtgacccagatcgtgtctgccgaagcctggggcagagccgattgcggatcccagagcttcggcctgctggaccccaagctgtgctacctgctggatggcatcctgttcatctacggcgtgatcctgaccgccctgttcctgagagtgaagttcagcagaagcgccgacgcccctgcctaccagcagggacagaaccaactgtacaacgagctgaacctgggcagacgggaagagtacgacgtgctggacaagcggagaggcagggaccctgagatgggcggaaagccccagcggagaaagaacccccaggaaggactgtataacgaactccagaaagacaagatggccgaagcctacagcgagatcggcatgaagggcgagcggagaagaggcaagggccacgatggcctgtaccagggcctgagcaccgccaccaaggacacctatgacgccctgcacatgcaggccctgcctccaagaagggccaagcgatctggatctggagcaacaaacttctcactactcaaacaagcaggtgacgtggaggagaatcccgggcctactagtatggactggatttggcgcatccttttccttgtcggcgctgctaccggcgcgcattccttcgaagaagtgcaactggttcagagcggagccgagctgaagaaacctggggccagcgtgaaggtgtcctgtaaagccagcggctacacctttaccgactactacatgaaatgggtccgacaggccccaggccagggactcgaatggatcggcgatattatccccagcaacggggccaccttctacaaccagaaattcaagggccgcgtgaccatcaccgtggacaagagcacaagcaccgcctacatggaactgagcagcctgagaagcgaggacaccgccgtgtattattgcgccagaagccatctgctgcgggccagttggttcgcctattggggacagggaaccctggtcaccgttagctctacgcgtatccagaaccctgatcctgccgtgtaccagctgcgggatagcaagagcagcgacaagagcgtgtgtctgttcaccgacttcgacagccagaccaacgtgtcccagagcaaggactccgacgtgtacatcaccgataagaccgtgctggacatgcggagcatggacttcaagagcaactccgccgtggcctggtccaacaagtccgatttcgcctgcgccaacgccttcaacaacagcattatccccgaggacacattcttcccaagccccgagagcagctgcggtaccatcactcaaggtttggcagtgtcaaccatctcatcattctttccacctggctaccaagtgtccttctgcctggtcatggtgctgctgttcgccgtggataccggcctgtacttcagcgtcaagaccaacatccggtccagcaccagagactggaaggaccacaagttcaagtggcggaaggaccctcaggacaag

SEQ ID NO: 34675 - DNA, 2157 bp, synthetic construct
  source 1..2157: mol_type = other DNA
atggccttaccagtgaccgccttgctcctgccgctggccttgctgctccacgccgccaggccggacttcgtgatgacacagagccctgatagcctggccgtgtctctcggcgagcgagtgaccatgagctgcaagtctagccagagcctgctgaacagcggcaaccagaagaactacctgacctggtatcagcagaagcccggccagcctcctaagctgctgatctactgggccagcaccagagaaagcggcgtgcccgatagattttctggctctggcagcggcaccgacttcaccctgacaatttctagcctgcaagccgaggacgtggccgtgtactactgccagaacgactacagctacccctacaccttcggccagggcaccaagctggaaatcaaactcgaggacctgaagaacgtgttcccacctgaggtggccgtgttcgagcctagcgaggccgagatcagccacacccagaaagccaccctcgtgtgcctggctaccggcttctaccccgaccatgtggaactgtcttggtgggtcaacggcaaagaggtgcacagcggcgtgtctaccgacccccagccactgaaagaacagcccgccctgaacgacagccggtactgcctgagcagcagactgagagtgtccgccaccttctggcagaacccccggaaccacttcagatgccaggtgcagttctacggcctgagcgagaacgacgagtggacccaggacagagccaagcccgtgacccagatcgtgtctgccgaagcctggggcagagccgattgcggatcccagagcttcggcctgctggaccccaagctgtgctacctgctggatggcatcctgttcatctacggcgtgatcctgaccgccctgttcctgagagtgaagttcagcagaagcgccgacgcccctgcctaccagcagggacagaaccaactgtacaacgagctgaacctgggcagacgggaagagtacgacgtgctggacaagcggagaggcagggaccctgagatgggcggaaagccccagcggagaaagaacccccaggaaggactgtataacgaactccagaaagacaagatggccgaagcctacagcgagatcggcatgaagggcgagcggagaagaggcaagggccacgatggcctgtaccagggcctgagcaccgccaccaaggacacctatgacgccctgcacatgcaggccctgcctccaagaagggccaagcgatctggatctggagcaacaaacttctcactactcaaacaagcaggtgacgtggaggagaatcccgggcctactagtatggactggatttggcgcatccttttccttgtcggcgctgctaccggcgcgcattccttcgaagaagtgcaactggttcagagcggagccgagctgaagaaacctggggccagcgtgaaggtgtcctgtaaagccagcggctacacctttaccgactactacatgaaatgggtccgacaggccccaggccagggactcgaatggatcggcgatattatccccagcaacggggccaccttctacaaccagaaattcaagggccgcgtgaccatcaccgtggacaagagcacaagcaccgcctacatggaactgagcagcctgagaagcgaggacaccgccgtgtattattgcgccagaagccatctgctgcgggccagttggttcgcctattggggacagggaaccctggtcaccgttagctctacgcgtatccagaaccctgatcctgccgtgtaccagctgcgggatagcaagagcagcgacaagagcgtgtgtctgttcaccgacttcgacagccagaccaacgtgtcccagagcaaggactccgacgtgtacatcaccgataagaccgtgctggacatgcggagcatggacttcaagagcaactccgccgtggcctggtccaacaagtccgatttcgcctgcgccaacgccttcaacaacagcattatccccgaggacacattcttcccaagccccgagagcagctgcggtaccatcactcaaggtttggcagtgtcaaccatctcatcattctttccacctggctaccaagtgtccttctgcctggtcatggtgctgctgttcgccgtggataccggcctgtacttcagcgtc

SEQ ID NO: 34676 - DNA, 2160 bp, synthetic construct
  source 1..2160: mol_type = other DNA
atggccttaccagtgaccgccttgctcctgccgctggccttgctgctccacgccgccaggccggacttcgtgatgacacagagccctgatagcctggccgtgtctctcggcgagcgagtgaccatgagctgcaagtctagccagagcctgctgaacagcggcaaccagaagaactacctgacctggtatcagcagaagcccggccagcctcctaagctgctgatctactgggccagcaccagagaaagcggcgtgcccgatagattttctggctctggcagcggcaccgacttcaccctgacaatttctagcctgcaagccgaggacgtggccgtgtactactgccagaacgactacagctacccctacaccttcggccagggcaccaagctggaaatcaaactcgaggacctgaagaacgtgttcccacctgaggtggccgtgttcgagcctagcgaggccgagatcagccacacccagaaagccaccctcgtgtgcctggctaccggcttctaccccgaccatgtggaactgtcttggtgggtcaacggcaaagaggtgcacagcggcgtgtctaccgacccccagccactgaaagaacagcccgccctgaacgacagccggtactgcctgagcagcagactgagagtgtccgccaccttctggcagaacccccggaaccacttcagatgccaggtgcagttctacggcctgagcgagaacgacgagtggacccaggacagagccaagcccgtgacccagatcgtgtctgccgaagcctggggcagagccgattgcggatcccagagcttcggcctgctggaccccaagctgtgctacctgctggatggcatcctgttcatctacggcgtgatcctgaccgccctgttcctgagagtgaagttcagcagaagcgccgacgcccctgcctaccagcagggacagaaccaactgtacaacgagctgaacctgggcagacgggaagagtacgacgtgctggacaagcggagaggcagggaccctgagatgggcggaaagccccagcggagaaagaacccccaggaaggactgtataacgaactccagaaagacaagatggccgaagcctacagcgagatcggcatgaagggcgagcggagaagaggcaagggccacgatggcctgtaccagggcctgagcaccgccaccaaggacacctatgacgccctgcacatgcaggccctgcctccaagaagggccaagcgatctggatctggagcaacaaacttctcactactcaaacaagcaggtgacgtggaggagaatcccgggcctactagtatggactggatttggcgcatccttttccttgtcggcgctgctaccggcgcgcattccttcgaagaagtgcaactggttcagagcggagccgagctgaagaaacctggggccagcgtgaaggtgtcctgtaaagccagcggctacacctttaccgactactacatgaaatgggtccgacaggccccaggccagggactcgaatggatcggcgatattatccccagcaacggggccaccttctacaaccagaaattcaagggccgcgtgaccatcaccgtggacaagagcacaagcaccgcctacatggaactgagcagcctgagaagcgaggacaccgccgtgtattattgcgccagaagccatctgctgcgggccagttggttcgcctattggggacagggaaccctggtcaccgttagctctacgcgtatccagaaccctgatcctgccgtgtaccagctgcgggatagcaagagcagcgacaagagcgtgtgtctgttcaccgacttcgacagccagaccaacgtgtcccagagcaaggactccgacgtgtacatcaccgataagaccgtgctggacatgcggagcatggacttcaagagcaactccgccgtggcctggtccaacaagtccgatttcgcctgcgccaacgccttcaacaacagcattatccccgaggacacattcttcccaagccccgagagcagctgcggtaccatcactcaaggtttggcagtgtcaaccatctcatcattctttccacctggctaccaagtgtccttctgcctggtcatggtgctgctgttcgccgtggataccggcctgtacttcagcgtcaag

SEQ ID NO: 34677 - DNA, 2163 bp, synthetic construct
  source 1..2163: mol_type = other DNA
atggccttaccagtgaccgccttgctcctgccgctggccttgctgctccacgccgccaggccggacttcgtgatgacacagagccctgatagcctggccgtgtctctcggcgagcgagtgaccatgagctgcaagtctagccagagcctgctgaacagcggcaaccagaagaactacctgacctggtatcagcagaagcccggccagcctcctaagctgctgatctactgggccagcaccagagaaagcggcgtgcccgatagattttctggctctggcagcggcaccgacttcaccctgacaatttctagcctgcaagccgaggacgtggccgtgtactactgccagaacgactacagctacccctacaccttcggccagggcaccaagctggaaatcaaactcgaggacctgaagaacgtgttcccacctgaggtggccgtgttcgagcctagcgaggccgagatcagccacacccagaaagccaccctcgtgtgcctggctaccggcttctaccccgaccatgtggaactgtcttggtgggtcaacggcaaagaggtgcacagcggcgtgtctaccgacccccagccactgaaagaacagcccgccctgaacgacagccggtactgcctgagcagcagactgagagtgtccgccaccttctggcagaacccccggaaccacttcagatgccaggtgcagttctacggcctgagcgagaacgacgagtggacccaggacagagccaagcccgtgacccagatcgtgtctgccgaagcctggggcagagccgattgcggatcccagagcttcggcctgctggaccccaagctgtgctacctgctggatggcatcctgttcatctacggcgtgatcctgaccgccctgttcctgagagtgaagttcagcagaagcgccgacgcccctgcctaccagcagggacagaaccaactgtacaacgagctgaacctgggcagacgggaagagtacgacgtgctggacaagcggagaggcagggaccctgagatgggcggaaagccccagcggagaaagaacccccaggaaggactgtataacgaactccagaaagacaagatggccgaagcctacagcgagatcggcatgaagggcgagcggagaagaggcaagggccacgatggcctgtaccagggcctgagcaccgccaccaaggacacctatgacgccctgcacatgcaggccctgcctccaagaagggccaagcgatctggatctggagcaacaaacttctcactactcaaacaagcaggtgacgtggaggagaatcccgggcctactagtatggactggatttggcgcatccttttccttgtcggcgctgctaccggcgcgcattccttcgaagaagtgcaactggttcagagcggagccgagctgaagaaacctggggccagcgtgaaggtgtcctgtaaagccagcggctacacctttaccgactactacatgaaatgggtccgacaggccccaggccagggactcgaatggatcggcgatattatccccagcaacggggccaccttctacaaccagaaattcaagggccgcgtgaccatcaccgtggacaagagcacaagcaccgcctacatggaactgagcagcctgagaagcgaggacaccgccgtgtattattgcgccagaagccatctgctgcgggccagttggttcgcctattggggacagggaaccctggtcaccgttagctctacgcgtatccagaaccctgatcctgccgtgtaccagctgcgggatagcaagagcagcgacaagagcgtgtgtctgttcaccgacttcgacagccagaccaacgtgtcccagagcaaggactccgacgtgtacatcaccgataagaccgtgctggacatgcggagcatggacttcaagagcaactccgccgtggcctggtccaacaagtccgatttcgcctgcgccaacgccttcaacaacagcattatccccgaggacacattcttcccaagccccgagagcagctgcggtaccatcactcaaggtttggcagtgtcaaccatctcatcattctttccacctggctaccaagtgtccttctgcctggtcatggtgctgctgttcgccgtggataccggcctgtacttcagcgtcaagacc

SEQ ID NO: 34678 - DNA, 1974 bp, synthetic construct
  source 1..1974: mol_type = other DNA
atggccttaccagtgaccgccttgctcctgccgctggccttgctgctccacgccgccaggccggacttcgtgatgacacagagccctgatagcctggccgtgtctctcggcgagcgagtgaccatgagctgcaagtctagccagagcctgctgaacagcggcaaccagaagaactacctgacctggtatcagcagaagcccggccagcctcctaagctgctgatctactgggccagcaccagagaaagcggcgtgcccgatagattttctggctctggcagcggcaccgacttcaccctgacaatttctagcctgcaagccgaggacgtggccgtgtactactgccagaacgactacagctacccctacaccttcggccagggcaccaagctggaaatcaaactcgagggacagcctaaggccaatcctaccgtgacactgttccctccaagcagcgaagaactccaggccaacaaggccacacttgtgtgcctgatctccgacttctaccctggggctgtgacagtggcttggaaggccgatggatctcctgtgaaagccggcgtggaaaccaccaagccatccaagcagagcaacaacaaatacgccgccagctcctacctgagcctgacacctgagcagtggaagtcccacagatcctacagctgccaagtgacccacgaaggcagcaccgtggaaaagacagtggcccctacagagtgcagcggatccctgggagagcctcagctgtgctatatcctggacgccatcctgtttctgtacggcatcgtgctgaccctgctgtactgccggctgaagatccaagtgcggaaggccgccatcaccagctacgagaaatccgacggcgtgtacaccggcctgagcaccagaaatcaagagacatacgagacactgaagcacgaaaagcctccacaaagggccaagcgatctggatctggagcaacaaacttctcactactcaaacaagcaggtgacgtggaggagaatcccgggcctactagtatggactggatttggcgcatccttttccttgtcggcgctgctaccggcgcgcattccttcgaagaagtgcaactggttcagagcggagccgagctgaagaaacctggggccagcgtgaaggtgtcctgtaaagccagcggctacacctttaccgactactacatgaaatgggtccgacaggccccaggccagggactcgaatggatcggcgatattatccccagcaacggggccaccttctacaaccagaaattcaagggccgcgtgaccatcaccgtggacaagagcacaagcaccgcctacatggaactgagcagcctgagaagcgaggacaccgccgtgtattattgcgccagaagccatctgctgcgggccagttggttcgcctattggggacagggaaccctggtcaccgttagctctacgcgtgcctctacaaagggaccctccgtgtttcctctggctcccagcagcaagtctacaagcggaggaacagccgctctgggctgcctggtcaaggattactttcccgagcctgtgaccgtgtcctggaatagcggagcactgacaagcggcgtgcacacctttccagccgtgctgcaaagcagcggcctgtactctctgagcagcgtggtcacagtgcctagctctagcctgggcacccagacctacatctgcaatgtgaaccacaagcctagcaacaccaaggtggacaagagagtggaacccaagagctgtggtaccctcggagaaccacagctctgttacattctggatgctatcctgttcctctatgggatcgtcctgacactcctgtattgcagactcaaaattcaagttcgcaaagccgccattacctcttacgagaagagtgatggggtgtacacaggactgtctacccggaatcaagaaacctacgaaaccctcaaacatgagaagccacctcagtaa

SEQ ID NO: 34679 - DNA, 1881 bp, synthetic construct
  source 1..1881: mol_type = other DNA
atggccttaccagtgaccgccttgctcctgccgctggccttgctgctccacgccgccaggccggacttcgtgatgacacagagccctgatagcctggccgtgtctctcggcgagcgagtgaccatgagctgcaagtctagccagagcctgctgaacagcggcaaccagaagaactacctgacctggtatcagcagaagcccggccagcctcctaagctgctgatctactgggccagcaccagagaaagcggcgtgcccgatagattttctggctctggcagcggcaccgacttcaccctgacaatttctagcctgcaagccgaggacgtggccgtgtactactgccagaacgactacagctacccctacaccttcggccagggcaccaagctggaaatcaaactcgaggacctgaagaacgtgttcccacctgaggtggccgtgttcgagcctagcgaggccgagatcagccacacccagaaagccaccctcgtgtgcctggctaccggcttctaccccgaccatgtggaactgtcttggtgggtcaacggcaaagaggtgcacagcggcgtgtgtaccgacccccagccactgaaagaacagcccgccctgaacgacagccggtactgcctgagcagcagactgagagtgtccgccaccttctggcagaacccccggaaccacttcagatgccaggtgcagttctacggcctgagcgagaacgacgagtggacccaggacagagccaagcccgtgacccagatcgtgtctgccgaagcctggggcagagccgattgcggctttaccagcgagagctaccagcagggcgtgctgagcgcctactacatgtacttgttgctgctgctgaagtccgtggtgtacttcgccatcatcacatgctgcctgctgcggagaaccgccttctgctgcaacggcgagaagtctagggccaagcgatctggatctggagcaacaaacttctcactactcaaacaagcaggtgacgtggaggagaatcccgggcctactagtatggactggatttggcgcatccttttccttgtcggcgctgctaccggcgcgcattccttcgaagaagtgcaactggttcagagcggagccgagctgaagaaacctggggccagcgtgaaggtgtcctgtaaagccagcggctacacctttaccgactactacatgaaatgggtccgacaggccccaggccagggactcgaatggatcggcgatattatccccagcaacggggccaccttctacaaccagaaattcaagggccgcgtgaccatcaccgtggacaagagcacaagcaccgcctacatggaactgagcagcctgagaagcgaggacaccgccgtgtattattgcgccagaagccatctgctgcgggccagttggttcgcctattggggacagggaaccctggtcaccgttagctctacgcgtatccagaaccctgatcctgccgtgtaccagctgcgggatagcaagagcagcgacaagagcgtgtgtctgttcaccgacttcgacagccagaccaacgtgtcccagagcaaggactccgacgtgtacatcaccgataagtgcgtgctggacatgcggagcatggacttcaagagcaactccgccgtggcctggtccaacaagtccgatttcgcctgcgccaacgccttcaacaacagcattatccccgaggacacattcttcccaagccccgagagcagctgcgacgtgaagctggtggaaaagagcttcgagacagacaccaacctgaacttccagaacctgagcgtgatcggcttcagaatcctgctgctgaaagtggccggctttaacctgctgatgaccctgcggctgtggtccagc

SEQ ID NO: 34680 - DNA, 1902 bp, synthetic construct
  source 1..1902: mol_type = other DNA
atggccttaccagtgaccgccttgctcctgccgctggccttgctgctccacgccgccaggccggacttcgtgatgacacagagccctgatagcctggccgtgtctctcggcgagcgagtgaccatgagctgcaagtctagccagagcctgctgaacagcggcaaccagaagaactacctgacctggtatcagcagaagcccggccagcctcctaagctgctgatctactgggccagcaccagagaaagcggcgtgcccgatagattttctggctctggcagcggcaccgacttcaccctgacaatttctagcctgcaagccgaggacgtggccgtgtactactgccagaacgactacagctacccctacaccttcggccagggcaccaagctggaaatcaaactcgaggacaagcagctggacgccgacgtgtcccccaagcctaccatcttcctgccctctatcgccgagacaaagctccagaaggccggcacctacctgtgcctgctggaaaagttcttcccagatgtgattaagatccactggcaggaaaagaagtccaacaccatcctgggcagccaggaaggcaacaccatgaagaccaacgacacctacatgaagttcagctggctgaccgtgcccgagaagtccctggacaaagaacacagatgcatcgtgcggcacgaaaacaacaagaacggcgtggaccaggaaatcatcttcccacccatcaagaccgatgtgattacaatggaccccaaggacaactgctccaaggacgccaacgataccctgctgctccagctgaccaacaccagcgcctactacatgtacgagatcctgctgggcaaggccaccctgtacgccgtgctggtgtctgccctggtgctgatggctatggtcaagcggaaggacagccggggaagggccaagcgatctggatctggagcaacaaacttctcactactcaaacaagcaggtgacgtggaggagaatcccgggcctactagtatggactggatttggcgcatccttttccttgtcggcgctgctaccggcgcgcattccttcgaagaagtgcaactggttcagagcggagccgagctgaagaaacctggggccagcgtgaaggtgtcctgtaaagccagcggctacacctttaccgactactacatgaaatgggtccgacaggccccaggccagggactcgaatggatcggcgatattatccccagcaacggggccaccttctacaaccagaaattcaagggccgcgtgaccatcaccgtggacaagagcacaagcaccgcctacatggaactgagcagcctgagaagcgaggacaccgccgtgtattattgcgccagaagccatctgctgcgggccagttggttcgcctattggggacagggaaccctggtcaccgttagctctacgcgtagccagcctcacaccaagcccagcgtgttcgtgatgaagaacggcaccaacgtggcctgcctcgtgaaagagttctaccccaaggacatcaggatcaacctggtgtccagcaagaagatcaccgagttcgaccccgccatcgtgatctcccccagcggcaagtacaacgccgtgaagctggggaagtatgaggacagcaacagcgtgacctgctccgtgcagcacgacaacaagaccgtgcacagcaccgactttgaagtgaaaaccgactccaccgaccacgtgaagcccaaagagacagagaacaccaagcagcccagcaagagctgccacaagcccaaggccatcgtgcacaccgagaaagtgaacatgatgagcctgaccgtgatcggcttcagaatcctgctgctgaaagtggccggctttaacctgctgatgaccctgcggctgtggtccagctaa

SEQ ID NO: 34681 - DNA, 1902 bp, synthetic construct
  source 1..1902: mol_type = other DNA
atggccttaccagtgaccgccttgctcctgccgctggccttgctgctccacgccgccaggccggacttcgtgatgacacagagccctgatagcctggccgtgtctctcggcgagcgagtgaccatgagctgcaagtctagccagagcctgctgaacagcggcaaccagaagaactacctgacctggtatcagcagaagcccggccagcctcctaagctgctgatctactgggccagcaccagagaaagcggcgtgcccgatagattttctggctctggcagcggcaccgacttcaccctgacaatttctagcctgcaagccgaggacgtggccgtgtactactgccagaacgactacagctacccctacaccttcggccagggcaccaagctggaaatcaaactcgaggacaagcagctggacgccgacgtgtcccccaagcctaccatcttcctgccctctatcgccgagacaaagctccagaaggccggcacctacctgtgcctgctggaaaagttcttcccagatgtgattaagatccactggcaggaaaagaagtccaacaccatcctgggcagccaggaaggcaacaccatgaagaccaacgacacctacatgaagttcagctggctgaccgtgcccgagaagtccctggacaaagaacacagatgcatcgtgcggcacgaaaacaacaagaacggcgtggaccaggaaatcatcttcccacccatcaagaccgatgtgattacaatggaccccaaggacaactgctccaaggacgccaacgataccctgctgctccagctgaccaacaccagcgccaccatcctgtacgagatcctgctgggcaaggccaccctgtacgccgtgctggtgtctgccctggtgctgatggctatggtcaagcggaaggacagccggggaagggccaagcgatctggatctggagcaacaaacttctcactactcaaacaagcaggtgacgtggaggagaatcccgggcctactagtatggactggatttggcgcatccttttccttgtcggcgctgctaccggcgcgcattccttcgaagaagtgcaactggttcagagcggagccgagctgaagaaacctggggccagcgtgaaggtgtcctgtaaagccagcggctacacctttaccgactactacatgaaatgggtccgacaggccccaggccagggactcgaatggatcggcgatattatccccagcaacggggccaccttctacaaccagaaattcaagggccgcgtgaccatcaccgtggacaagagcacaagcaccgcctacatggaactgagcagcctgagaagcgaggacaccgccgtgtattattgcgccagaagccatctgctgcgggccagttggttcgcctattggggacagggaaccctggtcaccgttagctctacgcgtagccagcctcacaccaagcccagcgtgttcgtgatgaagaacggcaccaacgtggcctgcctcgtgaaagagttctaccccaaggacatcaggatcaacctggtgtccagcaagaagatcaccgagttcgaccccgccatcgtgatctcccccagcggcaagtacaacgccgtgaagctggggaagtatgaggacagcaacagcgtgacctgctccgtgcagcacgacaacaagaccgtgcacagcaccgactttgaagtgaaaaccgactccaccgaccacgtgaagcccaaagagacagagaacaccaagcagcccagcaagagctgccacaagcccaaggccatcgtgcacaccgagaaagtgaacatgatgagcctgaccgtgatcggcttcagaatcctgctgctgaaagtggccggctttaacctgctgatgaccctgcggctgtggtccagctaa

SEQ ID NO: 34682 - DNA, 1902 bp, synthetic construct
  source 1..1902: mol_type = other DNA
atggccttaccagtgaccgccttgctcctgccgctggccttgctgctccacgccgccaggccggacttcgtgatgacacagagccctgatagcctggccgtgtctctcggcgagcgagtgaccatgagctgcaagtctagccagagcctgctgaacagcggcaaccagaagaactacctgacctggtatcagcagaagcccggccagcctcctaagctgctgatctactgggccagcaccagagaaagcggcgtgcccgatagattttctggctctggcagcggcaccgacttcaccctgacaatttctagcctgcaagccgaggacgtggccgtgtactactgccagaacgactacagctacccctacaccttcggccagggcaccaagctggaaatcaaactcgaggacaagcagctggacgccgacgtgtcccccaagcctaccatcttcctgccctctatcgccgagacaaagctccagaaggccggcacctacctgtgcctgctggaaaagttcttcccagatgtgattaagatccactggcaggaaaagaagtccaacaccatcctgggcagccaggaaggcaacaccatgaagaccaacgacacctacatgaagttcagctggctgaccgtgcccgagaagtccctggacaaagaacacagatgcatcgtgcggcacgaaaacaacaagaacggcgtggaccaggaaatcatcttcccacccatcaagaccgatgtgattacaatggaccccaaggacaactgctccaaggacgccaacgataccctgctgctccagctgaccaacaccagcgcctactacatgtacgagatcctgctgggcaaggccaccctgtacgccgtgctggtgtctgccctggtgctgatggctatggtcaagcggaaggacagccggggaagggccaagcgatctggatctggagcaacaaacttctcactactcaaacaagcaggtgacgtggaggagaatcccgggcctactagtatggactggatttggcgcatccttttccttgtcggcgctgctaccggcgcgcattccttcgaagaagtgcaactggttcagagcggagccgagctgaagaaacctggggccagcgtgaaggtgtcctgtaaagccagcggctacacctttaccgactactacatgaaatgggtccgacaggccccaggccagggactcgaatggatcggcgatattatccccagcaacggggccaccttctacaaccagaaattcaagggccgcgtgaccatcaccgtggacaagagcacaagcaccgcctacatggaactgagcagcctgagaagcgaggacaccgccgtgtattattgcgccagaagccatctgctgcgggccagttggttcgcctattggggacagggaaccctggtcaccgttagctctacgcgtagccagcctcacaccaagcccagcgtgttcgtgatgaagaacggcaccaacgtggcctgcctcgtgaaagagttctaccccaaggacatcaggatcaacctggtgtccagcaagaagatcaccgagttcgaccccgccatcgtgatctcccccagcggcaagtacaacgccgtgaagctggggaagtacgaggacagcaacagcgtgacctgctccgtgcagcacgacaacaagaccgtgcacagcaccgactttgaagtgaaaaccgactccaccgaccacgtgaagcccaaagagacagagaacaccaagcagcccagcaagagctgccacaagcccaaggccatcgtgcacaccgagaaagtgaacatgatgagcctgaccgtgctgggcttcagaatcctgctgctgaaagtggccggctttaacctgctgatgaccctgcggctgtggtccagctaa

SEQ ID NO: 34683 - DNA, 1902 bp, synthetic construct
  source 1..1902: mol_type = other DNA
atggccttaccagtgaccgccttgctcctgccgctggccttgctgctccacgccgccaggccggacttcgtgatgacacagagccctgatagcctggccgtgtctctcggcgagcgagtgaccatgagctgcaagtctagccagagcctgctgaacagcggcaaccagaagaactacctgacctggtatcagcagaagcccggccagcctcctaagctgctgatctactgggccagcaccagagaaagcggcgtgcccgatagattttctggctctggcagcggcaccgacttcaccctgacaatttctagcctgcaagccgaggacgtggccgtgtactactgccagaacgactacagctacccctacaccttcggccagggcaccaagctggaaatcaaactcgaggacaagcagctggacgccgacgtgtcccccaagcctaccatcttcctgccctctatcgccgagacaaagctccagaaggccggcacctacctgtgcctgctggaaaagttcttcccagatgtgattaagatccactggcaggaaaagaagtccaacaccatcctgggcagccaggaaggcaacaccatgaagaccaacgacacctacatgaagttcagctggctgaccgtgcccgagaagtccctggacaaagaacacagatgcatcgtgcggcacgaaaacaacaagaacggcgtggaccaggaaatcatcttcccacccatcaagaccgatgtgattacaatggaccccaaggacaactgctccaaggacgccaacgataccctgctgctccagctgaccaacaccagcgccaccatcctgtacgagatcctgctgggcaaggccaccctgtacgccgtgctggtgtctgccctggtgctgatggctatggtcaagcggaaggacagccggggaagggccaagcgatctggatctggagcaacaaacttctcactactcaaacaagcaggtgacgtggaggagaatcccgggcctactagtatggactggatttggcgcatccttttccttgtcggcgctgctaccggcgcgcattccttcgaagaagtgcaactggttcagagcggagccgagctgaagaaacctggggccagcgtgaaggtgtcctgtaaagccagcggctacacctttaccgactactacatgaaatgggtccgacaggccccaggccagggactcgaatggatcggcgatattatccccagcaacggggccaccttctacaaccagaaattcaagggccgcgtgaccatcaccgtggacaagagcacaagcaccgcctacatggaactgagcagcctgagaagcgaggacaccgccgtgtattattgcgccagaagccatctgctgcgggccagttggttcgcctattggggacagggaaccctggtcaccgttagctctacgcgtagccagcctcacaccaagcccagcgtgttcgtgatgaagaacggcaccaacgtggcctgcctcgtgaaagagttctaccccaaggacatcaggatcaacctggtgtccagcaagaagatcaccgagttcgaccccgccatcgtgatctcccccagcggcaagtacaacgccgtgaagctggggaagtacgaggacagcaacagcgtgacctgctccgtgcagcacgacaacaagaccgtgcacagcaccgactttgaagtgaaaaccgactccaccgaccacgtgaagcccaaagagacagagaacaccaagcagcccagcaagagctgccacaagcccaaggccatcgtgcacaccgagaaagtgaacatgatgagcctgaccgtgctgggcttcagaatcctgctgctgaaagtggccggctttaacctgctgatgaccctgcggctgtggtccagctaa

SEQ ID NO: 34684 - DNA, 1884 bp, synthetic construct
  source 1..1884: mol_type = other DNA
atggccttaccagtgaccgccttgctcctgccgctggccttgctgctccacgccgccaggccggacttcgtgatgacacagagccctgatagcctggccgtgtctctcggcgagcgagtgaccatgagctgcaagtctagccagagcctgctgaacagcggcaaccagaagaactacctgacctggtatcagcagaagcccggccagcctcctaagctgctgatctactgggccagcaccagagaaagcggcgtgcccgatagattttctggctctggcagcggcaccgacttcaccctgacaatttctagcctgcaagccgaggacgtggccgtgtactactgccagaacgactacagctacccctacaccttcggccagggcaccaagctggaaatcaaactcgaggacctgaagaacgtgttcccacctgaggtggccgtgttcgagcctagcgaggccgagatcagccacacccagaaagccaccctcgtgtgcctggctaccggcttctaccccgaccatgtggaactgtcttggtgggtcaacggcaaagaggtgcacagcggcgtgtgtaccgacccccagccactgaaagaacagcccgccctgaacgacagccggtactgcctgagcagcagactgagagtgtccgccaccttctggcagaacccccggaaccacttcagatgccaggtgcagttctacggcctgagcgagaacgacgagtggacccaggacagagccaagcccgtgacccagatcgtgtctgccgaagcctggggcagagccgattgcggctttaccagcgagagctaccagcagggcgtgctgagcgccaccatcctgtacttgttgctgctgctgaagtccgtggtgtacttcgccatcatcacatgctgcctgctgcggagaaccgccttctgctgcaacggcgagaagtctagggccaagcgatctggatctggagcaacaaacttctcactactcaaacaagcaggtgacgtggaggagaatcccgggcctactagtatggactggatttggcgcatccttttccttgtcggcgctgctaccggcgcgcattccttcgaagaagtgcaactggttcagagcggagccgagctgaagaaacctggggccagcgtgaaggtgtcctgtaaagccagcggctacacctttaccgactactacatgaaatgggtccgacaggccccaggccagggactcgaatggatcggcgatattatccccagcaacggggccaccttctacaaccagaaattcaagggccgcgtgaccatcaccgtggacaagagcacaagcaccgcctacatggaactgagcagcctgagaagcgaggacaccgccgtgtattattgcgccagaagccatctgctgcgggccagttggttcgcctattggggacagggaaccctggtcaccgttagctctacgcgtatccagaaccctgatcctgccgtgtaccagctgcgggatagcaagagcagcgacaagagcgtgtgtctgttcaccgacttcgacagccagaccaacgtgtcccagagcaaggactccgacgtgtacatcaccgataagtgcgtgctggacatgcggagcatggacttcaagagcaactccgccgtggcctggtccaacaagtccgatttcgcctgcgccaacgccttcaacaacagcattatccccgaggacacattcttcccaagccccgagagcagctgcgacgtgaagctggtggaaaagagcttcgagacagacaccaacctgaacttccagaacctgagcgtgatcggcctgcggatgctgttcgccaaaaccgtggccgtgaacttcctgctgaccgccaagctgttcttcctctaa

SEQ ID NO: 34685 - DNA, 1971 bp, synthetic construct
  source 1..1971: mol_type = other DNA
atggccttaccagtgaccgccttgctcctgccgctggccttgctgctccacgccgccaggccggacttcgtgatgacacagagccctgatagcctggccgtgtctctcggcgagcgagtgaccatgagctgcaagtctagccagagcctgctgaacagcggcaaccagaagaactacctgacctggtatcagcagaagcccggccagcctcctaagctgctgatctactgggccagcaccagagaaagcggcgtgcccgatagattttctggctctggcagcggcaccgacttcaccctgacaatttctagcctgcaagccgaggacgtggccgtgtactactgccagaacgactacagctacccctacaccttcggccagggcaccaagctggaaatcaaactcgaggacctgaagaacgtgttcccacctgaggtggccgtgttcgagcctagcgaggccgagatcagccacacccagaaagccaccctcgtgtgcctggctaccggcttctaccccgaccatgtggaactgtcttggtgggtcaacggcaaagaggtgcacagcggcgtgtctaccgacccccagccactgaaagaacagcccgccctgaacgacagccggtactgcctgagcagcagactgagagtgtccgccaccttctggcagaacccccggaaccacttcagatgccaggtgcagttctacggcctgagcgagaacgacgagtggacccaggacagagccaagcccgtgacccagatcgtgtctgccgaagcctggggcagagccgattgcggatcctccaaggacgccaacgataccctgctgctccagctgaccaacaccagcgcctactacatgtacttgttgctgctgctgaagtccgtggtgtacttcgccatcatcacatgctgcctgctgcggagaaccgccttctgctgcaacggcgagaagtctagggccaagcgatctggatctggagcaacaaacttctcactactcaaacaagcaggtgacgtggaggagaatcccgggcctactagtatggactggatttggcgcatccttttccttgtcggcgctgctaccggcgcgcattccttcgaagaagtgcaactggttcagagcggagccgagctgaagaaacctggggccagcgtgaaggtgtcctgtaaagccagcggctacacctttaccgactactacatgaaatgggtccgacaggccccaggccagggactcgaatggatcggcgatattatccccagcaacggggccaccttctacaaccagaaattcaagggccgcgtgaccatcaccgtggacaagagcacaagcaccgcctacatggaactgagcagcctgagaagcgaggacaccgccgtgtattattgcgccagaagccatctgctgcgggccagttggttcgcctattggggacagggaaccctggtcaccgttagctctacgcgtatccagaaccctgatcctgccgtgtaccagctgcgggatagcaagagcagcgacaagagcgtgtgtctgttcaccgacttcgacagccagaccaacgtgtcccagagcaaggactccgacgtgtacatcaccgataagaccgtgctggacatgcggagcatggacttcaagagcaactccgccgtggcctggtccaacaagtccgatttcgcctgcgccaacgccttcaacaacagcattatccccgaggacacattcttcccaagccccgagagcagctgcggtaccgaagtgaaaaccgactccaccgaccacgtgaagcccaaagagacagagaacaccaagcagcccagcaagagctgccacaagcccaaggccatcgtgcacaccgagaaagtgaacatgatgagcctgaccgtgctgggcctgcggatgctgttcgccaaaaccgtggccgtgaacttcctgctgaccgccaagctgttcttcctctaa

SEQ ID NO: 34686 - DNA, 1881 bp, synthetic construct
  source 1..1881: mol_type = other DNA
atggccttaccagtgaccgccttgctcctgccgctggccttgctgctccacgccgccaggccggacttcgtgatgacacagagccctgatagcctggccgtgtctctcggcgagcgagtgaccatgagctgcaagtctagccagagcctgctgaacagcggcaaccagaagaactacctgacctggtatcagcagaagcccggccagcctcctaagctgctgatctactgggccagcaccagagaaagcggcgtgcccgatagattttctggctctggcagcggcaccgacttcaccctgacaatttctagcctgcaagccgaggacgtggccgtgtactactgccagaacgactacagctacccctacaccttcggccagggcaccaagctggaaatcaaactcgaggacctgaagaacgtgttcccacctgaggtggccgtgttcgagcctagcgaggccgagatcagccacacccagaaagccaccctcgtgtgcctggctaccggcttctaccccgaccatgtggaactgtcttggtgggtcaacggcaaagaggtgcacagcggcgtgtgtaccgacccccagccactgaaagaacagcccgccctgaacgacagccggtactgcctgagcagcagactgagagtgtccgccaccttctggcagaacccccggaaccacttcagatgccaggtgcagttctacggcctgagcgagaacgacgagtggacccaggacagagccaagcccgtgacccagatcgtgtctgccgaagcctggggcagagccgattgcgacgtgaagctggtggaaaagagcttcgagacagacaccaacctgaacttccagaacctgagcgtgatcggcttcagaatcctgctgctgaaagtggccggctttaacctgctgatgaccctgcggctgtggtccagcagggccaagcgatctggatctggagcaacaaacttctcactactcaaacaagcaggtgacgtggaggagaatcccgggcctactagtatggactggatttggcgcatccttttccttgtcggcgctgctaccggcgcgcattccttcgaagaagtgcaactggttcagagcggagccgagctgaagaaacctggggccagcgtgaaggtgtcctgtaaagccagcggctacacctttaccgactactacatgaaatgggtccgacaggccccaggccagggactcgaatggatcggcgatattatccccagcaacggggccaccttctacaaccagaaattcaagggccgcgtgaccatcaccgtggacaagagcacaagcaccgcctacatggaactgagcagcctgagaagcgaggacaccgccgtgtattattgcgccagaagccatctgctgcgggccagttggttcgcctattggggacagggaaccctggtcaccgttagctctacgcgtatccagaaccctgatcctgccgtgtaccagctgcgggatagcaagagcagcgacaagagcgtgtgtctgttcaccgacttcgacagccagaccaacgtgtcccagagcaaggactccgacgtgtacatcaccgataagtgcgtgctggacatgcggagcatggacttcaagagcaactccgccgtggcctggtccaacaagtccgatttcgcctgcgccaacgccttcaacaacagcattatccccgaggacacattcttcccaagccccgagagcagctgcggctttaccagcgagagctaccagcagggcgtgctgagcgccaccatcctgtacgagatcctgctgggcaaggccaccctgtacgccgtgctggtgtctgccctggtgctgatggctatggtcaagcggaaggacagccggggataa

SEQ ID NO: 34687 - DNA, 1881 bp, synthetic construct
  source 1..1881: mol_type = other DNA
atggccttaccagtgaccgccttgctcctgccgctggccttgctgctccacgccgccaggccggacttcgtgatgacacagagccctgatagcctggccgtgtctctcggcgagcgagtgaccatgagctgcaagtctagccagagcctgctgaacagcggcaaccagaagaactacctgacctggtatcagcagaagcccggccagcctcctaagctgctgatctactgggccagcaccagagaaagcggcgtgcccgatagattttctggctctggcagcggcaccgacttcaccctgacaatttctagcctgcaagccgaggacgtggccgtgtactactgccagaacgactacagctacccctacaccttcggccagggcaccaagctggaaatcaaactcgaggacctgaagaacgtgttcccacctgaggtggccgtgttcgagcctagcgaggccgagatcagccacacccagaaagccaccctcgtgtgcctggctaccggcttctaccccgaccatgtggaactgtcttggtgggtcaacggcaaagaggtgcacagcggcgtgtgtaccgacccccagccactgaaagaacagcccgccctgaacgacagccggtactgcctgagcagcagactgagagtgtccgccaccttctggcagaacccccggaaccacttcagatgccaggtgcagttctacggcctgagcgagaacgacgagtggacccaggacagagccaagcccgtgacccagatcgtgtctgccgaagcctggggcagagccgattgcggctttaccagcgagagctaccagcagggcgtgctgagcgccaccaacctgagcgtgatcggcttcagaatcctgctgctgaaagtggccggctttaacctgctgatgaccctgcggctgtggtccagcagggccaagcgatctggatctggagcaacaaacttctcactactcaaacaagcaggtgacgtggaggagaatcccgggcctactagtatggactggatttggcgcatccttttccttgtcggcgctgctaccggcgcgcattccttcgaagaagtgcaactggttcagagcggagccgagctgaagaaacctggggccagcgtgaaggtgtcctgtaaagccagcggctacacctttaccgactactacatgaaatgggtccgacaggccccaggccagggactcgaatggatcggcgatattatccccagcaacggggccaccttctacaaccagaaattcaagggccgcgtgaccatcaccgtggacaagagcacaagcaccgcctacatggaactgagcagcctgagaagcgaggacaccgccgtgtattattgcgccagaagccatctgctgcgggccagttggttcgcctattggggacagggaaccctggtcaccgttagctctacgcgtatccagaaccctgatcctgccgtgtaccagctgcgggatagcaagagcagcgacaagagcgtgtgtctgttcaccgacttcgacagccagaccaacgtgtcccagagcaaggactccgacgtgtacatcaccgataagtgcgtgctggacatgcggagcatggacttcaagagcaactccgccgtggcctggtccaacaagtccgatttcgcctgcgccaacgccttcaacaacagcattatccccgaggacacattcttcccaagccccgagagcagctgcgacgtgaagctggtggaaaagagcttcgagacagacaccaacctgaacttccagatcctgtacgagatcctgctgggcaaggccaccctgtacgccgtgctggtgtctgccctggtgctgatggctatggtcaagcggaaggacagccggggataa

SEQ ID NO: 34688 - DNA, 1881 bp, synthetic construct; identical to SEQ ID NO: 34686
  source 1..1881: mol_type = other DNA

SEQ ID NO: 34689 - DNA, 1881 bp, synthetic construct; identical to SEQ ID NO: 34687
  source 1..1881: mol_type = other DNA

SEQ ID NO: 34690 - DNA, 1878 bp, synthetic construct; identical to SEQ ID NO: 4044
  source 1..1878: mol_type = other DNA

SEQ ID NO: 34691 - DNA, 1890 bp, synthetic construct
  source 1..1890: mol_type = other DNA
atggccttaccagtgaccgccttgctcctgccgctggccttgctgctccacgccgccaggccggacttcgtgatgacacagagccctgatagcctggccgtgtctctcggcgagcgagtgaccatgagctgcaagtctagccagagcctgctgaacagcggcaaccagaagaactacctgacctggtatcagcagaagcccggccagcctcctaagctgctgatctactgggccagcaccagagaaagcggcgtgcccgatagattttctggctctggcagcggcaccgacttcaccctgacaatttctagcctgcaagccgaggacgtggccgtgtactactgccagaacgactacagctacccctacaccttcggccagggcaccaagctggaaatcaaactcgaggccgacgtgtcccccaagcctaccatcttcctgccctctatcgccgagacaaagctccagaaggccggcacctacctgtgcctgctggaaaagttcttcccagatgtgattaagatccactggcaggaaaagaagtccaacaccatcctgggcagccaggaaggcaacaccatgaagaccaacgacacctacatgaagttcagctggctgaccgtgcccgagaagtccctggacaaagaacacagatgcatcgtgcggcacgaaaacaacaagaacggcgtggaccaggaaatcatcttcccacccatcaagaccgatgtgattacaatggaccccaaggacaactgctccaaggacgccaacgataccctgctgctccagctgaccaacaccagcgcctactacatgtacttgttgctgctgctgaagtccgtggtgtacttcgccatcatcacatgctgcctgctgcggagaaccgccttctgctgcaacggcgagaagtctagggccaagcgatctggatctggagcaacaaacttctcactactcaaacaagcaggtgacgtggaggagaatcccgggcctactagtatggactggatttggcgcatccttttccttgtcggcgctgctaccggcgcgcattccttcgaagaagtgcaactggttcagagcggagccgagctgaagaaacctggggccagcgtgaaggtgtcctgtaaagccagcggctacacctttaccgactactacatgaaatgggtccgacaggccccaggccagggactcgaatggatcggcgatattatccccagcaacggggccaccttctacaaccagaaattcaagggccgcgtgaccatcaccgtggacaagagcacaagcaccgcctacatggaactgagcagcctgagaagcgaggacaccgccgtgtattattgcgccagaagccatctgctgcgggccagttggttcgcctattggggacagggaaccctggtcaccgttagctctacgcgtagccagcctcacaccaagcccagcgtgttcgtgatgaagaacggcaccaacgtggcctgcctcgtgaaagagttctaccccaaggacatcaggatcaacctggtgtccagcaagaagatcaccgagttcgaccccgccatcgtgatctcccccagcggcaagtacaacgccgtgaagctggggaagtatgaggacagcaacagcgtgacctgctccgtgcagcacgacaacaagaccgtgcacagcaccgactttgaagtgaaaaccgactccaccgaccacgtgaagcccaaagagacagagaacaccaagcagcccagcaagagctgccacaagcccaaggccatcgtgcacaccgagaaagtgaacatgatgagcctgaccgtgatcggcttcagaatcctgctgctgaaagtggccggctttaacctgctgatgaccctgcggctgtggtccagctaa

SEQ ID NO: 34692 - DNA, 1890 bp, synthetic construct
  source 1..1890: mol_type = other DNA
atggccttaccagtgaccgccttgctcctgccgctggccttgctgctccacgccgccaggccggacttcgtgatgacacagagccctgatagcctggccgtgtctctcggcgagcgagtgaccatgagctgcaagtctagccagagcctgctgaacagcggcaaccagaagaactacctgacctggtatcagcagaagcccggccagcctcctaagctgctgatctactgggccagcaccagagaaagcggcgtgcccgatagattttctggctctggcagcggcaccgacttcaccctgacaatttctagcctgcaagccgaggacgtggccgtgtactactgccagaacgactacagctacccctacaccttcggccagggcaccaagctggaaatcaaactcgaggccgacgtgtcccccaagcctaccatcttcctgccctctatcgccgagacaaagctccagaaggccggcacctacctgtgcctgctggaaaagttcttcccagatgtgattaagatccactggcaggaaaagaagtccaacaccatcctgggcagccaggaaggcaacaccatgaagaccaacgacacctacatgaagttcagctggctgaccgtgcccgagaagtccctggacaaagaacacagatgcatcgtgcggcacgaaaacaacaagaacggcgtggaccaggaaatcatcttcccacccatcaagaccgatgtgattacaatggaccccaaggacaactgctccaaggacgccaacgataccctgctgctccagctgaccaacaccagcgcctactacatgtacttgttgctgctgctgaagtccgtggtgtacttcgccatcatcacatgctgcctgctgcggagaaccgccttctgctgcaacggcgagaagtctagggccaagcgatctggatctggagcaacaaacttctcactactcaaacaagcaggtgacgtggaggagaatcccgggcctactagtatggactggatttggcgcatccttttccttgtcggcgctgctaccggcgcgcattccttcgaagaagtgcaactggttcagagcggagccgagctgaagaaacctggggccagcgtgaaggtgtcctgtaaagccagcggctacacctttaccgactactacatgaaatgggtccgacaggccccaggccagggactcgaatggatcggcgatattatccccagcaacggggccaccttctacaaccagaaattcaagggccgcgtgaccatcaccgtggacaagagcacaagcaccgcctacatggaactgagcagcctgagaagcgaggacaccgccgtgtattattgcgccagaagccatctgctgcgggccagttggttcgcctattggggacagggaaccctggtcaccgttagctctacgcgtagccagcctcacaccaagcccagcgtgttcgtgatgaagaacggcaccaacgtggcctgcctcgtgaaagagttctaccccaaggacatcaggatcaacctggtgtccagcaagaagatcaccgagttcgaccccgccatcgtgatctcccccagcggcaagtacaacgccgtgaagctggggaagtacgaggacagcaacagcgtgacctgctccgtgcagcacgacaacaagaccgtgcacagcaccgactttgaagtgaaaaccgactccaccgaccacgtgaagcccaaagagacagagaacaccaagcagcccagcaagagctgccacaagcccaaggccatcgtgcacaccgagaaagtgaacatgatgagcctgaccgtgctgggcttcagaatcctgctgctgaaagtggccggctttaacctgctgatgaccctgcggctgtggtccagctaa

SEQ ID NO: 34693 - DNA, 1878 bp, synthetic construct; identical to SEQ ID NO: 4044
  source 1..1878: mol_type = other DNA

SEQ ID NO: 34694 - DNA, 1890 bp, synthetic construct; identical to SEQ ID NO: 4209
  source 1..1890: mol_type = other DNA

SEQ ID NO: 34695 - DNA, 2283 bp, synthetic construct; identical to SEQ ID NO: 4374
  source 1..2283: mol_type = other DNA

SEQ ID NO: 34696 - DNA, 2295 bp, synthetic construct; identical to SEQ ID NO: 4539
  source 1..2295: mol_type = other DNA

SEQ ID NO: 34697 - DNA, 2694 bp, synthetic construct; identical to SEQ ID NO: 4704
  source 1..2694: mol_type = other DNA

SEQ ID NO: 34698 - DNA, 2706 bp, synthetic construct; identical to SEQ ID NO: 4869
  source 1..2706: mol_type = other DNA

SEQ ID NO: 34699 - DNA, 2088 bp, synthetic construct
  source 1..2088: mol_type = other DNA
atggccttaccagtgaccgccttgctcctgccgctggccttgctgctccacgccgccaggccggacttcgtgatgacacagagccctgatagcctggccgtgtctctcggcgagcgagtgaccatgagctgcaagtctagccagagcctgctgaacagcggcaaccagaagaactacctgacctggtatcagcagaagcccggccagcctcctaagctgctgatctactgggccagcaccagagaaagcggcgtgcccgatagattttctggctctggcagcggcaccgacttcaccctgacaatttctagcctgcaagccgaggacgtggccgtgtactactgccagaacgactacagctacccctacaccttcggccagggcaccaagctggaaatcaaactcgaggacctgaagaacgtgttcccacctgaggtggccgtgttcgagcctagcgaggccgagatcagccacacccagaaagccaccctcgtgtgcctggctaccggcttctaccccgaccatgtggaactgtcttggtgggtcaacggcaaagaggtgcacagcggcgtgtgtaccgacccccagccactgaaagaacagcccgccctgaacgacagccggtactgcctgagcagcagactgagagtgtccgccaccttctggcagaacccccggaaccacttcagatgccaggtgcagttctacggcctgagcgagaacgacgagtggacccaggacagagccaagcccgtgacccagatcgtgtctgccgaagcctggggcagagccgattgcgacgtgaagctggtggaaaagagcttcgagacagacaccaacctgaacttccagaacctgagcgtgatcggcttcagaatcctgctgctgaaagtggccggctttaacctgctgatgaccctgcggctgtggtccagcagggccaagcgatctggatctggagcaacaaacttctcactactcaaacaagcaggtgacgtggaggagaatcccgggcctactagtatggactggatttggcgcatccttttccttgtcggcgctgctaccggcgcccattccgggcccatggaccccgacctggaaatcagagccgccttcctgcggcagagaaacacagccctgagaacagaggtggccgagctggaacaagaggtgcagcggctggaaaacgaggtgtcccagtacgagacaagatacggccctctcggaggcggaaaaggatccggcggcggaggatctggcggaggcggatctgggggcggaggctctttcgaagaagtgcaactggttcagagcggagccgagctgaagaaacctggggccagcgtgaaggtgtcctgtaaagccagcggctacacctttaccgactactacatgaaatgggtccgacaggccccaggccagggactcgaatggatcggcgatattatccccagcaacggggccaccttctacaaccagaaattcaagggccgcgtgaccatcaccgtggacaagagcacaagcaccgcctacatggaactgagcagcctgagaagcgaggacaccgccgtgtattattgcgccagaagccatctgctgcgggccagttggttcgcctattggggacagggaaccctggtcaccgttagctctacgcgtatccagaaccctgatcctgccgtgtaccagctgcgggatagcaagagcagcgacaagagcgtgtgtctgttcaccgacttcgacagccagaccaacgtgtcccagagcaaggactccgacgtgtacatcaccgataagtgcgtgctggacatgcggagcatggacttcaagagcaactccgccgtggcctggtccaacaagtccgatttcgcctgcgccaacgccttcaacaacagcattatccccgaggacacattcttcccaagccccgagagcagctgcggctttaccagcgagagctaccagcagggcgtgctgagcgccaccatcctgtacgagatcctgctgggcaaggccaccctgtacgccgtgctggtgtctgccctggtgctgatggctatggtcaagcggaaggacagccgggga

SEQ ID NO: 34700 - DNA, 2100 bp, synthetic construct
  source 1..2100: mol_type = other DNA
atggccttaccagtgaccgccttgctcctgccgctggccttgctgctccacgccgccaggccggacttcgtgatgacacagagccctgatagcctggccgtgtctctcggcgagcgagtgaccatgagctgcaagtctagccagagcctgctgaacagcggcaaccagaagaactacctgacctggtatcagcagaagcccggccagcctcctaagctgctgatctactgggccagcaccagagaaagcggcgtgcccgatagattttctggctctggcagcggcaccgacttcaccctgacaatttctagcctgcaagccgaggacgtggccgtgtactactgccagaacgactacagctacccctacaccttcggccagggcaccaagctggaaatcaaactcgagatccagaaccctgatcctgccgtgtaccagctgcgggatagcaagagcagcgacaagagcgtgtgtctgttcaccgacttcgacagccagaccaacgtgtcccagagcaaggactccgacgtgtacatcaccgataagtgcgtgctggacatgcggagcatggacttcaagagcaactccgccgtggcctggtccaacaagtccgatttcgcctgcgccaacgccttcaacaacagcattatccccgaggacacattcttcccaagccccgagagcagctgcggctttaccagcgagagctaccagcagggcgtgctgagcgccaccatcctgtacgagatcctgctgggcaaggccaccctgtacgccgtgctggtgtctgccctggtgctgatggctatggtcaagcggaaggacagccggggacgcgccaagagaagcggatctggcgtgaagcagaccctgaatttcgacctgctgaagctggctggcgacgtggaatccaacccaggccctactagtatggactggatttggcgcatccttttccttgtcggcgctgctaccggcgcccattccgggcccatggaccccgacctggaaatcagagccgccttcctgcggcagagaaacacagccctgagaacagaggtggccgagctggaacaagaggtgcagcggctggaaaacgaggtgtcccagtacgagacaagatacggccctctcggaggcggaaaaggatccggcggcggaggatctggcggaggcggatctgggggcggaggctctttcgaagaagtgcaactggttcagagcggagccgagctgaagaaacctggggccagcgtgaaggtgtcctgtaaagccagcggctacacctttaccgactactacatgaaatgggtccgacaggccccaggccagggactcgaatggatcggcgatattatccccagcaacggggccaccttctacaaccagaaattcaagggccgcgtgaccatcaccgtggacaagagcacaagcaccgcctacatggaactgagcagcctgagaagcgaggacaccgccgtgtattattgcgccagaagccatctgctgcgggccagttggttcgcctattggggacagggaaccctggtcaccgttagctctacgcgtgaggacctgaagaacgtgttcccacctgaggtggccgtgttcgagcctagcgaggccgagatcagccacacccagaaagccaccctcgtgtgcctggctaccggcttctaccccgaccatgtggaactgtcttggtgggtcaacggcaaagaggtgcacagcggcgtgtgtaccgacccccagccactgaaagaacagcccgccctgaacgacagccggtactgcctgagcagcagactgagagtgtccgccaccttctggcagaacccccggaaccacttcagatgccaggtgcagttctacggcctgagcgagaacgacgagtggacccaggacagagccaagcccgtgacccagatcgtgtctgccgaagcctggggcagagccgattgcgacgtgaagctggtggaaaagagcttcgagacagacaccaacctgaacttccagaacctgagcgtgatcggcttcagaatcctgctgctgaaagtggccggctttaacctgctgatgaccctgcggctgtggtccagc

SEQ ID NO: 34701 - DNA, 2019 bp, synthetic construct
  source 1..2019: mol_type = other DNA
atggccttaccagtgaccgccttgctcctgccgctggccttgctgctccacgccgccaggccggacttcgtgatgacacagagccctgatagcctggccgtgtctctcggcgagcgagtgaccatgagctgcaagtctagccagagcctgctgaacagcggcaaccagaagaactacctgacctggtatcagcagaagcccggccagcctcctaagctgctgatctactgggccagcaccagagaaagcggcgtgcccgatagattttctggctctggcagcggcaccgacttcaccctgacaatttctagcctgcaagccgaggacgtggccgtgtactactgccagaacgactacagctacccctacaccttcggccagggcaccaagctggaaatcaaactcgaggacctgaagaacgtgttcccacctgaggtggccgtgttcgagcctagcgaggccgagatcagccacacccagaaagccaccctcgtgtgcctggctaccggcttctaccccgaccatgtggaactgtcttggtgggtcaacggcaaagaggtgcacagcggcgtgtgtaccgacccccagccactgaaagaacagcccgccctgaacgacagccggtactgcctgagcagcagactgagagtgtccgccaccttctggcagaacccccggaaccacttcagatgccaggtgcagttctacggcctgagcgagaacgacgagtggacccaggacagagccaagcccgtgacccagatcgtgtctgccgaagcctggggcagagccgattgcgacgtgaagctggtggaaaagagcttcgagacagacaccaacctgaacttccagaacctgagcgtgatcggcttcagaatcctgctgctgaaagtggccggctttaacctgctgatgaccctgcggctgtggtccagcagggccaagcgatctggatctggagcaacaaacttctcactactcaaacaagcaggtgacgtggaggagaatcccgggcctactagtatggactggatttggcgcatccttttccttgtcggcgctgctaccggcgcccattccgggcccgaagttgctgccctcgagaaggaggtagcagctttggaaaaagaagtcgcagcccttgagaaagaagttgcggctctggagaagggatccggcggcggaggatctggcggaggcggatctgggggcggaggctctttcgaagaagtgcaactggttcagagcggagccgagctgaagaaacctggggccagcgtgaaggtgtcctgtaaagccagcggctacacctttaccgactactacatgaaatgggtccgacaggccccaggccagggactcgaatggatcggcgatattatccccagcaacggggccaccttctacaaccagaaattcaagggccgcgtgaccatcaccgtggacaagagcacaagcaccgcctacatggaactgagcagcctgagaagcgaggacaccgccgtgtattattgcgccagaagccatctgctgcgggccagttggttcgcctattggggacagggaaccctggtcaccgttagctctacgcgtatccagaaccctgatcctgccgtgtaccagctgcgggatagcaagagcagcgacaagagcgtgtgtctgttcaccgacttcgacagccagaccaacgtgtcccagagcaaggactccgacgtgtacatcaccgataagtgcgtgctggacatgcggagcatggacttcaagagcaactccgccgtggcctggtccaacaagtccgatttcgcctgcgccaacgccttcaacaacagcattatccccgaggacacattcttcccaagccccgagagcagctgcggctttaccagcgagagctaccagcagggcgtgctgagcgccaccatcctgtacgagatcctgctgggcaaggccaccctgtacgccgtgctggtgtctgccctggtgctgatggctatggtcaagcggaaggacagccgggga

SEQ ID NO: 34702 - DNA, 2031 bp, synthetic construct
  source 1..2031: mol_type = other DNA
atggccttaccagtgaccgccttgctcctgccgctggccttgctgctccacgccgccaggccggacttcgtgatgacacagagccctgatagcctggccgtgtctctcggcgagcgagtgaccatgagctgcaagtctagccagagcctgctgaacagcggcaaccagaagaactacctgacctggtatcagcagaagcccggccagcctcctaagctgctgatctactgggccagcaccagagaaagcggcgtgcccgatagattttctggctctggcagcggcaccgacttcaccctgacaatttctagcctgcaagccgaggacgtggccgtgtactactgccagaacgactacagctacccctacaccttcggccagggcaccaagctggaaatcaaactcgagatccagaaccctgatcctgccgtgtaccagctgcgggatagcaagagcagcgacaagagcgtgtgtctgttcaccgacttcgacagccagaccaacgtgtcccagagcaaggactccgacgtgtacatcaccgataagtgcgtgctggacatgcggagcatggacttcaagagcaactccgccgtggcctggtccaacaagtccgatttcgcctgcgccaacgccttcaacaacagcattatccccgaggacacattcttcccaagccccgagagcagctgcggctttaccagcgagagctaccagcagggcgtgctgagcgccaccatcctgtacgagatcctgctgggcaaggccaccctgtacgccgtgctggtgtctgccctggtgctgatggctatggtcaagcggaaggacagccggggacgcgccaagagaagcggatctggcgtgaagcagaccctgaatttcgacctgctgaagctggctggcgacgtggaatccaacccaggccctactagtatggactggatttggcgcatccttttccttgtcggcgctgctaccggcgcccattccgggcccgaagttgctgccctcgagaaggaggtagcagctttggaaaaagaagtcgcagcccttgagaaagaagttgcggctctggagaagggatccggcggcggaggatctggcggaggcggatctgggggcggaggctctttcgaagaagtgcaactggttcagagcggagccgagctgaagaaacctggggccagcgtgaaggtgtcctgtaaagccagcggctacacctttaccgactactacatgaaatgggtccgacaggccccaggccagggactcgaatggatcggcgatattatccccagcaacggggccaccttctacaaccagaaattcaagggccgcgtgaccatcaccgtggacaagagcacaagcaccgcctacatggaactgagcagcctgagaagcgaggacaccgccgtgtattattgcgccagaagccatctgctgcgggccagttggttcgcctattggggacagggaaccctggtcaccgttagctctacgcgtgaggacctgaagaacgtgttcccacctgaggtggccgtgttcgagcctagcgaggccgagatcagccacacccagaaagccaccctcgtgtgcctggctaccggcttctaccccgaccatgtggaactgtcttggtgggtcaacggcaaagaggtgcacagcggcgtgtgtaccgacccccagccactgaaagaacagcccgccctgaacgacagccggtactgcctgagcagcagactgagagtgtccgccaccttctggcagaacccccggaaccacttcagatgccaggtgcagttctacggcctgagcgagaacgacgagtggacccaggacagagccaagcccgtgacccagatcgtgtctgccgaagcctggggcagagccgattgcgacgtgaagctggtggaaaagagcttcgagacagacaccaacctgaacttccagaacctgagcgtgatcggcttcagaatcctgctgctgaaagtggccggctttaacctgctgatgaccctgcggctgtggtccagc

SEQ ID NO: 34703 - DNA, 2289 bp, synthetic construct
  source 1..2289: mol_type = other DNA
atggccttaccagtgaccgccttgctcctgccgctggccttgctgctccacgccgccaggccggacttcgtgatgacacagagccctgatagcctggccgtgtctctcggcgagcgagtgaccatgagctgcaagtctagccagagcctgctgaacagcggcaaccagaagaactacctgacctggtatcagcagaagcccggccagcctcctaagctgctgatctactgggccagcaccagagaaagcggcgtgcccgatagattttctggctctggcagcggcaccgacttcaccctgacaatttctagcctgcaagccgaggacgtggccgtgtactactgccagaacgactacagctacccctacaccttcggccagggcaccaagctggaaatcaaactcgaggacctgaagaacgtgttcccacctgaggtggccgtgttcgagcctagcgaggccgagatcagccacacccagaaagccaccctcgtgtgcctggctaccggcttctaccccgaccatgtggaactgtcttggtgggtcaacggcaaagaggtgcacagcggcgtgtgtaccgacccccagccactgaaagaacagcccgccctgaacgacagccggtactgcctgagcagcagactgagagtgtccgccaccttctggcagaacccccggaaccacttcagatgccaggtgcagttctacggcctgagcgagaacgacgagtggacccaggacagagccaagcccgtgacccagatcgtgtctgccgaagcctggggcagagccgattgcgacgtgaagctggtggaaaagagcttcgagacagacaccaacctgaacttccagaacctgagcgtgatcggcttcagaatcctgctgctgaaagtggccggctttaacctgctgatgaccctgcggctgtggtccagcagggccaagcgatctggatctggagcaacaaacttctcactactcaaacaagcaggtgacgtggaggagaatcccgggcctactagtatggactggatttggcgcatccttttccttgtcggcgctgctaccggcgcccattccgggccccaggttcagctgcaagagtctggcggaggacttgctcaagctggcggaagcctgagactgtcttgtgccgcctctggcagaaccttcagcatgggctggtttagacaggcccctggcaaagagagagagttcgtcgccgccatcacatacagcggcggcagcccttactacgcctcttctgtcagaggccggttcaccatcagccgggacaacgccaagaacaccgtgtacctccagatgaacagcctgaagccagaggacaccgccgtgtactactgtgccgccaatccaacctacggcagcgactggaatgccgagaattggggccagggcacccaagtgacagtgtctagtggatccggcggcggaggatctggcggaggcggatctgggggcggaggctctttcgaagaagtgcaactggttcagagcggagccgagctgaagaaacctggggccagcgtgaaggtgtcctgtaaagccagcggctacacctttaccgactactacatgaaatgggtccgacaggccccaggccagggactcgaatggatcggcgatattatccccagcaacggggccaccttctacaaccagaaattcaagggccgcgtgaccatcaccgtggacaagagcacaagcaccgcctacatggaactgagcagcctgagaagcgaggacaccgccgtgtattattgcgccagaagccatctgctgcgggccagttggttcgcctattggggacagggaaccctggtcaccgttagctctacgcgtatccagaaccctgatcctgccgtgtaccagctgcgggatagcaagagcagcgacaagagcgtgtgtctgttcaccgacttcgacagccagaccaacgtgtcccagagcaaggactccgacgtgtacatcaccgataagtgcgtgctggacatgcggagcatggacttcaagagcaactccgccgtggcctggtccaacaagtccgatttcgcctgcgccaacgccttcaacaacagcattatccccgaggacacattcttcccaagccccgagagcagctgcggctttaccagcgagagctaccagcagggcgtgctgagcgccaccatcctgtacgagatcctgctgggcaaggccaccctgtacgccgtgctggtgtctgccctggtgctgatggctatggtcaagcggaaggacagccgggga

SEQ ID NO: 34704 - DNA, 2301 bp, synthetic construct
  source 1..2301: mol_type = other DNA
atggccttaccagtgaccgccttgctcctgccgctggccttgctgctccacgccgccaggccggacttcgtgatgacacagagccctgatagcctggccgtgtctctcggcgagcgagtgaccatgagctgcaagtctagccagagcctgctgaacagcggcaaccagaagaactacctgacctggtatcagcagaagcccggccagcctcctaagctgctgatctactgggccagcaccagagaaagcggcgtgcccgatagattttctggctctggcagcggcaccgacttcaccctgacaatttctagcctgcaagccgaggacgtggccgtgtactactgccagaacgactacagctacccctacaccttcggccagggcaccaagctggaaatcaaactcgagatccagaaccctgatcctgccgtgtaccagctgcgggatagcaagagcagcgacaagagcgtgtgtctgttcaccgacttcgacagccagaccaacgtgtcccagagcaaggactccgacgtgtacatcaccgataagtgcgtgctggacatgcggagcatggacttcaagagcaactccgccgtggcctggtccaacaagtccgatttcgcctgcgccaacgccttcaacaacagcattatccccgaggacacattcttcccaagccccgagagcagctgcggctttaccagcgagagctaccagcagggcgtgctgagcgccaccatcctgtacgagatcctgctgggcaaggccaccctgtacgccgtgctggtgtctgccctggtgctgatggctatggtcaagcggaaggacagccggggacgcgccaagagaagcggatctggcgtgaagcagaccctgaatttcgacctgctgaagctggctggcgacgtggaatccaacccaggccctactagtatggactggatttggcgcatccttttccttgtcggcgctgctaccggcgcccattccgggccccaggttcagctgcaagagtctggcggaggacttgctcaagctggcggaagcctgagactgtcttgtgccgcctctggcagaaccttcagcatgggctggtttagacaggcccctggcaaagagagagagttcgtcgccgccatcacatacagcggcggcagcccttactacgcctcttctgtcagaggccggttcaccatcagccgggacaacgccaagaacaccgtgtacctccagatgaacagcctgaagccagaggacaccgccgtgtactactgtgccgccaatccaacctacggcagcgactggaatgccgagaattggggccagggcacccaagtgacagtgtctagtggatccggcggcggaggatctggcggaggcggatctgggggcggaggctctttcgaagaagtgcaactggttcagagcggagccgagctgaagaaacctggggccagcgtgaaggtgtcctgtaaagccagcggctacacctttaccgactactacatgaaatgggtccgacaggccccaggccagggactcgaatggatcggcgatattatccccagcaacggggccaccttctacaaccagaaattcaagggccgcgtgaccatcaccgtggacaagagcacaagcaccgcctacatggaactgagcagcctgagaagcgaggacaccgccgtgtattattgcgccagaagccatctgctgcgggccagttggttcgcctattggggacagggaaccctggtcaccgttagctctacgcgtgaggacctgaagaacgtgttcccacctgaggtggccgtgttcgagcctagcgaggccgagatcagccacacccagaaagccaccctcgtgtgcctggctaccggcttctaccccgaccatgtggaactgtcttggtgggtcaacggcaaagaggtgcacagcggcgtgtgtaccgacccccagccactgaaagaacagcccgccctgaacgacagccggtactgcctgagcagcagactgagagtgtccgccaccttctggcagaacccccggaaccacttcagatgccaggtgcagttctacggcctgagcgagaacgacgagtggacccaggacagagccaagcccgtgacccagatcgtgtctgccgaagcctggggcagagccgattgcgacgtgaagctggtggaaaagagcttcgagacagacaccaacctgaacttccagaacctgagcgtgatcggcttcagaatcctgctgctgaaagtggccggctttaacctgctgatgaccctgcggctgtggtccagc

SEQ ID NO: 34705 - DNA, 2307 bp, synthetic construct
  source 1..2307: mol_type = other DNA
atggccttaccagtgaccgccttgctcctgccgctggccttgctgctccacgccgccaggccggaagtgcaactggtggaatctggaggctctctggtgcagccagggggaagcctgagactgtcttgtgccgcttccggcttcaccttcgacgactacgccatgagctgggtgcgccaggtgccaggcaaaggcctggaatgggtgtccagcatcaactggagcggcacccacaccgattacgccgactccgtgaaaggcagattcacaatcagcagaaacaacgccaacaataccctgtacctgcagatgaactccctgaagtctgaggatacagcagtgtattattgcgccaagaactggcgggacgccggcaccacttggtttgagaaaagcggctctgccggacagggaacccaagtgacagtgtcctccggtaccggcggaggcggatctggcggcggaggtagcggtggcggaggatctgaattcgacttcgtgatgacacagagccctgatagcctggccgtgtctctcggcgagcgagtgaccatgagctgcaagtctagccagagcctgctgaacagcggcaaccagaagaactacctgacctggtatcagcagaagcccggccagcctcctaagctgctgatctactgggccagcaccagagaaagcggcgtgcccgatagattttctggctctggcagcggcaccgacttcaccctgacaatttctagcctgcaagccgaggacgtggccgtgtactactgccagaacgactacagctacccctacaccttcggccagggcaccaagctggaaatcaaactcgaggacctgaagaacgtgttcccacctgaggtggccgtgttcgagcctagcgaggccgagatcagccacacccagaaagccaccctcgtgtgcctggctaccggcttctaccccgaccatgtggaactgtcttggtgggtcaacggcaaagaggtgcacagcggcgtgtgtaccgacccccagccactgaaagaacagcccgccctgaacgacagccggtactgcctgagcagcagactgagagtgtccgccaccttctggcagaacccccggaaccacttcagatgccaggtgcagttctacggcctgagcgagaacgacgagtggacccaggacagagccaagcccgtgacccagatcgtgtctgccgaagcctggggcagagccgattgcgacgtgaagctggtggaaaagagcttcgagacagacaccaacctgaacttccagaacctgagcgtgatcggcttcagaatcctgctgctgaaagtggccggctttaacctgctgatgaccctgcggctgtggtccagcagggccaagcgatctggatctggagcaacaaacttctcactactcaaacaagcaggtgacgtggaggagaatcccgggcctactagtatggactggatttggcgcatccttttccttgtcggcgctgctaccggcgcgcattccttcgaagaagtgcaactggttcagagcggagccgagctgaagaaacctggggccagcgtgaaggtgtcctgtaaagccagcggctacacctttaccgactactacatgaaatgggtccgacaggccccaggccagggactcgaatggatcggcgatattatccccagcaacggggccaccttctacaaccagaaattcaagggccgcgtgaccatcaccgtggacaagagcacaagcaccgcctacatggaactgagcagcctgagaagcgaggacaccgccgtgtattattgcgccagaagccatctgctgcgggccagttggttcgcctattggggacagggaaccctggtcaccgttagctctacgcgtatccagaaccctgatcctgccgtgtaccagctgcgggatagcaagagcagcgacaagagcgtgtgtctgttcaccgacttcgacagccagaccaacgtgtcccagagcaaggactccgacgtgtacatcaccgataagtgcgtgctggacatgcggagcatggacttcaagagcaactccgccgtggcctggtccaacaagtccgatttcgcctgcgccaacgccttcaacaacagcattatccccgaggacacattcttcccaagccccgagagcagctgcggctttaccagcgagagctaccagcagggcgtgctgagcgccaccatcctgtacgagatcctgctgggcaaggccaccctgtacgccgtgctggtgtctgccctggtgctgatggctatggtcaagcggaaggacagccgggga

SEQ ID NO: 34706 - DNA, 2319 bp, synthetic construct
  source 1..2319: mol_type = other DNA
atggccttaccagtgaccgccttgctcctgccgctggccttgctgctccacgccgccaggccggaagtgcaactggtggaatctggaggctctctggtgcagccagggggaagcctgagactgtcttgtgccgcttccggcttcaccttcgacgactacgccatgagctgggtgcgccaggtgccaggcaaaggcctggaatgggtgtccagcatcaactggagcggcacccacaccgattacgccgactccgtgaaaggcagattcacaatcagcagaaacaacgccaacaataccctgtacctgcagatgaactccctgaagtctgaggatacagcagtgtattattgcgccaagaactggcgggacgccggcaccacttggtttgagaaaagcggctctgccggacagggaacccaagtgacagtgtcctccggtaccggcggaggcggatctggcggcggaggtagcggtggcggaggatctgaattcgacttcgtgatgacacagagccctgatagcctggccgtgtctctcggcgagcgagtgaccatgagctgcaagtctagccagagcctgctgaacagcggcaaccagaagaactacctgacctggtatcagcagaagcccggccagcctcctaagctgctgatctactgggccagcaccagagaaagcggcgtgcccgatagattttctggctctggcagcggcaccgacttcaccctgacaatttctagcctgcaagccgaggacgtggccgtgtactactgccagaacgactacagctacccctacaccttcggccagggcaccaagctggaaatcaaactcgagatccagaaccctgatcctgccgtgtaccagctgcgggatagcaagagcagcgacaagagcgtgtgtctgttcaccgacttcgacagccagaccaacgtgtcccagagcaaggactccgacgtgtacatcaccgataagtgcgtgctggacatgcggagcatggacttcaagagcaactccgccgtggcctggtccaacaagtccgatttcgcctgcgccaacgccttcaacaacagcattatccccgaggacacattcttcccaagccccgagagcagctgcggctttaccagcgagagctaccagcagggcgtgctgagcgccaccatcctgtacgagatcctgctgggcaaggccaccctgtacgccgtgctggtgtctgccctggtgctgatggctatggtcaagcggaaggacagccggggacgcgccaagagaagcggatctggcgtgaagcagaccctgaatttcgacctgctgaagctggctggcgacgtggaatccaacccaggccctactagtatggactggatttggcgcatccttttccttgtcggcgctgctaccggcgcgcattccttcgaagaagtgcaactggttcagagcggagccgagctgaagaaacctggggccagcgtgaaggtgtcctgtaaagccagcggctacacctttaccgactactacatgaaatgggtccgacaggccccaggccagggactcgaatggatcggcgatattatccccagcaacggggccaccttctacaaccagaaattcaagggccgcgtgaccatcaccgtggacaagagcacaagcaccgcctacatggaactgagcagcctgagaagcgaggacaccgccgtgtattattgcgccagaagccatctgctgcgggccagttggttcgcctattggggacagggaaccctggtcaccgttagctctacgcgtgaggacctgaagaacgtgttcccacctgaggtggccgtgttcgagcctagcgaggccgagatcagccacacccagaaagccaccctcgtgtgcctggctaccggcttctaccccgaccatgtggaactgtcttggtgggtcaacggcaaagaggtgcacagcggcgtgtgtaccgacccccagccactgaaagaacagcccgccctgaacgacagccggtactgcctgagcagcagactgagagtgtccgccaccttctggcagaacccccggaaccacttcagatgccaggtgcagttctacggcctgagcgagaacgacgagtggacccaggacagagccaagcccgtgacccagatcgtgtctgccgaagcctggggcagagccgattgcgacgtgaagctggtggaaaagagcttcgagacagacaccaacctgaacttccagaacctgagcgtgatcggcttcagaatcctgctgctgaaagtggccggctttaacctgctgatgaccctgcggctgtggtccagc

SEQ ID NO: 34707 - DNA, 2301 bp, synthetic construct
  source 1..2301: mol_type = other DNA
atggccttaccagtgaccgccttgctcctgccgctggccttgctgctccacgccgccaggccggaagttcagctgcttgagtctggcggaggactggttcaacctggcggaagcctgagactgtcttgtgccgccagcggcttcatcttcagcagctacgccatgagctgggtccgacaggctcctggaaagggccaagaatgggtttccggcgttagcggcacaggcgtgaacacctactacgccgatagcgtgaagggcagattcaccatcagccgggacaacagcaagaacaccctgtacctccagatgaacagcctgagagccgaggacaccgccgtgtactattgtgcctctggcaaaggctgggacagcggctcttggtacgaggactatagaggccagggcaccctggtcacagtttcttcaggtaccggcggaggcggatctggcggcggaggtagcggtggcggaggatctgaattcgacttcgtgatgacacagagccctgatagcctggccgtgtctctcggcgagcgagtgaccatgagctgcaagtctagccagagcctgctgaacagcggcaaccagaagaactacctgacctggtatcagcagaagcccggccagcctcctaagctgctgatctactgggccagcaccagagaaagcggcgtgcccgatagattttctggctctggcagcggcaccgacttcaccctgacaatttctagcctgcaagccgaggacgtggccgtgtactactgccagaacgactacagctacccctacaccttcggccagggcaccaagctggaaatcaaactcgaggacctgaagaacgtgttcccacctgaggtggccgtgttcgagcctagcgaggccgagatcagccacacccagaaagccaccctcgtgtgcctggctaccggcttctaccccgaccatgtggaactgtcttggtgggtcaacggcaaagaggtgcacagcggcgtgtgtaccgacccccagccactgaaagaacagcccgccctgaacgacagccggtactgcctgagcagcagactgagagtgtccgccaccttctggcagaacccccggaaccacttcagatgccaggtgcagttctacggcctgagcgagaacgacgagtggacccaggacagagccaagcccgtgacccagatcgtgtctgccgaagcctggggcagagccgattgcgacgtgaagctggtggaaaagagcttcgagacagacaccaacctgaacttccagaacctgagcgtgatcggcttcagaatcctgctgctgaaagtggccggctttaacctgctgatgaccctgcggctgtggtccagcagggccaagcgatctggatctggagcaacaaacttctcactactcaaacaagcaggtgacgtggaggagaatcccgggcctactagtatggactggatttggcgcatccttttccttgtcggcgctgctaccggcgcgcattccttcgaagaagtgcaactggttcagagcggagccgagctgaagaaacctggggccagcgtgaaggtgtcctgtaaagccagcggctacacctttaccgactactacatgaaatgggtccgacaggccccaggccagggactcgaatggatcggcgatattatccccagcaacggggccaccttctacaaccagaaattcaagggccgcgtgaccatcaccgtggacaagagcacaagcaccgcctacatggaactgagcagcctgagaagcgaggacaccgccgtgtattattgcgccagaagccatctgctgcgggccagttggttcgcctattggggacagggaaccctggtcaccgttagctctacgcgtatccagaaccctgatcctgccgtgtaccagctgcgggatagcaagagcagcgacaagagcgtgtgtctgttcaccgacttcgacagccagaccaacgtgtcccagagcaaggactccgacgtgtacatcaccgataagtgcgtgctggacatgcggagcatggacttcaagagcaactccgccgtggcctggtccaacaagtccgatttcgcctgcgccaacgccttcaacaacagcattatccccgaggacacattcttcccaagccccgagagcagctgcggctttaccagcgagagctaccagcagggcgtgctgagcgccaccatcctgtacgagatcctgctgggcaaggccaccctgtacgccgtgctggtgtctgccctggtgctgatggctatggtcaagcggaaggacagccgggga

SEQ ID NO: 34708 - DNA, 2313 bp, synthetic construct
  source 1..2313: mol_type = other DNA
atggccttaccagtgaccgccttgctcctgccgctggccttgctgctccacgccgccaggccggaagttcagctgcttgagtctggcggaggactggttcaacctggcggaagcctgagactgtcttgtgccgccagcggcttcatcttcagcagctacgccatgagctgggtccgacaggctcctggaaagggccaagaatgggtttccggcgttagcggcacaggcgtgaacacctactacgccgatagcgtgaagggcagattcaccatcagccgggacaacagcaagaacaccctgtacctccagatgaacagcctgagagccgaggacaccgccgtgtactattgtgcctctggcaaaggctgggacagcggctcttggtacgaggactatagaggccagggcaccctggtcacagtttcttcaggtaccggcggaggcggatctggcggcggaggtagcggtggcggaggatctgaattcgacttcgtgatgacacagagccctgatagcctggccgtgtctctcggcgagcgagtgaccatgagctgcaagtctagccagagcctgctgaacagcggcaaccagaagaactacctgacctggtatcagcagaagcccggccagcctcctaagctgctgatctactgggccagcaccagagaaagcggcgtgcccgatagattttctggctctggcagcggcaccgacttcaccctgacaatttctagcctgcaagccgaggacgtggccgtgtactactgccagaacgactacagctacccctacaccttcggccagggcaccaagctggaaatcaaactcgagatccagaaccctgatcctgccgtgtaccagctgcgggatagcaagagcagcgacaagagcgtgtgtctgttcaccgacttcgacagccagaccaacgtgtcccagagcaaggactccgacgtgtacatcaccgataagtgcgtgctggacatgcggagcatggacttcaagagcaactccgccgtggcctggtccaacaagtccgatttcgcctgcgccaacgccttcaacaacagcattatccccgaggacacattcttcccaagccccgagagcagctgcggctttaccagcgagagctaccagcagggcgtgctgagcgccaccatcctgtacgagatcctgctgggcaaggccaccctgtacgccgtgctggtgtctgccctggtgctgatggctatggtcaagcggaaggacagccggggacgcgccaagagaagcggatctggcgtgaagcagaccctgaatttcgacctgctgaagctggctggcgacgtggaatccaacccaggccctactagtatggactggatttggcgcatccttttccttgtcggcgctgctaccggcgcgcattccttcgaagaagtgcaactggttcagagcggagccgagctgaagaaacctggggccagcgtgaaggtgtcctgtaaagccagcggctacacctttaccgactactacatgaaatgggtccgacaggccccaggccagggactcgaatggatcggcgatattatccccagcaacggggccaccttctacaaccagaaattcaagggccgcgtgaccatcaccgtggacaagagcacaagcaccgcctacatggaactgagcagcctgagaagcgaggacaccgccgtgtattattgcgccagaagccatctgctgcgggccagttggttcgcctattggggacagggaaccctggtcaccgttagctctacgcgtgaggacctgaagaacgtgttcccacctgaggtggccgtgttcgagcctagcgaggccgagatcagccacacccagaaagccaccctcgtgtgcctggctaccggcttctaccccgaccatgtggaactgtcttggtgggtcaacggcaaagaggtgcacagcggcgtgtgtaccgacccccagccactgaaagaacagcccgccctgaacgacagccggtactgcctgagcagcagactgagagtgtccgccaccttctggcagaacccccggaaccacttcagatgccaggtgcagttctacggcctgagcgagaacgacgagtggacccaggacagagccaagcccgtgacccagatcgtgtctgccgaagcctggggcagagccgattgcgacgtgaagctggtggaaaagagcttcgagacagacaccaacctgaacttccagaacctgagcgtgatcggcttcagaatcctgctgctgaaagtggccggctttaacctgctgatgaccctgcggctgtggtccagc

SEQ ID NO: 34709 - DNA, 2205 bp, synthetic construct
  source 1..2205: mol_type = other DNA
atggccttaccagtgaccgccttgctcctgccgctggccttgctgctccacgccgccaggccgatgctgcccgctcctaagaatctggtggtgtccagaatcaccgaggacagcgccagactgtcttggacagctcctgatgccgccttcgacagcttccccatccggtacatcgagacactgatctggggcgaagccatctggctggatgtgcctggaagcgagagaagctacgacctgaccggactgaagcctggcacagagtatgccgtggtcatcaccggcgtgaaaggcggcagattctctagccctctggtggcctctttcaccaccggtaccggcggaggcggatctggcggcggaggtagcggtggcggaggatctgaattcgacttcgtgatgacacagagccctgatagcctggccgtgtctctcggcgagcgagtgaccatgagctgcaagtctagccagagcctgctgaacagcggcaaccagaagaactacctgacctggtatcagcagaagcccggccagcctcctaagctgctgatctactgggccagcaccagagaaagcggcgtgcccgatagattttctggctctggcagcggcaccgacttcaccctgacaatttctagcctgcaagccgaggacgtggccgtgtactactgccagaacgactacagctacccctacaccttcggccagggcaccaagctggaaatcaaactcgaggacctgaagaacgtgttcccacctgaggtggccgtgttcgagcctagcgaggccgagatcagccacacccagaaagccaccctcgtgtgcctggctaccggcttctaccccgaccatgtggaactgtcttggtgggtcaacggcaaagaggtgcacagcggcgtgtgtaccgacccccagccactgaaagaacagcccgccctgaacgacagccggtactgcctgagcagcagactgagagtgtccgccaccttctggcagaacccccggaaccacttcagatgccaggtgcagttctacggcctgagcgagaacgacgagtggacccaggacagagccaagcccgtgacccagatcgtgtctgccgaagcctggggcagagccgattgcgacgtgaagctggtggaaaagagcttcgagacagacaccaacctgaacttccagaacctgagcgtgatcggcttcagaatcctgctgctgaaagtggccggctttaacctgctgatgaccctgcggctgtggtccagcagggccaagcgatctggatctggagcaacaaacttctcactactcaaacaagcaggtgacgtggaggagaatcccgggcctactagtatggactggatttggcgcatccttttccttgtcggcgctgctaccggcgcgcattccttcgaagaagtgcaactggttcagagcggagccgagctgaagaaacctggggccagcgtgaaggtgtcctgtaaagccagcggctacacctttaccgactactacatgaaatgggtccgacaggccccaggccagggactcgaatggatcggcgatattatccccagcaacggggccaccttctacaaccagaaattcaagggccgcgtgaccatcaccgtggacaagagcacaagcaccgcctacatggaactgagcagcctgagaagcgaggacaccgccgtgtattattgcgccagaagccatctgctgcgggccagttggttcgcctattggggacagggaaccctggtcaccgttagctctacgcgtatccagaaccctgatcctgccgtgtaccagctgcgggatagcaagagcagcgacaagagcgtgtgtctgttcaccgacttcgacagccagaccaacgtgtcccagagcaaggactccgacgtgtacatcaccgataagtgcgtgctggacatgcggagcatggacttcaagagcaactccgccgtggcctggtccaacaagtccgatttcgcctgcgccaacgccttcaacaacagcattatccccgaggacacattcttcccaagccccgagagcagctgcggctttaccagcgagagctaccagcagggcgtgctgagcgccaccatcctgtacgagatcctgctgggcaaggccaccctgtacgccgtgctggtgtctgccctggtgctgatggctatggtcaagcggaaggacagccgggga

SEQ ID NO: 34710 - DNA, 2217 bp, synthetic construct
  source 1..2217: mol_type = other DNA
atggccttaccagtgaccgccttgctcctgccgctggccttgctgctccacgccgccaggccgatgctgcccgctcctaagaatctggtggtgtccagaatcaccgaggacagcgccagactgtcttggacagctcctgatgccgccttcgacagcttccccatccggtacatcgagacactgatctggggcgaagccatctggctggatgtgcctggaagcgagagaagctacgacctgaccggactgaagcctggcacagagtatgccgtggtcatcaccggcgtgaaaggcggcagattctctagccctctggtggcctctttcaccaccggtaccggcggaggcggatctggcggcggaggtagcggtggcggaggatctgaattcgacttcgtgatgacacagagccctgatagcctggccgtgtctctcggcgagcgagtgaccatgagctgcaagtctagccagagcctgctgaacagcggcaaccagaagaactacctgacctggtatcagcagaagcccggccagcctcctaagctgctgatctactgggccagcaccagagaaagcggcgtgcccgatagattttctggctctggcagcggcaccgacttcaccctgacaatttctagcctgcaagccgaggacgtggccgtgtactactgccagaacgactacagctacccctacaccttcggccagggcaccaagctggaaatcaaactcgagatccagaaccctgatcctgccgtgtaccagctgcgggatagcaagagcagcgacaagagcgtgtgtctgttcaccgacttcgacagccagaccaacgtgtcccagagcaaggactccgacgtgtacatcaccgataagtgcgtgctggacatgcggagcatggacttcaagagcaactccgccgtggcctggtccaacaagtccgatttcgcctgcgccaacgccttcaacaacagcattatccccgaggacacattcttcccaagccccgagagcagctgcggctttaccagcgagagctaccagcagggcgtgctgagcgccaccatcctgtacgagatcctgctgggcaaggccaccctgtacgccgtgctggtgtctgccctggtgctgatggctatggtcaagcggaaggacagccggggacgcgccaagagaagcggatctggcgtgaagcagaccctgaatttcgacctgctgaagctggctggcgacgtggaatccaacccaggccctactagtatggactggatttggcgcatccttttccttgtcggcgctgctaccggcgcgcattccttcgaagaagtgcaactggttcagagcggagccgagctgaagaaacctggggccagcgtgaaggtgtcctgtaaagccagcggctacacctttaccgactactacatgaaatgggtccgacaggccccaggccagggactcgaatggatcggcgatattatccccagcaacggggccaccttctacaaccagaaattcaagggccgcgtgaccatcaccgtggacaagagcacaagcaccgcctacatggaactgagcagcctgagaagcgaggacaccgccgtgtattattgcgccagaagccatctgctgcgggccagttggttcgcctattggggacagggaaccctggtcaccgttagctctacgcgtgaggacctgaagaacgtgttcccacctgaggtggccgtgttcgagcctagcgaggccgagatcagccacacccagaaagccaccctcgtgtgcctggctaccggcttctaccccgaccatgtggaactgtcttggtgggtcaacggcaaagaggtgcacagcggcgtgtgtaccgacccccagccactgaaagaacagcccgccctgaacgacagccggtactgcctgagcagcagactgagagtgtccgccaccttctggcagaacccccggaaccacttcagatgccaggtgcagttctacggcctgagcgagaacgacgagtggacccaggacagagccaagcccgtgacccagatcgtgtctgccgaagcctggggcagagccgattgcgacgtgaagctggtggaaaagagcttcgagacagacaccaacctgaacttccagaacctgagcgtgatcggcttcagaatcctgctgctgaaagtggccggctttaacctgctgatgaccctgcggctgtggtccagc

SEQ ID NO: 34711 - DNA, 2292 bp, synthetic construct
  source 1..2292: mol_type = other DNA
atggccttaccagtgaccgccttgctcctgccgctggccttgctgctccacgccgccaggccggaggtgcagctggttgaatctggcggaggactggttcagcctggcggatctctgagactgtcttgtgccgccagcggcttcaacatcaaggatacctgtatcggctgggttcgcagagcccctggcaaagaggaagaactggtcgccaaaatctgcaagtacagcggccacaccagatacgccgacagcgtgaagggcagattcaccatcagcgccgacaccagcaagaacaccgcctacctccagatgaacagcctgagagccgaggacaccgccgtgtactattgtgccgctgtgtccgtcagagatgggcactacaattactggggccagggcaccaccgtgaccgtttcttcaggtaccggcggaggcggatctggcggcggaggtagcggtggcggaggatctgaattcgacttcgtgatgacacagagccctgatagcctggccgtgtctctcggcgagcgagtgaccatgagctgcaagtctagccagagcctgctgaacagcggcaaccagaagaactacctgacctggtatcagcagaagcccggccagcctcctaagctgctgatctactgggccagcaccagagaaagcggcgtgcccgatagattttctggctctggcagcggcaccgacttcaccctgacaatttctagcctgcaagccgaggacgtggccgtgtactactgccagaacgactacagctacccctacaccttcggccagggcaccaagctggaaatcaaactcgaggacctgaagaacgtgttcccacctgaggtggccgtgttcgagcctagcgaggccgagatcagccacacccagaaagccaccctcgtgtgcctggctaccggcttctaccccgaccatgtggaactgtcttggtgggtcaacggcaaagaggtgcacagcggcgtgtgtaccgacccccagccactgaaagaacagcccgccctgaacgacagccggtactgcctgagcagcagactgagagtgtccgccaccttctggcagaacccccggaaccacttcagatgccaggtgcagttctacggcctgagcgagaacgacgagtggacccaggacagagccaagcccgtgacccagatcgtgtctgccgaagcctggggcagagccgattgcgacgtgaagctggtggaaaagagcttcgagacagacaccaacctgaacttccagaacctgagcgtgatcggcttcagaatcctgctgctgaaagtggccggctttaacctgctgatgaccctgcggctgtggtccagcagggccaagcgatctggatctggagcaacaaacttctcactactcaaacaagcaggtgacgtggaggagaatcccgggcctactagtatggactggatttggcgcatccttttccttgtcggcgctgctaccggcgcgcattccttcgaagaagtgcaactggttcagagcggagccgagctgaagaaacctggggccagcgtgaaggtgtcctgtaaagccagcggctacacctttaccgactactacatgaaatgggtccgacaggccccaggccagggactcgaatggatcggcgatattatccccagcaacggggccaccttctacaaccagaaattcaagggccgcgtgaccatcaccgtggacaagagcacaagcaccgcctacatggaactgagcagcctgagaagcgaggacaccgccgtgtattattgcgccagaagccatctgctgcgggccagttggttcgcctattggggacagggaaccctggtcaccgttagctctacgcgtatccagaaccctgatcctgccgtgtaccagctgcgggatagcaagagcagcgacaagagcgtgtgtctgttcaccgacttcgacagccagaccaacgtgtcccagagcaaggactccgacgtgtacatcaccgataagtgcgtgctggacatgcggagcatggacttcaagagcaactccgccgtggcctggtccaacaagtccgatttcgcctgcgccaacgccttcaacaacagcattatccccgaggacacattcttcccaagccccgagagcagctgcggctttaccagcgagagctaccagcagggcgtgctgagcgccaccatcctgtacgagatcctgctgggcaaggccaccctgtacgccgtgctggtgtctgccctggtgctgatggctatggtcaagcggaaggacagccgggga

SEQ ID NO: 34712 - DNA, 2304 bp, synthetic construct
  source 1..2304: mol_type = other DNA
atggccttaccagtgaccgccttgctcctgccgctggccttgctgctccacgccgccaggccggaggtgcagctggttgaatctggcggaggactggttcagcctggcggatctctgagactgtcttgtgccgccagcggcttcaacatcaaggatacctgtatcggctgggttcgcagagcccctggcaaagaggaagaactggtcgccaaaatctgcaagtacagcggccacaccagatacgccgacagcgtgaagggcagattcaccatcagcgccgacaccagcaagaacaccgcctacctccagatgaacagcctgagagccgaggacaccgccgtgtactattgtgccgctgtgtccgtcagagatgggcactacaattactggggccagggcaccaccgtgaccgtttcttcaggtaccggcggaggcggatctggcggcggaggtagcggtggcggaggatctgaattcgacttcgtgatgacacagagccctgatagcctggccgtgtctctcggcgagcgagtgaccatgagctgcaagtctagccagagcctgctgaacagcggcaaccagaagaactacctgacctggtatcagcagaagcccggccagcctcctaagctgctgatctactgggccagcaccagagaaagcggcgtgcccgatagattttctggctctggcagcggcaccgacttcaccctgacaatttctagcctgcaagccgaggacgtggccgtgtactactgccagaacgactacagctacccctacaccttcggccagggcaccaagctggaaatcaaactcgagatccagaaccctgatcctgccgtgtaccagctgcgggatagcaagagcagcgacaagagcgtgtgtctgttcaccgacttcgacagccagaccaacgtgtcccagagcaaggactccgacgtgtacatcaccgataagtgcgtgctggacatgcggagcatggacttcaagagcaactccgccgtggcctggtccaacaagtccgatttcgcctgcgccaacgccttcaacaacagcattatccccgaggacacattcttcccaagccccgagagcagctgcggctttaccagcgagagctaccagcagggcgtgctgagcgccaccatcctgtacgagatcctgctgggcaaggccaccctgtacgccgtgctggtgtctgccctggtgctgatggctatggtcaagcggaaggacagccggggacgcgccaagagaagcggatctggcgtgaagcagaccctgaatttcgacctgctgaagctggctggcgacgtggaatccaacccaggccctactagtatggactggatttggcgcatccttttccttgtcggcgctgctaccggcgcgcattccttcgaagaagtgcaactggttcagagcggagccgagctgaagaaacctggggccagcgtgaaggtgtcctgtaaagccagcggctacacctttaccgactactacatgaaatgggtccgacaggccccaggccagggactcgaatggatcggcgatattatccccagcaacggggccaccttctacaaccagaaattcaagggccgcgtgaccatcaccgtggacaagagcacaagcaccgcctacatggaactgagcagcctgagaagcgaggacaccgccgtgtattattgcgccagaagccatctgctgcgggccagttggttcgcctattggggacagggaaccctggtcaccgttagctctacgcgtgaggacctgaagaacgtgttcccacctgaggtggccgtgttcgagcctagcgaggccgagatcagccacacccagaaagccaccctcgtgtgcctggctaccggcttctaccccgaccatgtggaactgtcttggtgggtcaacggcaaagaggtgcacagcggcgtgtgtaccgacccccagccactgaaagaacagcccgccctgaacgacagccggtactgcctgagcagcagactgagagtgtccgccaccttctggcagaacccccggaaccacttcagatgccaggtgcagttctacggcctgagcgagaacgacgagtggacccaggacagagccaagcccgtgacccagatcgtgtctgccgaagcctggggcagagccgattgcgacgtgaagctggtggaaaagagcttcgagacagacaccaacctgaacttccagaacctgagcgtgatcggcttcagaatcctgctgctgaaagtggccggctttaacctgctgatgaccctgcggctgtggtccagc

SEQ ID NO: 34713 - DNA, 3408 bp, synthetic construct
  source 1..3408: mol_type = other DNA
atggccttaccagtgaccgccttgctcctgccgctggccttgctgctccacgccgccaggccggaagtgcagctggttgaatctggcggaggactggttcaggctggcggatctctgagactgtcttgtgccgccagcggcagaacctttagcatgggctggtttagacaggcccctggcaaagagagagagttcgtcgccgccatcacatactctggcggcagcccttactacgccgactctgtgaagggcagattcaccatcagccgggacaacgccaagaacaccgtgtacctccagatgaacagcctgaagcctgaggacaccgccgtgtactactgcgccgccaatccaacatacggcagcgactggaacgccgagaattggggccagggaacccaagtgacagtgtctagcggtaccggcggaggcggatctggcggcggaggtagcggtggcggaggatctgaattcgacttcgtgatgacacagagccctgatagcctggccgtgtctctcggcgagcgagtgaccatgagctgcaagtctagccagagcctgctgaacagcggcaaccagaagaactacctgacctggtatcagcagaagcccggccagcctcctaagctgctgatctactgggccagcaccagagaaagcggcgtgcccgatagattttctggctctggcagcggcaccgacttcaccctgacaatttctagcctgcaagccgaggacgtggccgtgtactactgccagaacgactacagctacccctacaccttcggccagggcaccaagctggaaatcaaactcgaggacctgaagaacgtgttcccacctgaggtggccgtgttcgagcctagcgaggccgagatcagccacacccagaaagccaccctcgtgtgcctggctaccggcttctaccccgaccatgtggaactgtcttggtgggtcaacggcaaagaggtgcacagcggcgtgtgtaccgacccccagccactgaaagaacagcccgccctgaacgacagccggtactgcctgagcagcagactgagagtgtccgccaccttctggcagaacccccggaaccacttcagatgccaggtgcagttctacggcctgagcgagaacgacgagtggacccaggacagagccaagcccgtgacccagatcgtgtctgccgaagcctggggcagagccgattgcgacgtgaagctggtggaaaagagcttcgagacagacaccaacctgaacttccagaacctgagcgtgatcggcttcagaatcctgctgctgaaagtggccggctttaacctgctgatgaccctgcggctgtggtccagcagggccaagcgatctggatctggagcaacaaacttctcactactcaaacaagcaggtgacgtggaggagaatcccgggcctactagtgccaccatggactggatttggcgcatccttttccttgtcggcgctgctaccggcgcccattccgggcccgaagtgcaactggttgaatccggtggcggcctggtgcaagcaggcggatctctcagacttagctgtgccgcctccggcagaaccttcacaatgggatggtttaggcaggctccagggaaagagagagagttcgtcgccgccatctctctgtctcccacactggcctactacgccgactctgtgaaaggccggttcaccatctccagagataatgccaagaacaccgtggtgctgcaaatgaactctctgaaacccgaggatacagccctgtactattgtgccgctgaccggaagtccgtgatgagcatcagacccgattactggggacagggcacacaagtcacagtgtcctctggatccggcggcggaggatctggcggaggcggatctgggggcggaggctctttcgaagaagtgcaactggttcagagcggagccgagctgaagaaacctggggccagcgtgaaggtgtcctgtaaagccagcggctacacctttaccgactactacatgaaatgggtccgacaggccccaggccagggactcgaatggatcggcgatattatccccagcaacggggccaccttctacaaccagaaattcaagggccgcgtgaccatcaccgtggacaagagcacaagcaccgcctacatggaactgagcagcctgagaagcgaggacaccgccgtgtattattgcgccagaagccatctgctgcgggccagttggttcgcctattggggacagggaaccctggtcaccgttagctctacgcgtatccagaaccctgatcctgccgtgtaccagctgcgggatagcaagagcagcgacaagagcgtgtgtctgttcaccgacttcgacagccagaccaacgtgtcccagagcaaggactccgacgtgtacatcaccgataagtgcgtgctggacatgcggagcatggacttcaagagcaactccgccgtggcctggtccaacaagtccgatttcgcctgcgccaacgccttcaacaacagcattatccccgaggacacattcttcccaagccccgagagcagctgcggctttaccagcgagagctaccagcagggcgtgctgagcgccaccatcctgtacgagatcctgctgggcaaggccaccctgtacgccgtgctggtgtctgccctggtgctgatggctatggtcaagcggaaggacagccggggacgcgccaagagaagcggatctggcgtgaagcagaccctgaatttcgacctgctgaagctggctggcgacgtggaatccaacccaggcccttctagaggccatatgaccgagtacaagcccacggtgcgcctcgccacccgcgacgacgtccccagggccgtacgcaccctcgccgccgcgttcgccgactaccccgccacgcgccacaccgtcgatccggaccgccacatcgagcgggtcaccgagctgcaagaactcttcctcacgcgcgtcgggctcgacatcggcaaggtgtgggtcgcggacgacggcgccgcggtggcggtctggaccacgccggagagcgtcgaagcgggggcggtgttcgccgagatcggcccgcgcatggccgagttgagcggttcccggctggccgcgcagcaacagatggaaggcctcctggcgccgcaccggcccaaggagcccgcgtggttcctggccaccgtcggcgtctcgcccgaccaccagggcaagggtctgggcagcgccgtcgtgctccccggagtggaggcggccgagcgcgccggggtgcccgccttcctggagacctccgcgccccgcaacctccccttctacgagcggctcggcttcaccgtcaccgccgacgtcgaggtgcccgaaggaccgcgcacctggtgcatgacccgcaagcccggtgcctga

SEQ ID NO: 34714 - DNA, 2322 bp, synthetic construct
  source 1..2322: mol_type = other DNA
atggccttaccagtgaccgccttgctcctgccgctggccttgctgctccacgccgccaggccggaagtgcagctggttgaatctggcggaggactggttcagcctggcggatctctgagactgtcttgtgccgcctctggcttcgccagcgactactatatcatcggctggttcagacaggcccctggcaaagagagagagggcgtcagctgtatcagcagcagatacgccaacaccaactacgccgacagcgtgaagggcagattcaccatcagccgggacaacgccaagaacaccgtgtacctccagatgaacagcctgaagcctgaggacaccgccgtgtactactgtgccgccgacaccagaagatacacctgtcctgacattgccaccatgcaccggaacttcgattcttggggccagggcacactggtcaccgtttcttctggtaccggcggaggcggatctggcggcggaggtagcggtggcggaggatctgaattcgacttcgtgatgacacagagccctgatagcctggccgtgtctctcggcgagcgagtgaccatgagctgcaagtctagccagagcctgctgaacagcggcaaccagaagaactacctgacctggtatcagcagaagcccggccagcctcctaagctgctgatctactgggccagcaccagagaaagcggcgtgcccgatagattttctggctctggcagcggcaccgacttcaccctgacaatttctagcctgcaagccgaggacgtggccgtgtactactgccagaacgactacagctacccctacaccttcggccagggcaccaagctggaaatcaaactcgaggacctgaagaacgtgttcccacctgaggtggccgtgttcgagcctagcgaggccgagatcagccacacccagaaagccaccctcgtgtgcctggctaccggcttctaccccgaccatgtggaactgtcttggtgggtcaacggcaaagaggtgcacagcggcgtgtgtaccgacccccagccactgaaagaacagcccgccctgaacgacagccggtactgcctgagcagcagactgagagtgtccgccaccttctggcagaacccccggaaccacttcagatgccaggtgcagttctacggcctgagcgagaacgacgagtggacccaggacagagccaagcccgtgacccagatcgtgtctgccgaagcctggggcagagccgattgcgacgtgaagctggtggaaaagagcttcgagacagacaccaacctgaacttccagaacctgagcgtgatcggcttcagaatcctgctgctgaaagtggccggctttaacctgctgatgaccctgcggctgtggtccagcagggccaagcgatctggatctggagcaacaaacttctcactactcaaacaagcaggtgacgtggaggagaatcccgggcctactagtatggactggatttggcgcatccttttccttgtcggcgctgctaccggcgcgcattccttcgaagaagtgcaactggttcagagcggagccgagctgaagaaacctggggccagcgtgaaggtgtcctgtaaagccagcggctacacctttaccgactactacatgaaatgggtccgacaggccccaggccagggactcgaatggatcggcgatattatccccagcaacggggccaccttctacaaccagaaattcaagggccgcgtgaccatcaccgtggacaagagcacaagcaccgcctacatggaactgagcagcctgagaagcgaggacaccgccgtgtattattgcgccagaagccatctgctgcgggccagttggttcgcctattggggacagggaaccctggtcaccgttagctctacgcgtatccagaaccctgatcctgccgtgtaccagctgcgggatagcaagagcagcgacaagagcgtgtgtctgttcaccgacttcgacagccagaccaacgtgtcccagagcaaggactccgacgtgtacatcaccgataagtgcgtgctggacatgcggagcatggacttcaagagcaactccgccgtggcctggtccaacaagtccgatttcgcctgcgccaacgccttcaacaacagcattatccccgaggacacattcttcccaagccccgagagcagctgcggctttaccagcgagagctaccagcagggcgtgctgagcgccaccatcctgtacgagatcctgctgggcaaggccaccctgtacgccgtgctggtgtctgccctggtgctgatggctatggtcaagcggaaggacagccggggataa

SEQ ID NO: 34715 - DNA, 2322 bp, synthetic construct
  source 1..2322: mol_type = other DNA
atggccttaccagtgaccgccttgctcctgccgctggccttgctgctccacgccgccaggccggaagtgcagctggttgaatctggcggaggactggttcagcctggcggatctctgagactgagctgtgaagccagcggcttcgccagcgacgattacatcatcggctggttcagacaggcccctggcaaagagagagagggcgtcagctgcatcagctctaagtacgccaacaccgtgtacaccgacagcgtgaagggcagattcagactgagcagaggcaccgccaagaataccgtgtacctccagatgagcgccctgaagcctgaggataccgccgtgtactactgcgctatggacagccgcagagtgacatgccctgagatcagcaccatgcaccggaacttcgattcttggggccagggcacactggtcacagtgtcatctggtaccggcggaggcggatctggcggcggaggtagcggtggcggaggatctgaattcgacttcgtgatgacacagagccctgatagcctggccgtgtctctcggcgagcgagtgaccatgagctgcaagtctagccagagcctgctgaacagcggcaaccagaagaactacctgacctggtatcagcagaagcccggccagcctcctaagctgctgatctactgggccagcaccagagaaagcggcgtgcccgatagattttctggctctggcagcggcaccgacttcaccctgacaatttctagcctgcaagccgaggacgtggccgtgtactactgccagaacgactacagctacccctacaccttcggccagggcaccaagctggaaatcaaactcgaggacctgaagaacgtgttcccacctgaggtggccgtgttcgagcctagcgaggccgagatcagccacacccagaaagccaccctcgtgtgcctggctaccggcttctaccccgaccatgtggaactgtcttggtgggtcaacggcaaagaggtgcacagcggcgtgtgtaccgacccccagccactgaaagaacagcccgccctgaacgacagccggtactgcctgagcagcagactgagagtgtccgccaccttctggcagaacccccggaaccacttcagatgccaggtgcagttctacggcctgagcgagaacgacgagtggacccaggacagagccaagcccgtgacccagatcgtgtctgccgaagcctggggcagagccgattgcgacgtgaagctggtggaaaagagcttcgagacagacaccaacctgaacttccagaacctgagcgtgatcggcttcagaatcctgctgctgaaagtggccggctttaacctgctgatgaccctgcggctgtggtccagcagggccaagcgatctggatctggagcaacaaacttctcactactcaaacaagcaggtgacgtggaggagaatcccgggcctactagtatggactggatttggcgcatccttttccttgtcggcgctgctaccggcgcgcattccttcgaagaagtgcaactggttcagagcggagccgagctgaagaaacctggggccagcgtgaaggtgtcctgtaaagccagcggctacacctttaccgactactacatgaaatgggtccgacaggccccaggccagggactcgaatggatcggcgatattatccccagcaacggggccaccttctacaaccagaaattcaagggccgcgtgaccatcaccgtggacaagagcacaagcaccgcctacatggaactgagcagcctgagaagcgaggacaccgccgtgtattattgcgccagaagccatctgctgcgggccagttggttcgcctattggggacagggaaccctggtcaccgttagctctacgcgtatccagaaccctgatcctgccgtgtaccagctgcgggatagcaagagcagcgacaagagcgtgtgtctgttcaccgacttcgacagccagaccaacgtgtcccagagcaaggactccgacgtgtacatcaccgataagtgcgtgctggacatgcggagcatggacttcaagagcaactccgccgtggcctggtccaacaagtccgatttcgcctgcgccaacgccttcaacaacagcattatccccgaggacacattcttcccaagccccgagagcagctgcggctttaccagcgagagctaccagcagggcgtgctgagcgccaccatcctgtacgagatcctgctgggcaaggccaccctgtacgccgtgctggtgtctgccctggtgctgatggctatggtcaagcggaaggacagccggggataa

SEQ ID NO: 34716 - DNA, 2319 bp, synthetic construct
  source 1..2319: mol_type = other DNA
atggccttaccagtgaccgccttgctcctgccgctggccttgctgctccacgccgccaggccggaagtgcagctggttgaatctggcggaggactggttcagcctggcggatctctgagactgtcttgtgccgcctctggcttcgccagcgactactatatcatcggctggttcagacaggcccctggcaaagagagagagggcgtcagctgtatcagcagcagatacgccaacaccaactacgccgacagcgtgaagggcagattcaccatcagccgggacaacgccaagaacaccgtgtacctccagatgaacagcctgaagcctgaggacaccgccgtgtactactgtgccgccgacaccagaagatacacctgtcctgacattgccaccatgcaccggaacttcgattcttggggccagggcacactggtcaccgtttcttctggtaccggcggaggcggatctggcggcggaggtagcggtggcggaggatctgaattcgacttcgtgatgacacagagccctgatagcctggccgtgtctctcggcgagcgagtgaccatgagctgcaagtctagccagagcctgctgaacagcggcaaccagaagaactacctgacctggtatcagcagaagcccggccagcctcctaagctgctgatctactgggccagcaccagagaaagcggcgtgcccgatagattttctggctctggcagcggcaccgacttcaccctgacaatttctagcctgcaagccgaggacgtggccgtgtactactgccagaacgactacagctacccctacaccttcggccagggcaccaagctggaaatcaaactcgagatccagaaccctgatcctgccgtgtaccagctgcgggatagcaagagcagcgacaagagcgtgtgtctgttcaccgacttcgacagccagaccaacgtgtcccagagcaaggactccgacgtgtacatcaccgataagtgcgtgctggacatgcggagcatggacttcaagagcaactccgccgtggcctggtccaacaagtccgatttcgcctgcgccaacgccttcaacaacagcattatccccgaggacacattcttcccaagccccgagagcagctgcggctttaccagcgagagctaccagcagggcgtgctgagcgccaccatcctgtacgagatcctgctgggcaaggccaccctgtacgccgtgctggtgtctgccctggtgctgatggctatggtcaagcggaaggacagccggggaagggccaagcgatctggatctggagcaacaaacttctcactactcaaacaagcaggtgacgtggaggagaatcccgggcctactagtatggactggatttggcgcatccttttccttgtcggcgctgctaccggcgcgcattccttcgaagaagtgcaactggttcagagcggagccgagctgaagaaacctggggccagcgtgaaggtgtcctgtaaagccagcggctacacctttaccgactactacatgaaatgggtccgacaggccccaggccagggactcgaatggatcggcgatattatccccagcaacggggccaccttctacaaccagaaattcaagggccgcgtgaccatcaccgtggacaagagcacaagcaccgcctacatggaactgagcagcctgagaagcgaggacaccgccgtgtattattgcgccagaagccatctgctgcgggccagttggttcgcctattggggacagggaaccctggtcaccgttagctctacgcgtgacctgaagaacgtgttcccacctgaggtggccgtgttcgagcctagcgaggccgagatcagccacacccagaaagccaccctcgtgtgcctggctaccggcttctaccccgaccatgtggaactgtcttggtgggtcaacggcaaagaggtgcacagcggcgtgtgtaccgacccccagccactgaaagaacagcccgccctgaacgacagccggtactgcctgagcagcagactgagagtgtccgccaccttctggcagaacccccggaaccacttcagatgccaggtgcagttctacggcctgagcgagaacgacgagtggacccaggacagagccaagcccgtgacccagatcgtgtctgccgaagcctggggcagagccgattgcgacgtgaagctggtggaaaagagcttcgagacagacaccaacctgaacttccagaacctgagcgtgatcggcttcagaatcctgctgctgaaagtggccggctttaacctgctgatgaccctgcggctgtggtccagc

SEQ ID NO: 34717 - DNA, 2319 bp, synthetic construct
  source 1..2319: mol_type = other DNA
atggccttaccagtgaccgccttgctcctgccgctggccttgctgctccacgccgccaggccggaagtgcagctggttgaatctggcggaggactggttcagcctggcggatctctgagactgagctgtgaagccagcggcttcgccagcgacgattacatcatcggctggttcagacaggcccctggcaaagagagagagggcgtcagctgcatcagctctaagtacgccaacaccgtgtacaccgacagcgtgaagggcagattcagactgagcagaggcaccgccaagaataccgtgtacctccagatgagcgccctgaagcctgaggataccgccgtgtactactgcgctatggacagccgcagagtgacatgccctgagatcagcaccatgcaccggaacttcgattcttggggccagggcacactggtcacagtgtcatctggtaccggcggaggcggatctggcggcggaggtagcggtggcggaggatctgaattcgacttcgtgatgacacagagccctgatagcctggccgtgtctctcggcgagcgagtgaccatgagctgcaagtctagccagagcctgctgaacagcggcaaccagaagaactacctgacctggtatcagcagaagcccggccagcctcctaagctgctgatctactgggccagcaccagagaaagcggcgtgcccgatagattttctggctctggcagcggcaccgacttcaccctgacaatttctagcctgcaagccgaggacgtggccgtgtactactgccagaacgactacagctacccctacaccttcggccagggcaccaagctggaaatcaaactcgagatccagaaccctgatcctgccgtgtaccagctgcgggatagcaagagcagcgacaagagcgtgtgtctgttcaccgacttcgacagccagaccaacgtgtcccagagcaaggactccgacgtgtacatcaccgataagtgcgtgctggacatgcggagcatggacttcaagagcaactccgccgtggcctggtccaacaagtccgatttcgcctgcgccaacgccttcaacaacagcattatccccgaggacacattcttcccaagccccgagagcagctgcggctttaccagcgagagctaccagcagggcgtgctgagcgccaccatcctgtacgagatcctgctgggcaaggccaccctgtacgccgtgctggtgtctgccctggtgctgatggctatggtcaagcggaaggacagccggggaagggccaagcgatctggatctggagcaacaaacttctcactactcaaacaagcaggtgacgtggaggagaatcccgggcctactagtatggactggatttggcgcatccttttccttgtcggcgctgctaccggcgcgcattccttcgaagaagtgcaactggttcagagcggagccgagctgaagaaacctggggccagcgtgaaggtgtcctgtaaagccagcggctacacctttaccgactactacatgaaatgggtccgacaggccccaggccagggactcgaatggatcggcgatattatccccagcaacggggccaccttctacaaccagaaattcaagggccgcgtgaccatcaccgtggacaagagcacaagcaccgcctacatggaactgagcagcctgagaagcgaggacaccgccgtgtattattgcgccagaagccatctgctgcgggccagttggttcgcctattggggacagggaaccctggtcaccgttagctctacgcgtgacctgaagaacgtgttcccacctgaggtggccgtgttcgagcctagcgaggccgagatcagccacacccagaaagccaccctcgtgtgcctggctaccggcttctaccccgaccatgtggaactgtcttggtgggtcaacggcaaagaggtgcacagcggcgtgtgtaccgacccccagccactgaaagaacagcccgccctgaacgacagccggtactgcctgagcagcagactgagagtgtccgccaccttctggcagaacccccggaaccacttcagatgccaggtgcagttctacggcctgagcgagaacgacgagtggacccaggacagagccaagcccgtgacccagatcgtgtctgccgaagcctggggcagagccgattgcgacgtgaagctggtggaaaagagcttcgagacagacaccaacctgaacttccagaacctgagcgtgatcggcttcagaatcctgctgctgaaagtggccggctttaacctgctgatgaccctgcggctgtggtccagc

SEQ ID NO: 34718 - DNA, 2292 bp, synthetic construct
  source 1..2292: mol_type = other DNA
atggccttaccagtgaccgccttgctcctgccgctggccttgctgctccacgccgccaggccgcaagtcaaactggaagaaagcggtggcggcctggtgcaacctggcgaatctctgagactgagctgtagcgccagcggctccatcttcaaggtgttcagagtgttcgccatgagctggtacaggcaaggccctggcaagcagagagagctggtcgcctctatcagcagcggcgagacaaccacatacgccgaatctgtgaaaggccggttcaccatcagccgggataatgccaagaataccgcctatctccagatggactccctgaagcctgaagatacagctgtgtactactgcaacgccgaccataccttcaccggcgatttttggggccagggaacccaagtgaccgtgtctagtggtaccggcggaggcggatctggcggcggaggtagcggtggcggaggatctgaattcgacttcgtgatgacacagagccctgatagcctggccgtgtctctcggcgagcgagtgaccatgagctgcaagtctagccagagcctgctgaacagcggcaaccagaagaactacctgacctggtatcagcagaagcccggccagcctcctaagctgctgatctactgggccagcaccagagaaagcggcgtgcccgatagattttctggctctggcagcggcaccgacttcaccctgacaatttctagcctgcaagccgaggacgtggccgtgtactactgccagaacgactacagctacccctacaccttcggccagggcaccaagctggaaatcaaactcgagatccagaaccctgatcctgccgtgtaccagctgcgggatagcaagagcagcgacaagagcgtgtgtctgttcaccgacttcgacagccagaccaacgtgtcccagagcaaggactccgacgtgtacatcaccgataagtgcgtgctggacatgcggagcatggacttcaagagcaactccgccgtggcctggtccaacaagtccgatttcgcctgcgccaacgccttcaacaacagcattatccccgaggacacattcttcccaagccccgagagcagctgcggctttaccagcgagagctaccagcagggcgtgctgagcgccaccatcctgtacgagatcctgctgggcaaggccaccctgtacgccgtgctggtgtctgccctggtgctgatggctatggtcaagcggaaggacagccggggaagggccaagcgatctggatctggagcaacaaacttctcactactcaaacaagcaggtgacgtggaggagaatcccgggcctactagtatggactggatttggcgcatccttttccttgtcggcgctgctaccggcgcgcattccttcgaagaagtgcaactggttcagagcggagccgagctgaagaaacctggggccagcgtgaaggtgtcctgtaaagccagcggctacacctttaccgactactacatgaaatgggtccgacaggccccaggccagggactcgaatggatcggcgatattatccccagcaacggggccaccttctacaaccagaaattcaagggccgcgtgaccatcaccgtggacaagagcacaagcaccgcctacatggaactgagcagcctgagaagcgaggacaccgccgtgtattattgcgccagaagccatctgctgcgggccagttggttcgcctattggggacagggaaccctggtcaccgttagctctacgcgtgacctgaagaacgtgttcccacctgaggtggccgtgttcgagcctagcgaggccgagatcagccacacccagaaagccaccctcgtgtgcctggctaccggcttctaccccgaccatgtggaactgtcttggtgggtcaacggcaaagaggtgcacagcggcgtgtgtaccgacccccagccactgaaagaacagcccgccctgaacgacagccggtactgcctgagcagcagactgagagtgtccgccaccttctggcagaacccccggaaccacttcagatgccaggtgcagttctacggcctgagcgagaacgacgagtggacccaggacagagccaagcccgtgacccagatcgtgtctgccgaagcctggggcagagccgattgcgacgtgaagctggtggaaaagagcttcgagacagacaccaacctgaacttccagaacctgagcgtgatcggcttcagaatcctgctgctgaaagtggccggctttaacctgctgatgaccctgcggctgtggtccagc

SEQ ID NO: 34719 - DNA, 2298 bp, synthetic construct
  source 1..2298: mol_type = other DNA
atggccttaccagtgaccgccttgctcctgccgctggccttgctgctccacgccgccaggccggacttcgtgatgacacagagccctgatagcctggccgtgtctctcggcgagcgagtgaccatgagctgcaagtctagccagagcctgctgaacagcggcaaccagaagaactacctgacctggtatcagcagaagcccggccagcctcctaagctgctgatctactgggccagcaccagagaaagcggcgtgcccgatagattttctggctctggcagcggcaccgacttcaccctgacaatttctagcctgcaagccgaggacgtggccgtgtactactgccagaacgactacagctacccctacaccttcggccagggcaccaagctggaaatcaaactcgaggacctgaagaacgtgttcccacctgaggtggccgtgttcgagcctagcgaggccgagatcagccacacccagaaagccaccctcgtgtgcctggctaccggcttctaccccgaccatgtggaactgtcttggtgggtcaacggcaaagaggtgcacagcggcgtgtgtaccgacccccagccactgaaagaacagcccgccctgaacgacagccggtactgcctgagcagcagactgagagtgtccgccaccttctggcagaacccccggaaccacttcagatgccaggtgcagttctacggcctgagcgagaacgacgagtggacccaggacagagccaagcccgtgacccagatcgtgtctgccgaagcctggggcagagccgattgcgacgtgaagctggtggaaaagagcttcgagacagacaccaacctgaacttccagaacctgagcgtgatcggcttcagaatcctgctgctgaaagtggccggctttaacctgctgatgaccctgcggctgtggtccagcagggccaagcgatctggatctggagcaacaaacttctcactactcaaacaagcaggtgacgtggaggagaatcccgggcctactagtgccaccatggactggatttggcgcatccttttccttgtcggcgctgctaccggcgcccattccgggcccgaagtgcagctggttgaatctggcggaggactggttcaggctggcggatctctgagactgtcttgtgccgccagcggcagaacctttagcatgggctggtttagacaggcccctggcaaagagagagagttcgtcgccgccatcacatactctggcggcagcccttactacgccgactctgtgaagggcagattcaccatcagccgggacaacgccaagaacaccgtgtacctccagatgaacagcctgaagcctgaggacaccgccgtgtactactgcgccgccaatccaacatacggcagcgactggaacgccgagaattggggccagggaacccaagtgacagtgtctagcggatccggcggcggaggatctggcggaggcggatctgggggcggaggctctttcgaagaagtgcaactggttcagagcggagccgagctgaagaaacctggggccagcgtgaaggtgtcctgtaaagccagcggctacacctttaccgactactacatgaaatgggtccgacaggccccaggccagggactcgaatggatcggcgatattatccccagcaacggggccaccttctacaaccagaaattcaagggccgcgtgaccatcaccgtggacaagagcacaagcaccgcctacatggaactgagcagcctgagaagcgaggacaccgccgtgtattattgcgccagaagccatctgctgcgggccagttggttcgcctattggggacagggaaccctggtcaccgttagctctacgcgtatccagaaccctgatcctgccgtgtaccagctgcgggatagcaagagcagcgacaagagcgtgtgtctgttcaccgacttcgacagccagaccaacgtgtcccagagcaaggactccgacgtgtacatcaccgataagtgcgtgctggacatgcggagcatggacttcaagagcaactccgccgtggcctggtccaacaagtccgatttcgcctgcgccaacgccttcaacaacagcattatccccgaggacacattcttcccaagccccgagagcagctgcggctttaccagcgagagctaccagcagggcgtgctgagcgccaccatcctgtacgagatcctgctgggcaaggccaccctgtacgccgtgctggtgtctgccctggtgctgatggctatggtcaagcggaaggacagccggggataa

SEQ ID NO: 34720 - DNA, 2301 bp, synthetic construct
  source 1..2301: mol_type = other DNA
atggccttaccagtgaccgccttgctcctgccgctggccttgctgctccacgccgccaggccggacttcgtgatgacacagagccctgatagcctggccgtgtctctcggcgagcgagtgaccatgagctgcaagtctagccagagcctgctgaacagcggcaaccagaagaactacctgacctggtatcagcagaagcccggccagcctcctaagctgctgatctactgggccagcaccagagaaagcggcgtgcccgatagattttctggctctggcagcggcaccgacttcaccctgacaatttctagcctgcaagccgaggacgtggccgtgtactactgccagaacgactacagctacccctacaccttcggccagggcaccaagctggaaatcaaactcgaggacctgaagaacgtgttcccacctgaggtggccgtgttcgagcctagcgaggccgagatcagccacacccagaaagccaccctcgtgtgcctggctaccggcttctaccccgaccatgtggaactgtcttggtgggtcaacggcaaagaggtgcacagcggcgtgtgtaccgacccccagccactgaaagaacagcccgccctgaacgacagccggtactgcctgagcagcagactgagagtgtccgccaccttctggcagaacccccggaaccacttcagatgccaggtgcagttctacggcctgagcgagaacgacgagtggacccaggacagagccaagcccgtgacccagatcgtgtctgccgaagcctggggcagagccgattgcgacgtgaagctggtggaaaagagcttcgagacagacaccaacctgaacttccagaacctgagcgtgatcggcttcagaatcctgctgctgaaagtggccggctttaacctgctgatgaccctgcggctgtggtccagcagggccaagcgatctggatctggagcaacaaacttctcactactcaaacaagcaggtgacgtggaggagaatcccgggcctactagtgccaccatggactggatttggcgcatccttttccttgtcggcgctgctaccggcgcccattccgggcccgaagtgcaactggtggaatctgggggcggactggtgcagccaggcggaagtctgaggctgtcttgtgccgcctccggcagcatcttcggcttcaacgacatggcctggtatcggcaggctcccggaaaacagcgcgagctggtggctctgattagcagagtgggcgtgaccagcagcgccgactctgtgaagggcagattcacaatctccagagtgaacgccaaggatacagtgtacctccagatgaactctctgaaacctgaggatacagcagtgtactattgctacatggaccagcggctggacggcagcacactggcctactggggacagggaactcaagtgacagtgtctagcggatccggcggcggaggatctggcggaggcggatctgggggcggaggctctttcgaagaagtgcaactggttcagagcggagccgagctgaagaaacctggggccagcgtgaaggtgtcctgtaaagccagcggctacacctttaccgactactacatgaaatgggtccgacaggccccaggccagggactcgaatggatcggcgatattatccccagcaacggggccaccttctacaaccagaaattcaagggccgcgtgaccatcaccgtggacaagagcacaagcaccgcctacatggaactgagcagcctgagaagcgaggacaccgccgtgtattattgcgccagaagccatctgctgcgggccagttggttcgcctattggggacagggaaccctggtcaccgttagctctacgcgtatccagaaccctgatcctgccgtgtaccagctgcgggatagcaagagcagcgacaagagcgtgtgtctgttcaccgacttcgacagccagaccaacgtgtcccagagcaaggactccgacgtgtacatcaccgataagtgcgtgctggacatgcggagcatggacttcaagagcaactccgccgtggcctggtccaacaagtccgatttcgcctgcgccaacgccttcaacaacagcattatccccgaggacacattcttcccaagccccgagagcagctgcggctttaccagcgagagctaccagcagggcgtgctgagcgccaccatcctgtacgagatcctgctgggcaaggccaccctgtacgccgtgctggtgtctgccctggtgctgatggctatggtcaagcggaaggacagccggggataa

SEQ ID NO: 34721 - DNA, 2289 bp, synthetic construct
  source 1..2289: mol_type = other DNA
atggccttaccagtgaccgccttgctcctgccgctggccttgctgctccacgccgccaggccggacttcgtgatgacacagagccctgatagcctggccgtgtctctcggcgagcgagtgaccatgagctgcaagtctagccagagcctgctgaacagcggcaaccagaagaactacctgacctggtatcagcagaagcccggccagcctcctaagctgctgatctactgggccagcaccagagaaagcggcgtgcccgatagattttctggctctggcagcggcaccgacttcaccctgacaatttctagcctgcaagccgaggacgtggccgtgtactactgccagaacgactacagctacccctacaccttcggccagggcaccaagctggaaatcaaactcgaggacctgaagaacgtgttcccacctgaggtggccgtgttcgagcctagcgaggccgagatcagccacacccagaaagccaccctcgtgtgcctggctaccggcttctaccccgaccatgtggaactgtcttggtgggtcaacggcaaagaggtgcacagcggcgtgtgtaccgacccccagccactgaaagaacagcccgccctgaacgacagccggtactgcctgagcagcagactgagagtgtccgccaccttctggcagaacccccggaaccacttcagatgccaggtgcagttctacggcctgagcgagaacgacgagtggacccaggacagagccaagcccgtgacccagatcgtgtctgccgaagcctggggcagagccgattgcgacgtgaagctggtggaaaagagcttcgagacagacaccaacctgaacttccagaacctgagcgtgatcggcttcagaatcctgctgctgaaagtggccggctttaacctgctgatgaccctgcggctgtggtccagcagggccaagcgatctggatctggagcaacaaacttctcactactcaaacaagcaggtgacgtggaggagaatcccgggcctactagtgccaccatggactggatttggcgcatccttttccttgtcggcgctgctaccggcgcccattccgggcccgaggtgcagctggttgaatctggcggaggactggttcaggctggcggatctctgagactgtcttgtgccgccagcggctctgtgttcagcggcaatgtgatgggctggtacagacaggcccctggcaaagaaagagagtgggttgccgccattgccagcggcggcagcatctactacagagactctgtgaagggcagattcaccatcagccgggacaacgccaagaacaccgtgtacctccagatgaacagcctgaagcctgaggacaccgccgtgtactactgcaactctcaccctcctacactgccctattggggcctgggaacccaagtgacagtgtcctctggatccggcggcggaggatctggcggaggcggatctgggggcggaggctctttcgaagaagtgcaactggttcagagcggagccgagctgaagaaacctggggccagcgtgaaggtgtcctgtaaagccagcggctacacctttaccgactactacatgaaatgggtccgacaggccccaggccagggactcgaatggatcggcgatattatccccagcaacggggccaccttctacaaccagaaattcaagggccgcgtgaccatcaccgtggacaagagcacaagcaccgcctacatggaactgagcagcctgagaagcgaggacaccgccgtgtattattgcgccagaagccatctgctgcgggccagttggttcgcctattggggacagggaaccctggtcaccgttagctctacgcgtatccagaaccctgatcctgccgtgtaccagctgcgggatagcaagagcagcgacaagagcgtgtgtctgttcaccgacttcgacagccagaccaacgtgtcccagagcaaggactccgacgtgtacatcaccgataagtgcgtgctggacatgcggagcatggacttcaagagcaactccgccgtggcctggtccaacaagtccgatttcgcctgcgccaacgccttcaacaacagcattatccccgaggacacattcttcccaagccccgagagcagctgcggctttaccagcgagagctaccagcagggcgtgctgagcgccaccatcctgtacgagatcctgctgggcaaggccaccctgtacgccgtgctggtgtctgccctggtgctgatggctatggtcaagcggaaggacagccggggataa

SEQ ID NO: 34722 - DNA, 2283 bp, synthetic construct
  source 1..2283: mol_type = other DNA
atggccttaccagtgaccgccttgctcctgccgctggccttgctgctccacgccgccaggccggacttcgtgatgacacagagccctgatagcctggccgtgtctctcggcgagcgagtgaccatgagctgcaagtctagccagagcctgctgaacagcggcaaccagaagaactacctgacctggtatcagcagaagcccggccagcctcctaagctgctgatctactgggccagcaccagagaaagcggcgtgcccgatagattttctggctctggcagcggcaccgacttcaccctgacaatttctagcctgcaagccgaggacgtggccgtgtactactgccagaacgactacagctacccctacaccttcggccagggcaccaagctggaaatcaaactcgaggacctgaagaacgtgttcccacctgaggtggccgtgttcgagcctagcgaggccgagatcagccacacccagaaagccaccctcgtgtgcctggctaccggcttctaccccgaccatgtggaactgtcttggtgggtcaacggcaaagaggtgcacagcggcgtgtgtaccgacccccagccactgaaagaacagcccgccctgaacgacagccggtactgcctgagcagcagactgagagtgtccgccaccttctggcagaacccccggaaccacttcagatgccaggtgcagttctacggcctgagcgagaacgacgagtggacccaggacagagccaagcccgtgacccagatcgtgtctgccgaagcctggggcagagccgattgcgacgtgaagctggtggaaaagagcttcgagacagacaccaacctgaacttccagaacctgagcgtgatcggcttcagaatcctgctgctgaaagtggccggctttaacctgctgatgaccctgcggctgtggtccagcagggccaagcgatctggatctggagcaacaaacttctcactactcaaacaagcaggtgacgtggaggagaatcccgggcctactagtgccaccatggactggatttggcgcatccttttccttgtcggcgctgctaccggcgcccattccgggcccgaagttcagctgctggaatctggcggaggactcgttcaacctggcggctctctgagactgagctgtgccgcttctggcttcagcttctctagctacgccctgagctgggttcgacaagctcccggaaagggccttgaatgggtgtccagcatcggcgagaatgacggcaccacagactatgccgatgccgtgaaaggccggtttaccatcagcagagacaattccaagaacacgctctatctgcaaatgaactccctgcgcgtggaagatacagccgtgtattattgcgtgaaggacggcatccactggggacagggaaccctggttacagtgtctagcggatccggcggcggaggatctggcggaggcggatctgggggcggaggctctttcgaagaagtgcaactggttcagagcggagccgagctgaagaaacctggggccagcgtgaaggtgtcctgtaaagccagcggctacacctttaccgactactacatgaaatgggtccgacaggccccaggccagggactcgaatggatcggcgatattatccccagcaacggggccaccttctacaaccagaaattcaagggccgcgtgaccatcaccgtggacaagagcacaagcaccgcctacatggaactgagcagcctgagaagcgaggacaccgccgtgtattattgcgccagaagccatctgctgcgggccagttggttcgcctattggggacagggaaccctggtcaccgttagctctacgcgtatccagaaccctgatcctgccgtgtaccagctgcgggatagcaagagcagcgacaagagcgtgtgtctgttcaccgacttcgacagccagaccaacgtgtcccagagcaaggactccgacgtgtacatcaccgataagtgcgtgctggacatgcggagcatggacttcaagagcaactccgccgtggcctggtccaacaagtccgatttcgcctgcgccaacgccttcaacaacagcattatccccgaggacacattcttcccaagccccgagagcagctgcggctttaccagcgagagctaccagcagggcgtgctgagcgccaccatcctgtacgagatcctgctgggcaaggccaccctgtacgccgtgctggtgtctgccctggtgctgatggctatggtcaagcggaaggacagccggggataa

SEQ ID NO: 34723 - DNA, 3390 bp, synthetic construct
  source 1..3390: mol_type = other DNA
atgggacccagactgctgttttgggctctgctgtgtctgctcggcacaggacctgttgaagctggcgtgacacagagccccacacacctgattaagaccagaggccagcaggccacactgagatgcagccctatcagcggccacaccagcgtgtactggtatcagcaggctctcggactgggcctccagttcctgctttggtacgacgagggcgaagagagaaaccggggcaacttccctcctcggttttccggcagacagttccccaactacagcagcgagctgaacgtgaacgccctggaactggaagatagcgccctgtacctgtgtgcctcttctcttggtggacctcgcggactggctggactgagaggggatgagcagtttttcggccctggcaccagactgaccgtgctggaaggtaccggcggaggcggatctggcggcggagaattcgacttcgtgatgacacagagccctgatagcctggccgtgtctctcggcgagcgagtgaccatgagctgcaagtctagccagagcctgctgaacagcggcaaccagaagaactacctgacctggtatcagcagaagcccggccagcctcctaagctgctgatctactgggccagcaccagagaaagcggcgtgcccgatagattttctggctctggcagcggcaccgacttcaccctgacaatttctagcctgcaagccgaggacgtggccgtgtactactgccagaacgactacagctacccctacaccttcggccagggcaccaagctggaaatcaaactcgaggacctgaagaacgtgttcccacctgaggtggccgtgttcgagcctagcgaggccgagatcagccacacccagaaagccaccctcgtgtgcctggctaccggcttctaccccgaccatgtggaactgtcttggtgggtcaacggcaaagaggtgcacagcggcgtgtgtaccgacccccagccactgaaagaacagcccgccctgaacgacagccggtactgcctgagcagcagactgagagtgtccgccaccttctggcagaacccccggaaccacttcagatgccaggtgcagttctacggcctgagcgagaacgacgagtggacccaggacagagccaagcccgtgacccagatcgtgtctgccgaagcctggggcagagccgattgcgacgtgaagctggtggaaaagagcttcgagacagacaccaacctgaacttccagaacctgagcgtgatcggcttcagaatcctgctgctgaaagtggccggctttaacctgctgatgaccctgcggctgtggtccagcagggccaagcgatctggatctggagcaacaaacttctcactactcaaacaagcaggtgacgtggaggagaatcccgggcctactagtgccaccatggactggatttggcgcatccttttccttgtcggcgctgctaccggcgcccattccgggcccgaagtgcagctggttgaatctggcggaggactggttcaggctggcggatctctgagactgtcttgtgccgccagcggcagaacctttagcatgggctggtttagacaggcccctggcaaagagagagagttcgtcgccgccatcacatactctggcggcagcccttactacgccgactctgtgaagggcagattcaccatcagccgggacaacgccaagaacaccgtgtacctccagatgaacagcctgaagcctgaggacaccgccgtgtactactgcgccgccaatccaacatacggcagcgactggaacgccgagaattggggccagggaacccaagtgacagtgtctagcggatccggcggcggaggatctggcggaggcggatctgggggcggaggctctttcgaagaagtgcaactggttcagagcggagccgagctgaagaaacctggggccagcgtgaaggtgtcctgtaaagccagcggctacacctttaccgactactacatgaaatgggtccgacaggccccaggccagggactcgaatggatcggcgatattatccccagcaacggggccaccttctacaaccagaaattcaagggccgcgtgaccatcaccgtggacaagagcacaagcaccgcctacatggaactgagcagcctgagaagcgaggacaccgccgtgtattattgcgccagaagccatctgctgcgggccagttggttcgcctattggggacagggaaccctggtcaccgttagctctacgcgtatccagaaccctgatcctgccgtgtaccagctgcgggatagcaagagcagcgacaagagcgtgtgtctgttcaccgacttcgacagccagaccaacgtgtcccagagcaaggactccgacgtgtacatcaccgataagtgcgtgctggacatgcggagcatggacttcaagagcaactccgccgtggcctggtccaacaagtccgatttcgcctgcgccaacgccttcaacaacagcattatccccgaggacacattcttcccaagccccgagagcagctgcggctttaccagcgagagctaccagcagggcgtgctgagcgccaccatcctgtacgagatcctgctgggcaaggccaccctgtacgccgtgctggtgtctgccctggtgctgatggctatggtcaagcggaaggacagccggggacgcgccaagagaagcggatctggcgtgaagcagaccctgaatttcgacctgctgaagctggctggcgacgtggaatccaacccaggcccttctagaggccatatgaccgagtacaagcccacggtgcgcctcgccacccgcgacgacgtccccagggccgtacgcaccctcgccgccgcgttcgccgactaccccgccacgcgccacaccgtcgatccggaccgccacatcgagcgggtcaccgagctgcaagaactcttcctcacgcgcgtcgggctcgacatcggcaaggtgtgggtcgcggacgacggcgccgcggtggcggtctggaccacgccggagagcgtcgaagcgggggcggtgttcgccgagatcggcccgcgcatggccgagttgagcggttcccggctggccgcgcagcaacagatggaaggcctcctggcgccgcaccggcccaaggagcccgcgtggttcctggccaccgtcggcgtctcgcccgaccaccagggcaagggtctgggcagcgccgtcgtgctccccggagtggaggcggccgagcgcgccggggtgcccgccttcctggagacctccgcgccccgcaacctccccttctacgagcggctcggcttcaccgtcaccgccgacgtcgaggtgcccgaaggaccgcgcacctggtgcatgacccgcaagcccggtgcctga

SEQ ID NO: 34724 - DNA, 3387 bp, synthetic construct
  source 1..3387: mol_type = other DNA
atgggacccagactgctgttttgggctctgctgtgtctgctcggcacaggacctgttgaagctggcgtgacacagagccccacacacctgattaagaccagaggccagcaggccacactgagatgcagccctatcagcggccacaccagcgtgtactggtatcagcaggctctcggactgggcctccagttcctgctttggtacgacgagggcgaagagagaaaccggggcaacttccctcctcggttttccggcagacagttccccaactacagcagcgagctgaacgtgaacgccctggaactggaagatagcgccctgtacctgtgtgccagctctctcggcggagatgaactgggagccgatggcaacgagcagttctttggccctggcaccagactgaccgtgctggaaggtaccggcggaggcggatctggcggcggaagcgaattcgacttcgtgatgacacagagccctgatagcctggccgtgtctctcggcgagcgagtgaccatgagctgcaagtctagccagagcctgctgaacagcggcaaccagaagaactacctgacctggtatcagcagaagcccggccagcctcctaagctgctgatctactgggccagcaccagagaaagcggcgtgcccgatagattttctggctctggcagcggcaccgacttcaccctgacaatttctagcctgcaagccgaggacgtggccgtgtactactgccagaacgactacagctacccctacaccttcggccagggcaccaagctggaaatcaaactcgaggacctgaagaacgtgttcccacctgaggtggccgtgttcgagcctagcgaggccgagatcagccacacccagaaagccaccctcgtgtgcctggctaccggcttctaccccgaccatgtggaactgtcttggtgggtcaacggcaaagaggtgcacagcggcgtgtgtaccgacccccagccactgaaagaacagcccgccctgaacgacagccggtactgcctgagcagcagactgagagtgtccgccaccttctggcagaacccccggaaccacttcagatgccaggtgcagttctacggcctgagcgagaacgacgagtggacccaggacagagccaagcccgtgacccagatcgtgtctgccgaagcctggggcagagccgattgcgacgtgaagctggtggaaaagagcttcgagacagacaccaacctgaacttccagaacctgagcgtgatcggcttcagaatcctgctgctgaaagtggccggctttaacctgctgatgaccctgcggctgtggtccagcagggccaagcgatctggatctggagcaacaaacttctcactactcaaacaagcaggtgacgtggaggagaatcccgggcctactagtgccaccatggactggatttggcgcatccttttccttgtcggcgctgctaccggcgcccattccgggcccgaagtgcagctggttgaatctggcggaggactggttcaggctggcggatctctgagactgtcttgtgccgccagcggcagaacctttagcatgggctggtttagacaggcccctggcaaagagagagagttcgtcgccgccatcacatactctggcggcagcccttactacgccgactctgtgaagggcagattcaccatcagccgggacaacgccaagaacaccgtgtacctccagatgaacagcctgaagcctgaggacaccgccgtgtactactgcgccgccaatccaacatacggcagcgactggaacgccgagaattggggccagggaacccaagtgacagtgtctagcggatccggcggcggaggatctggcggaggcggatctgggggcggaggctctttcgaagaagtgcaactggttcagagcggagccgagctgaagaaacctggggccagcgtgaaggtgtcctgtaaagccagcggctacacctttaccgactactacatgaaatgggtccgacaggccccaggccagggactcgaatggatcggcgatattatccccagcaacggggccaccttctacaaccagaaattcaagggccgcgtgaccatcaccgtggacaagagcacaagcaccgcctacatggaactgagcagcctgagaagcgaggacaccgccgtgtattattgcgccagaagccatctgctgcgggccagttggttcgcctattggggacagggaaccctggtcaccgttagctctacgcgtatccagaaccctgatcctgccgtgtaccagctgcgggatagcaagagcagcgacaagagcgtgtgtctgttcaccgacttcgacagccagaccaacgtgtcccagagcaaggactccgacgtgtacatcaccgataagtgcgtgctggacatgcggagcatggacttcaagagcaactccgccgtggcctggtccaacaagtccgatttcgcctgcgccaacgccttcaacaacagcattatccccgaggacacattcttcccaagccccgagagcagctgcggctttaccagcgagagctaccagcagggcgtgctgagcgccaccatcctgtacgagatcctgctgggcaaggccaccctgtacgccgtgctggtgtctgccctggtgctgatggctatggtcaagcggaaggacagccggggacgcgccaagagaagcggatctggcgtgaagcagaccctgaatttcgacctgctgaagctggctggcgacgtggaatccaacccaggcccttctagaggccatatgaccgagtacaagcccacggtgcgcctcgccacccgcgacgacgtccccagggccgtacgcaccctcgccgccgcgttcgccgactaccccgccacgcgccacaccgtcgatccggaccgccacatcgagcgggtcaccgagctgcaagaactcttcctcacgcgcgtcgggctcgacatcggcaaggtgtgggtcgcggacgacggcgccgcggtggcggtctggaccacgccggagagcgtcgaagcgggggcggtgttcgccgagatcggcccgcgcatggccgagttgagcggttcccggctggccgcgcagcaacagatggaaggcctcctggcgccgcaccggcccaaggagcccgcgtggttcctggccaccgtcggcgtctcgcccgaccaccagggcaagggtctgggcagcgccgtcgtgctccccggagtggaggcggccgagcgcgccggggtgcccgccttcctggagacctccgcgccccgcaacctccccttctacgagcggctcggcttcaccgtcaccgccgacgtcgaggtgcccgaaggaccgcgcacctggtgcatgacccgcaagcccggtgcctga

SEQ ID NO: 34725 - DNA, 2862 bp, synthetic construct
  source 1..2862: mol_type = other DNA
atggccttaccagtgaccgccttgctcctgccgctggccttgctgctccacgccgccaggccggacttcgtgatgacacagagccctgatagcctggccgtgtctctcggcgagcgagtgaccatgagctgcaagtctagccagagcctgctgaacagcggcaaccagaagaactacctgacctggtatcagcagaagcccggccagcctcctaagctgctgatctactgggccagcaccagagaaagcggcgtgcccgatagattttctggctctggcagcggcaccgacttcaccctgacaatttctagcctgcaagccgaggacgtggccgtgtactactgccagaacgactacagctacccctacaccttcggccagggcaccaagctggaaatcaaactcgaggacctgaagaacgtgttcccacctgaggtggccgtgttcgagcctagcgaggccgagatcagccacacccagaaagccaccctcgtgtgcctggctaccggcttctaccccgaccatgtggaactgtcttggtgggtcaacggcaaagaggtgcacagcggcgtgtgtaccgacccccagccactgaaagaacagcccgccctgaacgacagccggtactgcctgagcagcagactgagagtgtccgccaccttctggcagaacccccggaaccacttcagatgccaggtgcagttctacggcctgagcgagaacgacgagtggacccaggacagagccaagcccgtgacccagatcgtgtctgccgaagcctggggcagagccgattgcgacgtgaagctggtggaaaagagcttcgagacagacaccaacctgaacttccagaacctgagcgtgatcggcttcagaatcctgctgctgaaagtggccggctttaacctgctgatgaccctgcggctgtggtccagcagggccaagcgatctggatctggagcaacaaacttctcactactcaaacaagcaggtgacgtggaggagaatcccgggcctactagtgccaccatggactggatttggcgcatccttttccttgtcggcgctgctaccggcgcccattccgggcccatgggaagctggcttgagttctaccacagactcaacgccattgacagcaggctgtgggcacttggcggaagcgaagctgaactcgccgcttttgaaaaagaaattgccgctttcgagtccgagcttcaggcttacaaaggcaaagggaatcctgaggtcgagagcctgagagatcacgctgcccacattagagagtggttgcaggcataccggcacaatggatccggcggcggaggatctggcggaggcggatctgggggcggaggctctttcgaagaagtgcaactggttcagagcggagccgagctgaagaaacctggggccagcgtgaaggtgtcctgtaaagccagcggctacacctttaccgactactacatgaaatgggtccgacaggccccaggccagggactcgaatggatcggcgatattatccccagcaacggggccaccttctacaaccagaaattcaagggccgcgtgaccatcaccgtggacaagagcacaagcaccgcctacatggaactgagcagcctgagaagcgaggacaccgccgtgtattattgcgccagaagccatctgctgcgggccagttggttcgcctattggggacagggaaccctggtcaccgttagctctacgcgtatccagaaccctgatcctgccgtgtaccagctgcgggatagcaagagcagcgacaagagcgtgtgtctgttcaccgacttcgacagccagaccaacgtgtcccagagcaaggactccgacgtgtacatcaccgataagtgcgtgctggacatgcggagcatggacttcaagagcaactccgccgtggcctggtccaacaagtccgatttcgcctgcgccaacgccttcaacaacagcattatccccgaggacacattcttcccaagccccgagagcagctgcggctttaccagcgagagctaccagcagggcgtgctgagcgccaccatcctgtacgagatcctgctgggcaaggccaccctgtacgccgtgctggtgtctgccctggtgctgatggctatggtcaagcggaaggacagccggggacgcgccaagagaagcggatctggcgtgaagcagaccctgaatttcgacctgctgaagctggctggcgacgtggaatccaacccaggcccttctagaggccatatgaccgagtacaagcccacggtgcgcctcgccacccgcgacgacgtccccagggccgtacgcaccctcgccgccgcgttcgccgactaccccgccacgcgccacaccgtcgatccggaccgccacatcgagcgggtcaccgagctgcaagaactcttcctcacgcgcgtcgggctcgacatcggcaaggtgtgggtcgcggacgacggcgccgcggtggcggtctggaccacgccggagagcgtcgaagcgggggcggtgttcgccgagatcggcccgcgcatggccgagttgagcggttcccggctggccgcgcagcaacagatggaaggcctcctggcgccgcaccggcccaaggagcccgcgtggttcctggccaccgtcggcgtctcgcccgaccaccagggcaagggtctgggcagcgccgtcgtgctccccggagtggaggcggccgagcgcgccggggtgcccgccttcctggagacctccgcgccccgcaacctccccttctacgagcggctcggcttcaccgtcaccgccgacgtcgaggtgcccgaaggaccgcgcacctggtgcatgacccgcaagcccggtgcctga

SEQ ID NO: 34726 - DNA, 2862 bp, synthetic construct
  source 1..2862: mol_type = other DNA
atggccttaccagtgaccgccttgctcctgccgctggccttgctgctccacgccgccaggccggcatgcatgggcagttggttcgagttctacgaccggctgaatgccatcgacgccagactgtgggctctcggaggatctgaagctgagctggccgccttcgagaaagagatcgccgcctttgagagcgagctgcaagcctacaaaggcaagggcaaccccgaggtggaaaacctgagagtgcacgccgctgccatcagagaatggctccaggcttacagacacaacggtaccggcggaggcggatctggcggcggaggtagcggtggcggaggatctgaattcgacttcgtgatgacacagagccctgatagcctggccgtgtctctcggcgagcgagtgaccatgagctgcaagtctagccagagcctgctgaacagcggcaaccagaagaactacctgacctggtatcagcagaagcccggccagcctcctaagctgctgatctactgggccagcaccagagaaagcggcgtgcccgatagattttctggctctggcagcggcaccgacttcaccctgacaatttctagcctgcaagccgaggacgtggccgtgtactactgccagaacgactacagctacccctacaccttcggccagggcaccaagctggaaatcaaactcgaggacctgaagaacgtgttcccacctgaggtggccgtgttcgagcctagcgaggccgagatcagccacacccagaaagccaccctcgtgtgcctggctaccggcttctaccccgaccatgtggaactgtcttggtgggtcaacggcaaagaggtgcacagcggcgtgtgtaccgacccccagccactgaaagaacagcccgccctgaacgacagccggtactgcctgagcagcagactgagagtgtccgccaccttctggcagaacccccggaaccacttcagatgccaggtgcagttctacggcctgagcgagaacgacgagtggacccaggacagagccaagcccgtgacccagatcgtgtctgccgaagcctggggcagagccgattgcgacgtgaagctggtggaaaagagcttcgagacagacaccaacctgaacttccagaacctgagcgtgatcggcttcagaatcctgctgctgaaagtggccggctttaacctgctgatgaccctgcggctgtggtccagcagggccaagcgatctggatctggagcaacaaacttctcactactcaaacaagcaggtgacgtggaggagaatcccgggcctactagtatggactggatttggcgcatccttttccttgtcggcgctgctaccggcgcgcattccttcgaagaagtgcaactggttcagagcggagccgagctgaagaaacctggggccagcgtgaaggtgtcctgtaaagccagcggctacacctttaccgactactacatgaaatgggtccgacaggccccaggccagggactcgaatggatcggcgatattatccccagcaacggggccaccttctacaaccagaaattcaagggccgcgtgaccatcaccgtggacaagagcacaagcaccgcctacatggaactgagcagcctgagaagcgaggacaccgccgtgtattattgcgccagaagccatctgctgcgggccagttggttcgcctattggggacagggaaccctggtcaccgttagctctacgcgtatccagaaccctgatcctgccgtgtaccagctgcgggatagcaagagcagcgacaagagcgtgtgtctgttcaccgacttcgacagccagaccaacgtgtcccagagcaaggactccgacgtgtacatcaccgataagtgcgtgctggacatgcggagcatggacttcaagagcaactccgccgtggcctggtccaacaagtccgatttcgcctgcgccaacgccttcaacaacagcattatccccgaggacacattcttcccaagccccgagagcagctgcggctttaccagcgagagctaccagcagggcgtgctgagcgccaccatcctgtacgagatcctgctgggcaaggccaccctgtacgccgtgctggtgtctgccctggtgctgatggctatggtcaagcggaaggacagccggggacgcgccaagagaagcggatctggcgtgaagcagaccctgaatttcgacctgctgaagctggctggcgacgtggaatccaacccaggcccttctagaggccatatgaccgagtacaagcccacggtgcgcctcgccacccgcgacgacgtccccagggccgtacgcaccctcgccgccgcgttcgccgactaccccgccacgcgccacaccgtcgatccggaccgccacatcgagcgggtcaccgagctgcaagaactcttcctcacgcgcgtcgggctcgacatcggcaaggtgtgggtcgcggacgacggcgccgcggtggcggtctggaccacgccggagagcgtcgaagcgggggcggtgttcgccgagatcggcccgcgcatggccgagttgagcggttcccggctggccgcgcagcaacagatggaaggcctcctggcgccgcaccggcccaaggagcccgcgtggttcctggccaccgtcggcgtctcgcccgaccaccagggcaagggtctgggcagcgccgtcgtgctccccggagtggaggcggccgagcgcgccggggtgcccgccttcctggagacctccgcgccccgcaacctccccttctacgagcggctcggcttcaccgtcaccgccgacgtcgaggtgcccgaaggaccgcgcacctggtgcatgacccgcaagcccggtgcctga

SEQ ID NO: 34727 - DNA, 3213 bp, synthetic construct
  source 1..3213: mol_type = other DNA
atggccttaccagtgaccgccttgctcctgccgctggccttgctgctccacgccgccaggccggcatgcatggaccccgacctggaaatcagagccgccttcctgcggcagagaaacacagccctgagaacagaggtggccgagctggaacaagaggtgcagcggctggaaaacgaggtgtcccagtacgagacaagatacggccctctcggaggcggaaaaggtaccggcggaggcggatctggcggcggaggtagcggtggcggaggatctgaattcgacttcgtgatgacacagagccctgatagcctggccgtgtctctcggcgagcgagtgaccatgagctgcaagtctagccagagcctgctgaacagcggcaaccagaagaactacctgacctggtatcagcagaagcccggccagcctcctaagctgctgatctactgggccagcaccagagaaagcggcgtgcccgatagattttctggctctggcagcggcaccgacttcaccctgacaatttctagcctgcaagccgaggacgtggccgtgtactactgccagaacgactacagctacccctacaccttcggccagggcaccaagctggaaatcaaactcgaggacctgaagaacgtgttcccacctgaggtggccgtgttcgagcctagcgaggccgagatcagccacacccagaaagccaccctcgtgtgcctggctaccggcttctaccccgaccatgtggaactgtcttggtgggtcaacggcaaagaggtgcacagcggcgtgtgtaccgacccccagccactgaaagaacagcccgccctgaacgacagccggtactgcctgagcagcagactgagagtgtccgccaccttctggcagaacccccggaaccacttcagatgccaggtgcagttctacggcctgagcgagaacgacgagtggacccaggacagagccaagcccgtgacccagatcgtgtctgccgaagcctggggcagagccgattgcgacgtgaagctggtggaaaagagcttcgagacagacaccaacctgaacttccagaacctgagcgtgatcggcttcagaatcctgctgctgaaagtggccggctttaacctgctgatgaccctgcggctgtggtccagcagggccaagcgatctggatctggagcaacaaacttctcactactcaaacaagcaggtgacgtggaggagaatcccgggcctactagtgccaccatggactggatttggcgcatccttttccttgtcggcgctgctaccggcgcccattccgggcccgaagtgcagctggttgaatctggcggaggactggttcaggctggcggatctctgagactgtcttgtgccgccagcggcagaacctttagcatgggctggtttagacaggcccctggcaaagagagagagttcgtcgccgccatcacatactctggcggcagcccttactacgccgactctgtgaagggcagattcaccatcagccgggacaacgccaagaacaccgtgtacctccagatgaacagcctgaagcctgaggacaccgccgtgtactactgcgccgccaatccaacatacggcagcgactggaacgccgagaattggggccagggaacccaagtgacagtgtctagcggatccggcggcggaggatctggcggaggcggatctgggggcggaggctctttcgaagaagtgcaactggttcagagcggagccgagctgaagaaacctggggccagcgtgaaggtgtcctgtaaagccagcggctacacctttaccgactactacatgaaatgggtccgacaggccccaggccagggactcgaatggatcggcgatattatccccagcaacggggccaccttctacaaccagaaattcaagggccgcgtgaccatcaccgtggacaagagcacaagcaccgcctacatggaactgagcagcctgagaagcgaggacaccgccgtgtattattgcgccagaagccatctgctgcgggccagttggttcgcctattggggacagggaaccctggtcaccgttagctctacgcgtatccagaaccctgatcctgccgtgtaccagctgcgggatagcaagagcagcgacaagagcgtgtgtctgttcaccgacttcgacagccagaccaacgtgtcccagagcaaggactccgacgtgtacatcaccgataagtgcgtgctggacatgcggagcatggacttcaagagcaactccgccgtggcctggtccaacaagtccgatttcgcctgcgccaacgccttcaacaacagcattatccccgaggacacattcttcccaagccccgagagcagctgcggctttaccagcgagagctaccagcagggcgtgctgagcgccaccatcctgtacgagatcctgctgggcaaggccaccctgtacgccgtgctggtgtctgccctggtgctgatggctatggtcaagcggaaggacagccggggacgcgccaagagaagcggatctggcgtgaagcagaccctgaatttcgacctgctgaagctggctggcgacgtggaatccaacccaggcccttctagaggccatatgaccgagtacaagcccacggtgcgcctcgccacccgcgacgacgtccccagggccgtacgcaccctcgccgccgcgttcgccgactaccccgccacgcgccacaccgtcgatccggaccgccacatcgagcgggtcaccgagctgcaagaactcttcctcacgcgcgtcgggctcgacatcggcaaggtgtgggtcgcggacgacggcgccgcggtggcggtctggaccacgccggagagcgtcgaagcgggggcggtgttcgccgagatcggcccgcgcatggccgagttgagcggttcccggctggccgcgcagcaacagatggaaggcctcctggcgccgcaccggcccaaggagcccgcgtggttcctggccaccgtcggcgtctcgcccgaccaccagggcaagggtctgggcagcgccgtcgtgctccccggagtggaggcggccgagcgcgccggggtgcccgccttcctggagacctccgcgccccgcaacctccccttctacgagcggctcggcttcaccgtcaccgccgacgtcgaggtgcccgaaggaccgcgcacctggtgcatgacccgcaagcccggtgcctga

SEQ ID NO: 34728 - DNA, 2862 bp, synthetic construct
  source 1..2862: mol_type = other DNA
atggccttaccagtgaccgccttgctcctgccgctggccttgctgctccacgccgccaggccggacttcgtgatgacacagagccctgatagcctggccgtgtctctcggcgagcgagtgaccatgagctgcaagtctagccagagcctgctgaacagcggcaaccagaagaactacctgacctggtatcagcagaagcccggccagcctcctaagctgctgatctactgggccagcaccagagaaagcggcgtgcccgatagattttctggctctggcagcggcaccgacttcaccctgacaatttctagcctgcaagccgaggacgtggccgtgtactactgccagaacgactacagctacccctacaccttcggccagggcaccaagctggaaatcaaactcgaggacctgaagaacgtgttcccacctgaggtggccgtgttcgagcctagcgaggccgagatcagccacacccagaaagccaccctcgtgtgcctggctaccggcttctaccccgaccatgtggaactgtcttggtgggtcaacggcaaagaggtgcacagcggcgtgtgtaccgacccccagccactgaaagaacagcccgccctgaacgacagccggtactgcctgagcagcagactgagagtgtccgccaccttctggcagaacccccggaaccacttcagatgccaggtgcagttctacggcctgagcgagaacgacgagtggacccaggacagagccaagcccgtgacccagatcgtgtctgccgaagcctggggcagagccgattgcgacgtgaagctggtggaaaagagcttcgagacagacaccaacctgaacttccagaacctgagcgtgatcggcttcagaatcctgctgctgaaagtggccggctttaacctgctgatgaccctgcggctgtggtccagcagggccaagcgatctggatctggagcaacaaacttctcactactcaaacaagcaggtgacgtggaggagaatcccgggcctactagtgccaccatggactggatttggcgcatccttttccttgtcggcgctgctaccggcgcccattccgggcccatgggatcttggagcgagttttacgatcggctgcacgccattcaccaccggctgtatgctctcggaggaagcgaagctgagctggccgcttttgaaaaagaaattgccgctttcgagtccgagcttcaggcttacaaaggcaaagggaatcctgaggtcgaggccctgagagataccgccgccttcatcagaacccggttgcaggcataccggcacaacggatccggcggcggaggatctggcggaggcggatctgggggcggaggctctttcgaagaagtgcaactggttcagagcggagccgagctgaagaaacctggggccagcgtgaaggtgtcctgtaaagccagcggctacacctttaccgactactacatgaaatgggtccgacaggccccaggccagggactcgaatggatcggcgatattatccccagcaacggggccaccttctacaaccagaaattcaagggccgcgtgaccatcaccgtggacaagagcacaagcaccgcctacatggaactgagcagcctgagaagcgaggacaccgccgtgtattattgcgccagaagccatctgctgcgggccagttggttcgcctattggggacagggaaccctggtcaccgttagctctacgcgtatccagaaccctgatcctgccgtgtaccagctgcgggatagcaagagcagcgacaagagcgtgtgtctgttcaccgacttcgacagccagaccaacgtgtcccagagcaaggactccgacgtgtacatcaccgataagtgcgtgctggacatgcggagcatggacttcaagagcaactccgccgtggcctggtccaacaagtccgatttcgcctgcgccaacgccttcaacaacagcattatccccgaggacacattcttcccaagccccgagagcagctgcggctttaccagcgagagctaccagcagggcgtgctgagcgccaccatcctgtacgagatcctgctgggcaaggccaccctgtacgccgtgctggtgtctgccctggtgctgatggctatggtcaagcggaaggacagccggggacgcgccaagagaagcggatctggcgtgaagcagaccctgaatttcgacctgctgaagctggctggcgacgtggaatccaacccaggcccttctagaggccatatgaccgagtacaagcccacggtgcgcctcgccacccgcgacgacgtccccagggccgtacgcaccctcgccgccgcgttcgccgactaccccgccacgcgccacaccgtcgatccggaccgccacatcgagcgggtcaccgagctgcaagaactcttcctcacgcgcgtcgggctcgacatcggcaaggtgtgggtcgcggacgacggcgccgcggtggcggtctggaccacgccggagagcgtcgaagcgggggcggtgttcgccgagatcggcccgcgcatggccgagttgagcggttcccggctggccgcgcagcaacagatggaaggcctcctggcgccgcaccggcccaaggagcccgcgtggttcctggccaccgtcggcgtctcgcccgaccaccagggcaagggtctgggcagcgccgtcgtgctccccggagtggaggcggccgagcgcgccggggtgcccgccttcctggagacctccgcgccccgcaacctccccttctacgagcggctcggcttcaccgtcaccgccgacgtcgaggtgcccgaaggaccgcgcacctggtgcatgacccgcaagcccggtgcctga

SEQ ID NO: 34729 - DNA, 3492 bp, synthetic construct
  source 1..3492: mol_type = other DNA
atggccttaccagtgaccgccttgctcctgccgctggccttgctgctccacgccgccaggccggacttcgtgatgacacagagccctgatagcctggccgtgtctctcggcgagcgagtgaccatgagctgcaagtctagccagagcctgctgaacagcggcaaccagaagaactacctgacctggtatcagcagaagcccggccagcctcctaagctgctgatctactgggccagcaccagagaaagcggcgtgcccgatagattttctggctctggcagcggcaccgacttcaccctgacaatttctagcctgcaagccgaggacgtggccgtgtactactgccagaacgactacagctacccctacaccttcggccagggcaccaagctggaaatcaaactcgaggacctgaagaacgtgttcccacctgaggtggccgtgttcgagcctagcgaggccgagatcagccacacccagaaagccaccctcgtgtgcctggctaccggcttctaccccgaccatgtggaactgtcttggtgggtcaacggcaaagaggtgcacagcggcgtgtgtaccgacccccagccactgaaagaacagcccgccctgaacgacagccggtactgcctgagcagcagactgagagtgtccgccaccttctggcagaacccccggaaccacttcagatgccaggtgcagttctacggcctgagcgagaacgacgagtggacccaggacagagccaagcccgtgacccagatcgtgtctgccgaagcctggggcagagccgattgcgacgtgaagctggtggaaaagagcttcgagacagacaccaacctgaacttccagaacctgagcgtgatcggcttcagaatcctgctgctgaaagtggccggctttaacctgctgatgaccctgcggctgtggtccagcagggccaagcgatctggatctggagcaacaaacttctcactactcaaacaagcaggtgacgtggaggagaatcccgggcctactagtaccatggactggatttggcgcatccttttccttgtcggcgctgctaccggcgcccattccctgttcaatcaagaggtgcagatccctctgaccgagagctactgtggcccctgtcctaagaactggatctgctacaagaacaactgctaccagttcttcgacgagagcaagaattggtacgagagccaggccagctgcatgagccagaatgccagcctgctgaaggtgtacagcaaagaggaccaggacctgctgaaactggtcaagagcgcccactggatgggccttgtgcacatccccaccaatggctcttggcagtgggaggacggcagcattctgagccctaacctgctgaccatcatcgagatgcagaagggcgactgcgccctgtacgccagcagctttaagggctacatcgagaattgcagcaccccgaacacctacatctgtatgcagagaaccgtttctggcggaggcggctctggaggaggcggaagtggcggcggaggcgacctctttaatcaagaagtccagattccactcaccgaatcctactgcggaccttgtccaaaaaattggatttgttataagaacaactgttatcaattctttgatgagtctaaaaattggtatgagtcccaggcttcctgcatgtctcagaacgcttctctgctgaaagtctactctaaagaagatcaggatctcctgaagctcgtcaagtctgcccattggatggggctcgtccacattcctaccaacggaagctggcaatgggaagatggctccatcctgtctccaaatctgctcacgattattgaaatgcagaaaggggattgtgctctctacgccagctccttcaagggatatattgagaactgtagcacgcccaatacttatatctgtatgcaacggaccgtgggatccggcggcggaggatctggcggaggcggatctgggggcggaggctctttcgaagaagtgcaactggttcagagcggagccgagctgaagaaacctggggccagcgtgaaggtgtcctgtaaagccagcggctacacctttaccgactactacatgaaatgggtccgacaggccccaggccagggactcgaatggatcggcgatattatccccagcaacggggccaccttctacaaccagaaattcaagggccgcgtgaccatcaccgtggacaagagcacaagcaccgcctacatggaactgagcagcctgagaagcgaggacaccgccgtgtattattgcgccagaagccatctgctgcgggccagttggttcgcctattggggacagggaaccctggtcaccgttagctctacgcgtatccagaaccctgatcctgccgtgtaccagctgcgggatagcaagagcagcgacaagagcgtgtgtctgttcaccgacttcgacagccagaccaacgtgtcccagagcaaggactccgacgtgtacatcaccgataagtgcgtgctggacatgcggagcatggacttcaagagcaactccgccgtggcctggtccaacaagtccgatttcgcctgcgccaacgccttcaacaacagcattatccccgaggacacattcttcccaagccccgagagcagctgcggctttaccagcgagagctaccagcagggcgtgctgagcgccaccatcctgtacgagatcctgctgggcaaggccaccctgtacgccgtgctggtgtctgccctggtgctgatggctatggtcaagcggaaggacagccggggacgcgccaagagaagcggatctggcgtgaagcagaccctgaatttcgacctgctgaagctggctggcgacgtggaatccaacccaggcccttctagaggccatatgaccgagtacaagcccacggtgcgcctcgccacccgcgacgacgtccccagggccgtacgcaccctcgccgccgcgttcgccgactaccccgccacgcgccacaccgtcgatccggaccgccacatcgagcgggtcaccgagctgcaagaactcttcctcacgcgcgtcgggctcgacatcggcaaggtgtgggtcgcggacgacggcgccgcggtggcggtctggaccacgccggagagcgtcgaagcgggggcggtgttcgccgagatcggcccgcgcatggccgagttgagcggttcccggctggccgcgcagcaacagatggaaggcctcctggcgccgcaccggcccaaggagcccgcgtggttcctggccaccgtcggcgtctcgcccgaccaccagggcaagggtctgggcagcgccgtcgtgctccccggagtggaggcggccgagcgcgccggggtgcccgccttcctggagacctccgcgccccgcaacctccccttctacgagcggctcggcttcaccgtcaccgccgacgtcgaggtgcccgaaggaccgcgcacctggtgcatgacccgcaagcccggtgcctga

SEQ ID NO: 34730 - DNA, 1878 bp, synthetic construct; identical to SEQ ID NO: 5080
  source 1..1878: mol_type = other DNA

SEQ ID NO: 34731 - DNA, 1890 bp, synthetic construct; identical to SEQ ID NO: 5245
  source 1..1890: mol_type = other DNA

SEQ ID NO: 34732 - DNA, 2283 bp, synthetic construct; identical to SEQ ID NO: 5410
  source 1..2283: mol_type = other DNA

SEQ ID NO: 34733 - DNA, 2295 bp, synthetic construct; identical to SEQ ID NO: 5575
  source 1..2295: mol_type = other DNA

SEQ ID NO: 34734 - DNA, 2694 bp, synthetic construct; identical to SEQ ID NO: 5740
  source 1..2694: mol_type = other DNA

SEQ ID NO: 34735 - DNA, 2706 bp, synthetic construct; identical to SEQ ID NO: 5905
  source 1..2706: mol_type = other DNA

SEQ ID NO: 34736 - DNA, 2190 bp, synthetic construct; identical to SEQ ID NO: 6116
  source 1..2190: mol_type = other DNA

SEQ ID NO: 34737 - DNA, 2202 bp, synthetic construct; identical to SEQ ID NO: 6281
  source 1..2202: mol_type = other DNA

SEQ ID NO: 34738 - DNA, 2595 bp, synthetic construct; identical to SEQ ID NO: 6446
  source 1..2595: mol_type = other DNA

SEQ ID NO: 34739 - DNA, 2607 bp, synthetic construct; identical to SEQ ID NO: 6611
  source 1..2607: mol_type = other DNA

SEQ ID NO: 34740 - DNA, 3006 bp, synthetic construct; identical to SEQ ID NO: 6776
  source 1..3006: mol_type = other DNA

SEQ ID NO: 34741 - DNA, 3018 bp, synthetic construct; identical to SEQ ID NO: 6941
  source 1..3018: mol_type = other DNA

SEQ ID NO: 34742 - DNA, 2184 bp, synthetic construct; identical to SEQ ID NO: 7152
  source 1..2184: mol_type = other DNA

SEQ ID NO: 34743 - DNA, 2196 bp, synthetic construct; identical to SEQ ID NO: 7317
  source 1..2196: mol_type = other DNA

SEQ ID NO: 34744 - DNA, 2589 bp, synthetic construct; identical to SEQ ID NO: 7482
  source 1..2589: mol_type = other DNA

SEQ ID NO: 34745 - DNA, 3000 bp, synthetic construct; identical to SEQ ID NO: 7812
  source 1..3000: mol_type = other DNA

SEQ ID NO: 34746 - DNA, 1878 bp, synthetic construct
  source 1..1878: mol_type = other DNA
atggccttaccagtgaccgccttgctcctgccgctggccttgctgctccacgccgccaggccggacttcgtgatgacacagagccctgatagcctggccgtgtctctcggcgagcgagtgaccatgagctgcaagtctagccagagcctgctgaacagcggcaaccagaagaactacctgacctggtatcagcagaagcccggccagcctcctaagctgctgatctactgggccagcaccagagaaagcggcgtgcccgatagattttctggctctggcagcggcaccgacttcaccctgacaatttctagcctgcaagccgaggacgtggccgtgtactactgccagaacgactacagctacccctacaccttcggccagggcaccaagctggaaatcaaactcgaggacctgaagaacgtgttcccacctgaggtggccgtgttcgagcctagcgaggccgagatcagccacacccagaaagccaccctcgtgtgcctggctaccggcttctaccccgaccatgtggaactgtcttggtgggtcaacggcaaagaggtgcacagcggcgtgtctaccgacccccagccactgaaagaacagcccgccctgaacgacagccggtactgcctgagcagcagactgagagtgtccgccaccttctggcagaacccccggaaccacttcagatgccaggtgcagttctacggcctgagcgagaacgacgagtggacccaggacagagccaagcccgtgacccagatcgtgtctgccgaagcctggggcagagccgattgcgacgtgaagctggtggaaaagagcttcgagacagacaccaacctgaacttccagaacctgagcgtgatcggcttcagaatcctgctgctgaaagtggccggctttaacctgctgatgaccctgcggctgtggtccagcagggccaagcgatctggatctggagcaacaaacttctcactactcaaacaagcaggtgacgtggaggagaatcccgggcctactagtatggactggatttggcgcatccttttccttgtcggcgctgctaccggcgcgcattccttcgaagaagtgcaactggttcagagcggagccgagctgaagaaacctggggccagcgtgaaggtgtcctgtaaagccagcggctacacctttaccgactactacatgaaatgggtccgacaggccccaggccagggactcgaatggatcggcgatattatccccagcaacggggccaccttctacaaccagaaattcaagggccgcgtgaccatcaccgtggacaagagcacaagcaccgcctacatggaactgagcagcctgagaagcgaggacaccgccgtgtattattgcgccagaagccatctgctgcgggccagttggttcgcctattggggacagggaaccctggtcaccgttagctctacgcgtatccagaaccctgatcctgccgtgtaccagctgcgggatagcaagagcagcgacaagagcgtgtgtctgttcaccgacttcgacagccagaccaacgtgtcccagagcaaggactccgacgtgtacatcaccgataagaccgtgctggacatgcggagcatggacttcaagagcaactccgccgtggcctggtccaacaagtccgatttcgcctgcgccaacgccttcaacaacagcattatccccgaggacacattcttcccaagccccgagagcagctgcggctttaccagcgagagctaccagcagggcgtgctgagcgccaccatcctgtacgagatcctgctgggcaaggccaccctgtacgccgtgctggtgtctgccctggtgctgatggctatggtcaagcggaaggacagccgggga

SEQ ID NO: 34747 - DNA, 1878 bp, synthetic construct
  source 1..1878: mol_type = other DNA
atggccttaccagtgaccgccttgctcctgccgctggccttgctgctccacgccgccaggccggacttcgtgatgacacagagccctgatagcctggccgtgtctctcggcgagcgagtgaccatgagctgcaagtctagccagagcctgctgaacagcggcaaccagaagaactacctgacctggtatcagcagaagcccggccagcctcctaagctgctgatctactgggccagcaccagagaaagcggcgtgcccgatagattttctggctctggcagcggcaccgacttcaccctgacaatttctagcctgcaagccgaggacgtggccgtgtactactgccagaacgactacagctacccctacaccttcggccagggcaccaagctggaaatcaaactcgaggacctgaagaacgtgttcccacctgaggtggccgtgttcgagcctagcgaggccgagatcagccacacccagaaagccaccctcgtgtgcctggctaccggcttctaccccgaccatgtggaactgtcttggtgggtcaacggcaaagaggtgcacagcggcgtgtctaccgacccccagccactgaaagaacagcccgccctgaacgacagccggtactgcctgagcagcagactgagagtgtccgccaccttctggcagaacccccggaaccacttcagatgccaggtgcagttctacggcctgagcgagaacgacgagtggacccaggacagagccaagcccgtgacccagatcgtgtctgccgaagcctggggcagagccgattgcggctttaccagcgagagctaccagcagggcgtgctgagcgccaccaacctgagcgtgatcggcttcagaatcctgctgctgaaagtggccggctttaacctgctgatgaccctgcggctgtggtccagcagggccaagcgatctggatctggagcaacaaacttctcactactcaaacaagcaggtgacgtggaggagaatcccgggcctactagtatggactggatttggcgcatccttttccttgtcggcgctgctaccggcgcgcattccttcgaagaagtgcaactggttcagagcggagccgagctgaagaaacctggggccagcgtgaaggtgtcctgtaaagccagcggctacacctttaccgactactacatgaaatgggtccgacaggccccaggccagggactcgaatggatcggcgatattatccccagcaacggggccaccttctacaaccagaaattcaagggccgcgtgaccatcaccgtggacaagagcacaagcaccgcctacatggaactgagcagcctgagaagcgaggacaccgccgtgtattattgcgccagaagccatctgctgcgggccagttggttcgcctattggggacagggaaccctggtcaccgttagctctacgcgtatccagaaccctgatcctgccgtgtaccagctgcgggatagcaagagcagcgacaagagcgtgtgtctgttcaccgacttcgacagccagaccaacgtgtcccagagcaaggactccgacgtgtacatcaccgataagaccgtgctggacatgcggagcatggacttcaagagcaactccgccgtggcctggtccaacaagtccgatttcgcctgcgccaacgccttcaacaacagcattatccccgaggacacattcttcccaagccccgagagcagctgcgacgtgaagctggtggaaaagagcttcgagacagacaccaacctgaacttccagatcctgtacgagatcctgctgggcaaggccaccctgtacgccgtgctggtgtctgccctggtgctgatggctatggtcaagcggaaggacagccgggga

SEQ ID NO: 34748 - DNA, 2190 bp, synthetic construct
  source 1..2190: mol_type = other DNA
atggccttaccagtgaccgccttgctcctgccgctggccttgctgctccacgccgccaggccggacttcgtgatgacacagagccctgatagcctggccgtgtctctcggcgagcgagtgaccatgagctgcaagtctagccagagcctgctgaacagcggcaaccagaagaactacctgacctggtatcagcagaagcccggccagcctcctaagctgctgatctactgggccagcaccagagaaagcggcgtgcccgatagattttctggctctggcagcggcaccgacttcaccctgacaatttctagcctgcaagccgaggacgtggccgtgtactactgccagaacgactacagctacccctacaccttcggccagggcaccaagctggaaatcaaactcgaggacctgaagaacgtgttcccacctgaggtggccgtgttcgagcctagcgaggccgagatcagccacacccagaaagccaccctcgtgtgcctggctaccggcttctaccccgaccatgtggaactgtcttggtgggtcaacggcaaagaggtgcacagcggcgtgtctaccgacccccagccactgaaagaacagcccgccctgaacgacagccggtactgcctgagcagcagactgagagtgtccgccaccttctggcagaacccccggaaccacttcagatgccaggtgcagttctacggcctgagcgagaacgacgagtggacccaggacagagccaagcccgtgacccagatcgtgtctgccgaagcctggggcagagccgatgatgtgattaagatccactggcaggaaaagaagtccaacaccatcctgggcagccaggaaggcaacaccatgaagaccaacgacacctacatgaagttcagctggctgaccgtgcccgagaagtccctggacaaagaacacagatgcatcgtgcggcacgaaaacaacaagaacggcgtggaccaggaaatcatcttcccacccatcaagaccgatgtgattacaatggaccccaaggacaactgctccaaggacgccaacgataccctgctgctccagctgaccaacaccagcgcctactacatgtacttgttgctgctgctgaagtccgtggtgtacttcgccatcatcacatgctgcctgctgatggctatggtcaagcggaaggacagccggggaagggccaagcgatctggatctggagcaacaaacttctcactactcaaacaagcaggtgacgtggaggagaatcccgggcctactagtatggactggatttggcgcatccttttccttgtcggcgctgctaccggcgcgcattccttcgaagaagtgcaactggttcagagcggagccgagctgaagaaacctggggccagcgtgaaggtgtcctgtaaagccagcggctacacctttaccgactactacatgaaatgggtccgacaggccccaggccagggactcgaatggatcggcgatattatccccagcaacggggccaccttctacaaccagaaattcaagggccgcgtgaccatcaccgtggacaagagcacaagcaccgcctacatggaactgagcagcctgagaagcgaggacaccgccgtgtattattgcgccagaagccatctgctgcgggccagttggttcgcctattggggacagggaaccctggtcaccgttagctctacgcgtatccagaaccctgatcctgccgtgtaccagctgcgggatagcaagagcagcgacaagagcgtgtgtctgttcaccgacttcgacagccagaccaacgtgtcccagagcaaggactccgacgtgtacatcaccgataagaccgtgctggacatgcggagcatggacttcaagagcaactccgccgtggcctggtccaacaagtccgatttcgcctgcgccaacgccttcaacaacagcattatccccgaggacacattcttcccaagccccgagagcagcgactccaccgaccacgtgaagcccaaagagacagagaacaccaagcagcccagcaagagctgccacaagcccaaggccatcgtgcacaccgagaaagtgaacatgatgagcctgaccgtgctgggcctgcggatgctgttcgccaaaaccgtggccgtgaacttcctgctgaccgccaagctgttcttcctcctcaccgcc

SEQ ID NO: 34749 - DNA, 2184 bp, synthetic construct
  source 1..2184: mol_type = other DNA
atggccttaccagtgaccgccttgctcctgccgctggccttgctgctccacgccgccaggccggacttcgtgatgacacagagccctgatagcctggccgtgtctctcggcgagcgagtgaccatgagctgcaagtctagccagagcctgctgaacagcggcaaccagaagaactacctgacctggtatcagcagaagcccggccagcctcctaagctgctgatctactgggccagcaccagagaaagcggcgtgcccgatagattttctggctctggcagcggcaccgacttcaccctgacaatttctagcctgcaagccgaggacgtggccgtgtactactgccagaacgactacagctacccctacaccttcggccagggcaccaagctggaaatcaaactcgaggacctgaagaacgtgttcccacctgaggtggccgtgttcgagcctagcgaggccgagatcagccacacccagaaagccaccctcgtgtgcctggctaccggcttctaccccgaccatgtggaactgtcttggtgggtcaacggcaaagaggtgcacagcggcgtgtctaccgacccccagccactgaaagaacagcccgccctgaacgacagccggtactgcctgagcagcagactgagagtgtccgccaccttctggcagaacccccggaaccacttcagatgccaggtgcagttctacggcctgagcgagaacgacgagtggacccaggacagagccaagcccgtgacccagatcgtgtctgccgaagcctggggcagagccgatgatgtgattaagatccactggcaggaaaagaagtccaacaccatcctgggcagccaggaaggcaacaccatgaagaccaacgacacctacatgaagttcagctggctgaccgtgcccgagaagtccctggacaaagaacacagatgcatcgtgcggcacgaaaacaacaagaacggcgtggaccaggaaatcatcttcccacccatcaagaccgatgtgattacaatggaccccaaggacaactgctccaaggacgccaacgataccctgctgctccagctgaccaacaccagcgcctactacatgtacttgttgctgctgctgaagtccgtggtgtacttcgccatcatcacatgctgcctgctgcggagaaccgccttctgctgcaacggcgagaagtctagggccaagcgatctggatctggagcaacaaacttctcactactcaaacaagcaggtgacgtggaggagaatcccgggcctactagtatggactggatttggcgcatccttttccttgtcggcgctgctaccggcgcgcattccttcgaagaagtgcaactggttcagagcggagccgagctgaagaaacctggggccagcgtgaaggtgtcctgtaaagccagcggctacacctttaccgactactacatgaaatgggtccgacaggccccaggccagggactcgaatggatcggcgatattatccccagcaacggggccaccttctacaaccagaaattcaagggccgcgtgaccatcaccgtggacaagagcacaagcaccgcctacatggaactgagcagcctgagaagcgaggacaccgccgtgtattattgcgccagaagccatctgctgcgggccagttggttcgcctattggggacagggaaccctggtcaccgttagctctacgcgtatccagaaccctgatcctgccgtgtaccagctgcgggatagcaagagcagcgacaagagcgtgtgtctgttcaccgacttcgacagccagaccaacgtgtcccagagcaaggactccgacgtgtacatcaccgataagaccgtgctggacatgcggagcatggacttcaagagcaactccgccgtggcctggtccaacaagtccgatttcgcctgcgccaacgccttcaacaacagcattatccccgaggacacattcttcccaagccccgagagcagcgactccaccgaccacgtgaagcccaaagagacagagaacaccaagcagcccagcaagagctgccacaagcccaaggccatcgtgcacaccgagaaagtgaacatgatgagcctgaccgtgctgggcctgcggatgctgttcgccaaaaccgtggccgtgaacttcctgctgaccgccaagctgttcttcctc

SEQ ID NO: 34750 - DNA, 2616 bp, synthetic construct
  source 1..2616: mol_type = other DNA
atggccttaccagtgaccgccttgctcctgccgctggccttgctgctccacgccgccaggccgctcgaggaggacctgaagaacgtgttcccacctgaggtggccgtgttcgagcctagcgaggccgagatcagccacacccagaaagccaccctcgtgtgcctggctaccggcttctaccccgaccatgtggaactgtcttggtgggtcaacggcaaagaggtgcacagcggcgtgtgtaccgacccccagccactgaaagaacagcccgccctgaacgacagccggtactgcctgagcagcagactgagagtgtccgccaccttctggcagaacccccggaaccacttcagatgccaggtgcagttctacggcctgagcgagaacgacgagtggacccaggacagagccaagcccgtgacccagatcgtgtctgccgaagcctggggcagagccgattgcggctttaccagcgagagctaccagcagggcgtgctgagcgccaccaacctgagcgtgatcggcttcagaatcctgctgctgaaagtggccggctttaacctgctgatgaccctgcggctgtggtccagcagggccaagcgatctggatctggagcaacaaacttctcactactcaaacaagcaggtgacgtggaggagaatcccgggcctactagcatggccttaccagtgaccgccttgctcctgccgctggccttgctgctccacgccgccaggccggacttcgtgatgacacagagccctgatagcctggccgtgtctctcggcgagcgagtgaccatgagctgcaagtctagccagagcctgctgaacagcggcaaccagaagaactacctgacctggtatcagcagaagcccggccagcctcctaagctgctgatctactgggccagcaccagagaaagcggcgtgcccgatagattttctggctctggcagcggcaccgacttcaccctgacaatttctagcctgcaagccgaggacgtggccgtgtactactgccagaacgactacagctacccctacaccttcggccagggcaccaagctggaaatcaaaggcggaggcggaagtggaggcggaggatctggcggcggaggctctgaagtgcaactggttcagagcggagccgagctgaagaaacctggggccagcgtgaaggtgtcctgtaaagccagcggctacacctttaccgactactacatgaaatgggtccgacaggccccaggccagggactcgaatggatcggcgatattatccccagcaacggggccaccttctacaaccagaaattcaagggccgcgtgaccatcaccgtggacaagagcacaagcaccgcctacatggaactgagcagcctgagaagcgaggacaccgccgtgtattattgcgccagaagccatctgctgcgggccagttggttcgcctattggggacagggaaccctggtcaccgttagctctacgcgtatccagaaccctgatcctgccgtgtaccagctgcgggatagcaagagcagcgacaagagcgtgtgtctgttcaccgacttcgacagccagaccaacgtgtcccagagcaaggactccgacgtgtacatcaccgataagtgcgtgctggacatgcggagcatggacttcaagagcaactccgccgtggcctggtccaacaagtccgatttcgcctgcgccaacgccttcaacaacagcattatccccgaggacacattcttcccaagccccgagagcagctgcgacgtgaagctggtggaaaagagcttcgagacagacaccaacctgaacttccagatcctgtacgaggtgatcggcttcagaatcctgctgctgaaagtggccggctttaacctgctgatgaccctgcggctgtggtccagccgcgccaagagaagcggatctggcgtgaagcagaccctgaatttcgacctgctgaagctggctggcgacgtggaatccaacccaggcccttctagaggccatatgaccgagtacaagcccacggtgcgcctcgccacccgcgacgacgtccccagggccgtacgcaccctcgccgccgcgttcgccgactaccccgccacgcgccacaccgtcgatccggaccgccacatcgagcgggtcaccgagctgcaagaactcttcctcacgcgcgtcgggctcgacatcggcaaggtgtgggtcgcggacgacggcgccgcggtggcggtctggaccacgccggagagcgtcgaagcgggggcggtgttcgccgagatcggcccgcgcatggccgagttgagcggttcccggctggccgcgcagcaacagatggaaggcctcctggcgccgcaccggcccaaggagcccgcgtggttcctggccaccgtcggcgtctcgcccgaccaccagggcaagggtctgggcagcgccgtcgtgctccccggagtggaggcggccgagcgcgccggggtgcccgccttcctggagacctccgcgccccgcaacctccccttctacgagcggctcggcttcaccgtcaccgccgacgtcgaggtgcccgaaggaccgcgcacctggtgcatgacccgcaagcccggtgcctga

SEQ ID NO: 34751 - DNA, 2616 bp, synthetic construct
  source 1..2616: mol_type = other DNA
atggccttaccagtgaccgccttgctcctgccgctggccttgctgctccacgccgccaggccgctcgagatccagaaccctgatcctgccgtgtaccagctgcgggatagcaagagcagcgacaagagcgtgtgtctgttcaccgacttcgacagccagaccaacgtgtcccagagcaaggactccgacgtgtacatcaccgataagtgcgtgctggacatgcggagcatggacttcaagagcaactccgccgtggcctggtccaacaagtccgatttcgcctgcgccaacgccttcaacaacagcattatccccgaggacacattcttcccaagccccgagagcagctgcgacgtgaagctggtggaaaagagcttcgagacagacaccaacctgaacttccagatcctgtacgaggtgatcggcttcagaatcctgctgctgaaagtggccggctttaacctgctgatgaccctgcggctgtggtccagcagggccaagcgatctggatctggagcaacaaacttctcactactcaaacaagcaggtgacgtggaggagaatcccgggcctactagcatggccttaccagtgaccgccttgctcctgccgctggccttgctgctccacgccgccaggccggacttcgtgatgacacagagccctgatagcctggccgtgtctctcggcgagcgagtgaccatgagctgcaagtctagccagagcctgctgaacagcggcaaccagaagaactacctgacctggtatcagcagaagcccggccagcctcctaagctgctgatctactgggccagcaccagagaaagcggcgtgcccgatagattttctggctctggcagcggcaccgacttcaccctgacaatttctagcctgcaagccgaggacgtggccgtgtactactgccagaacgactacagctacccctacaccttcggccagggcaccaagctggaaatcaaaggcggaggcggaagtggaggcggaggatctggcggcggaggctctgaagtgcaactggttcagagcggagccgagctgaagaaacctggggccagcgtgaaggtgtcctgtaaagccagcggctacacctttaccgactactacatgaaatgggtccgacaggccccaggccagggactcgaatggatcggcgatattatccccagcaacggggccaccttctacaaccagaaattcaagggccgcgtgaccatcaccgtggacaagagcacaagcaccgcctacatggaactgagcagcctgagaagcgaggacaccgccgtgtattattgcgccagaagccatctgctgcgggccagttggttcgcctattggggacagggaaccctggtcaccgttagctctacgcgtgaggacctgaagaacgtgttcccacctgaggtggccgtgttcgagcctagcgaggccgagatcagccacacccagaaagccaccctcgtgtgcctggctaccggcttctaccccgaccatgtggaactgtcttggtgggtcaacggcaaagaggtgcacagcggcgtgtgtaccgacccccagccactgaaagaacagcccgccctgaacgacagccggtactgcctgagcagcagactgagagtgtccgccaccttctggcagaacccccggaaccacttcagatgccaggtgcagttctacggcctgagcgagaacgacgagtggacccaggacagagccaagcccgtgacccagatcgtgtctgccgaagcctggggcagagccgattgcggctttaccagcgagagctaccagcagggcgtgctgagcgccaccaacctgagcgtgatcggcttcagaatcctgctgctgaaagtggccggctttaacctgctgatgaccctgcggctgtggtccagccgcgccaagagaagcggatctggcgtgaagcagaccctgaatttcgacctgctgaagctggctggcgacgtggaatccaacccaggcccttctagaggccatatgaccgagtacaagcccacggtgcgcctcgccacccgcgacgacgtccccagggccgtacgcaccctcgccgccgcgttcgccgactaccccgccacgcgccacaccgtcgatccggaccgccacatcgagcgggtcaccgagctgcaagaactcttcctcacgcgcgtcgggctcgacatcggcaaggtgtgggtcgcggacgacggcgccgcggtggcggtctggaccacgccggagagcgtcgaagcgggggcggtgttcgccgagatcggcccgcgcatggccgagttgagcggttcccggctggccgcgcagcaacagatggaaggcctcctggcgccgcaccggcccaaggagcccgcgtggttcctggccaccgtcggcgtctcgcccgaccaccagggcaagggtctgggcagcgccgtcgtgctccccggagtggaggcggccgagcgcgccggggtgcccgccttcctggagacctccgcgccccgcaacctccccttctacgagcggctcggcttcaccgtcaccgccgacgtcgaggtgcccgaaggaccgcgcacctggtgcatgacccgcaagcccggtgcctga

SEQ ID NO: 34752 - DNA, 2616 bp, synthetic construct; identical to SEQ ID NO: 34750
  source 1..2616: mol_type = other DNA

SEQ ID NO: 34753 - DNA, 2940 bp, synthetic construct
  source 1..2940: mol_type = other DNA
atggccttaccagtgaccgccttgctcctgccgctggccttgctgctccacgccgccaggccgctcgaggaggacctgaagaacgtgttcccacctgaggtggccgtgttcgagcctagcgaggccgagatcagccacacccagaaagccaccctcgtgtgcctggctaccggcttctaccccgaccatgtggaactgtcttggtgggtcaacggcaaagaggtgcacagcggcgtgtctaccgacccccagccactgaaagaacagcccgccctgaacgacagccggtactgcctgagcagcagactgagagtgtccgccaccttctggcagaacccccggaaccacttcagatgccaggtgcagttctacggcctgagcgagaacgacgagtggacccaggacagagccaagcccgtgacccagatcgtgtctgccgaagcctggggcagagccgatgatgtgattaagatccactggcaggaaaagaagtccaacaccatcctgggcagccaggaaggcaacaccatgaagaccaacgacacctacatgaagttcagctggctgaccgtgcccgagaagtccctggacaaagaacacagatgcatcgtgcggcacgaaaacaacaagaacggcgtggaccaggaaatcatcttcccacccatcaagaccgatgtgattacaatggaccccaaggacaactgctccaaggacgccaacgataccctgctgctccagctgaccaacaccagcgcctactacatgtacttgttgctgctgctgaagtccgtggtgtacttcgccatcatcacatgctgcctgctgatggctatggtcaagcggaaggacagccggggaagggccaagcgatctggatctggagcaacaaacttctcactactcaaacaagcaggtgacgtggaggagaatcccgggcctactagcatggccttaccagtgaccgccttgctcctgccgctggccttgctgctccacgccgccaggccggacttcgtgatgacacagagccctgatagcctggccgtgtctctcggcgagcgagtgaccatgagctgcaagtctagccagagcctgctgaacagcggcaaccagaagaactacctgacctggtatcagcagaagcccggccagcctcctaagctgctgatctactgggccagcaccagagaaagcggcgtgcccgatagattttctggctctggcagcggcaccgacttcaccctgacaatttctagcctgcaagccgaggacgtggccgtgtactactgccagaacgactacagctacccctacaccttcggccagggcaccaagctggaaatcaaaggcggaggcggaagtggaggcggaggatctggcggcggaggctctgaagtgcaactggttcagagcggagccgagctgaagaaacctggggccagcgtgaaggtgtcctgtaaagccagcggctacacctttaccgactactacatgaaatgggtccgacaggccccaggccagggactcgaatggatcggcgatattatccccagcaacggggccaccttctacaaccagaaattcaagggccgcgtgaccatcaccgtggacaagagcacaagcaccgcctacatggaactgagcagcctgagaagcgaggacaccgccgtgtattattgcgccagaagccatctgctgcgggccagttggttcgcctattggggacagggaaccctggtcaccgttagctctacgcgtatccagaaccctgatcctgccgtgtaccagctgcgggatagcaagagcagcgacaagagcgtgtgtctgttcaccgacttcgacagccagaccaacgtgtcccagagcaaggactccgacgtgtacatcaccgataagaccgtgctggacatgcggagcatggacttcaagagcaactccgccgtggcctggtccaacaagtccgatttcgcctgcgccaacgccttcaacaacagcattatccccgaggacacattcttcccaagccccgagagcagcgactccaccgaccacgtgaagcccaaagagacagagaacaccaagcagcccagcaagagctgccacaagcccaaggccatcgtgcacaccgagaaagtgaacatgatgagcctgaccgtgctgggcctgcggatgctgttcgccaaaaccgtggccgtgaacttcctgctgaccgccaagctgttcttcctcctcaccgcccgcgccaagagaagcggatctggcgtgaagcagaccctgaatttcgacctgctgaagctggctggcgacgtggaatccaacccaggcccttctagaggccatatgaccgagtacaagcccacggtgcgcctcgccacccgcgacgacgtccccagggccgtacgcaccctcgccgccgcgttcgccgactaccccgccacgcgccacaccgtcgatccggaccgccacatcgagcgggtcaccgagctgcaagaactcttcctcacgcgcgtcgggctcgacatcggcaaggtgtgggtcgcggacgacggcgccgcggtggcggtctggaccacgccggagagcgtcgaagcgggggcggtgttcgccgagatcggcccgcgcatggccgagttgagcggttcccggctggccgcgcagcaacagatggaaggcctcctggcgccgcaccggcccaaggagcccgcgtggttcctggccaccgtcggcgtctcgcccgaccaccagggcaagggtctgggcagcgccgtcgtgctccccggagtggaggcggccgagcgcgccggggtgcccgccttcctggagacctccgcgccccgcaacctccccttctacgagcggctcggcttcaccgtcaccgccgacgtcgaggtgcccgaaggaccgcgcacctggtgcatgacccgcaagcccggtgcctga

SEQ ID NO: 34754 - DNA, 2940 bp, synthetic construct
  source 1..2940: mol_type = other DNA
atggccttaccagtgaccgccttgctcctgccgctggccttgctgctccacgccgccaggccgctcgagatccagaaccctgatcctgccgtgtaccagctgcgggatagcaagagcagcgacaagagcgtgtgtctgttcaccgacttcgacagccagaccaacgtgtcccagagcaaggactccgacgtgtacatcaccgataagaccgtgctggacatgcggagcatggacttcaagagcaactccgccgtggcctggtccaacaagtccgatttcgcctgcgccaacgccttcaacaacagcattatccccgaggacacattcttcccaagccccgagagcagcgactccaccgaccacgtgaagcccaaagagacagagaacaccaagcagcccagcaagagctgccacaagcccaaggccatcgtgcacaccgagaaagtgaacatgatgagcctgaccgtgctgggcctgcggatgctgttcgccaaaaccgtggccgtgaacttcctgctgaccgccaagctgttcttcctcctcaccgccagggccaagcgatctggatctggagcaacaaacttctcactactcaaacaagcaggtgacgtggaggagaatcccgggcctactagcatggccttaccagtgaccgccttgctcctgccgctggccttgctgctccacgccgccaggccggacttcgtgatgacacagagccctgatagcctggccgtgtctctcggcgagcgagtgaccatgagctgcaagtctagccagagcctgctgaacagcggcaaccagaagaactacctgacctggtatcagcagaagcccggccagcctcctaagctgctgatctactgggccagcaccagagaaagcggcgtgcccgatagattttctggctctggcagcggcaccgacttcaccctgacaatttctagcctgcaagccgaggacgtggccgtgtactactgccagaacgactacagctacccctacaccttcggccagggcaccaagctggaaatcaaaggcggaggcggaagtggaggcggaggatctggcggcggaggctctgaagtgcaactggttcagagcggagccgagctgaagaaacctggggccagcgtgaaggtgtcctgtaaagccagcggctacacctttaccgactactacatgaaatgggtccgacaggccccaggccagggactcgaatggatcggcgatattatccccagcaacggggccaccttctacaaccagaaattcaagggccgcgtgaccatcaccgtggacaagagcacaagcaccgcctacatggaactgagcagcctgagaagcgaggacaccgccgtgtattattgcgccagaagccatctgctgcgggccagttggttcgcctattggggacagggaaccctggtcaccgttagctctacgcgtgaggacctgaagaacgtgttcccacctgaggtggccgtgttcgagcctagcgaggccgagatcagccacacccagaaagccaccctcgtgtgcctggctaccggcttctaccccgaccatgtggaactgtcttggtgggtcaacggcaaagaggtgcacagcggcgtgtctaccgacccccagccactgaaagaacagcccgccctgaacgacagccggtactgcctgagcagcagactgagagtgtccgccaccttctggcagaacccccggaaccacttcagatgccaggtgcagttctacggcctgagcgagaacgacgagtggacccaggacagagccaagcccgtgacccagatcgtgtctgccgaagcctggggcagagccgatgatgtgattaagatccactggcaggaaaagaagtccaacaccatcctgggcagccaggaaggcaacaccatgaagaccaacgacacctacatgaagttcagctggctgaccgtgcccgagaagtccctggacaaagaacacagatgcatcgtgcggcacgaaaacaacaagaacggcgtggaccaggaaatcatcttcccacccatcaagaccgatgtgattacaatggaccccaaggacaactgctccaaggacgccaacgataccctgctgctccagctgaccaacaccagcgcctactacatgtacttgttgctgctgctgaagtccgtggtgtacttcgccatcatcacatgctgcctgctgatggctatggtcaagcggaaggacagccggggacgcgccaagagaagcggatctggcgtgaagcagaccctgaatttcgacctgctgaagctggctggcgacgtggaatccaacccaggcccttctagaggccatatgaccgagtacaagcccacggtgcgcctcgccacccgcgacgacgtccccagggccgtacgcaccctcgccgccgcgttcgccgactaccccgccacgcgccacaccgtcgatccggaccgccacatcgagcgggtcaccgagctgcaagaactcttcctcacgcgcgtcgggctcgacatcggcaaggtgtgggtcgcggacgacggcgccgcggtggcggtctggaccacgccggagagcgtcgaagcgggggcggtgttcgccgagatcggcccgcgcatggccgagttgagcggttcccggctggccgcgcagcaacagatggaaggcctcctggcgccgcaccggcccaaggagcccgcgtggttcctggccaccgtcggcgtctcgcccgaccaccagggcaagggtctgggcagcgccgtcgtgctccccggagtggaggcggccgagcgcgccggggtgcccgccttcctggagacctccgcgccccgcaacctccccttctacgagcggctcggcttcaccgtcaccgccgacgtcgaggtgcccgaaggaccgcgcacctggtgcatgacccgcaagcccggtgcctga

SEQ ID NO: 34755 - DNA, 2934 bp, synthetic construct
  source 1..2934: mol_type = other DNA
atggccttaccagtgaccgccttgctcctgccgctggccttgctgctccacgccgccaggccgctcgaggaggacctgaagaacgtgttcccacctgaggtggccgtgttcgagcctagcgaggccgagatcagccacacccagaaagccaccctcgtgtgcctggctaccggcttctaccccgaccatgtggaactgtcttggtgggtcaacggcaaagaggtgcacagcggcgtgtgtaccgacccccagccactgaaagaacagcccgccctgaacgacagccggtactgcctgagcagcagactgagagtgtccgccaccttctggcagaacccccggaaccacttcagatgccaggtgcagttctacggcctgagcgagaacgacgagtggacccaggacagagccaagcccgtgacccagatcgtgtctgccgaagcctggggcagagccgatgatgtgattaagatccactggcaggaaaagaagtccaacaccatcctgggcagccaggaaggcaacaccatgaagaccaacgacacctacatgaagttcagctggctgaccgtgcccgagaagtccctggacaaagaacacagatgcatcgtgcggcacgaaaacaacaagaacggcgtggaccaggaaatcatcttcccacccatcaagaccgatgtgattacaatggaccccaaggacaactgctccaaggacgccaacgataccctgctgctccagctgaccaacaccagcgcctactacatgtacttgttgctgctgctgaagtccgtggtgtacttcgccatcatcacatgctgcctgctgcggagaaccgccttctgctgcaacggcgagaagtctagggccaagcgatctggatctggagcaacaaacttctcactactcaaacaagcaggtgacgtggaggagaatcccgggcctactagcatggccttaccagtgaccgccttgctcctgccgctggccttgctgctccacgccgccaggccggacttcgtgatgacacagagccctgatagcctggccgtgtctctcggcgagcgagtgaccatgagctgcaagtctagccagagcctgctgaacagcggcaaccagaagaactacctgacctggtatcagcagaagcccggccagcctcctaagctgctgatctactgggccagcaccagagaaagcggcgtgcccgatagattttctggctctggcagcggcaccgacttcaccctgacaatttctagcctgcaagccgaggacgtggccgtgtactactgccagaacgactacagctacccctacaccttcggccagggcaccaagctggaaatcaaaggcggaggcggaagtggaggcggaggatctggcggcggaggctctgaagtgcaactggttcagagcggagccgagctgaagaaacctggggccagcgtgaaggtgtcctgtaaagccagcggctacacctttaccgactactacatgaaatgggtccgacaggccccaggccagggactcgaatggatcggcgatattatccccagcaacggggccaccttctacaaccagaaattcaagggccgcgtgaccatcaccgtggacaagagcacaagcaccgcctacatggaactgagcagcctgagaagcgaggacaccgccgtgtattattgcgccagaagccatctgctgcgggccagttggttcgcctattggggacagggaaccctggtcaccgttagctctacgcgtatccagaaccctgatcctgccgtgtaccagctgcgggatagcaagagcagcgacaagagcgtgtgtctgttcaccgacttcgacagccagaccaacgtgtcccagagcaaggactccgacgtgtacatcaccgataagtgcgtgctggacatgcggagcatggacttcaagagcaactccgccgtggcctggtccaacaagtccgatttcgcctgcgccaacgccttcaacaacagcattatccccgaggacacattcttcccaagccccgagagcagcgactccaccgaccacgtgaagcccaaagagacagagaacaccaagcagcccagcaagagctgccacaagcccaaggccatcgtgcacaccgagaaagtgaacatgatgagcctgaccgtgctgggcctgcggatgctgttcgccaaaaccgtggccgtgaacttcctgctgaccgccaagctgttcttcctccgcgccaagagaagcggatctggcgtgaagcagaccctgaatttcgacctgctgaagctggctggcgacgtggaatccaacccaggcccttctagaggccatatgaccgagtacaagcccacggtgcgcctcgccacccgcgacgacgtccccagggccgtacgcaccctcgccgccgcgttcgccgactaccccgccacgcgccacaccgtcgatccggaccgccacatcgagcgggtcaccgagctgcaagaactcttcctcacgcgcgtcgggctcgacatcggcaaggtgtgggtcgcggacgacggcgccgcggtggcggtctggaccacgccggagagcgtcgaagcgggggcggtgttcgccgagatcggcccgcgcatggccgagttgagcggttcccggctggccgcgcagcaacagatggaaggcctcctggcgccgcaccggcccaaggagcccgcgtggttcctggccaccgtcggcgtctcgcccgaccaccagggcaagggtctgggcagcgccgtcgtgctccccggagtggaggcggccgagcgcgccggggtgcccgccttcctggagacctccgcgccccgcaacctccccttctacgagcggctcggcttcaccgtcaccgccgacgtcgaggtgcccgaaggaccgcgcacctggtgcatgacccgcaagcccggtgcctga

SEQ ID NO: 34756 - DNA, 2934 bp, synthetic construct
  source 1..2934: mol_type = other DNA
atggccttaccagtgaccgccttgctcctgccgctggccttgctgctccacgccgccaggccgctcgagatccagaaccctgatcctgccgtgtaccagctgcgggatagcaagagcagcgacaagagcgtgtgtctgttcaccgacttcgacagccagaccaacgtgtcccagagcaaggactccgacgtgtacatcaccgataagtgcgtgctggacatgcggagcatggacttcaagagcaactccgccgtggcctggtccaacaagtccgatttcgcctgcgccaacgccttcaacaacagcattatccccgaggacacattcttcccaagccccgagagcagcgactccaccgaccacgtgaagcccaaagagacagagaacaccaagcagcccagcaagagctgccacaagcccaaggccatcgtgcacaccgagaaagtgaacatgatgagcctgaccgtgctgggcctgcggatgctgttcgccaaaaccgtggccgtgaacttcctgctgaccgccaagctgttcttcctcagggccaagcgatctggatctggagcaacaaacttctcactactcaaacaagcaggtgacgtggaggagaatcccgggcctactagcatggccttaccagtgaccgccttgctcctgccgctggccttgctgctccacgccgccaggccggacttcgtgatgacacagagccctgatagcctggccgtgtctctcggcgagcgagtgaccatgagctgcaagtctagccagagcctgctgaacagcggcaaccagaagaactacctgacctggtatcagcagaagcccggccagcctcctaagctgctgatctactgggccagcaccagagaaagcggcgtgcccgatagattttctggctctggcagcggcaccgacttcaccctgacaatttctagcctgcaagccgaggacgtggccgtgtactactgccagaacgactacagctacccctacaccttcggccagggcaccaagctggaaatcaaaggcggaggcggaagtggaggcggaggatctggcggcggaggctctgaagtgcaactggttcagagcggagccgagctgaagaaacctggggccagcgtgaaggtgtcctgtaaagccagcggctacacctttaccgactactacatgaaatgggtccgacaggccccaggccagggactcgaatggatcggcgatattatccccagcaacggggccaccttctacaaccagaaattcaagggccgcgtgaccatcaccgtggacaagagcacaagcaccgcctacatggaactgagcagcctgagaagcgaggacaccgccgtgtattattgcgccagaagccatctgctgcgggccagttggttcgcctattggggacagggaaccctggtcaccgttagctctacgcgtgaggacctgaagaacgtgttcccacctgaggtggccgtgttcgagcctagcgaggccgagatcagccacacccagaaagccaccctcgtgtgcctggctaccggcttctaccccgaccatgtggaactgtcttggtgggtcaacggcaaagaggtgcacagcggcgtgtgtaccgacccccagccactgaaagaacagcccgccctgaacgacagccggtactgcctgagcagcagactgagagtgtccgccaccttctggcagaacccccggaaccacttcagatgccaggtgcagttctacggcctgagcgagaacgacgagtggacccaggacagagccaagcccgtgacccagatcgtgtctgccgaagcctggggcagagccgatgatgtgattaagatccactggcaggaaaagaagtccaacaccatcctgggcagccaggaaggcaacaccatgaagaccaacgacacctacatgaagttcagctggctgaccgtgcccgagaagtccctggacaaagaacacagatgcatcgtgcggcacgaaaacaacaagaacggcgtggaccaggaaatcatcttcccacccatcaagaccgatgtgattacaatggaccccaaggacaactgctccaaggacgccaacgataccctgctgctccagctgaccaacaccagcgcctactacatgtacttgttgctgctgctgaagtccgtggtgtacttcgccatcatcacatgctgcctgctgcggagaaccgccttctgctgcaacggcgagaagtctcgcgccaagagaagcggatctggcgtgaagcagaccctgaatttcgacctgctgaagctggctggcgacgtggaatccaacccaggcccttctagaggccatatgaccgagtacaagcccacggtgcgcctcgccacccgcgacgacgtccccagggccgtacgcaccctcgccgccgcgttcgccgactaccccgccacgcgccacaccgtcgatccggaccgccacatcgagcgggtcaccgagctgcaagaactcttcctcacgcgcgtcgggctcgacatcggcaaggtgtgggtcgcggacgacggcgccgcggtggcggtctggaccacgccggagagcgtcgaagcgggggcggtgttcgccgagatcggcccgcgcatggccgagttgagcggttcccggctggccgcgcagcaacagatggaaggcctcctggcgccgcaccggcccaaggagcccgcgtggttcctggccaccgtcggcgtctcgcccgaccaccagggcaagggtctgggcagcgccgtcgtgctccccggagtggaggcggccgagcgcgccggggtgcccgccttcctggagacctccgcgccccgcaacctccccttctacgagcggctcggcttcaccgtcaccgccgacgtcgaggtgcccgaaggaccgcgcacctggtgcatgacccgcaagcccggtgcctga

SEQ ID NO: 34757 - DNA, 2934 bp, synthetic construct
  source 1..2934: mol_type = other DNA
atggccttaccagtgaccgccttgctcctgccgctggccttgctgctccacgccgccaggccgctcgaggaggacctgaagaacgtgttcccacctgaggtggccgtgttcgagcctagcgaggccgagatcagccacacccagaaagccaccctcgtgtgcctggctaccggcttctaccccgaccatgtggaactgtcttggtgggtcaacggcaaagaggtgcacagcggcgtgtctaccgacccccagccactgaaagaacagcccgccctgaacgacagccggtactgcctgagcagcagactgagagtgtccgccaccttctggcagaacccccggaaccacttcagatgccaggtgcagttctacggcctgagcgagaacgacgagtggacccaggacagagccaagcccgtgacccagatcgtgtctgccgaagcctggggcagagccgatgatgtgattaagatccactggcaggaaaagaagtccaacaccatcctgggcagccaggaaggcaacaccatgaagaccaacgacacctacatgaagttcagctggctgaccgtgcccgagaagtccctggacaaagaacacagatgcatcgtgcggcacgaaaacaacaagaacggcgtggaccaggaaatcatcttcccacccatcaagaccgatgtgattacaatggaccccaaggacaactgctccaaggacgccaacgataccctgctgctccagctgaccaacaccagcgcctactacatgtacttgttgctgctgctgaagtccgtggtgtacttcgccatcatcacatgctgcctgctgcggagaaccgccttctgctgcaacggcgagaagtctagggccaagcgatctggatctggagcaacaaacttctcactactcaaacaagcaggtgacgtggaggagaatcccgggcctactagcatggccttaccagtgaccgccttgctcctgccgctggccttgctgctccacgccgccaggccggacttcgtgatgacacagagccctgatagcctggccgtgtctctcggcgagcgagtgaccatgagctgcaagtctagccagagcctgctgaacagcggcaaccagaagaactacctgacctggtatcagcagaagcccggccagcctcctaagctgctgatctactgggccagcaccagagaaagcggcgtgcccgatagattttctggctctggcagcggcaccgacttcaccctgacaatttctagcctgcaagccgaggacgtggccgtgtactactgccagaacgactacagctacccctacaccttcggccagggcaccaagctggaaatcaaaggcggaggcggaagtggaggcggaggatctggcggcggaggctctgaagtgcaactggttcagagcggagccgagctgaagaaacctggggccagcgtgaaggtgtcctgtaaagccagcggctacacctttaccgactactacatgaaatgggtccgacaggccccaggccagggactcgaatggatcggcgatattatccccagcaacggggccaccttctacaaccagaaattcaagggccgcgtgaccatcaccgtggacaagagcacaagcaccgcctacatggaactgagcagcctgagaagcgaggacaccgccgtgtattattgcgccagaagccatctgctgcgggccagttggttcgcctattggggacagggaaccctggtcaccgttagctctacgcgtatccagaaccctgatcctgccgtgtaccagctgcgggatagcaagagcagcgacaagagcgtgtgtctgttcaccgacttcgacagccagaccaacgtgtcccagagcaaggactccgacgtgtacatcaccgataagaccgtgctggacatgcggagcatggacttcaagagcaactccgccgtggcctggtccaacaagtccgatttcgcctgcgccaacgccttcaacaacagcattatccccgaggacacattcttcccaagccccgagagcagcgactccaccgaccacgtgaagcccaaagagacagagaacaccaagcagcccagcaagagctgccacaagcccaaggccatcgtgcacaccgagaaagtgaacatgatgagcctgaccgtgctgggcctgcggatgctgttcgccaaaaccgtggccgtgaacttcctgctgaccgccaagctgttcttcctccgcgccaagagaagcggatctggcgtgaagcagaccctgaatttcgacctgctgaagctggctggcgacgtggaatccaacccaggcccttctagaggccatatgaccgagtacaagcccacggtgcgcctcgccacccgcgacgacgtccccagggccgtacgcaccctcgccgccgcgttcgccgactaccccgccacgcgccacaccgtcgatccggaccgccacatcgagcgggtcaccgagctgcaagaactcttcctcacgcgcgtcgggctcgacatcggcaaggtgtgggtcgcggacgacggcgccgcggtggcggtctggaccacgccggagagcgtcgaagcgggggcggtgttcgccgagatcggcccgcgcatggccgagttgagcggttcccggctggccgcgcagcaacagatggaaggcctcctggcgccgcaccggcccaaggagcccgcgtggttcctggccaccgtcggcgtctcgcccgaccaccagggcaagggtctgggcagcgccgtcgtgctccccggagtggaggcggccgagcgcgccggggtgcccgccttcctggagacctccgcgccccgcaacctccccttctacgagcggctcggcttcaccgtcaccgccgacgtcgaggtgcccgaaggaccgcgcacctggtgcatgacccgcaagcccggtgcctga

SEQ ID NO: 34758 - DNA, 2934 bp, synthetic construct
  source 1..2934: mol_type = other DNA
atggccttaccagtgaccgccttgctcctgccgctggccttgctgctccacgccgccaggccgctcgagatccagaaccctgatcctgccgtgtaccagctgcgggatagcaagagcagcgacaagagcgtgtgtctgttcaccgacttcgacagccagaccaacgtgtcccagagcaaggactccgacgtgtacatcaccgataagaccgtgctggacatgcggagcatggacttcaagagcaactccgccgtggcctggtccaacaagtccgatttcgcctgcgccaacgccttcaacaacagcattatccccgaggacacattcttcccaagccccgagagcagcgactccaccgaccacgtgaagcccaaagagacagagaacaccaagcagcccagcaagagctgccacaagcccaaggccatcgtgcacaccgagaaagtgaacatgatgagcctgaccgtgctgggcctgcggatgctgttcgccaaaaccgtggccgtgaacttcctgctgaccgccaagctgttcttcctcagggccaagcgatctggatctggagcaacaaacttctcactactcaaacaagcaggtgacgtggaggagaatcccgggcctactagcatggccttaccagtgaccgccttgctcctgccgctggccttgctgctccacgccgccaggccggacttcgtgatgacacagagccctgatagcctggccgtgtctctcggcgagcgagtgaccatgagctgcaagtctagccagagcctgctgaacagcggcaaccagaagaactacctgacctggtatcagcagaagcccggccagcctcctaagctgctgatctactgggccagcaccagagaaagcggcgtgcccgatagattttctggctctggcagcggcaccgacttcaccctgacaatttctagcctgcaagccgaggacgtggccgtgtactactgccagaacgactacagctacccctacaccttcggccagggcaccaagctggaaatcaaaggcggaggcggaagtggaggcggaggatctggcggcggaggctctgaagtgcaactggttcagagcggagccgagctgaagaaacctggggccagcgtgaaggtgtcctgtaaagccagcggctacacctttaccgactactacatgaaatgggtccgacaggccccaggccagggactcgaatggatcggcgatattatccccagcaacggggccaccttctacaaccagaaattcaagggccgcgtgaccatcaccgtggacaagagcacaagcaccgcctacatggaactgagcagcctgagaagcgaggacaccgccgtgtattattgcgccagaagccatctgctgcgggccagttggttcgcctattggggacagggaaccctggtcaccgttagctctacgcgtgaggacctgaagaacgtgttcccacctgaggtggccgtgttcgagcctagcgaggccgagatcagccacacccagaaagccaccctcgtgtgcctggctaccggcttctaccccgaccatgtggaactgtcttggtgggtcaacggcaaagaggtgcacagcggcgtgtctaccgacccccagccactgaaagaacagcccgccctgaacgacagccggtactgcctgagcagcagactgagagtgtccgccaccttctggcagaacccccggaaccacttcagatgccaggtgcagttctacggcctgagcgagaacgacgagtggacccaggacagagccaagcccgtgacccagatcgtgtctgccgaagcctggggcagagccgatgatgtgattaagatccactggcaggaaaagaagtccaacaccatcctgggcagccaggaaggcaacaccatgaagaccaacgacacctacatgaagttcagctggctgaccgtgcccgagaagtccctggacaaagaacacagatgcatcgtgcggcacgaaaacaacaagaacggcgtggaccaggaaatcatcttcccacccatcaagaccgatgtgattacaatggaccccaaggacaactgctccaaggacgccaacgataccctgctgctccagctgaccaacaccagcgcctactacatgtacttgttgctgctgctgaagtccgtggtgtacttcgccatcatcacatgctgcctgctgcggagaaccgccttctgctgcaacggcgagaagtctcgcgccaagagaagcggatctggcgtgaagcagaccctgaatttcgacctgctgaagctggctggcgacgtggaatccaacccaggcccttctagaggccatatgaccgagtacaagcccacggtgcgcctcgccacccgcgacgacgtccccagggccgtacgcaccctcgccgccgcgttcgccgactaccccgccacgcgccacaccgtcgatccggaccgccacatcgagcgggtcaccgagctgcaagaactcttcctcacgcgcgtcgggctcgacatcggcaaggtgtgggtcgcggacgacggcgccgcggtggcggtctggaccacgccggagagcgtcgaagcgggggcggtgttcgccgagatcggcccgcgcatggccgagttgagcggttcccggctggccgcgcagcaacagatggaaggcctcctggcgccgcaccggcccaaggagcccgcgtggttcctggccaccgtcggcgtctcgcccgaccaccagggcaagggtctgggcagcgccgtcgtgctccccggagtggaggcggccgagcgcgccggggtgcccgccttcctggagacctccgcgccccgcaacctccccttctacgagcggctcggcttcaccgtcaccgccgacgtcgaggtgcccgaaggaccgcgcacctggtgcatgacccgcaagcccggtgcctga

SEQ ID NO: 34759 - DNA, 2628 bp, synthetic construct
  source 1..2628: mol_type = other DNA
atggccttaccagtgaccgccttgctcctgccgctggccttgctgctccacgccgccaggccgctcgaggaggacctgaagaacgtgttcccacctgaggtggccgtgttcgagcctagcaaggccgagatcgcccacacccagaaagccaccctcgtgtgcctggctaccggcttctaccccgaccatgtggaactgtcttggtgggtcaacggcaaagaggtgcacagcggcgtgtgtaccgacccccagccactgaaagaacagcccgccctgaacgacagccggtactgcctgagcagcagactgagagtgtccgccaccttctggcagaacccccggaaccacttcagatgccaggtgcagttctacggcctgagcgagaacgacgagtggacccaggacagagccaagcccgtgacccagatcgtgtctgccgaagcctggggcagagccgattgcggcatcaccagcgccagctaccaccagggcgtgctgagcgccaccatcctgtacgagatcctgctgggcaaggccaccctgtacgccgtgctggtgtctgccctggtgctgatggctatggtcaagcggaaggacagccggggaagggccaagcgatctggatctggagcaacaaacttctcactactcaaacaagcaggtgacgtggaggagaatcccgggcctactagcatggccttaccagtgaccgccttgctcctgccgctggccttgctgctccacgccgccaggccggacttcgtgatgacacagagccctgatagcctggccgtgtctctcggcgagcgagtgaccatgagctgcaagtctagccagagcctgctgaacagcggcaaccagaagaactacctgacctggtatcagcagaagcccggccagcctcctaagctgctgatctactgggccagcaccagagaaagcggcgtgcccgatagattttctggctctggcagcggcaccgacttcaccctgacaatttctagcctgcaagccgaggacgtggccgtgtactactgccagaacgactacagctacccctacaccttcggccagggcaccaagctggaaatcaaaggcggaggcggaagtggaggcggaggatctggcggcggaggctctgaagtgcaactggttcagagcggagccgagctgaagaaacctggggccagcgtgaaggtgtcctgtaaagccagcggctacacctttaccgactactacatgaaatgggtccgacaggccccaggccagggactcgaatggatcggcgatattatccccagcaacggggccaccttctacaaccagaaattcaagggccgcgtgaccatcaccgtggacaagagcacaagcaccgcctacatggaactgagcagcctgagaagcgaggacaccgccgtgtattattgcgccagaagccatctgctgcgggccagttggttcgcctattggggacagggaaccctggtcaccgttagctctacgcgtatccagaaccctgatcctgccgtgtaccagctgcgggatagcaagagcagcgacaagagcgtgtgtctgttcaccgacttcgacagccagaccaacgtgtcccagagcaaggactccgacgtgtacatcaccgataagtgcgtgctggacatgcggagcatggacttcaagagcaactccgccgtggcctggtccaacaagtccgatttcgcctgcgccaacgccttcaacaacagcattatccccgaggacacattcttcccaagcagcgacgtgccctgcgacgtgaagctggtggaaaagagcttcgagacagacaccaacctgaacttccagaacctgagcgtgatcggcttcagaatcctgctgctgaaagtggccggctttaacctgctgatgaccctgcggctgtggtccagccgcgccaagagaagcggatctggcgtgaagcagaccctgaatttcgacctgctgaagctggctggcgacgtggaatccaacccaggcccttctagaggccatatgaccgagtacaagcccacggtgcgcctcgccacccgcgacgacgtccccagggccgtacgcaccctcgccgccgcgttcgccgactaccccgccacgcgccacaccgtcgatccggaccgccacatcgagcgggtcaccgagctgcaagaactcttcctcacgcgcgtcgggctcgacatcggcaaggtgtgggtcgcggacgacggcgccgcggtggcggtctggaccacgccggagagcgtcgaagcgggggcggtgttcgccgagatcggcccgcgcatggccgagttgagcggttcccggctggccgcgcagcaacagatggaaggcctcctggcgccgcaccggcccaaggagcccgcgtggttcctggccaccgtcggcgtctcgcccgaccaccagggcaagggtctgggcagcgccgtcgtgctccccggagtggaggcggccgagcgcgccggggtgcccgccttcctggagacctccgcgccccgcaacctccccttctacgagcggctcggcttcaccgtcaccgccgacgtcgaggtgcccgaaggaccgcgcacctggtgcatgacccgcaagcccggtgcctga

SEQ ID NO: 34760 - DNA, 2628 bp, synthetic construct
  source 1..2628: mol_type = other DNA
atggccttaccagtgaccgccttgctcctgccgctggccttgctgctccacgccgccaggccgctcgagatccagaaccctgatcctgccgtgtaccagctgcgggatagcaagagcagcgacaagagcgtgtgtctgttcaccgacttcgacagccagaccaacgtgtcccagagcaaggactccgacgtgtacatcaccgataagtgcgtgctggacatgcggagcatggacttcaagagcaactccgccgtggcctggtccaacaagtccgatttcgcctgcgccaacgccttcaacaacagcattatccccgaggacacattcttcccaagcagcgacgtgccctgcgacgtgaagctggtggaaaagagcttcgagacagacaccaacctgaacttccagaacctgagcgtgatcggcttcagaatcctgctgctgaaagtggccggctttaacctgctgatgaccctgcggctgtggtccagcagggccaagcgatctggatctggagcaacaaacttctcactactcaaacaagcaggtgacgtggaggagaatcccgggcctactagcatggccttaccagtgaccgccttgctcctgccgctggccttgctgctccacgccgccaggccggacttcgtgatgacacagagccctgatagcctggccgtgtctctcggcgagcgagtgaccatgagctgcaagtctagccagagcctgctgaacagcggcaaccagaagaactacctgacctggtatcagcagaagcccggccagcctcctaagctgctgatctactgggccagcaccagagaaagcggcgtgcccgatagattttctggctctggcagcggcaccgacttcaccctgacaatttctagcctgcaagccgaggacgtggccgtgtactactgccagaacgactacagctacccctacaccttcggccagggcaccaagctggaaatcaaaggcggaggcggaagtggaggcggaggatctggcggcggaggctctgaagtgcaactggttcagagcggagccgagctgaagaaacctggggccagcgtgaaggtgtcctgtaaagccagcggctacacctttaccgactactacatgaaatgggtccgacaggccccaggccagggactcgaatggatcggcgatattatccccagcaacggggccaccttctacaaccagaaattcaagggccgcgtgaccatcaccgtggacaagagcacaagcaccgcctacatggaactgagcagcctgagaagcgaggacaccgccgtgtattattgcgccagaagccatctgctgcgggccagttggttcgcctattggggacagggaaccctggtcaccgttagctctacgcgtgaggacctgaagaacgtgttcccacctgaggtggccgtgttcgagcctagcaaggccgagatcgcccacacccagaaagccaccctcgtgtgcctggctaccggcttctaccccgaccatgtggaactgtcttggtgggtcaacggcaaagaggtgcacagcggcgtgtgtaccgacccccagccactgaaagaacagcccgccctgaacgacagccggtactgcctgagcagcagactgagagtgtccgccaccttctggcagaacccccggaaccacttcagatgccaggtgcagttctacggcctgagcgagaacgacgagtggacccaggacagagccaagcccgtgacccagatcgtgtctgccgaagcctggggcagagccgattgcggcatcaccagcgccagctaccaccagggcgtgctgagcgccaccatcctgtacgagatcctgctgggcaaggccaccctgtacgccgtgctggtgtctgccctggtgctgatggctatggtcaagcggaaggacagccggggacgcgccaagagaagcggatctggcgtgaagcagaccctgaatttcgacctgctgaagctggctggcgacgtggaatccaacccaggcccttctagaggccatatgaccgagtacaagcccacggtgcgcctcgccacccgcgacgacgtccccagggccgtacgcaccctcgccgccgcgttcgccgactaccccgccacgcgccacaccgtcgatccggaccgccacatcgagcgggtcaccgagctgcaagaactcttcctcacgcgcgtcgggctcgacatcggcaaggtgtgggtcgcggacgacggcgccgcggtggcggtctggaccacgccggagagcgtcgaagcgggggcggtgttcgccgagatcggcccgcgcatggccgagttgagcggttcccggctggccgcgcagcaacagatggaaggcctcctggcgccgcaccggcccaaggagcccgcgtggttcctggccaccgtcggcgtctcgcccgaccaccagggcaagggtctgggcagcgccgtcgtgctccccggagtggaggcggccgagcgcgccggggtgcccgccttcctggagacctccgcgccccgcaacctccccttctacgagcggctcggcttcaccgtcaccgccgacgtcgaggtgcccgaaggaccgcgcacctggtgcatgacccgcaagcccggtgcctga

SEQ ID NO: 34761 - DNA, 2307 bp, synthetic construct
  source 1..2307: mol_type = other DNA
atggccttaccagtgaccgccttgctcctgccgctggccttgctgctccacgccgccaggccgctcgagcagagttttgggttgttggaccctaaattgtgctatctgttggacggaatcctgttcatttacggagtgatcctgaccgcattgttcctgcgggttaagttttccagatccgcagacgcacccgcttaccaacaagggcagaaccaactctacaatgaacttaatttggggcggagggaagagtacgacgttctggacaaaaggaggggacgagatcccgagatgggcggaaagcctcagcgaaggaagaatccgcaagaggggctttataacgaactccagaaagataaaatggcagaagcctatagtgagattgggatgaagggagaaaggaggaggggtaaaggtcacgatgggttgtaccaaggattgagcacagccactaaagatacctatgatgcgctccacatgcaggccctgccgccaagaagggccaagcgatctggatctggagcaacaaacttctcactactcaaacaagcaggtgacgtggaggagaatcccgggcctactagcatggccttaccagtgaccgccttgctcctgccgctggccttgctgctccacgccgccaggccggacttcgtgatgacacagagccctgatagcctggccgtgtctctcggcgagcgagtgaccatgagctgcaagtctagccagagcctgctgaacagcggcaaccagaagaactacctgacctggtatcagcagaagcccggccagcctcctaagctgctgatctactgggccagcaccagagaaagcggcgtgcccgatagattttctggctctggcagcggcaccgacttcaccctgacaatttctagcctgcaagccgaggacgtggccgtgtactactgccagaacgactacagctacccctacaccttcggccagggcaccaagctggaaatcaaaggcggaggcggaagtggaggcggaggatctggcggcggaggctctgaagtgcaactggttcagagcggagccgagctgaagaaacctggggccagcgtgaaggtgtcctgtaaagccagcggctacacctttaccgactactacatgaaatgggtccgacaggccccaggccagggactcgaatggatcggcgatattatccccagcaacggggccaccttctacaaccagaaattcaagggccgcgtgaccatcaccgtggacaagagcacaagcaccgcctacatggaactgagcagcctgagaagcgaggacaccgccgtgtattattgcgccagaagccatctgctgcgggccagttggttcgcctattggggacagggaaccctggtcaccgttagctctacgcgtgagctgggagagcctcagctgtgctatatcctggacgccatcctgtttctgtacggcatcgtgctgaccctgctgtactgccggctgaagatccaagtgcggaaggccgccatcaccagctacgagaaatccgacggcgtgtacaccggcctgagcaccagaaatcaagagacatacgagacactgaagcacgaaaagcctccacaacgcgccaagagaagcggatctggcgtgaagcagaccctgaatttcgacctgctgaagctggctggcgacgtggaatccaacccaggcccttctagaggccatatgaccgagtacaagcccacggtgcgcctcgccacccgcgacgacgtccccagggccgtacgcaccctcgccgccgcgttcgccgactaccccgccacgcgccacaccgtcgatccggaccgccacatcgagcgggtcaccgagctgcaagaactcttcctcacgcgcgtcgggctcgacatcggcaaggtgtgggtcgcggacgacggcgccgcggtggcggtctggaccacgccggagagcgtcgaagcgggggcggtgttcgccgagatcggcccgcgcatggccgagttgagcggttcccggctggccgcgcagcaacagatggaaggcctcctggcgccgcaccggcccaaggagcccgcgtggttcctggccaccgtcggcgtctcgcccgaccaccagggcaagggtctgggcagcgccgtcgtgctccccggagtggaggcggccgagcgcgccggggtgcccgccttcctggagacctccgcgccccgcaacctccccttctacgagcggctcggcttcaccgtcaccgccgacgtcgaggtgcccgaaggaccgcgcacctggtgcatgacccgcaagcccggtgcctga

SEQ ID NO: 34762 - DNA, 2940 bp, synthetic construct; identical to SEQ ID NO: 34753
  source 1..2940: mol_type = other DNA

SEQ ID NO: 34763 - DNA, 2940 bp, synthetic construct; identical to SEQ ID NO: 34754
  source 1..2940: mol_type = other DNA

SEQ ID NO: 34764 - DNA, 2937 bp, synthetic construct
  source 1..2937: mol_type = other DNA
atggccttaccagtgaccgccttgctcctgccgctggccttgctgctccacgccgccaggccgctcgaggaggaggacctgaagaacgtgttcccacctgaggtggccgtgttcgagcctagcgaggccgagatcagccacacccagaaagccaccctcgtgtgcctggctaccggcttctaccccgaccatgtggaactgtcttggtgggtcaacggcaaagaggtgcacagcggcgtgtgtaccgacccccagccactgaaagaacagcccgccctgaacgacagccggtactgcctgagcagcagactgagagtgtccgccaccttctggcagaacccccggaaccacttcagatgccaggtgcagttctacggcctgagcgagaacgacgagtggacccaggacagagccaagcccgtgacccagatcgtgtctgccgaagcctggggcagagccgatgatgtgattaagatccactggcaggaaaagaagtccaacaccatcctgggcagccaggaaggcaacaccatgaagaccaacgacacctacatgaagttcagctggctgaccgtgcccgagaagtccctggacaaagaacacagatgcatcgtgcggcacgaaaacaacaagaacggcgtggaccaggaaatcatcttcccacccatcaagaccgatgtgattacaatggaccccaaggacaactgctccaaggacgccaacgataccctgctgctccagctgaccaacaccagcgcctactacatgtacttgttgctgctgctgaagtccgtggtgtacttcgccatcatcacatgctgcctgctgcggagaaccgccttctgctgcaacggcgagaagtctagggccaagcgatctggatctggagcaacaaacttctcactactcaaacaagcaggtgacgtggaggagaatcccgggcctactagcatggccttaccagtgaccgccttgctcctgccgctggccttgctgctccacgccgccaggccggacttcgtgatgacacagagccctgatagcctggccgtgtctctcggcgagcgagtgaccatgagctgcaagtctagccagagcctgctgaacagcggcaaccagaagaactacctgacctggtatcagcagaagcccggccagcctcctaagctgctgatctactgggccagcaccagagaaagcggcgtgcccgatagattttctggctctggcagcggcaccgacttcaccctgacaatttctagcctgcaagccgaggacgtggccgtgtactactgccagaacgactacagctacccctacaccttcggccagggcaccaagctggaaatcaaaggcggaggcggaagtggaggcggaggatctggcggcggaggctctgaagtgcaactggttcagagcggagccgagctgaagaaacctggggccagcgtgaaggtgtcctgtaaagccagcggctacacctttaccgactactacatgaaatgggtccgacaggccccaggccagggactcgaatggatcggcgatattatccccagcaacggggccaccttctacaaccagaaattcaagggccgcgtgaccatcaccgtggacaagagcacaagcaccgcctacatggaactgagcagcctgagaagcgaggacaccgccgtgtattattgcgccagaagccatctgctgcgggccagttggttcgcctattggggacagggaaccctggtcaccgttagctctacgcgtatccagaaccctgatcctgccgtgtaccagctgcgggatagcaagagcagcgacaagagcgtgtgtctgttcaccgacttcgacagccagaccaacgtgtcccagagcaaggactccgacgtgtacatcaccgataagtgcgtgctggacatgcggagcatggacttcaagagcaactccgccgtggcctggtccaacaagtccgatttcgcctgcgccaacgccttcaacaacagcattatccccgaggacacattcttcccaagccccgagagcagcgactccaccgaccacgtgaagcccaaagagacagagaacaccaagcagcccagcaagagctgccacaagcccaaggccatcgtgcacaccgagaaagtgaacatgatgagcctgaccgtgctgggcctgcggatgctgttcgccaaaaccgtggccgtgaacttcctgctgaccgccaagctgttcttcctccgcgccaagagaagcggatctggcgtgaagcagaccctgaatttcgacctgctgaagctggctggcgacgtggaatccaacccaggcccttctagaggccatatgaccgagtacaagcccacggtgcgcctcgccacccgcgacgacgtccccagggccgtacgcaccctcgccgccgcgttcgccgactaccccgccacgcgccacaccgtcgatccggaccgccacatcgagcgggtcaccgagctgcaagaactcttcctcacgcgcgtcgggctcgacatcggcaaggtgtgggtcgcggacgacggcgccgcggtggcggtctggaccacgccggagagcgtcgaagcgggggcggtgttcgccgagatcggcccgcgcatggccgagttgagcggttcccggctggccgcgcagcaacagatggaaggcctcctggcgccgcaccggcccaaggagcccgcgtggttcctggccaccgtcggcgtctcgcccgaccaccagggcaagggtctgggcagcgccgtcgtgctccccggagtggaggcggccgagcgcgccggggtgcccgccttcctggagacctccgcgccccgcaacctccccttctacgagcggctcggcttcaccgtcaccgccgacgtcgaggtgcccgaaggaccgcgcacctggtgcatgacccgcaagcccggtgcctga

SEQ ID NO: 34765 - DNA, 2937 bp, synthetic construct
  source 1..2937: mol_type = other DNA
atggccttaccagtgaccgccttgctcctgccgctggccttgctgctccacgccgccaggccgctcgagatccagaaccctgatcctgccgtgtaccagctgcgggatagcaagagcagcgacaagagcgtgtgtctgttcaccgacttcgacagccagaccaacgtgtcccagagcaaggactccgacgtgtacatcaccgataagtgcgtgctggacatgcggagcatggacttcaagagcaactccgccgtggcctggtccaacaagtccgatttcgcctgcgccaacgccttcaacaacagcattatccccgaggacacattcttcccaagccccgagagcagcgactccaccgaccacgtgaagcccaaagagacagagaacaccaagcagcccagcaagagctgccacaagcccaaggccatcgtgcacaccgagaaagtgaacatgatgagcctgaccgtgctgggcctgcggatgctgttcgccaaaaccgtggccgtgaacttcctgctgaccgccaagctgttcttcctcagggccaagcgatctggatctggagcaacaaacttctcactactcaaacaagcaggtgacgtggaggagaatcccgggcctactagcatggccttaccagtgaccgccttgctcctgccgctggccttgctgctccacgccgccaggccggacttcgtgatgacacagagccctgatagcctggccgtgtctctcggcgagcgagtgaccatgagctgcaagtctagccagagcctgctgaacagcggcaaccagaagaactacctgacctggtatcagcagaagcccggccagcctcctaagctgctgatctactgggccagcaccagagaaagcggcgtgcccgatagattttctggctctggcagcggcaccgacttcaccctgacaatttctagcctgcaagccgaggacgtggccgtgtactactgccagaacgactacagctacccctacaccttcggccagggcaccaagctggaaatcaaaggcggaggcggaagtggaggcggaggatctggcggcggaggctctgaagtgcaactggttcagagcggagccgagctgaagaaacctggggccagcgtgaaggtgtcctgtaaagccagcggctacacctttaccgactactacatgaaatgggtccgacaggccccaggccagggactcgaatggatcggcgatattatccccagcaacggggccaccttctacaaccagaaattcaagggccgcgtgaccatcaccgtggacaagagcacaagcaccgcctacatggaactgagcagcctgagaagcgaggacaccgccgtgtattattgcgccagaagccatctgctgcgggccagttggttcgcctattggggacagggaaccctggtcaccgttagctctacgcgtgaggaggacctgaagaacgtgttcccacctgaggtggccgtgttcgagcctagcgaggccgagatcagccacacccagaaagccaccctcgtgtgcctggctaccggcttctaccccgaccatgtggaactgtcttggtgggtcaacggcaaagaggtgcacagcggcgtgtgtaccgacccccagccactgaaagaacagcccgccctgaacgacagccggtactgcctgagcagcagactgagagtgtccgccaccttctggcagaacccccggaaccacttcagatgccaggtgcagttctacggcctgagcgagaacgacgagtggacccaggacagagccaagcccgtgacccagatcgtgtctgccgaagcctggggcagagccgatgatgtgattaagatccactggcaggaaaagaagtccaacaccatcctgggcagccaggaaggcaacaccatgaagaccaacgacacctacatgaagttcagctggctgaccgtgcccgagaagtccctggacaaagaacacagatgcatcgtgcggcacgaaaacaacaagaacggcgtggaccaggaaatcatcttcccacccatcaagaccgatgtgattacaatggaccccaaggacaactgctccaaggacgccaacgataccctgctgctccagctgaccaacaccagcgcctactacatgtacttgttgctgctgctgaagtccgtggtgtacttcgccatcatcacatgctgcctgctgcggagaaccgccttctgctgcaacggcgagaagtctcgcgccaagagaagcggatctggcgtgaagcagaccctgaatttcgacctgctgaagctggctggcgacgtggaatccaacccaggcccttctagaggccatatgaccgagtacaagcccacggtgcgcctcgccacccgcgacgacgtccccagggccgtacgcaccctcgccgccgcgttcgccgactaccccgccacgcgccacaccgtcgatccggaccgccacatcgagcgggtcaccgagctgcaagaactcttcctcacgcgcgtcgggctcgacatcggcaaggtgtgggtcgcggacgacggcgccgcggtggcggtctggaccacgccggagagcgtcgaagcgggggcggtgttcgccgagatcggcccgcgcatggccgagttgagcggttcccggctggccgcgcagcaacagatggaaggcctcctggcgccgcaccggcccaaggagcccgcgtggttcctggccaccgtcggcgtctcgcccgaccaccagggcaagggtctgggcagcgccgtcgtgctccccggagtggaggcggccgagcgcgccggggtgcccgccttcctggagacctccgcgccccgcaacctccccttctacgagcggctcggcttcaccgtcaccgccgacgtcgaggtgcccgaaggaccgcgcacctggtgcatgacccgcaagcccggtgcctga

SEQ ID NO: 34766 - DNA, 2628 bp, synthetic construct
  source 1..2628: mol_type = other DNA
atggccttaccagtgaccgccttgctcctgccgctggccttgctgctccacgccgccaggccgctcgaggaggacctgaagaacgtgttcccacctgaggtggccgtgttcgagcctagcgaggccgagatcagccacacccagaaagccaccctcgtgtgcctggctaccggcttctaccccgaccatgtggaactgtcttggtgggtcaacggcaaagaggtgcacagcggcgtgtctaccgacccccagccactgaaagaacagcccgccctgaacgacagccggtactgcctgagcagcagactgagagtgtccgccaccttctggcagaacccccggaaccacttcagatgccaggtgcagttctacggcctgagcgagaacgacgagtggacccaggacagagccaagcccgtgacccagatcgtgtctgccgaagcctggggcagagccgattgcggctttaccagcgagagctaccagcagggcgtgctgagcgccaccaacctgagcgtgatcggcttcagaatcctgctgctgaaagtggccggctttaacctgctgatgaccctgcggctgtggtccagcagggccaagcgatctggatctggagcaacaaacttctcactactcaaacaagcaggtgacgtggaggagaatcccgggcctactagcatggccttaccagtgaccgccttgctcctgccgctggccttgctgctccacgccgccaggccggacttcgtgatgacacagagccctgatagcctggccgtgtctctcggcgagcgagtgaccatgagctgcaagtctagccagagcctgctgaacagcggcaaccagaagaactacctgacctggtatcagcagaagcccggccagcctcctaagctgctgatctactgggccagcaccagagaaagcggcgtgcccgatagattttctggctctggcagcggcaccgacttcaccctgacaatttctagcctgcaagccgaggacgtggccgtgtactactgccagaacgactacagctacccctacaccttcggccagggcaccaagctggaaatcaaaggcggaggcggaagtggaggcggaggatctggcggcggaggctctgaagtgcaactggttcagagcggagccgagctgaagaaacctggggccagcgtgaaggtgtcctgtaaagccagcggctacacctttaccgactactacatgaaatgggtccgacaggccccaggccagggactcgaatggatcggcgatattatccccagcaacggggccaccttctacaaccagaaattcaagggccgcgtgaccatcaccgtggacaagagcacaagcaccgcctacatggaactgagcagcctgagaagcgaggacaccgccgtgtattattgcgccagaagccatctgctgcgggccagttggttcgcctattggggacagggaaccctggtcaccgttagctctacgcgtatccagaaccctgatcctgccgtgtaccagctgcgggatagcaagagcagcgacaagagcgtgtgtctgttcaccgacttcgacagccagaccaacgtgtcccagagcaaggactccgacgtgtacatcaccgataagaccgtgctggacatgcggagcatggacttcaagagcaactccgccgtggcctggtccaacaagtccgatttcgcctgcgccaacgccttcaacaacagcattatccccgaggacacattcttcccaagccccgagagcagctgcgacgtgaagctggtggaaaagagcttcgagacagacaccaacctgaacttccagatcctgtacgagatcctgctgggcaaggccaccctgtacgccgtgctggtgtctgccctggtgctgatggctatggtcaagcggaaggacagccggggacgcgccaagagaagcggatctggcgtgaagcagaccctgaatttcgacctgctgaagctggctggcgacgtggaatccaacccaggcccttctagaggccatatgaccgagtacaagcccacggtgcgcctcgccacccgcgacgacgtccccagggccgtacgcaccctcgccgccgcgttcgccgactaccccgccacgcgccacaccgtcgatccggaccgccacatcgagcgggtcaccgagctgcaagaactcttcctcacgcgcgtcgggctcgacatcggcaaggtgtgggtcgcggacgacggcgccgcggtggcggtctggaccacgccggagagcgtcgaagcgggggcggtgttcgccgagatcggcccgcgcatggccgagttgagcggttcccggctggccgcgcagcaacagatggaaggcctcctggcgccgcaccggcccaaggagcccgcgtggttcctggccaccgtcggcgtctcgcccgaccaccagggcaagggtctgggcagcgccgtcgtgctccccggagtggaggcggccgagcgcgccggggtgcccgccttcctggagacctccgcgccccgcaacctccccttctacgagcggctcggcttcaccgtcaccgccgacgtcgaggtgcccgaaggaccgcgcacctggtgcatgacccgcaagcccggtgcctga

SEQ ID NO: 34767 - DNA, 2628 bp, synthetic construct
  source 1..2628: mol_type = other DNA
atggccttaccagtgaccgccttgctcctgccgctggccttgctgctccacgccgccaggccgctcgagatccagaaccctgatcctgccgtgtaccagctgcgggatagcaagagcagcgacaagagcgtgtgtctgttcaccgacttcgacagccagaccaacgtgtcccagagcaaggactccgacgtgtacatcaccgataagaccgtgctggacatgcggagcatggacttcaagagcaactccgccgtggcctggtccaacaagtccgatttcgcctgcgccaacgccttcaacaacagcattatccccgaggacacattcttcccaagccccgagagcagctgcgacgtgaagctggtggaaaagagcttcgagacagacaccaacctgaacttccagatcctgtacgagatcctgctgggcaaggccaccctgtacgccgtgctggtgtctgccctggtgctgatggctatggtcaagcggaaggacagccggggaagggccaagcgatctggatctggagcaacaaacttctcactactcaaacaagcaggtgacgtggaggagaatcccgggcctactagcatggccttaccagtgaccgccttgctcctgccgctggccttgctgctccacgccgccaggccggacttcgtgatgacacagagccctgatagcctggccgtgtctctcggcgagcgagtgaccatgagctgcaagtctagccagagcctgctgaacagcggcaaccagaagaactacctgacctggtatcagcagaagcccggccagcctcctaagctgctgatctactgggccagcaccagagaaagcggcgtgcccgatagattttctggctctggcagcggcaccgacttcaccctgacaatttctagcctgcaagccgaggacgtggccgtgtactactgccagaacgactacagctacccctacaccttcggccagggcaccaagctggaaatcaaaggcggaggcggaagtggaggcggaggatctggcggcggaggctctgaagtgcaactggttcagagcggagccgagctgaagaaacctggggccagcgtgaaggtgtcctgtaaagccagcggctacacctttaccgactactacatgaaatgggtccgacaggccccaggccagggactcgaatggatcggcgatattatccccagcaacggggccaccttctacaaccagaaattcaagggccgcgtgaccatcaccgtggacaagagcacaagcaccgcctacatggaactgagcagcctgagaagcgaggacaccgccgtgtattattgcgccagaagccatctgctgcgggccagttggttcgcctattggggacagggaaccctggtcaccgttagctctacgcgtgaggacctgaagaacgtgttcccacctgaggtggccgtgttcgagcctagcgaggccgagatcagccacacccagaaagccaccctcgtgtgcctggctaccggcttctaccccgaccatgtggaactgtcttggtgggtcaacggcaaagaggtgcacagcggcgtgtctaccgacccccagccactgaaagaacagcccgccctgaacgacagccggtactgcctgagcagcagactgagagtgtccgccaccttctggcagaacccccggaaccacttcagatgccaggtgcagttctacggcctgagcgagaacgacgagtggacccaggacagagccaagcccgtgacccagatcgtgtctgccgaagcctggggcagagccgattgcggctttaccagcgagagctaccagcagggcgtgctgagcgccaccaacctgagcgtgatcggcttcagaatcctgctgctgaaagtggccggctttaacctgctgatgaccctgcggctgtggtccagccgcgccaagagaagcggatctggcgtgaagcagaccctgaatttcgacctgctgaagctggctggcgacgtggaatccaacccaggcccttctagaggccatatgaccgagtacaagcccacggtgcgcctcgccacccgcgacgacgtccccagggccgtacgcaccctcgccgccgcgttcgccgactaccccgccacgcgccacaccgtcgatccggaccgccacatcgagcgggtcaccgagctgcaagaactcttcctcacgcgcgtcgggctcgacatcggcaaggtgtgggtcgcggacgacggcgccgcggtggcggtctggaccacgccggagagcgtcgaagcgggggcggtgttcgccgagatcggcccgcgcatggccgagttgagcggttcccggctggccgcgcagcaacagatggaaggcctcctggcgccgcaccggcccaaggagcccgcgtggttcctggccaccgtcggcgtctcgcccgaccaccagggcaagggtctgggcagcgccgtcgtgctccccggagtggaggcggccgagcgcgccggggtgcccgccttcctggagacctccgcgccccgcaacctccccttctacgagcggctcggcttcaccgtcaccgccgacgtcgaggtgcccgaaggaccgcgcacctggtgcatgacccgcaagcccggtgcctga

SEQ ID NO: 34768 - DNA, 2628 bp, synthetic construct
  source 1..2628: mol_type = other DNA
atggccttaccagtgaccgccttgctcctgccgctggccttgctgctccacgccgccaggccgctcgaggaggacctgaagaacgtgttcccacctgaggtggccgtgttcgagcctagcgaggccgagatcagccacacccagaaagccaccctcgtgtgcctggctaccggcttctaccccgaccatgtggaactgtcttggtgggtcaacggcaaagaggtgcacagcggcgtgtgtaccgacccccagccactgaaagaacagcccgccctgaacgacagccggtactgcctgagcagcagactgagagtgtccgccaccttctggcagaacccccggaaccacttcagatgccaggtgcagttctacggcctgagcgagaacgacgagtggacccaggacagagccaagcccgtgacccagatcgtgtctgccgaagcctggggcagagccgattgcgacgtgaagctggtggaaaagagcttcgagacagacaccaacctgaacttccagaacctgagcgtgatcggcttcagaatcctgctgctgaaagtggccggctttaacctgctgatgaccctgcggctgtggtccagcagggccaagcgatctggatctggagcaacaaacttctcactactcaaacaagcaggtgacgtggaggagaatcccgggcctactagcatggccttaccagtgaccgccttgctcctgccgctggccttgctgctccacgccgccaggccggacttcgtgatgacacagagccctgatagcctggccgtgtctctcggcgagcgagtgaccatgagctgcaagtctagccagagcctgctgaacagcggcaaccagaagaactacctgacctggtatcagcagaagcccggccagcctcctaagctgctgatctactgggccagcaccagagaaagcggcgtgcccgatagattttctggctctggcagcggcaccgacttcaccctgacaatttctagcctgcaagccgaggacgtggccgtgtactactgccagaacgactacagctacccctacaccttcggccagggcaccaagctggaaatcaaaggcggaggcggaagtggaggcggaggatctggcggcggaggctctgaagtgcaactggttcagagcggagccgagctgaagaaacctggggccagcgtgaaggtgtcctgtaaagccagcggctacacctttaccgactactacatgaaatgggtccgacaggccccaggccagggactcgaatggatcggcgatattatccccagcaacggggccaccttctacaaccagaaattcaagggccgcgtgaccatcaccgtggacaagagcacaagcaccgcctacatggaactgagcagcctgagaagcgaggacaccgccgtgtattattgcgccagaagccatctgctgcgggccagttggttcgcctattggggacagggaaccctggtcaccgttagctctacgcgtatccagaaccctgatcctgccgtgtaccagctgcgggatagcaagagcagcgacaagagcgtgtgtctgttcaccgacttcgacagccagaccaacgtgtcccagagcaaggactccgacgtgtacatcaccgataagtgcgtgctggacatgcggagcatggacttcaagagcaactccgccgtggcctggtccaacaagtccgatttcgcctgcgccaacgccttcaacaacagcattatccccgaggacacattcttcccaagccccgagagcagctgcggctttaccagcgagagctaccagcagggcgtgctgagcgccaccatcctgtacgagatcctgctgggcaaggccaccctgtacgccgtgctggtgtctgccctggtgctgatggctatggtcaagcggaaggacagccggggacgcgccaagagaagcggatctggcgtgaagcagaccctgaatttcgacctgctgaagctggctggcgacgtggaatccaacccaggcccttctagaggccatatgaccgagtacaagcccacggtgcgcctcgccacccgcgacgacgtccccagggccgtacgcaccctcgccgccgcgttcgccgactaccccgccacgcgccacaccgtcgatccggaccgccacatcgagcgggtcaccgagctgcaagaactcttcctcacgcgcgtcgggctcgacatcggcaaggtgtgggtcgcggacgacggcgccgcggtggcggtctggaccacgccggagagcgtcgaagcgggggcggtgttcgccgagatcggcccgcgcatggccgagttgagcggttcccggctggccgcgcagcaacagatggaaggcctcctggcgccgcaccggcccaaggagcccgcgtggttcctggccaccgtcggcgtctcgcccgaccaccagggcaagggtctgggcagcgccgtcgtgctccccggagtggaggcggccgagcgcgccggggtgcccgccttcctggagacctccgcgccccgcaacctccccttctacgagcggctcggcttcaccgtcaccgccgacgtcgaggtgcccgaaggaccgcgcacctggtgcatgacccgcaagcccggtgcctga

SEQ ID NO: 34769 - DNA, 2628 bp, synthetic construct
  source 1..2628: mol_type = other DNA
atggccttaccagtgaccgccttgctcctgccgctggccttgctgctccacgccgccaggccgctcgaggaggacctgaagaacgtgttcccacctgaggtggccgtgttcgagcctagcgaggccgagatcagccacacccagaaagccaccctcgtgtgcctggctaccggcttctaccccgaccatgtggaactgtcttggtgggtcaacggcaaagaggtgcacagcggcgtgtctaccgacccccagccactgaaagaacagcccgccctgaacgacagccggtactgcctgagcagcagactgagagtgtccgccaccttctggcagaacccccggaaccacttcagatgccaggtgcagttctacggcctgagcgagaacgacgagtggacccaggacagagccaagcccgtgacccagatcgtgtctgccgaagcctggggcagagccgattgcgacgtgaagctggtggaaaagagcttcgagacagacaccaacctgaacttccagaacctgagcgtgatcggcttcagaatcctgctgctgaaagtggccggctttaacctgctgatgaccctgcggctgtggtccagcagggccaagcgatctggatctggagcaacaaacttctcactactcaaacaagcaggtgacgtggaggagaatcccgggcctactagcatggccttaccagtgaccgccttgctcctgccgctggccttgctgctccacgccgccaggccggacttcgtgatgacacagagccctgatagcctggccgtgtctctcggcgagcgagtgaccatgagctgcaagtctagccagagcctgctgaacagcggcaaccagaagaactacctgacctggtatcagcagaagcccggccagcctcctaagctgctgatctactgggccagcaccagagaaagcggcgtgcccgatagattttctggctctggcagcggcaccgacttcaccctgacaatttctagcctgcaagccgaggacgtggccgtgtactactgccagaacgactacagctacccctacaccttcggccagggcaccaagctggaaatcaaaggcggaggcggaagtggaggcggaggatctggcggcggaggctctgaagtgcaactggttcagagcggagccgagctgaagaaacctggggccagcgtgaaggtgtcctgtaaagccagcggctacacctttaccgactactacatgaaatgggtccgacaggccccaggccagggactcgaatggatcggcgatattatccccagcaacggggccaccttctacaaccagaaattcaagggccgcgtgaccatcaccgtggacaagagcacaagcaccgcctacatggaactgagcagcctgagaagcgaggacaccgccgtgtattattgcgccagaagccatctgctgcgggccagttggttcgcctattggggacagggaaccctggtcaccgttagctctacgcgtatccagaaccctgatcctgccgtgtaccagctgcgggatagcaagagcagcgacaagagcgtgtgtctgttcaccgacttcgacagccagaccaacgtgtcccagagcaaggactccgacgtgtacatcaccgataagaccgtgctggacatgcggagcatggacttcaagagcaactccgccgtggcctggtccaacaagtccgatttcgcctgcgccaacgccttcaacaacagcattatccccgaggacacattcttcccaagccccgagagcagctgcggctttaccagcgagagctaccagcagggcgtgctgagcgccaccatcctgtacgagatcctgctgggcaaggccaccctgtacgccgtgctggtgtctgccctggtgctgatggctatggtcaagcggaaggacagccggggacgcgccaagagaagcggatctggcgtgaagcagaccctgaatttcgacctgctgaagctggctggcgacgtggaatccaacccaggcccttctagaggccatatgaccgagtacaagcccacggtgcgcctcgccacccgcgacgacgtccccagggccgtacgcaccctcgccgccgcgttcgccgactaccccgccacgcgccacaccgtcgatccggaccgccacatcgagcgggtcaccgagctgcaagaactcttcctcacgcgcgtcgggctcgacatcggcaaggtgtgggtcgcggacgacggcgccgcggtggcggtctggaccacgccggagagcgtcgaagcgggggcggtgttcgccgagatcggcccgcgcatggccgagttgagcggttcccggctggccgcgcagcaacagatggaaggcctcctggcgccgcaccggcccaaggagcccgcgtggttcctggccaccgtcggcgtctcgcccgaccaccagggcaagggtctgggcagcgccgtcgtgctccccggagtggaggcggccgagcgcgccggggtgcccgccttcctggagacctccgcgccccgcaacctccccttctacgagcggctcggcttcaccgtcaccgccgacgtcgaggtgcccgaaggaccgcgcacctggtgcatgacccgcaagcccggtgcctga

SEQ ID NO: 34770 - DNA, 2937 bp, synthetic construct
  source 1..2937: mol_type = other DNA
atggccttaccagtgaccgccttgctcctgccgctggccttgctgctccacgccgccaggccgctcgaggaggaggacctgaagaacgtgttcccacctgaggtggccgtgttcgagcctagcgaggccgagatcagccacacccagaaagccaccctcgtgtgcctggctaccggcttctaccccgaccatgtggaactgtcttggtgggtcaacggcaaagaggtgcacagcggcgtgtctaccgacccccagccactgaaagaacagcccgccctgaacgacagccggtactgcctgagcagcagactgagagtgtccgccaccttctggcagaacccccggaaccacttcagatgccaggtgcagttctacggcctgagcgagaacgacgagtggacccaggacagagccaagcccgtgacccagatcgtgtctgccgaagcctggggcagagccgatgatgtgattaagatccactggcaggaaaagaagtccaacaccatcctgggcagccaggaaggcaacaccatgaagaccaacgacacctacatgaagttcagctggctgaccgtgcccgagaagtccctggacaaagaacacagatgcatcgtgcggcacgaaaacaacaagaacggcgtggaccaggaaatcatcttcccacccatcaagaccgatgtgattacaatggaccccaaggacaactgctccaaggacgccaacgataccctgctgctccagctgaccaacaccagcgcctactacatgtacttgttgctgctgctgaagtccgtggtgtacttcgccatcatcacatgctgcctgctgcggagaaccgccttctgctgcaacggcgagaagtctagggccaagcgatctggatctggagcaacaaacttctcactactcaaacaagcaggtgacgtggaggagaatcccgggcctactagcatggccttaccagtgaccgccttgctcctgccgctggccttgctgctccacgccgccaggccggacttcgtgatgacacagagccctgatagcctggccgtgtctctcggcgagcgagtgaccatgagctgcaagtctagccagagcctgctgaacagcggcaaccagaagaactacctgacctggtatcagcagaagcccggccagcctcctaagctgctgatctactgggccagcaccagagaaagcggcgtgcccgatagattttctggctctggcagcggcaccgacttcaccctgacaatttctagcctgcaagccgaggacgtggccgtgtactactgccagaacgactacagctacccctacaccttcggccagggcaccaagctggaaatcaaaggcggaggcggaagtggaggcggaggatctggcggcggaggctctgaagtgcaactggttcagagcggagccgagctgaagaaacctggggccagcgtgaaggtgtcctgtaaagccagcggctacacctttaccgactactacatgaaatgggtccgacaggccccaggccagggactcgaatggatcggcgatattatccccagcaacggggccaccttctacaaccagaaattcaagggccgcgtgaccatcaccgtggacaagagcacaagcaccgcctacatggaactgagcagcctgagaagcgaggacaccgccgtgtattattgcgccagaagccatctgctgcgggccagttggttcgcctattggggacagggaaccctggtcaccgttagctctacgcgtatccagaaccctgatcctgccgtgtaccagctgcgggatagcaagagcagcgacaagagcgtgtgtctgttcaccgacttcgacagccagaccaacgtgtcccagagcaaggactccgacgtgtacatcaccgataagaccgtgctggacatgcggagcatggacttcaagagcaactccgccgtggcctggtccaacaagtccgatttcgcctgcgccaacgccttcaacaacagcattatccccgaggacacattcttcccaagccccgagagcagcgactccaccgaccacgtgaagcccaaagagacagagaacaccaagcagcccagcaagagctgccacaagcccaaggccatcgtgcacaccgagaaagtgaacatgatgagcctgaccgtgctgggcctgcggatgctgttcgccaaaaccgtggccgtgaacttcctgctgaccgccaagctgttcttcctccgcgccaagagaagcggatctggcgtgaagcagaccctgaatttcgacctgctgaagctggctggcgacgtggaatccaacccaggcccttctagaggccatatgaccgagtacaagcccacggtgcgcctcgccacccgcgacgacgtccccagggccgtacgcaccctcgccgccgcgttcgccgactaccccgccacgcgccacaccgtcgatccggaccgccacatcgagcgggtcaccgagctgcaagaactcttcctcacgcgcgtcgggctcgacatcggcaaggtgtgggtcgcggacgacggcgccgcggtggcggtctggaccacgccggagagcgtcgaagcgggggcggtgttcgccgagatcggcccgcgcatggccgagttgagcggttcccggctggccgcgcagcaacagatggaaggcctcctggcgccgcaccggcccaaggagcccgcgtggttcctggccaccgtcggcgtctcgcccgaccaccagggcaagggtctgggcagcgccgtcgtgctccccggagtggaggcggccgagcgcgccggggtgcccgccttcctggagacctccgcgccccgcaacctccccttctacgagcggctcggcttcaccgtcaccgccgacgtcgaggtgcccgaaggaccgcgcacctggtgcatgacccgcaagcccggtgcctga

SEQ ID NO: 34771 - DNA, 2628 bp, synthetic construct
  source 1..2628: mol_type = other DNA
atggccttaccagtgaccgccttgctcctgccgctggccttgctgctccacgccgccaggccgctcgaggaggacctgaagaacgtgttcccacctgaggtggccgtgttcgagcctagcgaggccgagatcagccacacccagaaagccaccctcgtgtgcctggctaccggcttctaccccgaccatgtggaactgtcttggtgggtcaacggcaaagaggtgcacagcggcgtgtgtaccgacccccagccactgaaagaacagcccgccctgaacgacagccggtactgcctgagcagcagactgagagtgtccgccaccttctggcagaacccccggaaccacttcagatgccaggtgcagttctacggcctgagcgagaacgacgagtggacccaggacagagccaagcccgtgacccagatcgtgtctgccgaagcctggggcagagccgattgcggctttaccagcgagagctaccagcagggcgtgctgagcgccaccaacctgagcgtgatcggcttcagaatcctgctgctgaaagtggccggctttaacctgctgatgaccctgcggctgtggtccagcagggccaagcgatctggatctggagcaacaaacttctcactactcaaacaagcaggtgacgtggaggagaatcccgggcctactagcatggccttaccagtgaccgccttgctcctgccgctggccttgctgctccacgccgccaggccggacttcgtgatgacacagagccctgatagcctggccgtgtctctcggcgagcgagtgaccatgagctgcaagtctagccagagcctgctgaacagcggcaaccagaagaactacctgacctggtatcagcagaagcccggccagcctcctaagctgctgatctactgggccagcaccagagaaagcggcgtgcccgatagattttctggctctggcagcggcaccgacttcaccctgacaatttctagcctgcaagccgaggacgtggccgtgtactactgccagaacgactacagctacccctacaccttcggccagggcaccaagctggaaatcaaaggcggaggcggaagtggaggcggaggatctggcggcggaggctctgaagtgcaactggttcagagcggagccgagctgaagaaacctggggccagcgtgaaggtgtcctgtaaagccagcggctacacctttaccgactactacatgaaatgggtccgacaggccccaggccagggactcgaatggatcggcgatattatccccagcaacggggccaccttctacaaccagaaattcaagggccgcgtgaccatcaccgtggacaagagcacaagcaccgcctacatggaactgagcagcctgagaagcgaggacaccgccgtgtattattgcgccagaagccatctgctgcgggccagttggttcgcctattggggacagggaaccctggtcaccgttagctctacgcgtatccagaaccctgatcctgccgtgtaccagctgcgggatagcaagagcagcgacaagagcgtgtgtctgttcaccgacttcgacagccagaccaacgtgtcccagagcaaggactccgacgtgtacatcaccgataagtgcgtgctggacatgcggagcatggacttcaagagcaactccgccgtggcctggtccaacaagtccgatttcgcctgcgccaacgccttcaacaacagcattatccccgaggacacattcttcccaagccccgagagcagctgcgacgtgaagctggtggaaaagagcttcgagacagacaccaacctgaacttccagatcctgtacgagatcctgctgggcaaggccaccctgtacgccgtgctggtgtctgccctggtgctgatggctatggtcaagcggaaggacagccggggacgcgccaagagaagcggatctggcgtgaagcagaccctgaatttcgacctgctgaagctggctggcgacgtggaatccaacccaggcccttctagaggccatatgaccgagtacaagcccacggtgcgcctcgccacccgcgacgacgtccccagggccgtacgcaccctcgccgccgcgttcgccgactaccccgccacgcgccacaccgtcgatccggaccgccacatcgagcgggtcaccgagctgcaagaactcttcctcacgcgcgtcgggctcgacatcggcaaggtgtgggtcgcggacgacggcgccgcggtggcggtctggaccacgccggagagcgtcgaagcgggggcggtgttcgccgagatcggcccgcgcatggccgagttgagcggttcccggctggccgcgcagcaacagatggaaggcctcctggcgccgcaccggcccaaggagcccgcgtggttcctggccaccgtcggcgtctcgcccgaccaccagggcaagggtctgggcagcgccgtcgtgctccccggagtggaggcggccgagcgcgccggggtgcccgccttcctggagacctccgcgccccgcaacctccccttctacgagcggctcggcttcaccgtcaccgccgacgtcgaggtgcccgaaggaccgcgcacctggtgcatgacccgcaagcccggtgcctga

SEQ ID NO: 34772 - DNA, 2715 bp, synthetic construct
  source 1..2715: mol_type = other DNA
atggccttaccagtgaccgccttgctcctgccgctggccttgctgctccacgccgccaggccgctcgaggaggaggacctgaagaacgtgttcccacctgaggtggccgtgttcgagcctagcgaggccgagatcagccacacccagaaagccaccctcgtgtgcctggctaccggcttctaccccgaccatgtggaactgtcttggtgggtcaacggcaaagaggtgcacagcggcgtgtgtaccgacccccagccactgaaagaacagcccgccctgaacgacagccggtactgcctgagcagcagactgagagtgtccgccaccttctggcagaacccccggaaccacttcagatgccaggtgcagttctacggcctgagcgagaacgacgagtggacccaggacagagccaagcccgtgacccagatcgtgtctgccgaagcctggggcagagccgattgcggctttaccagcgagagctaccagcagggcgtgctgagcgccaccaacctgagcgtgatcggcttcagaatcctgctgctgaaagtggccggctttaacctgctgatgaccctgcggctgtggtccagcagggccaagcgatctggatctggagcaacaaacttctcactactcaaacaagcaggtgacgtggaggagaatcccgggcctactagcatggccttaccagtgaccgccttgctcctgccgctggccttgctgctccacgccgccaggccggacttcgtgatgacacagagccctgatagcctggccgtgtctctcggcgagcgagtgaccatgagctgcaagtctagccagagcctgctgaacagcggcaaccagaagaactacctgacctggtatcagcagaagcccggccagcctcctaagctgctgatctactgggccagcaccagagaaagcggcgtgcccgatagattttctggctctggcagcggcaccgacttcaccctgacaatttctagcctgcaagccgaggacgtggccgtgtactactgccagaacgactacagctacccctacaccttcggccagggcaccaagctggaaatcaaaggcggaggcggaagtggaggcggaggatctggcggcggaggctctgaagtgcaactggttcagagcggagccgagctgaagaaacctggggccagcgtgaaggtgtcctgtaaagccagcggctacacctttaccgactactacatgaaatgggtccgacaggccccaggccagggactcgaatggatcggcgatattatccccagcaacggggccaccttctacaaccagaaattcaagggccgcgtgaccatcaccgtggacaagagcacaagcaccgcctacatggaactgagcagcctgagaagcgaggacaccgccgtgtattattgcgccagaagccatctgctgcgggccagttggttcgcctattggggacagggaaccctggtcaccgttagctctacgcgtggacagcctaaggccaatcctaccgtgacactgttccctccaagcagcgaagaactccaggccaacaaggccacacttgtgtgcctgatctccgacttctaccctggggctgtgacagtggcttggaaggccgatggatctcctgtgaaagccggcgtggaaaccaccaagccatccaagcagagcaacaacaaatacgccgccagctcctacctgagcctgacacctgagcagtggaagtcccacagatcctacagctgccaagtgacccacgaaggcagcaccgtggaaaagacagtggcccctacagagtgcagccccatcaagaccgatgtgattacaatggaccccaaggacaactgctccaaggacgccaacgataccctgctgctccagctgaccaacaccagcgcctactacatgtacttgttgctgctgctgaagtccgtggtgtacttcgccatcatcacatgctgcctgctgcggagaaccgccttctgctgcaacggcgagaagtctcgcgccaagagaagcggatctggcgtgaagcagaccctgaatttcgacctgctgaagctggctggcgacgtggaatccaacccaggcccttctagaggccatatgaccgagtacaagcccacggtgcgcctcgccacccgcgacgacgtccccagggccgtacgcaccctcgccgccgcgttcgccgactaccccgccacgcgccacaccgtcgatccggaccgccacatcgagcgggtcaccgagctgcaagaactcttcctcacgcgcgtcgggctcgacatcggcaaggtgtgggtcgcggacgacggcgccgcggtggcggtctggaccacgccggagagcgtcgaagcgggggcggtgttcgccgagatcggcccgcgcatggccgagttgagcggttcccggctggccgcgcagcaacagatggaaggcctcctggcgccgcaccggcccaaggagcccgcgtggttcctggccaccgtcggcgtctcgcccgaccaccagggcaagggtctgggcagcgccgtcgtgctccccggagtggaggcggccgagcgcgccggggtgcccgccttcctggagacctccgcgccccgcaacctccccttctacgagcggctcggcttcaccgtcaccgccgacgtcgaggtgcccgaaggaccgcgcacctggtgcatgacccgcaagcccggtgcctga

SEQ ID NO: 34773 - DNA, 2715 bp, synthetic construct
  source 1..2715: mol_type = other DNA
atggccttaccagtgaccgccttgctcctgccgctggccttgctgctccacgccgccaggccgctcgagggacagcctaaggccaatcctaccgtgacactgttccctccaagcagcgaagaactccaggccaacaaggccacacttgtgtgcctgatctccgacttctaccctggggctgtgacagtggcttggaaggccgatggatctcctgtgaaagccggcgtggaaaccaccaagccatccaagcagagcaacaacaaatacgccgccagctcctacctgagcctgacacctgagcagtggaagtcccacagatcctacagctgccaagtgacccacgaaggcagcaccgtggaaaagacagtggcccctacagagtgcagccccatcaagaccgatgtgattacaatggaccccaaggacaactgctccaaggacgccaacgataccctgctgctccagctgaccaacaccagcgcctactacatgtacttgttgctgctgctgaagtccgtggtgtacttcgccatcatcacatgctgcctgctgcggagaaccgccttctgctgcaacggcgagaagtctagggccaagcgatctggatctggagcaacaaacttctcactactcaaacaagcaggtgacgtggaggagaatcccgggcctactagcatggccttaccagtgaccgccttgctcctgccgctggccttgctgctccacgccgccaggccggacttcgtgatgacacagagccctgatagcctggccgtgtctctcggcgagcgagtgaccatgagctgcaagtctagccagagcctgctgaacagcggcaaccagaagaactacctgacctggtatcagcagaagcccggccagcctcctaagctgctgatctactgggccagcaccagagaaagcggcgtgcccgatagattttctggctctggcagcggcaccgacttcaccctgacaatttctagcctgcaagccgaggacgtggccgtgtactactgccagaacgactacagctacccctacaccttcggccagggcaccaagctggaaatcaaaggcggaggcggaagtggaggcggaggatctggcggcggaggctctgaagtgcaactggttcagagcggagccgagctgaagaaacctggggccagcgtgaaggtgtcctgtaaagccagcggctacacctttaccgactactacatgaaatgggtccgacaggccccaggccagggactcgaatggatcggcgatattatccccagcaacggggccaccttctacaaccagaaattcaagggccgcgtgaccatcaccgtggacaagagcacaagcaccgcctacatggaactgagcagcctgagaagcgaggacaccgccgtgtattattgcgccagaagccatctgctgcgggccagttggttcgcctattggggacagggaaccctggtcaccgttagctctacgcgtgaggaggacctgaagaacgtgttcccacctgaggtggccgtgttcgagcctagcgaggccgagatcagccacacccagaaagccaccctcgtgtgcctggctaccggcttctaccccgaccatgtggaactgtcttggtgggtcaacggcaaagaggtgcacagcggcgtgtgtaccgacccccagccactgaaagaacagcccgccctgaacgacagccggtactgcctgagcagcagactgagagtgtccgccaccttctggcagaacccccggaaccacttcagatgccaggtgcagttctacggcctgagcgagaacgacgagtggacccaggacagagccaagcccgtgacccagatcgtgtctgccgaagcctggggcagagccgattgcggctttaccagcgagagctaccagcagggcgtgctgagcgccaccaacctgagcgtgatcggcttcagaatcctgctgctgaaagtggccggctttaacctgctgatgaccctgcggctgtggtccagccgcgccaagagaagcggatctggcgtgaagcagaccctgaatttcgacctgctgaagctggctggcgacgtggaatccaacccaggcccttctagaggccatatgaccgagtacaagcccacggtgcgcctcgccacccgcgacgacgtccccagggccgtacgcaccctcgccgccgcgttcgccgactaccccgccacgcgccacaccgtcgatccggaccgccacatcgagcgggtcaccgagctgcaagaactcttcctcacgcgcgtcgggctcgacatcggcaaggtgtgggtcgcggacgacggcgccgcggtggcggtctggaccacgccggagagcgtcgaagcgggggcggtgttcgccgagatcggcccgcgcatggccgagttgagcggttcccggctggccgcgcagcaacagatggaaggcctcctggcgccgcaccggcccaaggagcccgcgtggttcctggccaccgtcggcgtctcgcccgaccaccagggcaagggtctgggcagcgccgtcgtgctccccggagtggaggcggccgagcgcgccggggtgcccgccttcctggagacctccgcgccccgcaacctccccttctacgagcggctcggcttcaccgtcaccgccgacgtcgaggtgcccgaaggaccgcgcacctggtgcatgacccgcaagcccggtgcctga

SEQ ID NO: 34774 - DNA, 2706 bp, synthetic construct
  source 1..2706: mol_type = other DNA
atggccttaccagtgaccgccttgctcctgccgctggccttgctgctccacgccgccaggccgctcgaggaggcctctacaaagggaccctccgtgtttcctctggctcccagcagcaagtctacaagcggaggaacagccgctctgggctgcctggtcaaggattactttcccgagcctgtgaccgtgtcctggaatagcggagcactgacaagcggcgtgcacacctttccagccgtgctgcaaagcagcggcctgtactctctgagcagcgtggtcacagtgcctagctctagcctgggcacccagacctacatctgcaatgtgaaccacaagcctagcaacaccaaggtggacaagagagtggaacccaagagctgtcccatcaagaccgatgtgattacaatggaccccaaggacaactgctccaaggacgccaacgataccctgctgctccagctgaccaacaccagcgcctactacatgtacttgttgctgctgctgaagtccgtggtgtacttcgccatcatcacatgctgcctgctgcggagaaccgccttctgctgcaacggcgagaagtctagggccaagcgatctggatctggagcaacaaacttctcactactcaaacaagcaggtgacgtggaggagaatcccgggcctactagcatggccttaccagtgaccgccttgctcctgccgctggccttgctgctccacgccgccaggccggacttcgtgatgacacagagccctgatagcctggccgtgtctctcggcgagcgagtgaccatgagctgcaagtctagccagagcctgctgaacagcggcaaccagaagaactacctgacctggtatcagcagaagcccggccagcctcctaagctgctgatctactgggccagcaccagagaaagcggcgtgcccgatagattttctggctctggcagcggcaccgacttcaccctgacaatttctagcctgcaagccgaggacgtggccgtgtactactgccagaacgactacagctacccctacaccttcggccagggcaccaagctggaaatcaaaggcggaggcggaagtggaggcggaggatctggcggcggaggctctgaagtgcaactggttcagagcggagccgagctgaagaaacctggggccagcgtgaaggtgtcctgtaaagccagcggctacacctttaccgactactacatgaaatgggtccgacaggccccaggccagggactcgaatggatcggcgatattatccccagcaacggggccaccttctacaaccagaaattcaagggccgcgtgaccatcaccgtggacaagagcacaagcaccgcctacatggaactgagcagcctgagaagcgaggacaccgccgtgtattattgcgccagaagccatctgctgcgggccagttggttcgcctattggggacagggaaccctggtcaccgttagctctacgcgtggacagcctaaggccaatcctaccgtgacactgttccctccaagcagcgaagaactccaggccaacaaggccacacttgtgtgcctgatctccgacttctaccctggggctgtgacagtggcttggaaggccgatggatctcctgtgaaagccggcgtggaaaccaccaagccatccaagcagagcaacaacaaatacgccgccagctcctacctgagcctgacacctgagcagtggaagtcccacagatcctacagctgccaagtgacccacgaaggcagcaccgtggaaaagacagtggcccctacagagtgcagcgaagtgaaaaccgactccaccgaccacgtgaagcccaaagagacagagaacaccaagcagcccagcaagagctgccacaagcccaaggccatcgtgcacaccgagaaagtgaacatgatgagcctgaccgtgctgggcctgcggatgctgttcgccaaaaccgtggccgtgaacttcctgctgaccgccaagctgttcttcctccgcgccaagagaagcggatctggcgtgaagcagaccctgaatttcgacctgctgaagctggctggcgacgtggaatccaacccaggcccttctagaggccatatgaccgagtacaagcccacggtgcgcctcgccacccgcgacgacgtccccagggccgtacgcaccctcgccgccgcgttcgccgactaccccgccacgcgccacaccgtcgatccggaccgccacatcgagcgggtcaccgagctgcaagaactcttcctcacgcgcgtcgggctcgacatcggcaaggtgtgggtcgcggacgacggcgccgcggtggcggtctggaccacgccggagagcgtcgaagcgggggcggtgttcgccgagatcggcccgcgcatggccgagttgagcggttcccggctggccgcgcagcaacagatggaaggcctcctggcgccgcaccggcccaaggagcccgcgtggttcctggccaccgtcggcgtctcgcccgaccaccagggcaagggtctgggcagcgccgtcgtgctccccggagtggaggcggccgagcgcgccggggtgcccgccttcctggagacctccgcgccccgcaacctccccttctacgagcggctcggcttcaccgtcaccgccgacgtcgaggtgcccgaaggaccgcgcacctggtgcatgacccgcaagcccggtgcctga

SEQ ID NO: 34775 - DNA, 2640 bp, synthetic construct
  source 1..2640: mol_type = other DNA
atggccttaccagtgaccgccttgctcctgccgctggccttgctgctccacgccgccaggccgctcgaggaggcctctacaaagggaccctccgtgtttcctctggctcccagcagcaagtctacaagcggaggaacagccgctctgggctgcctggtcaaggattactttcccgagcctgtgaccgtgtcctggaatagcggagcactgacaagcggcgtgcacacctttccagccgtgctgcaaagcagcggcctgtactctctgagcagcgtggtcacagtgcctagctctagcctgggcacccagacctacatctgcaatgtgaaccacaagcctagcaacaccaaggtggacaagagagtggaacccaagagctgtggcagagccgattgcggctttaccagcgagagctaccagcagggcgtgctgagcgccaccatcctgtacgagatcctgctgggcaaggccaccctgtacgccgtgctggtgtctgccctggtgctgatggctatggtcaagcggaaggacagccggggaagggccaagcgatctggatctggagcaacaaacttctcactactcaaacaagcaggtgacgtggaggagaatcccgggcctactagcatggccttaccagtgaccgccttgctcctgccgctggccttgctgctccacgccgccaggccggacttcgtgatgacacagagccctgatagcctggccgtgtctctcggcgagcgagtgaccatgagctgcaagtctagccagagcctgctgaacagcggcaaccagaagaactacctgacctggtatcagcagaagcccggccagcctcctaagctgctgatctactgggccagcaccagagaaagcggcgtgcccgatagattttctggctctggcagcggcaccgacttcaccctgacaatttctagcctgcaagccgaggacgtggccgtgtactactgccagaacgactacagctacccctacaccttcggccagggcaccaagctggaaatcaaaggcggaggcggaagtggaggcggaggatctggcggcggaggctctgaagtgcaactggttcagagcggagccgagctgaagaaacctggggccagcgtgaaggtgtcctgtaaagccagcggctacacctttaccgactactacatgaaatgggtccgacaggccccaggccagggactcgaatggatcggcgatattatccccagcaacggggccaccttctacaaccagaaattcaagggccgcgtgaccatcaccgtggacaagagcacaagcaccgcctacatggaactgagcagcctgagaagcgaggacaccgccgtgtattattgcgccagaagccatctgctgcgggccagttggttcgcctattggggacagggaaccctggtcaccgttagctctacgcgtggacagcctaaggccaatcctaccgtgacactgttccctccaagcagcgaagaactccaggccaacaaggccacacttgtgtgcctgatctccgacttctaccctggggctgtgacagtggcttggaaggccgatggatctcctgtgaaagccggcgtggaaaccaccaagccatccaagcagagcaacaacaaatacgccgccagctcctacctgagcctgacacctgagcagtggaagtcccacagatcctacagctgccaagtgacccacgaaggcagcaccgtggaaaagacagtggcccctacagagtgcagcatccccgaggacacattcttcccaagccccgagagcagctgcgacgtgaagctggtggaaaagagcttcgagacagacaccaacctgaacttccagaacctgagcgtgatcggcttcagaatcctgctgctgaaagtggccggctttaacctgctgatgaccctgcggctgtggtccagccgcgccaagagaagcggatctggcgtgaagcagaccctgaatttcgacctgctgaagctggctggcgacgtggaatccaacccaggcccttctagaggccatatgaccgagtacaagcccacggtgcgcctcgccacccgcgacgacgtccccagggccgtacgcaccctcgccgccgcgttcgccgactaccccgccacgcgccacaccgtcgatccggaccgccacatcgagcgggtcaccgagctgcaagaactcttcctcacgcgcgtcgggctcgacatcggcaaggtgtgggtcgcggacgacggcgccgcggtggcggtctggaccacgccggagagcgtcgaagcgggggcggtgttcgccgagatcggcccgcgcatggccgagttgagcggttcccggctggccgcgcagcaacagatggaaggcctcctggcgccgcaccggcccaaggagcccgcgtggttcctggccaccgtcggcgtctcgcccgaccaccagggcaagggtctgggcagcgccgtcgtgctccccggagtggaggcggccgagcgcgccggggtgcccgccttcctggagacctccgcgccccgcaacctccccttctacgagcggctcggcttcaccgtcaccgccgacgtcgaggtgcccgaaggaccgcgcacctggtgcatgacccgcaagcccggtgcctga

SEQ ID NO: 34776 - DNA, 2640 bp, synthetic construct
  source 1..2640: mol_type = other DNA
atggccttaccagtgaccgccttgctcctgccgctggccttgctgctccacgccgccaggccgctcgaggaggcctctacaaagggaccctccgtgtttcctctggctcccagcagcaagtctacaagcggaggaacagccgctctgggctgcctggtcaaggattactttcccgagcctgtgaccgtgtcctggaatagcggagcactgacaagcggcgtgcacacctttccagccgtgctgcaaagcagcggcctgtactctctgagcagcgtggtcacagtgcctagctctagcctgggcacccagacctacatctgcaatgtgaaccacaagcctagcaacaccaaggtggacaagagagtggaacccaagagctgtatccccgaggacacattcttcccaagccccgagagcagctgcgacgtgaagctggtggaaaagagcttcgagacagacaccaacctgaacttccagaacctgagcgtgatcggcttcagaatcctgctgctgaaagtggccggctttaacctgctgatgaccctgcggctgtggtccagcagggccaagcgatctggatctggagcaacaaacttctcactactcaaacaagcaggtgacgtggaggagaatcccgggcctactagcatggccttaccagtgaccgccttgctcctgccgctggccttgctgctccacgccgccaggccggacttcgtgatgacacagagccctgatagcctggccgtgtctctcggcgagcgagtgaccatgagctgcaagtctagccagagcctgctgaacagcggcaaccagaagaactacctgacctggtatcagcagaagcccggccagcctcctaagctgctgatctactgggccagcaccagagaaagcggcgtgcccgatagattttctggctctggcagcggcaccgacttcaccctgacaatttctagcctgcaagccgaggacgtggccgtgtactactgccagaacgactacagctacccctacaccttcggccagggcaccaagctggaaatcaaaggcggaggcggaagtggaggcggaggatctggcggcggaggctctgaagtgcaactggttcagagcggagccgagctgaagaaacctggggccagcgtgaaggtgtcctgtaaagccagcggctacacctttaccgactactacatgaaatgggtccgacaggccccaggccagggactcgaatggatcggcgatattatccccagcaacggggccaccttctacaaccagaaattcaagggccgcgtgaccatcaccgtggacaagagcacaagcaccgcctacatggaactgagcagcctgagaagcgaggacaccgccgtgtattattgcgccagaagccatctgctgcgggccagttggttcgcctattggggacagggaaccctggtcaccgttagctctacgcgtggacagcctaaggccaatcctaccgtgacactgttccctccaagcagcgaagaactccaggccaacaaggccacacttgtgtgcctgatctccgacttctaccctggggctgtgacagtggcttggaaggccgatggatctcctgtgaaagccggcgtggaaaccaccaagccatccaagcagagcaacaacaaatacgccgccagctcctacctgagcctgacacctgagcagtggaagtcccacagatcctacagctgccaagtgacccacgaaggcagcaccgtggaaaagacagtggcccctacagagtgcagcggcagagccgattgcggctttaccagcgagagctaccagcagggcgtgctgagcgccaccatcctgtacgagatcctgctgggcaaggccaccctgtacgccgtgctggtgtctgccctggtgctgatggctatggtcaagcggaaggacagccggggacgcgccaagagaagcggatctggcgtgaagcagaccctgaatttcgacctgctgaagctggctggcgacgtggaatccaacccaggcccttctagaggccatatgaccgagtacaagcccacggtgcgcctcgccacccgcgacgacgtccccagggccgtacgcaccctcgccgccgcgttcgccgactaccccgccacgcgccacaccgtcgatccggaccgccacatcgagcgggtcaccgagctgcaagaactcttcctcacgcgcgtcgggctcgacatcggcaaggtgtgggtcgcggacgacggcgccgcggtggcggtctggaccacgccggagagcgtcgaagcgggggcggtgttcgccgagatcggcccgcgcatggccgagttgagcggttcccggctggccgcgcagcaacagatggaaggcctcctggcgccgcaccggcccaaggagcccgcgtggttcctggccaccgtcggcgtctcgcccgaccaccagggcaagggtctgggcagcgccgtcgtgctccccggagtggaggcggccgagcgcgccggggtgcccgccttcctggagacctccgcgccccgcaacctccccttctacgagcggctcggcttcaccgtcaccgccgacgtcgaggtgcccgaaggaccgcgcacctggtgcatgacccgcaagcccggtgcctga

SEQ ID NO: 34777 - DNA, 1878 bp, synthetic construct
  source 1..1878: mol_type = other DNA
atggccttaccagtgaccgccttgctcctgccgctggccttgctgctccacgccgccaggccggacttcgtgatgacacagagccctgatagcctggccgtgtctctcggcgagcgagtgaccatgagctgcaagtctagccagagcctgctgaacagcggcaaccagaagaactacctgacctggtatcagcagaagcccggccagcctcctaagctgctgatctactgggccagcaccagagaaagcggcgtgcccgatagattttctggctctggcagcggcaccgacttcaccctgacaatttctagcctgcaagccgaggacgtggccgtgtactactgccagaacgactacagctacccctacaccttcggccagggcaccaagctggaaatcaaactcgaggacctgaagaacgtgttcccacctgaggtggccgtgttcgagcctagcgaggccgagatcagccacacccagaaagccaccctcgtgtgcctggctaccggcttctaccccgaccatgtggaactgtcttggtgggtcaacggcaaagaggtgcacagcggcgtgtgtaccgacccccagccactgaaagaacagcccgccctgaacgacagccggtactgcctgagcagcagactgagagtgtccgccaccttctggcagaacccccggaaccacttcagatgccaggtgcagttctacggcctgagcgagaacgacgagtggacccaggacagagccaagcccgtgacccagatcgtgtctgccgaagcctggggcagagccgatagcggctttaccagcgagagctaccagcagggcgtgctgagcgccaccatcctgtacgagatcctgctgggcaaggccaccctgtacgccgtgctggtgtctgccctggtgctgatggctatggtcaagcggaaggacagccggggaagggccaagcgatctggatctggagcaacaaacttctcactactcaaacaagcaggtgacgtggaggagaatcccgggcctactagtatggactggatttggcgcatccttttccttgtcggcgctgctaccggcgcgcattccttcgaagaagtgcaactggttcagagcggagccgagctgaagaaacctggggccagcgtgaaggtgtcctgtaaagccagcggctacacctttaccgactactacatgaaatgggtccgacaggccccaggccagggactcgaatggatcggcgatattatccccagcaacggggccaccttctacaaccagaaattcaagggccgcgtgaccatcaccgtggacaagagcacaagcaccgcctacatggaactgagcagcctgagaagcgaggacaccgccgtgtattattgcgccagaagccatctgctgcgggccagttggttcgcctattggggacagggaaccctggtcaccgttagctctacgcgtatccagaaccctgatcctgccgtgtaccagctgcgggatagcaagagcagcgacaagagcgtgtgtctgttcaccgacttcgacagccagaccaacgtgtcccagagcaaggactccgacgtgtacatcaccgataagtgcgtgctggacatgcggagcatggacttcaagagcaactccgccgtggcctggtccaacaagtccgatttcgcctgcgccaacgccttcaacaacagcattatccccgaggacacattcttcccaagccccgagagcagcagcgacgtgaagctggtggaaaagagcttcgagacagacaccaacctgaacttccagaacctgagcgtgatcggcttcagaatcctgctgctgaaagtggccggctttaacctgctgatgaccctgcggctgtggtccagc

SEQ ID NO: 34778 - DNA, 2718 bp, synthetic construct
  source 1..2718: mol_type = other DNA
atggccttaccagtgaccgccttgctcctgccgctggccttgctgctccacgccgccaggccggaggttcagctgcttgagtctggcggaggactggttcaacctggcggaagcctgagactgtcttgtgccgcctctggcagaaccttcagcatgggctggtatagacaggcccctggcaagggcctcgaatttgtgtctgccatcacatacagcggcggcagcccttactacgccgattctgtgaagggcagattcaccatcagccgggacaacagcaagaacaccgtgtacctccagatgaacagcctgagagccgaggacaccgccgtgtactactgtgccgccaatccaacctacggcagcgactggaatgccgagaattggggccagggcacactggtcacagtgtctagtggtaccggcggaggcggatctggcggcggaggtagcggtggcggaggatctgaattcgacttcgtgatgacacagagccctgatagcctggccgtgtctctcggcgagcgagtgaccatgagctgcaagtctagccagagcctgctgaacagcggcaaccagaagaactacctgacctggtatcagcagaagcccggccagcctcctaagctgctgatctactgggccagcaccagagaaagcggcgtgcccgatagattttctggctctggcagcggcaccgacttcaccctgacaatttctagcctgcaagccgaggacgtggccgtgtactactgccagaacgactacagctacccctacaccttcggccagggcaccaagctggaaatcaaactcgagatccagaaccctgatcctgccgtgtaccagctgcgggatagcaagagcagcgacaagagcgtgtgtctgttcaccgacttcgacagccagaccaacgtgtcccagagcaaggactccgacgtgtacatcaccgataagtgcgtgctggacatgcggagcatggacttcaagagcaactccgccgtggcctggtccaacaagtccgatttcgcctgcgccaacgccttcaacaacagcattatccccgaggacacattcttcccaagcagcgacgtgccctgcgacgtgaagctggtggaaaagagcttcgagacagacaccaacctgaacttccagaacctgagcgtgatcggcttcagaatcctgctgctgaaagtggccggctttaacctgctgatgaccctgcggctgtggtccagccgcgccaagagaagcggatctggcgtgaagcagaccctgaatttcgacctgctgaagctggctggcgacgtggaatccaacccaggccctactagtaccatggactggatttggcgcatccttttccttgtcggcgctgctaccggcacccattccgggcccgaagtgcaactggttgaatccggtggcggcctggtgcaacccggcggatctctcagacttagctgtgccgcctccggcagaaccttcacaatgggatggtacaggcaggctccagggaaagagagagagttcgtcgccgccatctctctgtctcccacactggcctactacgccgactctgtgaaaggccggttcaccatctccagagataatagcaagaacaccgtggtgctgcaaatgaactctctgagagccgaggatacagccctgtactattgtgccgctgaccggaagtccgtgatgagcatcagacccgattactggggacagggcacactggtcacagtgtctagtggatccggcggcggaggatctggcggaggcggatctgggggcggaggctctttcgaagaagtgcaactggttcagagcggagccgagctgaagaaacctggggccagcgtgaaggtgtcctgtaaagccagcggctacacctttaccgactactacatgaaatgggtccgacaggccccaggccagggactcgaatggatcggcgatattatccccagcaacggggccaccttctacaaccagaaattcaagggccgcgtgaccatcaccgtggacaagagcacaagcaccgcctacatggaactgagcagcctgagaagcgaggacaccgccgtgtattattgcgccagaagccatctgctgcgggccagttggttcgcctattggggacagggaaccctggtcaccgttagctctacgcgtgaggacctgaagaacgtgttcccacctgaggtggccgtgttcgagcctagcaaggccgagatcgcccacacccagaaagccaccctcgtgtgcctggctaccggcttctaccccgaccatgtggaactgtcttggtgggtcaacggcaaagaggtgcacagcggcgtgtgtaccgacccccagccactgaaagaacagcccgccctgaacgacagccggtactgcctgagcagcagactgagagtgtccgccaccttctggcagaacccccggaaccacttcagatgccaggtgcagttctacggcctgagcgagaacgacgagtggacccaggacagagccaagcccgtgacccagatcgtgtctgccgaagcctggggcagagccgattgcggcatcaccagcgccagctaccaccagggcgtgctgagcgccaccatcctgtacgagatcctgctgggcaaggccaccctgtacgccgtgctggtgtctgccctggtgctgatggctatggtcaagcggaaggacagccggggataa

SEQ ID NO: 34779 - DNA, 2718 bp, synthetic construct
  source 1..2718: mol_type = other DNA
atggccttaccagtgaccgccttgctcctgccgctggccttgctgctccacgccgccaggccggaagtgcagctggttgaatctggcggaggactggttcaggctggcggatctctgagactgtcttgtgccgccagcggcagaacctttagcatgggctggtttagacaggcccctggcaaagagagagagttcgtcgccgccatcacatactctggcggcagcccttactacgccgactctgtgaagggcagattcaccatcagccgggacaacgccaagaacaccgtgtacctccagatgaacagcctgaagcctgaggacaccgccgtgtactactgcgccgccaatccaacatacggcagcgactggaacgccgagaattggggccagggaacccaagtgacagtgtctagcggtaccggcggaggcggatctggcggcggaggtagcggtggcggaggatctgaattcgacttcgtgatgacacagagccctgatagcctggccgtgtctctcggcgagcgagtgaccatgagctgcaagtctagccagagcctgctgaacagcggcaaccagaagaactacctgacctggtatcagcagaagcccggccagcctcctaagctgctgatctactgggccagcaccagagaaagcggcgtgcccgatagattttctggctctggcagcggcaccgacttcaccctgacaatttctagcctgcaagccgaggacgtggccgtgtactactgccagaacgactacagctacccctacaccttcggccagggcaccaagctggaaatcaaactcgagatccagaaccctgatcctgccgtgtaccagctgcgggatagcaagagcagcgacaagagcgtgtgtctgttcaccgacttcgacagccagaccaacgtgtcccagagcaaggactccgacgtgtacatcaccgataagtgcgtgctggacatgcggagcatggacttcaagagcaactccgccgtggcctggtccaacaagtccgatttcgcctgcgccaacgccttcaacaacagcattatccccgaggacacattcttcccaagcagcgacgtgccctgcgacgtgaagctggtggaaaagagcttcgagacagacaccaacctgaacttccagaacctgagcgtgatcggcttcagaatcctgctgctgaaagtggccggctttaacctgctgatgaccctgcggctgtggtccagccgcgccaagagaagcggatctggcgtgaagcagaccctgaatttcgacctgctgaagctggctggcgacgtggaatccaacccaggccctactagtaccatggactggatttggcgcatccttttccttgtcggcgctgctaccggcgcccattccgggcccgaagtgcaactggttgaatccggtggcggcctggtgcaacccggcggatctctcagacttagctgtgccgcctccggcagaaccttcacaatgggatggtacaggcaggctccagggaaagagagagagttcgtcgccgccatctctctgtctcccacactggcctactacgccgactctgtgaaaggccggttcaccatctccagagataatagcaagaacaccgtggtgctgcaaatgaactctctgagagccgaggatacagccctgtactattgtgccgctgaccggaagtccgtgatgagcatcagacccgattactggggacagggcacactggtcacagtgtctagtggatccggcggcggaggatctggcggaggcggatctgggggcggaggctctttcgaagaagtgcaactggttcagagcggagccgagctgaagaaacctggggccagcgtgaaggtgtcctgtaaagccagcggctacacctttaccgactactacatgaaatgggtccgacaggccccaggccagggactcgaatggatcggcgatattatccccagcaacggggccaccttctacaaccagaaattcaagggccgcgtgaccatcaccgtggacaagagcacaagcaccgcctacatggaactgagcagcctgagaagcgaggacaccgccgtgtattattgcgccagaagccatctgctgcgggccagttggttcgcctattggggacagggaaccctggtcaccgttagctctacgcgtgaggacctgaagaacgtgttcccacctgaggtggccgtgttcgagcctagcaaggccgagatcgcccacacccagaaagccaccctcgtgtgcctggctaccggcttctaccccgaccatgtggaactgtcttggtgggtcaacggcaaagaggtgcacagcggcgtgtgtaccgacccccagccactgaaagaacagcccgccctgaacgacagccggtactgcctgagcagcagactgagagtgtccgccaccttctggcagaacccccggaaccacttcagatgccaggtgcagttctacggcctgagcgagaacgacgagtggacccaggacagagccaagcccgtgacccagatcgtgtctgccgaagcctggggcagagccgattgcggcatcaccagcgccagctaccaccagggcgtgctgagcgccaccatcctgtacgagatcctgctgggcaaggccaccctgtacgccgtgctggtgtctgccctggtgctgatggctatggtcaagcggaaggacagccggggataa

SEQ ID NO: 34780 - DNA, 2709 bp, synthetic construct
  source 1..2709: mol_type = other DNA
atggccttaccagtgaccgccttgctcctgccgctggccttgctgctccacgccgccaggccggaagtgcagctggttgaatctggcggaggactggttcaggctggcggatctctgagactgtcttgtgccgccagcggcagaacctttagcatgggctggtttagacaggcccctggcaaagagagagagttcgtcgccgccatcacatactctggcggcagcccttactacgccgactctgtgaagggcagattcaccatcagccgggacaacgccaagaacaccgtgtacctccagatgaacagcctgaagcctgaggacaccgccgtgtactactgcgccgccaatccaacatacggcagcgactggaacgccgagaattggggccagggaacccaagtgacagtgtctagcggtaccggcggaggcggatctggcggcggaggtagcggtggcggaggatctgaattcgacttcgtgatgacacagagccctgatagcctggccgtgtctctcggcgagcgagtgaccatgagctgcaagtctagccagagcctgctgaacagcggcaaccagaagaactacctgacctggtatcagcagaagcccggccagcctcctaagctgctgatctactgggccagcaccagagaaagcggcgtgcccgatagattttctggctctggcagcggcaccgacttcaccctgacaatttctagcctgcaagccgaggacgtggccgtgtactactgccagaacgactacagctacccctacaccttcggccagggcaccaagctggaaatcaaactcgaggacctgaagaacgtgttcccacctgaggtggccgtgttcgagcctagcgaggccgagatcagccacacccagaaagccaccctcgtgtgcctggctaccggcttctaccccgaccatgtggaactgtcttggtgggtcaacggcaaagaggtgcacagcggcgtgtgtaccgacccccagccactgaaagaacagcccgccctgaacgacagccggtactgcctgagcagcagactgagagtgtccgccaccttctggcagaacccccggaaccacttcagatgccaggtgcagttctacggcctgagcgagaacgacgagtggacccaggacagagccaagcccgtgacccagatcgtgtctgccgaagcctggggcagagccgattgcggctttaccagcgagagctaccagcagggcgtgctgagcgccaccatcctgtacgagatcctgctgggcaaggccaccctgtacgccgtgctggtgtctgccctggtgctgatggctatggtcaagcggaaggacagccggggaagggccaagcgatctggatctggagcaacaaacttctcactactcaaacaagcaggtgacgtggaggagaatcccgggcctactagtgccaccatggactggatttggcgcatccttttccttgtcggcgctgctaccggcgcccattccgggcccgaagtgcaactggttgaatccggtggcggcctggtgcaagcaggcggatctctcagacttagctgtgccgcctccggcagaaccttcacaatgggatggtttaggcaggctccagggaaagagagagagttcgtcgccgccatctctctgtctcccacactggcctactacgccgactctgtgaaaggccggttcaccatctccagagataatgccaagaacaccgtggtgctgcaaatgaactctctgaaacccgaggatacagccctgtactattgtgccgctgaccggaagtccgtgatgagcatcagacccgattactggggacagggcacacaagtcacagtgtcctctggatccggcggcggaggatctggcggaggcggatctgggggcggaggctctttcgaagaagtgcaactggttcagagcggagccgagctgaagaaacctggggccagcgtgaaggtgtcctgtaaagccagcggctacacctttaccgactactacatgaaatgggtccgacaggccccaggccagggactcgaatggatcggcgatattatccccagcaacggggccaccttctacaaccagaaattcaagggccgcgtgaccatcaccgtggacaagagcacaagcaccgcctacatggaactgagcagcctgagaagcgaggacaccgccgtgtattattgcgccagaagccatctgctgcgggccagttggttcgcctattggggacagggaaccctggtcaccgttagctctacgcgtatccagaaccctgatcctgccgtgtaccagctgcgggatagcaagagcagcgacaagagcgtgtgtctgttcaccgacttcgacagccagaccaacgtgtcccagagcaaggactccgacgtgtacatcaccgataagtgcgtgctggacatgcggagcatggacttcaagagcaactccgccgtggcctggtccaacaagtccgatttcgcctgcgccaacgccttcaacaacagcattatccccgaggacacattcttcccaagccccgagagcagctgcgacgtgaagctggtggaaaagagcttcgagacagacaccaacctgaacttccagaacctgagcgtgatcggcttcagaatcctgctgctgaaagtggccggctttaacctgctgatgaccctgcggctgtggtccagctaa

SEQ ID NO: 34781 - DNA, 2322 bp, synthetic construct
  source 1..2322: mol_type = other DNA
atggccttaccagtgaccgccttgctcctgccgctggccttgctgctccacgccgccaggccggaagtgcagctggttgaatctggcggaggactggttcagcctggcggatctctgagactgagctgtgaagccagcggcttcgccagcgacgattacatcatcggctggttcagacaggcccctggcaaagagagagagggcgtcagctgcatcagctctaagtacgccaacaccgtgtacaccgacagcgtgaagggcagattcagactgagcagaggcaccgccaagaataccgtgtacctccagatgagcgccctgaagcctgaggataccgccgtgtactactgcgctatggacagccgcagagtgacatgccctgagatcagcaccatgcaccggaacttcgattcttggggccagggcacactggtcacagtgtcatctggtaccggcggaggcggatctggcggcggaggtagcggtggcggaggatctgaattcgacttcgtgatgacacagagccctgatagcctggccgtgtctctcggcgagcgagtgaccatgagctgcaagtctagccagagcctgctgaacagcggcaaccagaagaactacctgacctggtatcagcagaagcccggccagcctcctaagctgctgatctactgggccagcaccagagaaagcggcgtgcccgatagattttctggctctggcagcggcaccgacttcaccctgacaatttctagcctgcaagccgaggacgtggccgtgtactactgccagaacgactacagctacccctacaccttcggccagggcaccaagctggaaatcaaactcgaggacctgaagaacgtgttcccacctgaggtggccgtgttcgagcctagcaaggccgagatcgcccacacccagaaagccaccctcgtgtgcctggctaccggcttctaccccgaccatgtggaactgtcttggtgggtcaacggcaaagaggtgcacagcggcgtgtgtaccgacccccagccactgaaagaacagcccgccctgaacgacagccggtactgcctgagcagcagactgagagtgtccgccaccttctggcagaacccccggaaccacttcagatgccaggtgcagttctacggcctgagcgagaacgacgagtggacccaggacagagccaagcccgtgacccagatcgtgtctgccgaagcctggggcagagccgattgcggcatcaccagcgccagctaccaccagggcgtgctgagcgccaccatcctgtacgagatcctgctgggcaaggccaccctgtacgccgtgctggtgtctgccctggtgctgatggctatggtcaagcggaaggacagccggggaagggccaagcgatctggatctggagcaacaaacttctcactactcaaacaagcaggtgacgtggaggagaatcccgggcctactagtatggactggatttggcgcatccttttccttgtcggcgctgctaccggcgcgcattccttcgaagaagtgcaactggttcagagcggagccgagctgaagaaacctggggccagcgtgaaggtgtcctgtaaagccagcggctacacctttaccgactactacatgaaatgggtccgacaggccccaggccagggactcgaatggatcggcgatattatccccagcaacggggccaccttctacaaccagaaattcaagggccgcgtgaccatcaccgtggacaagagcacaagcaccgcctacatggaactgagcagcctgagaagcgaggacaccgccgtgtattattgcgccagaagccatctgctgcgggccagttggttcgcctattggggacagggaaccctggtcaccgttagctctacgcgtatccagaaccctgatcctgccgtgtaccagctgcgggatagcaagagcagcgacaagagcgtgtgtctgttcaccgacttcgacagccagaccaacgtgtcccagagcaaggactccgacgtgtacatcaccgataagtgcgtgctggacatgcggagcatggacttcaagagcaactccgccgtggcctggtccaacaagtccgatttcgcctgcgccaacgccttcaacaacagcattatccccgaggacacattcttcccaagcagcgacgtgccctgcgacgtgaagctggtggaaaagagcttcgagacagacaccaacctgaacttccagaacctgagcgtgatcggcttcagaatcctgctgctgaaagtggccggctttaacctgctgatgaccctgcggctgtggtccagctaa

SEQ ID NO: 34782 - DNA, 2295 bp, synthetic construct
  source 1..2295: mol_type = other DNA
atggccttaccagtgaccgccttgctcctgccgctggccttgctgctccacgccgccaggccggacttcgtgatgacacagagccctgatagcctggccgtgtctctcggcgagcgagtgaccatgagctgcaagtctagccagagcctgctgaacagcggcaaccagaagaactacctgacctggtatcagcagaagcccggccagcctcctaagctgctgatctactgggccagcaccagagaaagcggcgtgcccgatagattttctggctctggcagcggcaccgacttcaccctgacaatttctagcctgcaagccgaggacgtggccgtgtactactgccagaacgactacagctacccctacaccttcggccagggcaccaagctggaaatcaaactcgaggacctgaagaacgtgttcccacctgaggtggccgtgttcgagcctagcgaggccgagatcagccacacccagaaagccaccctcgtgtgcctggctaccggcttctaccccgaccatgtggaactgtcttggtgggtcaacggcaaagaggtgcacagcggcgtgtgtaccgacccccagccactgaaagaacagcccgccctgaacgacagccggtactgcctgagcagcagactgagagtgtccgccaccttctggcagaacccccggaaccacttcagatgccaggtgcagttctacggcctgagcgagaacgacgagtggacccaggacagagccaagcccgtgacccagatcgtgtctgccgaagcctggggcagagccgattgcggctttaccagcgagagctaccagcagggcgtgctgagcgccaccatcctgtacgagatcctgctgggcaaggccaccctgtacgccgtgctggtgtctgccctggtgctgatggctatggtcaagcggaaggacagccggggaagggccaagcgatctggatctggagcaacaaacttctcactactcaaacaagcaggtgacgtggaggagaatcccgggcctactagtaccatggactggatttggcgcatccttttccttgtcggcgctgctaccggcgcccattccgggcccgaagtgcaactggttgaatccggtggcggcctggtgcaacccggcggatctctcagacttagctgtgccgcctccggcagaaccttcacaatgggatggtacaggcaggctccagggaaagagagagagttcgtcgccgccatctctctgtctcccacactggcctactacgccgactctgtgaaaggccggttcaccatctccagagataatagcaagaacaccgtggtgctgcaaatgaactctctgagagccgaggatacagccctgtactattgtgccgctgaccggaagtccgtgatgagcatcagacccgattactggggacagggcacactggtcacagtgtctagtggatccggcggcggaggatctggcggaggcggatctgggggcggaggctctttcgaagaagtgcaactggttcagagcggagccgagctgaagaaacctggggccagcgtgaaggtgtcctgtaaagccagcggctacacctttaccgactactacatgaaatgggtccgacaggccccaggccagggactcgaatggatcggcgatattatccccagcaacggggccaccttctacaaccagaaattcaagggccgcgtgaccatcaccgtggacaagagcacaagcaccgcctacatggaactgagcagcctgagaagcgaggacaccgccgtgtattattgcgccagaagccatctgctgcgggccagttggttcgcctattggggacagggaaccctggtcaccgttagctctacgcgtatccagaaccctgatcctgccgtgtaccagctgcgggatagcaagagcagcgacaagagcgtgtgtctgttcaccgacttcgacagccagaccaacgtgtcccagagcaaggactccgacgtgtacatcaccgataagtgcgtgctggacatgcggagcatggacttcaagagcaactccgccgtggcctggtccaacaagtccgatttcgcctgcgccaacgccttcaacaacagcattatccccgaggacacattcttcccaagccccgagagcagctgcgacgtgaagctggtggaaaagagcttcgagacagacaccaacctgaacttccagaacctgagcgtgatcggcttcagaatcctgctgctgaaagtggccggctttaacctgctgatgaccctgcggctgtggtccagctaa

SEQ ID NO: 34783 - DNA, 2313 bp, synthetic construct
  source 1..2313: mol_type = other DNA
atggccttaccagtgaccgccttgctcctgccgctggccttgctgctccacgccgccaggccggacttcgtgatgacacagagccctgatagcctggccgtgtctctcggcgagcgagtgaccatgagctgcaagtctagccagagcctgctgaacagcggcaaccagaagaactacctgacctggtatcagcagaagcccggccagcctcctaagctgctgatctactgggccagcaccagagaaagcggcgtgcccgatagattttctggctctggcagcggcaccgacttcaccctgacaatttctagcctgcaagccgaggacgtggccgtgtactactgccagaacgactacagctacccctacaccttcggccagggcaccaagctggaaatcaaactcgaggacctgaagaacgtgttcccacctgaggtggccgtgttcgagcctagcgaggccgagatcagccacacccagaaagccaccctcgtgtgcctggctaccggcttctaccccgaccatgtggaactgtcttggtgggtcaacggcaaagaggtgcacagcggcgtgtgtaccgacccccagccactgaaagaacagcccgccctgaacgacagccggtactgcctgagcagcagactgagagtgtccgccaccttctggcagaacccccggaaccacttcagatgccaggtgcagttctacggcctgagcgagaacgacgagtggacccaggacagagccaagcccgtgacccagatcgtgtctgccgaagcctggggcagagccgattgcggctttaccagcgagagctaccagcagggcgtgctgagcgccaccatcctgtacgagatcctgctgggcaaggccaccctgtacgccgtgctggtgtctgccctggtgctgatggctatggtcaagcggaaggacagccggggaagggccaagcgatctggatctggagcaacaaacttctcactactcaaacaagcaggtgacgtggaggagaatcccgggcctactagtaccatggactggatttggcgcatccttttccttgtcggcgctgctaccggcgcccattccgggccccaggtgcagctggttgaatctggcggaggactggttcagcctggcggatctctgagactgtcttgtgccgccagcggcaacatcaacagcagaaactgcatgggctggttcagacaggcccctggcaagggaagagaaggcgtggcagctatcggccaagtgaccggcagaacctactacgtggacagcgtgaagggcagattcaccatcagcctggacaacagcaagaacaccctgtacctccagatgaacagcctgagagccgaggacaccgccgtgtactattgtgctgctgcccctggctgtctgctgtctgcacttagaagcgccgactacagaaactggggccagggcacactggtcaccgtttcttctggatccggcggcggaggatctggcggaggcggatctgggggcggaggctctttcgaagaagtgcaactggttcagagcggagccgagctgaagaaacctggggccagcgtgaaggtgtcctgtaaagccagcggctacacctttaccgactactacatgaaatgggtccgacaggccccaggccagggactcgaatggatcggcgatattatccccagcaacggggccaccttctacaaccagaaattcaagggccgcgtgaccatcaccgtggacaagagcacaagcaccgcctacatggaactgagcagcctgagaagcgaggacaccgccgtgtattattgcgccagaagccatctgctgcgggccagttggttcgcctattggggacagggaaccctggtcaccgttagctctacgcgtatccagaaccctgatcctgccgtgtaccagctgcgggatagcaagagcagcgacaagagcgtgtgtctgttcaccgacttcgacagccagaccaacgtgtcccagagcaaggactccgacgtgtacatcaccgataagtgcgtgctggacatgcggagcatggacttcaagagcaactccgccgtggcctggtccaacaagtccgatttcgcctgcgccaacgccttcaacaacagcattatccccgaggacacattcttcccaagccccgagagcagctgcgacgtgaagctggtggaaaagagcttcgagacagacaccaacctgaacttccagaacctgagcgtgatcggcttcagaatcctgctgctgaaagtggccggctttaacctgctgatgaccctgcggctgtggtccagc

SEQ ID NO: 34784 - DNA, 2316 bp, synthetic construct
  source 1..2316: mol_type = other DNA
atggccttaccagtgaccgccttgctcctgccgctggccttgctgctccacgccgccaggccggacttcgtgatgacacagagccctgatagcctggccgtgtctctcggcgagcgagtgaccatgagctgcaagtctagccagagcctgctgaacagcggcaaccagaagaactacctgacctggtatcagcagaagcccggccagcctcctaagctgctgatctactgggccagcaccagagaaagcggcgtgcccgatagattttctggctctggcagcggcaccgacttcaccctgacaatttctagcctgcaagccgaggacgtggccgtgtactactgccagaacgactacagctacccctacaccttcggccagggcaccaagctggaaatcaaactcgaggacctgaagaacgtgttcccacctgaggtggccgtgttcgagcctagcgaggccgagatcagccacacccagaaagccaccctcgtgtgcctggctaccggcttctaccccgaccatgtggaactgtcttggtgggtcaacggcaaagaggtgcacagcggcgtgtgtaccgacccccagccactgaaagaacagcccgccctgaacgacagccggtactgcctgagcagcagactgagagtgtccgccaccttctggcagaacccccggaaccacttcagatgccaggtgcagttctacggcctgagcgagaacgacgagtggacccaggacagagccaagcccgtgacccagatcgtgtctgccgaagcctggggcagagccgattgcggctttaccagcgagagctaccagcagggcgtgctgagcgccaccatcctgtacgagatcctgctgggcaaggccaccctgtacgccgtgctggtgtctgccctggtgctgatggctatggtcaagcggaaggacagccggggaagggccaagcgatctggatctggagcaacaaacttctcactactcaaacaagcaggtgacgtggaggagaatcccgggcctactagtaccatggactggatttggcgcatccttttccttgtcggcgctgctaccggcgcccattccgggccccaggtgcagctggttgaatctggcggaggatctgttcaggctggcggctctctgagactgtcttgtggcgcttccggcaacatcagcagcagaaactgcatgggctggttcagacaggcccctggcaaagagagagaaggcgttgccgccatcggacaagtgaccggcagatcctactacgtggacagcgtgaagggcagattcaccatcagcctggacaacgccaagaacaccctgtacctccagatgaacacactgaagcccgaggacaccgccatgtactactgtgctgctgcccctggctgtctgctgtctgcacttagaagcgccgactacagaaactggggccagggaacccaagtgacagtgtctagtggatccggcggcggaggatctggcggaggcggatctgggggcggaggctctttcgaagaagtgcaactggttcagagcggagccgagctgaagaaacctggggccagcgtgaaggtgtcctgtaaagccagcggctacacctttaccgactactacatgaaatgggtccgacaggccccaggccagggactcgaatggatcggcgatattatccccagcaacggggccaccttctacaaccagaaattcaagggccgcgtgaccatcaccgtggacaagagcacaagcaccgcctacatggaactgagcagcctgagaagcgaggacaccgccgtgtattattgcgccagaagccatctgctgcgggccagttggttcgcctattggggacagggaaccctggtcaccgttagctctacgcgtatccagaaccctgatcctgccgtgtaccagctgcgggatagcaagagcagcgacaagagcgtgtgtctgttcaccgacttcgacagccagaccaacgtgtcccagagcaaggactccgacgtgtacatcaccgataagtgcgtgctggacatgcggagcatggacttcaagagcaactccgccgtggcctggtccaacaagtccgatttcgcctgcgccaacgccttcaacaacagcattatccccgaggacacattcttcccaagccccgagagcagctgcgacgtgaagctggtggaaaagagcttcgagacagacaccaacctgaacttccagaacctgagcgtgatcggcttcagaatcctgctgctgaaagtggccggctttaacctgctgatgaccctgcggctgtggtccagctaa

SEQ ID NO: 34785 - DNA, 2739 bp, synthetic construct
  source 1..2739: mol_type = other DNA
atggccttaccagtgaccgccttgctcctgccgctggccttgctgctccacgccgccaggccggaagtgcagctggttgaatctggcggaggactggttcaggctggcggatctctgagactgtcttgtgccgccagcggcagaacctttagcatgggctggtttagacaggcccctggcaaagagagagagttcgtcgccgccatcacatactctggcggcagcccttactacgccgactctgtgaagggcagattcaccatcagccgggacaacgccaagaacaccgtgtacctccagatgaacagcctgaagcctgaggacaccgccgtgtactactgcgccgccaatccaacatacggcagcgactggaacgccgagaattggggccagggaacccaagtgacagtgtctagcggtaccggcggaggcggatctggcggcggaggtagcggtggcggaggatctgaattcgacttcgtgatgacacagagccctgatagcctggccgtgtctctcggcgagcgagtgaccatgagctgcaagtctagccagagcctgctgaacagcggcaaccagaagaactacctgacctggtatcagcagaagcccggccagcctcctaagctgctgatctactgggccagcaccagagaaagcggcgtgcccgatagattttctggctctggcagcggcaccgacttcaccctgacaatttctagcctgcaagccgaggacgtggccgtgtactactgccagaacgactacagctacccctacaccttcggccagggcaccaagctggaaatcaaactcgagatccagaaccctgatcctgccgtgtaccagctgcgggatagcaagagcagcgacaagagcgtgtgtctgttcaccgacttcgacagccagaccaacgtgtcccagagcaaggactccgacgtgtacatcaccgataagtgcgtgctggacatgcggagcatggacttcaagagcaactccgccgtggcctggtccaacaagtccgatttcgcctgcgccaacgccttcaacaacagcattatccccgaggacacattcttcccaagcagcgacgtgccctgcgacgtgaagctggtggaaaagagcttcgagacagacaccaacctgaacttccagaacctgagcgtgatcggcttcagaatcctgctgctgaaagtggccggctttaacctgctgatgaccctgcggctgtggtccagccgcgccaagagaagcggatctggcgtgaagcagaccctgaatttcgacctgctgaagctggctggcgacgtggaatccaacccaggccctactagtaccatggactggatttggcgcatccttttccttgtcggcgctgctaccggcgcccattccgggccccaggtgcagctggttgaatctggcggaggatctgttcaggctggcggctctctgagactgtcttgtggcgcttccggcaacatcagcagcagaaactgcatgggctggttcagacaggcccctggcaaagagagagaaggcgttgccgccatcggacaagtgaccggcagatcctactacgtggacagcgtgaagggcagattcaccatcagcctggacaacgccaagaacaccctgtacctccagatgaacacactgaagcccgaggacaccgccatgtactactgtgctgctgcccctggctgtctgctgtctgcacttagaagcgccgactacagaaactggggccagggaacccaagtgacagtgtctagtggatccggcggcggaggatctggcggaggcggatctgggggcggaggctctttcgaagaagtgcaactggttcagagcggagccgagctgaagaaacctggggccagcgtgaaggtgtcctgtaaagccagcggctacacctttaccgactactacatgaaatgggtccgacaggccccaggccagggactcgaatggatcggcgatattatccccagcaacggggccaccttctacaaccagaaattcaagggccgcgtgaccatcaccgtggacaagagcacaagcaccgcctacatggaactgagcagcctgagaagcgaggacaccgccgtgtattattgcgccagaagccatctgctgcgggccagttggttcgcctattggggacagggaaccctggtcaccgttagctctacgcgtgaggacctgaagaacgtgttcccacctgaggtggccgtgttcgagcctagcaaggccgagatcgcccacacccagaaagccaccctcgtgtgcctggctaccggcttctaccccgaccatgtggaactgtcttggtgggtcaacggcaaagaggtgcacagcggcgtgtgtaccgacccccagccactgaaagaacagcccgccctgaacgacagccggtactgcctgagcagcagactgagagtgtccgccaccttctggcagaacccccggaaccacttcagatgccaggtgcagttctacggcctgagcgagaacgacgagtggacccaggacagagccaagcccgtgacccagatcgtgtctgccgaagcctggggcagagccgattgcggcatcaccagcgccagctaccaccagggcgtgctgagcgccaccatcctgtacgagatcctgctgggcaaggccaccctgtacgccgtgctggtgtctgccctggtgctgatggctatggtcaagcggaaggacagccggggataa

SEQ ID NO: 34786 - DNA, 2730 bp, synthetic construct
  source 1..2730: mol_type = other DNA
atggccttaccagtgaccgccttgctcctgccgctggccttgctgctccacgccgccaggccgcaggtgcagctggttgaatctggcggaggatctgttcaggctggcggctctctgagactgtcttgtggcgcttccggcaacatcagcagcagaaactgcatgggctggttcagacaggcccctggcaaagagagagaaggcgttgccgccatcggacaagtgaccggcagatcctactacgtggacagcgtgaagggcagattcaccatcagcctggacaacgccaagaacaccctgtacctccagatgaacacactgaagcccgaggacaccgccatgtactactgtgctgctgcccctggctgtctgctgtctgcacttagaagcgccgactacagaaactggggccagggaacccaagtgacagtgtctagtggtaccggcggaggcggatctggcggcggaggtagcggtggcggaggatctgaattcgacttcgtgatgacacagagccctgatagcctggccgtgtctctcggcgagcgagtgaccatgagctgcaagtctagccagagcctgctgaacagcggcaaccagaagaactacctgacctggtatcagcagaagcccggccagcctcctaagctgctgatctactgggccagcaccagagaaagcggcgtgcccgatagattttctggctctggcagcggcaccgacttcaccctgacaatttctagcctgcaagccgaggacgtggccgtgtactactgccagaacgactacagctacccctacaccttcggccagggcaccaagctggaaatcaaactcgaggacctgaagaacgtgttcccacctgaggtggccgtgttcgagcctagcgaggccgagatcagccacacccagaaagccaccctcgtgtgcctggctaccggcttctaccccgaccatgtggaactgtcttggtgggtcaacggcaaagaggtgcacagcggcgtgtgtaccgacccccagccactgaaagaacagcccgccctgaacgacagccggtactgcctgagcagcagactgagagtgtccgccaccttctggcagaacccccggaaccacttcagatgccaggtgcagttctacggcctgagcgagaacgacgagtggacccaggacagagccaagcccgtgacccagatcgtgtctgccgaagcctggggcagagccgattgcggctttaccagcgagagctaccagcagggcgtgctgagcgccaccatcctgtacgagatcctgctgggcaaggccaccctgtacgccgtgctggtgtctgccctggtgctgatggctatggtcaagcggaaggacagccggggaagggccaagcgatctggatctggagcaacaaacttctcactactcaaacaagcaggtgacgtggaggagaatcccgggcctactagtgccaccatggactggatttggcgcatccttttccttgtcggcgctgctaccggcgcccattccgggcccgaagtgcaactggttgaatccggtggcggcctggtgcaagcaggcggatctctcagacttagctgtgccgcctccggcagaaccttcacaatgggatggtttaggcaggctccagggaaagagagagagttcgtcgccgccatctctctgtctcccacactggcctactacgccgactctgtgaaaggccggttcaccatctccagagataatgccaagaacaccgtggtgctgcaaatgaactctctgaaacccgaggatacagccctgtactattgtgccgctgaccggaagtccgtgatgagcatcagacccgattactggggacagggcacacaagtcacagtgtcctctggatccggcggcggaggatctggcggaggcggatctgggggcggaggctctttcgaagaagtgcaactggttcagagcggagccgagctgaagaaacctggggccagcgtgaaggtgtcctgtaaagccagcggctacacctttaccgactactacatgaaatgggtccgacaggccccaggccagggactcgaatggatcggcgatattatccccagcaacggggccaccttctacaaccagaaattcaagggccgcgtgaccatcaccgtggacaagagcacaagcaccgcctacatggaactgagcagcctgagaagcgaggacaccgccgtgtattattgcgccagaagccatctgctgcgggccagttggttcgcctattggggacagggaaccctggtcaccgttagctctacgcgtatccagaaccctgatcctgccgtgtaccagctgcgggatagcaagagcagcgacaagagcgtgtgtctgttcaccgacttcgacagccagaccaacgtgtcccagagcaaggactccgacgtgtacatcaccgataagtgcgtgctggacatgcggagcatggacttcaagagcaactccgccgtggcctggtccaacaagtccgatttcgcctgcgccaacgccttcaacaacagcattatccccgaggacacattcttcccaagccccgagagcagctgcgacgtgaagctggtggaaaagagcttcgagacagacaccaacctgaacttccagaacctgagcgtgatcggcttcagaatcctgctgctgaaagtggccggctttaacctgctgatgaccctgcggctgtggtccagctaa

SEQ ID NO: 34787 - DNA, 2319 bp, synthetic construct
  source 1..2319: mol_type = other DNA
atggccttaccagtgaccgccttgctcctgccgctggccttgctgctccacgccgccaggccgcaggtgcagctggttgaatctggcggaggatctgttcaggctggcggctctctgagactgtcttgtggcgcttccggcaacatcagcagcagaaactgcatgggctggttcagacaggcccctggcaaagagagagaaggcgttgccgccatcggacaagtgaccggcagatcctactacgtggacagcgtgaagggcagattcaccatcagcctggacaacgccaagaacaccctgtacctccagatgaacacactgaagcccgaggacaccgccatgtactactgtgctgctgcccctggctgtctgctgtctgcacttagaagcgccgactacagaaactggggccagggaacccaagtgacagtgtctagtggtaccggcggaggcggatctggcggcggaggtagcggtggcggaggatctgaattcgacttcgtgatgacacagagccctgatagcctggccgtgtctctcggcgagcgagtgaccatgagctgcaagtctagccagagcctgctgaacagcggcaaccagaagaactacctgacctggtatcagcagaagcccggccagcctcctaagctgctgatctactgggccagcaccagagaaagcggcgtgcccgatagattttctggctctggcagcggcaccgacttcaccctgacaatttctagcctgcaagccgaggacgtggccgtgtactactgccagaacgactacagctacccctacaccttcggccagggcaccaagctggaaatcaaactcgaggacctgaagaacgtgttcccacctgaggtggccgtgttcgagcctagcgaggccgagatcagccacacccagaaagccaccctcgtgtgcctggctaccggcttctaccccgaccatgtggaactgtcttggtgggtcaacggcaaagaggtgcacagcggcgtgtgtaccgacccccagccactgaaagaacagcccgccctgaacgacagccggtactgcctgagcagcagactgagagtgtccgccaccttctggcagaacccccggaaccacttcagatgccaggtgcagttctacggcctgagcgagaacgacgagtggacccaggacagagccaagcccgtgacccagatcgtgtctgccgaagcctggggcagagccgattgcggctttaccagcgagagctaccagcagggcgtgctgagcgccaccatcctgtacgagatcctgctgggcaaggccaccctgtacgccgtgctggtgtctgccctggtgctgatggctatggtcaagcggaaggacagccggggaagggccaagcgatctggatctggagcaacaaacttctcactactcaaacaagcaggtgacgtggaggagaatcccgggcctactagtgccaccatggactggatttggcgcatccttttccttgtcggcgctgctaccggcgcccattccttcgaagaagtgcaactggttcagagcggagccgagctgaagaaacctggggccagcgtgaaggtgtcctgtaaagccagcggctacacctttaccgactactacatgaaatgggtccgacaggccccaggccagggactcgaatggatcggcgatattatccccagcaacggggccaccttctacaaccagaaattcaagggccgcgtgaccatcaccgtggacaagagcacaagcaccgcctacatggaactgagcagcctgagaagcgaggacaccgccgtgtattattgcgccagaagccatctgctgcgggccagttggttcgcctattggggacagggaaccctggtcaccgttagctctacgcgtatccagaaccctgatcctgccgtgtaccagctgcgggatagcaagagcagcgacaagagcgtgtgtctgttcaccgacttcgacagccagaccaacgtgtcccagagcaaggactccgacgtgtacatcaccgataagtgcgtgctggacatgcggagcatggacttcaagagcaactccgccgtggcctggtccaacaagtccgatttcgcctgcgccaacgccttcaacaacagcattatccccgaggacacattcttcccaagccccgagagcagctgcgacgtgaagctggtggaaaagagcttcgagacagacaccaacctgaacttccagaacctgagcgtgatcggcttcagaatcctgctgctgaaagtggccggctttaacctgctgatgaccctgcggctgtggtccagctaa

SEQ ID NO: 34788 - DNA, 2319 bp, synthetic construct
  source 1..2319: mol_type = other DNA
atggccttaccagtgaccgccttgctcctgccgctggccttgctgctccacgccgccaggccgcaagttcagctggtggaaagcggtggtggcgttgtgcaacctggtggaagtctgaggctgagctgtgccgcttctggcctgagctttagcacctacactgtggcctggttcaggcaggctcccggaaagggtcttgaaggcgtggccgccattccttacaccagccagcacatggtgtacacagacagcgtcagaggccggttcaccatcagcagagacaactccaagaatacgctctatctccagatgaactctctgcgcgccgaagatacagccgtgtattactgcgccaccgacagacggcctggcacctctatgctggctatcaacggctacaacagatggggacagggaaccaccgtgaccgtgtcatctggtaccggcggaggcggatctggcggcggaggtagcggtggcggaggatctgaattcgacttcgtgatgacacagagccctgatagcctggccgtgtctctcggcgagcgagtgaccatgagctgcaagtctagccagagcctgctgaacagcggcaaccagaagaactacctgacctggtatcagcagaagcccggccagcctcctaagctgctgatctactgggccagcaccagagaaagcggcgtgcccgatagattttctggctctggcagcggcaccgacttcaccctgacaatttctagcctgcaagccgaggacgtggccgtgtactactgccagaacgactacagctacccctacaccttcggccagggcaccaagctggaaatcaaactcgaggacctgaagaacgtgttcccacctgaggtggccgtgttcgagcctagcgaggccgagatcagccacacccagaaagccaccctcgtgtgcctggctaccggcttctaccccgaccatgtggaactgtcttggtgggtcaacggcaaagaggtgcacagcggcgtgtgtaccgacccccagccactgaaagaacagcccgccctgaacgacagccggtactgcctgagcagcagactgagagtgtccgccaccttctggcagaacccccggaaccacttcagatgccaggtgcagttctacggcctgagcgagaacgacgagtggacccaggacagagccaagcccgtgacccagatcgtgtctgccgaagcctggggcagagccgattgcggctttaccagcgagagctaccagcagggcgtgctgagcgccaccatcctgtacgagatcctgctgggcaaggccaccctgtacgccgtgctggtgtctgccctggtgctgatggctatggtcaagcggaaggacagccggggaagggccaagcgatctggatctggagcaacaaacttctcactactcaaacaagcaggtgacgtggaggagaatcccgggcctactagtgccaccatggactggatttggcgcatccttttccttgtcggcgctgctaccggcgcccattccttcgaagaagtgcaactggttcagagcggagccgagctgaagaaacctggggccagcgtgaaggtgtcctgtaaagccagcggctacacctttaccgactactacatgaaatgggtccgacaggccccaggccagggactcgaatggatcggcgatattatccccagcaacggggccaccttctacaaccagaaattcaagggccgcgtgaccatcaccgtggacaagagcacaagcaccgcctacatggaactgagcagcctgagaagcgaggacaccgccgtgtattattgcgccagaagccatctgctgcgggccagttggttcgcctattggggacagggaaccctggtcaccgttagctctacgcgtatccagaaccctgatcctgccgtgtaccagctgcgggatagcaagagcagcgacaagagcgtgtgtctgttcaccgacttcgacagccagaccaacgtgtcccagagcaaggactccgacgtgtacatcaccgataagtgcgtgctggacatgcggagcatggacttcaagagcaactccgccgtggcctggtccaacaagtccgatttcgcctgcgccaacgccttcaacaacagcattatccccgaggacacattcttcccaagccccgagagcagctgcgacgtgaagctggtggaaaagagcttcgagacagacaccaacctgaacttccagaacctgagcgtgatcggcttcagaatcctgctgctgaaagtggccggctttaacctgctgatgaccctgcggctgtggtccagctaa

SEQ ID NO: 34789 - DNA, 2316 bp, synthetic construct
  source 1..2316: mol_type = other DNA
atggccttaccagtgaccgccttgctcctgccgctggccttgctgctccacgccgccaggccggacttcgtgatgacacagagccctgatagcctggccgtgtctctcggcgagcgagtgaccatgagctgcaagtctagccagagcctgctgaacagcggcaaccagaagaactacctgacctggtatcagcagaagcccggccagcctcctaagctgctgatctactgggccagcaccagagaaagcggcgtgcccgatagattttctggctctggcagcggcaccgacttcaccctgacaatttctagcctgcaagccgaggacgtggccgtgtactactgccagaacgactacagctacccctacaccttcggccagggcaccaagctggaaatcaaactcgaggacctgaagaacgtgttcccacctgaggtggccgtgttcgagcctagcgaggccgagatcagccacacccagaaagccaccctcgtgtgcctggctaccggcttctaccccgaccatgtggaactgtcttggtgggtcaacggcaaagaggtgcacagcggcgtgtgtaccgacccccagccactgaaagaacagcccgccctgaacgacagccggtactgcctgagcagcagactgagagtgtccgccaccttctggcagaacccccggaaccacttcagatgccaggtgcagttctacggcctgagcgagaacgacgagtggacccaggacagagccaagcccgtgacccagatcgtgtctgccgaagcctggggcagagccgattgcggctttaccagcgagagctaccagcagggcgtgctgagcgccaccatcctgtacgagatcctgctgggcaaggccaccctgtacgccgtgctggtgtctgccctggtgctgatggctatggtcaagcggaaggacagccggggaagggccaagcgatctggatctggagcaacaaacttctcactactcaaacaagcaggtgacgtggaggagaatcccgggcctactagtaccatggactggatttggcgcatccttttccttgtcggcgctgctaccggcgcccattccgggccccaagttcagctggtggaaagcggtggtggcgttgtgcaacctggtggaagtctgaggctgagctgtgccgcttctggcctgagctttagcacctacactgtggcctggttcaggcaggctcccggaaagggtcttgaaggcgtggccgccattccttacaccagccagcacatggtgtacacagacagcgtcagaggccggttcaccatcagcagagacaactccaagaatacgctctatctccagatgaactctctgcgcgccgaagatacagccgtgtattactgcgccaccgacagacggcctggcacctctatgctggctatcaacggctacaacagatggggacagggaaccaccgtgaccgtgtcatctggatccggcggcggaggatctggcggaggcggatctgggggcggaggctctttcgaagaagtgcaactggttcagagcggagccgagctgaagaaacctggggccagcgtgaaggtgtcctgtaaagccagcggctacacctttaccgactactacatgaaatgggtccgacaggccccaggccagggactcgaatggatcggcgatattatccccagcaacggggccaccttctacaaccagaaattcaagggccgcgtgaccatcaccgtggacaagagcacaagcaccgcctacatggaactgagcagcctgagaagcgaggacaccgccgtgtattattgcgccagaagccatctgctgcgggccagttggttcgcctattggggacagggaaccctggtcaccgttagctctacgcgtatccagaaccctgatcctgccgtgtaccagctgcgggatagcaagagcagcgacaagagcgtgtgtctgttcaccgacttcgacagccagaccaacgtgtcccagagcaaggactccgacgtgtacatcaccgataagtgcgtgctggacatgcggagcatggacttcaagagcaactccgccgtggcctggtccaacaagtccgatttcgcctgcgccaacgccttcaacaacagcattatccccgaggacacattcttcccaagccccgagagcagctgcgacgtgaagctggtggaaaagagcttcgagacagacaccaacctgaacttccagaacctgagcgtgatcggcttcagaatcctgctgctgaaagtggccggctttaacctgctgatgaccctgcggctgtggtccagctaa

SEQ ID NO: 34790 - DNA, 2322 bp, synthetic construct
  source 1..2322: mol_type = other DNA
atggccttaccagtgaccgccttgctcctgccgctggccttgctgctccacgccgccaggccggacttcgtgatgacacagagccctgatagcctggccgtgtctctcggcgagcgagtgaccatgagctgcaagtctagccagagcctgctgaacagcggcaaccagaagaactacctgacctggtatcagcagaagcccggccagcctcctaagctgctgatctactgggccagcaccagagaaagcggcgtgcccgatagattttctggctctggcagcggcaccgacttcaccctgacaatttctagcctgcaagccgaggacgtggccgtgtactactgccagaacgactacagctacccctacaccttcggccagggcaccaagctggaaatcaaactcgaggacctgaagaacgtgttcccacctgaggtggccgtgttcgagcctagcgaggccgagatcagccacacccagaaagccaccctcgtgtgcctggctaccggcttctaccccgaccatgtggaactgtcttggtgggtcaacggcaaagaggtgcacagcggcgtgtgtaccgacccccagccactgaaagaacagcccgccctgaacgacagccggtactgcctgagcagcagactgagagtgtccgccaccttctggcagaacccccggaaccacttcagatgccaggtgcagttctacggcctgagcgagaacgacgagtggacccaggacagagccaagcccgtgacccagatcgtgtctgccgaagcctggggcagagccgattgcggctttaccagcgagagctaccagcagggcgtgctgagcgccaccatcctgtacgagatcctgctgggcaaggccaccctgtacgccgtgctggtgtctgccctggtgctgatggctatggtcaagcggaaggacagccggggaagggccaagcgatctggatctggagcaacaaacttctcactactcaaacaagcaggtgacgtggaggagaatcccgggcctactagtaccatggactggatttggcgcatccttttccttgtcggcgctgctaccggcgcccattccgggcccgaggtgcagctggttgaatctggcggaggatctgttcaggctggcggctctctgagactgtcttgtgccgccagcggctacacctacagcatcaactgcatgggctggttcagacaggcccctggcaaagagagagaaggcgttgccgccatctctaccggcggaggcagaaccgattaccgggattctgtgaagggcagattcaccatcagccaggacaacgccaagaacaccgtgtacctccagatgaacagcctgaagcctgaggacaccgccatgtactactgtgccggcaagaccacctatcctggctacggatgtggcctgggcagaagcgcctacaattattggggccagggcacccaagtgaccgtgtcatctggatccggcggcggaggatctggcggaggcggatctgggggcggaggctctttcgaagaagtgcaactggttcagagcggagccgagctgaagaaacctggggccagcgtgaaggtgtcctgtaaagccagcggctacacctttaccgactactacatgaaatgggtccgacaggccccaggccagggactcgaatggatcggcgatattatccccagcaacggggccaccttctacaaccagaaattcaagggccgcgtgaccatcaccgtggacaagagcacaagcaccgcctacatggaactgagcagcctgagaagcgaggacaccgccgtgtattattgcgccagaagccatctgctgcgggccagttggttcgcctattggggacagggaaccctggtcaccgttagctctacgcgtatccagaaccctgatcctgccgtgtaccagctgcgggatagcaagagcagcgacaagagcgtgtgtctgttcaccgacttcgacagccagaccaacgtgtcccagagcaaggactccgacgtgtacatcaccgataagtgcgtgctggacatgcggagcatggacttcaagagcaactccgccgtggcctggtccaacaagtccgatttcgcctgcgccaacgccttcaacaacagcattatccccgaggacacattcttcccaagccccgagagcagctgcgacgtgaagctggtggaaaagagcttcgagacagacaccaacctgaacttccagaacctgagcgtgatcggcttcagaatcctgctgctgaaagtggccggctttaacctgctgatgaccctgcggctgtggtccagctaa

SEQ ID NO: 34791 - DNA, 1878 bp, synthetic construct
  source 1..1878: mol_type = other DNA
atggccttaccagtgaccgccttgctcctgccgctggccttgctgctccacgccgccaggccggacttcgtgatgacacagagccctgatagcctggccgtgtctctcggcgagcgagtgaccatgagctgcaagtctagccagagcctgctgaacagcggcaaccagaagaactacctgacctggtatcagcagaagcccggccagcctcctaagctgctgatctactgggccagcaccagagaaagcggcgtgcccgatagattttctggctctggcagcggcaccgacttcaccctgacaatttctagcctgcaagccgaggacgtggccgtgtactactgccagaacgactacagctacccctacaccttcggccagggcaccaagctggaaatcaaactcgaggacctgaagcacgtgttcccacctgaggtggccgtgttcgagcctagcgacgccgagatctggcacacccagaaagccaccctcgtgtgcctggctaccggcttctaccccgaccatgtggaactgtcttggtgggtcaacggcaaagaggtgcacagcggcgtgtctaccgacccccagccactgaaagaacagcccgccctgaacgacagccggtactgcctgagcagcagactgagagtgtccgccaccttctggcagaacccccggaaccacttcagatgccaggtgcagttctacggcctgagcgagaacgacgagtggacccaggacagagccaagcccgtgacccagatcgtgtctgccgaagcctggggcagagccgattgcggctttaccagcgagagctaccagcagggcgtgctgagcgccaccatcctgtacgagatcctgctgggcaaggccaccctgtacgccgtgctggtgtctgccctggtgctgatggctatggtcaagcggaaggacagccggggaagggccaagcgatctggatctggagcaacaaacttctcactactcaaacaagcaggtgacgtggaggagaatcccgggcctactagtatggactggatttggcgcatccttttccttgtcggcgctgctaccggcgcgcattccttcgaagaagtgcaactggttcagagcggagccgagctgaagaaacctggggccagcgtgaaggtgtcctgtaaagccagcggctacacctttaccgactactacatgaaatgggtccgacaggccccaggccagggactcgaatggatcggcgatattatccccagcaacggggccaccttctacaaccagaaattcaagggccgcgtgaccatcaccgtggacaagagcacaagcaccgcctacatggaactgagcagcctgagaagcgaggacaccgccgtgtattattgcgccagaagccatctgctgcgggccagttggttcgcctattggggacagggaaccctggtcaccgttagctctacgcgtatccagaaccctgatcctgccgtgtaccagctgcgggatagcaagagcagcgacaagagcgtgtgtctgttcaccgacttcgacagccagaccaacgtgtcccagagcaaggactccgacgtgtacatcaccgataagaccgtgctggacatgcggagcatggacttcaagagcaactccgccgtggcctggtccagcaagtccgatttcgcctgcgccaacgccttcaacaacagcattatccccgaggacacattcttcccaagccccgagatggcctgcgacgtgaagctggtggaaaagagcttcgagacagacaccaacctgaacttccagaacctgctcgtgatctggctgagaatcctgctgctgaaagtggccggctttaacctgctgatgaccctgcggctgtggtccagc

SEQ ID NO: 34792 - DNA, 1878 bp, synthetic construct
  source 1..1878: mol_type = other DNA
atggccttaccagtgaccgccttgctcctgccgctggccttgctgctccacgccgccaggccggacttcgtgatgacacagagccctgatagcctggccgtgtctctcggcgagcgagtgaccatgagctgcaagtctagccagagcctgctgaacagcggcaaccagaagaactacctgacctggtatcagcagaagcccggccagcctcctaagctgctgatctactgggccagcaccagagaaagcggcgtgcccgatagattttctggctctggcagcggcaccgacttcaccctgacaatttctagcctgcaagccgaggacgtggccgtgtactactgccagaacgactacagctacccctacaccttcggccagggcaccaagctggaaatcaaactcgaggacctgaagcacgtgttcccacctgaggtggccgtgttcgagcctagcgacgccgagatctggcacacccagaaagccaccctcgtgtgcctggctaccggcttctaccccgaccatgtggaactgtcttggtgggtcaacggcaaagaggtgcacagcggcgtgtctaccgacccccagccactgaaagaacagcccgccctgaacgacagccggtactgcctgagcagcagactgagagtgtccgccaccttctggcagaacccccggaaccacttcagatgccaggtgcagttctacggcctgagcgagaacgacgagtggacccaggacagagccaagcccgtgacccagatcgtgtctgccgaagcctggggcagagccgattgcggctttaccagcgagagctaccagcagggcgtgctgagcgccaccatcctgtacgagatcctgctgggcaaggccaccctgtacgccgtgctggtgtctgccctggtgctgatggctatggtcaagcggaaggacagccggggaagggccaagcgatctggatctggagcaacaaacttctcactactcaaacaagcaggtgacgtggaggagaatcccgggcctactagtatggactggatttggcgcatccttttccttgtcggcgctgctaccggcgcgcattccttcgaagaagtgcaactggttcagagcggagccgagctgaagaaacctggggccagcgtgaaggtgtcctgtaaagccagcggctacacctttaccgactactacatgaaatgggtccgacaggccccaggccagggactcgaatggatcggcgatattatccccagcaacggggccaccttctacaaccagaaattcaagggccgcgtgaccatcaccgtggacaagagcacaagcaccgcctacatggaactgagcagcctgagaagcgaggacaccgccgtgtattattgcgccagaagccatctgctgcgggccagttggttcgcctattggggacagggaaccctggtcaccgttagctctacgcgtatccagaaccctgatcctgccgtgtaccagctgcgggatagcaagagcagcgacaagagcgtgtgtctgttcaccgacttcgacagccagaccaacgtgtcccagagcaaggactccgacgtgtacatcaccgataagaccgtgctggacatgcggagcatggacttcaagagcaactccgccgtggcctggtccaccaagtccgatttcgcctgcgccaacgccttcaacaacagcattatccccgaggacacattcttcccaagccccgaggtggtgtgcgacgtgaagctggtggaaaagagcttcgagacagacaccaacctgaacttccagaacctggtggtgatcggcgccagaatcctgctgctgaaagtggccggctttaacctgctgatgaccctgcggctgtggtccagc

SEQ ID NO: 34793 - DNA, 1878 bp, synthetic construct
  source 1..1878: mol_type = other DNA
atggccttaccagtgaccgccttgctcctgccgctggccttgctgctccacgccgccaggccggacttcgtgatgacacagagccctgatagcctggccgtgtctctcggcgagcgagtgaccatgagctgcaagtctagccagagcctgctgaacagcggcaaccagaagaactacctgacctggtatcagcagaagcccggccagcctcctaagctgctgatctactgggccagcaccagagaaagcggcgtgcccgatagattttctggctctggcagcggcaccgacttcaccctgacaatttctagcctgcaagccgaggacgtggccgtgtactactgccagaacgactacagctacccctacaccttcggccagggcaccaagctggaaatcaaactcgaggacctgaagaacgtgttcccacctgaggtggccgtgttcgagcctagcaaggccgagatcagcagaacccagaaagccaccctcgtgtgcctggctaccggcttctaccctcctcatgtggaactgtcttggtgggtcaacggcaaagaggtgcacgacggcgtgtgtaccgacccccagccactgaaagaacagcccgccctgaacgacagccggtactgcctgagcagcagactgagagtgtccgccaccttctggcagaacccccggaaccacttcagatgccaggtgcagttctacggcctgagcgagaacgacgagtggacccaggacagagccaagcccgtgacccagatcgtgtctgccgaagcctggggcagagccgattgcggctttaccagcgagagctaccagcagggcgtgctgagcgccaccatcctgtacgagatcctgctgggcaaggccaccctgtacgccgtgctggtgtctgccctggtgctgatggctatggtcaagcggaaggacagccggggaagggccaagcgatctggatctggagcaacaaacttctcactactcaaacaagcaggtgacgtggaggagaatcccgggcctactagtatggactggatttggcgcatccttttccttgtcggcgctgctaccggcgcgcattccttcgaagaagtgcaactggttcagagcggagccgagctgaagaaacctggggccagcgtgaaggtgtcctgtaaagccagcggctacacctttaccgactactacatgaaatgggtccgacaggccccaggccagggactcgaatggatcggcgatattatccccagcaacggggccaccttctacaaccagaaattcaagggccgcgtgaccatcaccgtggacaagagcacaagcaccgcctacatggaactgagcagcctgagaagcgaggacaccgccgtgtattattgcgccagaagccatctgctgcgggccagttggttcgcctattggggacagggaaccctggtcaccgttagctctacgcgtatccagaaccctgatcctgccgtgtaccagctgcgggatagcaagagcagcgacaagttcgtgtgtctgttcaccgacttcgacagccagatcaacgtgtcccagagcaaggactccgacgtgtacatcaccgataagtgcgtgctggacatgcggagcatggacttcaagagcaactccgccgtggcctggtccaacaagtccgatttcacctgcgccaacgccttcaacaacagcattatccccgaggacacattcttcccaagccccgagagcagctgcgacgtgaagctggtggaaaagagcttcgagacagacaccaacctgaacttccagaacctgagcgtgatcggcttcagaatcctgctgctgaaagtggccggctttaacctgctgatgaccctgcggctgtggtccagc

SEQ ID NO: 34794 - DNA, 2304 bp, synthetic construct
  source 1..2304: mol_type = other DNA
atggccttaccagtgaccgccttgctcctgccgctggccttgctgctccacgccgccaggccggacttcgtgatgacacagagccctgatagcctggccgtgtctctcggcgagcgagtgaccatgagctgcaagtctagccagagcctgctgaacagcggcaaccagaagaactacctgacctggtatcagcagaagcccggccagcctcctaagctgctgatctactgggccagcaccagagaaagcggcgtgcccgatagattttctggctctggcagcggcaccgacttcaccctgacaatttctagcctgcaagccgaggacgtggccgtgtactactgccagaacgactacagctacccctacaccttcggccagggcaccaagctggaaatcaaactcgaggacctgaagaacgtgttcccacctgaggtggccgtgttcgagcctagcgaggccgagatcagccacacccagaaagccaccctcgtgtgcctggctaccggcttctaccccgaccatgtggaactgtcttggtgggtcaacggcaaagaggtgcacagcggcgtgtgtaccgacccccagccactgaaagaacagcccgccctgaacgacagccggtactgcctgagcagcagactgagagtgtccgccaccttctggcagaacccccggaaccacttcagatgccaggtgcagttctacggcctgagcgagaacgacgagtggacccaggacagagccaagcccgtgacccagatcgtgtctgccgaagcctggggcagagccgattgcggctttaccagcgagagctaccagcagggcgtgctgagcgccaccatcctgtacgagatcctgctgggcaaggccaccctgtacgccgtgctggtgtctgccctggtgctgatggctatggtcaagcggaaggacagccggggaagggccaagcgatctggatctggagcaacaaacttctcactactcaaacaagcaggtgacgtggaggagaatcccgggcctactagtaccatggactggatttggcgcatccttttccttgtcggcgctgctaccggcgcccattccgggccccaggtgcagctccaagaaagcggacccggactggttaagccctctcagaccctgtctctgacctgcacagttagcggagccagcattaccacaggcgagtattattggaattggtttcggcagccaccaggcaaggggcttgagtggatgggtgctattgctgcctctggcagcaccacctactctcccagctttgagagcagaacctccatcagccgggacacctccaaaaaccagttctctctgaagctgtcctccgtgaccgctgctgacaccgccgtctattattgtggccggtctttcggcgtggcagctgtgaccacaggacagaacagaggccagggaacacttgtgaccgtgtcctctggatccggcggcggaggatctggcggaggcggatctgggggcggaggctctttcgaagaagtgcaactggttcagagcggagccgagctgaagaaacctggggccagcgtgaaggtgtcctgtaaagccagcggctacacctttaccgactactacatgaaatgggtccgacaggccccaggccagggactcgaatggatcggcgatattatccccagcaacggggccaccttctacaaccagaaattcaagggccgcgtgaccatcaccgtggacaagagcacaagcaccgcctacatggaactgagcagcctgagaagcgaggacaccgccgtgtattattgcgccagaagccatctgctgcgggccagttggttcgcctattggggacagggaaccctggtcaccgttagctctacgcgtatccagaaccctgatcctgccgtgtaccagctgcgggatagcaagagcagcgacaagagcgtgtgtctgttcaccgacttcgacagccagaccaacgtgtcccagagcaaggactccgacgtgtacatcaccgataagtgcgtgctggacatgcggagcatggacttcaagagcaactccgccgtggcctggtccaacaagtccgatttcgcctgcgccaacgccttcaacaacagcattatccccgaggacacattcttcccaagccccgagagcagctgcgacgtgaagctggtggaaaagagcttcgagacagacaccaacctgaacttccagaacctgagcgtgatcggcttcagaatcctgctgctgaaagtggccggctttaacctgctgatgaccctgcggctgtggtccagc

SEQ ID NO: 34795 - DNA, 2727 bp, synthetic construct
  source 1..2727: mol_type = other DNA
atggccttaccagtgaccgccttgctcctgccgctggccttgctgctccacgccgccaggccgcaggttcagctgcaagagtctggccctggcctggtcaagcctagccaaacactgagcctgacctgtaccgtgtctggcggctctatcaccaccggcgagttctactggaactggttcagacagcctcctggcaaaggactggaatggatgggagccattgccgccagcggcagcacaacatacagccctagcttcgagagccggaccagcatcagcagagacaccagcaagaatcagttcagcctgaagctgagcagcgtgacagccgccgatacagccgtgtattactgcggcagatcctttggagtggccgccgtgacaaccggccagaatagaggacagggcaccctggtcacagtgtctagcggtaccggcggaggcggatctggcggcggaggtagcggtggcggaggatctgaattcgacttcgtgatgacacagagccctgatagcctggccgtgtctctcggcgagcgagtgaccatgagctgcaagtctagccagagcctgctgaacagcggcaaccagaagaactacctgacctggtatcagcagaagcccggccagcctcctaagctgctgatctactgggccagcaccagagaaagcggcgtgcccgatagattttctggctctggcagcggcaccgacttcaccctgacaatttctagcctgcaagccgaggacgtggccgtgtactactgccagaacgactacagctacccctacaccttcggccagggcaccaagctggaaatcaaactcgagatccagaaccctgatcctgccgtgtaccagctgcgggatagcaagagcagcgacaagagcgtgtgtctgttcaccgacttcgacagccagaccaacgtgtcccagagcaaggactccgacgtgtacatcaccgataagtgcgtgctggacatgcggagcatggacttcaagagcaactccgccgtggcctggtccaacaagtccgatttcgcctgcgccaacgccttcaacaacagcattatccccgaggacacattcttcccaagcagcgacgtgccctgcgacgtgaagctggtggaaaagagcttcgagacagacaccaacctgaacttccagaacctgagcgtgatcggcttcagaatcctgctgctgaaagtggccggctttaacctgctgatgaccctgcggctgtggtccagccgcgccaagagaagcggatctggcgtgaagcagaccctgaatttcgacctgctgaagctggctggcgacgtggaatccaacccaggccctactagtaccatggactggatttggcgcatccttttccttgtcggcgctgctaccggcgcccattccgggcccgaagtgcaactggttgaatccggtggcggcctggtgcaacccggcggatctctcagacttagctgtgccgcctccggcagaaccttcacaatgggatggtacaggcaggctccagggaaagagagagagttcgtcgccgccatctctctgtctcccacactggcctactacgccgactctgtgaaaggccggttcaccatctccagagataatagcaagaacaccgtggtgctgcaaatgaactctctgagagccgaggatacagccctgtactattgtgccgctgaccggaagtccgtgatgagcatcagacccgattactggggacagggcacactggtcacagtgtctagtggatccggcggcggaggatctggcggaggcggatctgggggcggaggctctttcgaagaagtgcaactggttcagagcggagccgagctgaagaaacctggggccagcgtgaaggtgtcctgtaaagccagcggctacacctttaccgactactacatgaaatgggtccgacaggccccaggccagggactcgaatggatcggcgatattatccccagcaacggggccaccttctacaaccagaaattcaagggccgcgtgaccatcaccgtggacaagagcacaagcaccgcctacatggaactgagcagcctgagaagcgaggacaccgccgtgtattattgcgccagaagccatctgctgcgggccagttggttcgcctattggggacagggaaccctggtcaccgttagctctacgcgtgaggacctgaagaacgtgttcccacctgaggtggccgtgttcgagcctagcaaggccgagatcgcccacacccagaaagccaccctcgtgtgcctggctaccggcttctaccccgaccatgtggaactgtcttggtgggtcaacggcaaagaggtgcacagcggcgtgtgtaccgacccccagccactgaaagaacagcccgccctgaacgacagccggtactgcctgagcagcagactgagagtgtccgccaccttctggcagaacccccggaaccacttcagatgccaggtgcagttctacggcctgagcgagaacgacgagtggacccaggacagagccaagcccgtgacccagatcgtgtctgccgaagcctggggcagagccgattgcggcatcaccagcgccagctaccaccagggcgtgctgagcgccaccatcctgtacgagatcctgctgggcaaggccaccctgtacgccgtgctggtgtctgccctggtgctgatggctatggtcaagcggaaggacagccgggga

SEQ ID NO: 34796 - DNA, 2316 bp, synthetic construct
  source 1..2316: mol_type = other DNA
atggccttaccagtgaccgccttgctcctgccgctggccttgctgctccacgccgccaggccgcaggttcagctgcaagagtctggccctggcctggtcaagcctagccaaacactgagcctgacctgtaccgtgtctggcggctctatcaccaccggcgagttctactggaactggttcagacagcctcctggcaaaggactggaatggatgggagccattgccgccagcggcagcacaacatacagccctagcttcgagagccggaccagcatcagcagagacaccagcaagaatcagttcagcctgaagctgagcagcgtgacagccgccgatacagccgtgtattactgcggcagatcctttggagtggccgccgtgacaaccggccagaatagaggacagggcaccctggtcacagtgtctagcggtaccggcggaggcggatctggcggcggaggtagcggtggcggaggatctgaattcgacttcgtgatgacacagagccctgatagcctggccgtgtctctcggcgagcgagtgaccatgagctgcaagtctagccagagcctgctgaacagcggcaaccagaagaactacctgacctggtatcagcagaagcccggccagcctcctaagctgctgatctactgggccagcaccagagaaagcggcgtgcccgatagattttctggctctggcagcggcaccgacttcaccctgacaatttctagcctgcaagccgaggacgtggccgtgtactactgccagaacgactacagctacccctacaccttcggccagggcaccaagctggaaatcaaactcgagatccagaaccctgatcctgccgtgtaccagctgcgggatagcaagagcagcgacaagagcgtgtgtctgttcaccgacttcgacagccagaccaacgtgtcccagagcaaggactccgacgtgtacatcaccgataagtgcgtgctggacatgcggagcatggacttcaagagcaactccgccgtggcctggtccaacaagtccgatttcgcctgcgccaacgccttcaacaacagcattatccccgaggacacattcttcccaagcagcgacgtgccctgcgacgtgaagctggtggaaaagagcttcgagacagacaccaacctgaacttccagaacctgagcgtgatcggcttcagaatcctgctgctgaaagtggccggctttaacctgctgatgaccctgcggctgtggtccagccgcgccaagagaagcggatctggcgtgaagcagaccctgaatttcgacctgctgaagctggctggcgacgtggaatccaacccaggccctactagtaccatggactggatttggcgcatccttttccttgtcggcgctgctaccggcgcccattccttcgaagaagtgcaactggttcagagcggagccgagctgaagaaacctggggccagcgtgaaggtgtcctgtaaagccagcggctacacctttaccgactactacatgaaatgggtccgacaggccccaggccagggactcgaatggatcggcgatattatccccagcaacggggccaccttctacaaccagaaattcaagggccgcgtgaccatcaccgtggacaagagcacaagcaccgcctacatggaactgagcagcctgagaagcgaggacaccgccgtgtattattgcgccagaagccatctgctgcgggccagttggttcgcctattggggacagggaaccctggtcaccgttagctctacgcgtgaggacctgaagaacgtgttcccacctgaggtggccgtgttcgagcctagcaaggccgagatcgcccacacccagaaagccaccctcgtgtgcctggctaccggcttctaccccgaccatgtggaactgtcttggtgggtcaacggcaaagaggtgcacagcggcgtgtgtaccgacccccagccactgaaagaacagcccgccctgaacgacagccggtactgcctgagcagcagactgagagtgtccgccaccttctggcagaacccccggaaccacttcagatgccaggtgcagttctacggcctgagcgagaacgacgagtggacccaggacagagccaagcccgtgacccagatcgtgtctgccgaagcctggggcagagccgattgcggcatcaccagcgccagctaccaccagggcgtgctgagcgccaccatcctgtacgagatcctgctgggcaaggccaccctgtacgccgtgctggtgtctgccctggtgctgatggctatggtcaagcggaaggacagccgggga

SEQ ID NO: 34797 - DNA, 2715 bp, synthetic construct
  source 1..2715: mol_type = other DNA
atggccttaccagtgaccgccttgctcctgccgctggccttgctgctccacgccgccaggccggaagtgcagctggttgaatctggcggaggactggttcaggctggcggatctctgagactgtcttgtgccgccagcggcagaacctttagcatgggctggtttagacaggcccctggcaaagagagagagttcgtcgccgccatcacatactctggcggcagcccttactacgccgactctgtgaagggcagattcaccatcagccgggacaacgccaagaacaccgtgtacctccagatgaacagcctgaagcctgaggacaccgccgtgtactactgcgccgccaatccaacatacggcagcgactggaacgccgagaattggggccagggaacccaagtgacagtgtctagcggtaccggcggaggcggatctggcggcggaggtagcggtggcggaggatctgaattcgacttcgtgatgacacagagccctgatagcctggccgtgtctctcggcgagcgagtgaccatgagctgcaagtctagccagagcctgctgaacagcggcaaccagaagaactacctgacctggtatcagcagaagcccggccagcctcctaagctgctgatctactgggccagcaccagagaaagcggcgtgcccgatagattttctggctctggcagcggcaccgacttcaccctgacaatttctagcctgcaagccgaggacgtggccgtgtactactgccagaacgactacagctacccctacaccttcggccagggcaccaagctggaaatcaaactcgaggacctgaagaacgtgttcccacctgaggtggccgtgttcgagcctagcgaggccgagatcagccacacccagaaagccaccctcgtgtgcctggctaccggcttctaccccgaccatgtggaactgtcttggtgggtcaacggcaaagaggtgcacagcggcgtgtgtaccgacccccagccactgaaagaacagcccgccctgaacgacagccggtactgcctgagcagcagactgagagtgtccgccaccttctggcagaacccccggaaccacttcagatgccaggtgcagttctacggcctgagcgagaacgacgagtggacccaggacagagccaagcccgtgacccagatcgtgtctgccgaagcctggggcagagccgattgcggctttaccagcgagagctaccagcagggcgtgctgagcgccaccatcctgtacgagatcctgctgggcaaggccaccctgtacgccgtgctggtgtctgccctggtgctgatggctatggtcaagcggaaggacagccggggaagggccaagcgatctggatctggagcaacaaacttctcactactcaaacaagcaggtgacgtggaggagaatcccgggcctactagtaccatggactggatttggcgcatccttttccttgtcggcgctgctaccggcgcccattccgggccccaggtgcagctccaagaaagcggacccggactggttaagccctctcagaccctgtctctgacctgcacagttagcggagccagcattaccacaggcgagtattattggaattggtttcggcagccaccaggcaaggggcttgagtggatgggtgctattgctgcctctggcagcaccacctactctcccagctttgagagcagaacctccatcagccgggacacctccaaaaaccagttctctctgaagctgtcctccgtgaccgctgctgacaccgccgtctattattgtggccggtctttcggcgtggcagctgtgaccacaggacagaacagaggccagggaacacttgtgaccgtgtcctctggatccggcggcggaggatctggcggaggcggatctgggggcggaggctctttcgaagaagtgcaactggttcagagcggagccgagctgaagaaacctggggccagcgtgaaggtgtcctgtaaagccagcggctacacctttaccgactactacatgaaatgggtccgacaggccccaggccagggactcgaatggatcggcgatattatccccagcaacggggccaccttctacaaccagaaattcaagggccgcgtgaccatcaccgtggacaagagcacaagcaccgcctacatggaactgagcagcctgagaagcgaggacaccgccgtgtattattgcgccagaagccatctgctgcgggccagttggttcgcctattggggacagggaaccctggtcaccgttagctctacgcgtatccagaaccctgatcctgccgtgtaccagctgcgggatagcaagagcagcgacaagagcgtgtgtctgttcaccgacttcgacagccagaccaacgtgtcccagagcaaggactccgacgtgtacatcaccgataagtgcgtgctggacatgcggagcatggacttcaagagcaactccgccgtggcctggtccaacaagtccgatttcgcctgcgccaacgccttcaacaacagcattatccccgaggacacattcttcccaagccccgagagcagctgcgacgtgaagctggtggaaaagagcttcgagacagacaccaacctgaacttccagaacctgagcgtgatcggcttcagaatcctgctgctgaaagtggccggctttaacctgctgatgaccctgcggctgtggtccagc

SEQ ID NO: 34798 - DNA, 2736 bp, synthetic construct
  source 1..2736: mol_type = other DNA
atggccttaccagtgaccgccttgctcctgccgctggccttgctgctccacgccgccaggccggaagtgcagctggttgaatctggcggaggactggttcaggctggcggatctctgagactgtcttgtgccgccagcggcagaacctttagcatgggctggtttagacaggcccctggcaaagagagagagttcgtcgccgccatcacatactctggcggcagcccttactacgccgactctgtgaagggcagattcaccatcagccgggacaacgccaagaacaccgtgtacctccagatgaacagcctgaagcctgaggacaccgccgtgtactactgcgccgccaatccaacatacggcagcgactggaacgccgagaattggggccagggaacccaagtgacagtgtctagcggtaccggcggaggcggatctggcggcggaggtagcggtggcggaggatctgaattcgacttcgtgatgacacagagccctgatagcctggccgtgtctctcggcgagcgagtgaccatgagctgcaagtctagccagagcctgctgaacagcggcaaccagaagaactacctgacctggtatcagcagaagcccggccagcctcctaagctgctgatctactgggccagcaccagagaaagcggcgtgcccgatagattttctggctctggcagcggcaccgacttcaccctgacaatttctagcctgcaagccgaggacgtggccgtgtactactgccagaacgactacagctacccctacaccttcggccagggcaccaagctggaaatcaaactcgagatccagaaccctgatcctgccgtgtaccagctgcgggatagcaagagcagcgacaagagcgtgtgtctgttcaccgacttcgacagccagaccaacgtgtcccagagcaaggactccgacgtgtacatcaccgataagtgcgtgctggacatgcggagcatggacttcaagagcaactccgccgtggcctggtccaacaagtccgatttcgcctgcgccaacgccttcaacaacagcattatccccgaggacacattcttcccaagcagcgacgtgccctgcgacgtgaagctggtggaaaagagcttcgagacagacaccaacctgaacttccagaacctgagcgtgatcggcttcagaatcctgctgctgaaagtggccggctttaacctgctgatgaccctgcggctgtggtccagccgcgccaagagaagcggatctggcgtgaagcagaccctgaatttcgacctgctgaagctggctggcgacgtggaatccaacccaggccctactagtaccatggactggatttggcgcatccttttccttgtcggcgctgctaccggcgcccattccgggccccaggtgcagctggttgaatctggcggaggactggttcagcctggcggatctctgagactgtcttgtgccgccagcggcaacatcaacagcagaaactgcatgggctggttcagacaggcccctggcaagggaagagaaggcgtggcagctatcggccaagtgaccggcagaacctactacgtggacagcgtgaagggcagattcaccatcagcctggacaacagcaagaacaccctgtacctccagatgaacagcctgagagccgaggacaccgccgtgtactattgtgctgctgcccctggctgtctgctgtctgcacttagaagcgccgactacagaaactggggccagggcacactggtcaccgtttcttctggatccggcggcggaggatctggcggaggcggatctgggggcggaggctctttcgaagaagtgcaactggttcagagcggagccgagctgaagaaacctggggccagcgtgaaggtgtcctgtaaagccagcggctacacctttaccgactactacatgaaatgggtccgacaggccccaggccagggactcgaatggatcggcgatattatccccagcaacggggccaccttctacaaccagaaattcaagggccgcgtgaccatcaccgtggacaagagcacaagcaccgcctacatggaactgagcagcctgagaagcgaggacaccgccgtgtattattgcgccagaagccatctgctgcgggccagttggttcgcctattggggacagggaaccctggtcaccgttagctctacgcgtgaggacctgaagaacgtgttcccacctgaggtggccgtgttcgagcctagcaaggccgagatcgcccacacccagaaagccaccctcgtgtgcctggctaccggcttctaccccgaccatgtggaactgtcttggtgggtcaacggcaaagaggtgcacagcggcgtgtgtaccgacccccagccactgaaagaacagcccgccctgaacgacagccggtactgcctgagcagcagactgagagtgtccgccaccttctggcagaacccccggaaccacttcagatgccaggtgcagttctacggcctgagcgagaacgacgagtggacccaggacagagccaagcccgtgacccagatcgtgtctgccgaagcctggggcagagccgattgcggcatcaccagcgccagctaccaccagggcgtgctgagcgccaccatcctgtacgagatcctgctgggcaaggccaccctgtacgccgtgctggtgtctgccctggtgctgatggctatggtcaagcggaaggacagccgggga

SEQ ID NO: 34799 - DNA, 2724 bp, synthetic construct
  source 1..2724: mol_type = other DNA
atggccttaccagtgaccgccttgctcctgccgctggccttgctgctccacgccgccaggccggaagtgcagctggttgaatctggcggaggactggttcaggctggcggatctctgagactgtcttgtgccgccagcggcagaacctttagcatgggctggtttagacaggcccctggcaaagagagagagttcgtcgccgccatcacatactctggcggcagcccttactacgccgactctgtgaagggcagattcaccatcagccgggacaacgccaagaacaccgtgtacctccagatgaacagcctgaagcctgaggacaccgccgtgtactactgcgccgccaatccaacatacggcagcgactggaacgccgagaattggggccagggaacccaagtgacagtgtctagcggtaccggcggaggcggatctggcggcggaggtagcggtggcggaggatctgaattcgacttcgtgatgacacagagccctgatagcctggccgtgtctctcggcgagcgagtgaccatgagctgcaagtctagccagagcctgctgaacagcggcaaccagaagaactacctgacctggtatcagcagaagcccggccagcctcctaagctgctgatctactgggccagcaccagagaaagcggcgtgcccgatagattttctggctctggcagcggcaccgacttcaccctgacaatttctagcctgcaagccgaggacgtggccgtgtactactgccagaacgactacagctacccctacaccttcggccagggcaccaagctggaaatcaaactcgaggacctgaagaacgtgttcccacctgaggtggccgtgttcgagcctagcgaggccgagatcagccacacccagaaagccaccctcgtgtgcctggctaccggcttctaccccgaccatgtggaactgtcttggtgggtcaacggcaaagaggtgcacagcggcgtgtgtaccgacccccagccactgaaagaacagcccgccctgaacgacagccggtactgcctgagcagcagactgagagtgtccgccaccttctggcagaacccccggaaccacttcagatgccaggtgcagttctacggcctgagcgagaacgacgagtggacccaggacagagccaagcccgtgacccagatcgtgtctgccgaagcctggggcagagccgattgcggctttaccagcgagagctaccagcagggcgtgctgagcgccaccatcctgtacgagatcctgctgggcaaggccaccctgtacgccgtgctggtgtctgccctggtgctgatggctatggtcaagcggaaggacagccggggaagggccaagcgatctggatctggagcaacaaacttctcactactcaaacaagcaggtgacgtggaggagaatcccgggcctactagtaccatggactggatttggcgcatccttttccttgtcggcgctgctaccggcgcccattccgggccccaggtgcagctggttgaatctggcggaggactggttcagcctggcggatctctgagactgtcttgtgccgccagcggcaacatcaacagcagaaactgcatgggctggttcagacaggcccctggcaagggaagagaaggcgtggcagctatcggccaagtgaccggcagaacctactacgtggacagcgtgaagggcagattcaccatcagcctggacaacagcaagaacaccctgtacctccagatgaacagcctgagagccgaggacaccgccgtgtactattgtgctgctgcccctggctgtctgctgtctgcacttagaagcgccgactacagaaactggggccagggcacactggtcaccgtttcttctggatccggcggcggaggatctggcggaggcggatctgggggcggaggctctttcgaagaagtgcaactggttcagagcggagccgagctgaagaaacctggggccagcgtgaaggtgtcctgtaaagccagcggctacacctttaccgactactacatgaaatgggtccgacaggccccaggccagggactcgaatggatcggcgatattatccccagcaacggggccaccttctacaaccagaaattcaagggccgcgtgaccatcaccgtggacaagagcacaagcaccgcctacatggaactgagcagcctgagaagcgaggacaccgccgtgtattattgcgccagaagccatctgctgcgggccagttggttcgcctattggggacagggaaccctggtcaccgttagctctacgcgtatccagaaccctgatcctgccgtgtaccagctgcgggatagcaagagcagcgacaagagcgtgtgtctgttcaccgacttcgacagccagaccaacgtgtcccagagcaaggactccgacgtgtacatcaccgataagtgcgtgctggacatgcggagcatggacttcaagagcaactccgccgtggcctggtccaacaagtccgatttcgcctgcgccaacgccttcaacaacagcattatccccgaggacacattcttcccaagccccgagagcagctgcgacgtgaagctggtggaaaagagcttcgagacagacaccaacctgaacttccagaacctgagcgtgatcggcttcagaatcctgctgctgaaagtggccggctttaacctgctgatgaccctgcggctgtggtccagc

SEQ ID NO: 34800 - DNA, 2724 bp, synthetic construct
  source 1..2724: mol_type = other DNA
atggccttaccagtgaccgccttgctcctgccgctggccttgctgctccacgccgccaggccggaagtgcaactggttgaatccggtggcggcctggtgcaagcaggcggatctctcagacttagctgtgccgcctccggcagaaccttcacaatgggatggtttaggcaggctccagggaaagagagagagttcgtcgccgccatctctctgtctcccacactggcctactacgccgactctgtgaaaggccggttcaccatctccagagataatgccaagaacaccgtggtgctgcaaatgaactctctgaaacccgaggatacagccctgtactattgtgccgctgaccggaagtccgtgatgagcatcagacccgattactggggacagggcacacaagtcacagtgtcctctggtaccggcggaggcggatctggcggcggaggtagcggtggcggaggatctgaattcgacttcgtgatgacacagagccctgatagcctggccgtgtctctcggcgagcgagtgaccatgagctgcaagtctagccagagcctgctgaacagcggcaaccagaagaactacctgacctggtatcagcagaagcccggccagcctcctaagctgctgatctactgggccagcaccagagaaagcggcgtgcccgatagattttctggctctggcagcggcaccgacttcaccctgacaatttctagcctgcaagccgaggacgtggccgtgtactactgccagaacgactacagctacccctacaccttcggccagggcaccaagctggaaatcaaactcgaggacctgaagaacgtgttcccacctgaggtggccgtgttcgagcctagcgaggccgagatcagccacacccagaaagccaccctcgtgtgcctggctaccggcttctaccccgaccatgtggaactgtcttggtgggtcaacggcaaagaggtgcacagcggcgtgtgtaccgacccccagccactgaaagaacagcccgccctgaacgacagccggtactgcctgagcagcagactgagagtgtccgccaccttctggcagaacccccggaaccacttcagatgccaggtgcagttctacggcctgagcgagaacgacgagtggacccaggacagagccaagcccgtgacccagatcgtgtctgccgaagcctggggcagagccgattgcggctttaccagcgagagctaccagcagggcgtgctgagcgccaccatcctgtacgagatcctgctgggcaaggccaccctgtacgccgtgctggtgtctgccctggtgctgatggctatggtcaagcggaaggacagccggggaagggccaagcgatctggatctggagcaacaaacttctcactactcaaacaagcaggtgacgtggaggagaatcccgggcctactagtaccatggactggatttggcgcatccttttccttgtcggcgctgctaccggcgcccattccgggccccaggtgcagctggttgaatctggcggaggactggttcagcctggcggatctctgagactgtcttgtgccgccagcggcaacatcaacagcagaaactgcatgggctggttcagacaggcccctggcaagggaagagaaggcgtggcagctatcggccaagtgaccggcagaacctactacgtggacagcgtgaagggcagattcaccatcagcctggacaacagcaagaacaccctgtacctccagatgaacagcctgagagccgaggacaccgccgtgtactattgtgctgctgcccctggctgtctgctgtctgcacttagaagcgccgactacagaaactggggccagggcacactggtcaccgtttcttctggatccggcggcggaggatctggcggaggcggatctgggggcggaggctctttcgaagaagtgcaactggttcagagcggagccgagctgaagaaacctggggccagcgtgaaggtgtcctgtaaagccagcggctacacctttaccgactactacatgaaatgggtccgacaggccccaggccagggactcgaatggatcggcgatattatccccagcaacggggccaccttctacaaccagaaattcaagggccgcgtgaccatcaccgtggacaagagcacaagcaccgcctacatggaactgagcagcctgagaagcgaggacaccgccgtgtattattgcgccagaagccatctgctgcgggccagttggttcgcctattggggacagggaaccctggtcaccgttagctctacgcgtatccagaaccctgatcctgccgtgtaccagctgcgggatagcaagagcagcgacaagagcgtgtgtctgttcaccgacttcgacagccagaccaacgtgtcccagagcaaggactccgacgtgtacatcaccgataagtgcgtgctggacatgcggagcatggacttcaagagcaactccgccgtggcctggtccaacaagtccgatttcgcctgcgccaacgccttcaacaacagcattatccccgaggacacattcttcccaagccccgagagcagctgcgacgtgaagctggtggaaaagagcttcgagacagacaccaacctgaacttccagaacctgagcgtgatcggcttcagaatcctgctgctgaaagtggccggctttaacctgctgatgaccctgcggctgtggtccagc

SEQ ID NO: 34801 - DNA, 2736 bp, synthetic construct
  source 1..2736: mol_type = other DNA
atggccttaccagtgaccgccttgctcctgccgctggccttgctgctccacgccgccaggccgcaggttcagctgcaagagtctggccctggcctggtcaagcctagccaaacactgagcctgacctgtaccgtgtctggcggctctatcaccaccggcgagttctactggaactggttcagacagcctcctggcaaaggactggaatggatgggagccattgccgccagcggcagcacaacatacagccctagcttcgagagccggaccagcatcagcagagacaccagcaagaatcagttcagcctgaagctgagcagcgtgacagccgccgatacagccgtgtattactgcggcagatcctttggagtggccgccgtgacaaccggccagaatagaggacagggcaccctggtcacagtgtctagcggtaccggcggaggcggatctggcggcggaggtagcggtggcggaggatctgaattcgacttcgtgatgacacagagccctgatagcctggccgtgtctctcggcgagcgagtgaccatgagctgcaagtctagccagagcctgctgaacagcggcaaccagaagaactacctgacctggtatcagcagaagcccggccagcctcctaagctgctgatctactgggccagcaccagagaaagcggcgtgcccgatagattttctggctctggcagcggcaccgacttcaccctgacaatttctagcctgcaagccgaggacgtggccgtgtactactgccagaacgactacagctacccctacaccttcggccagggcaccaagctggaaatcaaactcgaggacctgaagaacgtgttcccacctgaggtggccgtgttcgagcctagcgaggccgagatcagccacacccagaaagccaccctcgtgtgcctggctaccggcttctaccccgaccatgtggaactgtcttggtgggtcaacggcaaagaggtgcacagcggcgtgtgtaccgacccccagccactgaaagaacagcccgccctgaacgacagccggtactgcctgagcagcagactgagagtgtccgccaccttctggcagaacccccggaaccacttcagatgccaggtgcagttctacggcctgagcgagaacgacgagtggacccaggacagagccaagcccgtgacccagatcgtgtctgccgaagcctggggcagagccgattgcggctttaccagcgagagctaccagcagggcgtgctgagcgccaccatcctgtacgagatcctgctgggcaaggccaccctgtacgccgtgctggtgtctgccctggtgctgatggctatggtcaagcggaaggacagccggggaagggccaagcgatctggatctggagcaacaaacttctcactactcaaacaagcaggtgacgtggaggagaatcccgggcctactagtaccatggactggatttggcgcatccttttccttgtcggcgctgctaccggcgcccattccgggccccaggtgcagctggttgaatctggcggaggactggttcagcctggcggatctctgagactgtcttgtgccgccagcggcaacatcaacagcagaaactgcatgggctggttcagacaggcccctggcaagggaagagaaggcgtggcagctatcggccaagtgaccggcagaacctactacgtggacagcgtgaagggcagattcaccatcagcctggacaacagcaagaacaccctgtacctccagatgaacagcctgagagccgaggacaccgccgtgtactattgtgctgctgcccctggctgtctgctgtctgcacttagaagcgccgactacagaaactggggccagggcacactggtcaccgtttcttctggatccggcggcggaggatctggcggaggcggatctgggggcggaggctctttcgaagaagtgcaactggttcagagcggagccgagctgaagaaacctggggccagcgtgaaggtgtcctgtaaagccagcggctacacctttaccgactactacatgaaatgggtccgacaggccccaggccagggactcgaatggatcggcgatattatccccagcaacggggccaccttctacaaccagaaattcaagggccgcgtgaccatcaccgtggacaagagcacaagcaccgcctacatggaactgagcagcctgagaagcgaggacaccgccgtgtattattgcgccagaagccatctgctgcgggccagttggttcgcctattggggacagggaaccctggtcaccgttagctctacgcgtatccagaaccctgatcctgccgtgtaccagctgcgggatagcaagagcagcgacaagagcgtgtgtctgttcaccgacttcgacagccagaccaacgtgtcccagagcaaggactccgacgtgtacatcaccgataagtgcgtgctggacatgcggagcatggacttcaagagcaactccgccgtggcctggtccaacaagtccgatttcgcctgcgccaacgccttcaacaacagcattatccccgaggacacattcttcccaagccccgagagcagctgcgacgtgaagctggtggaaaagagcttcgagacagacaccaacctgaacttccagaacctgagcgtgatcggcttcagaatcctgctgctgaaagtggccggctttaacctgctgatgaccctgcggctgtggtccagc

SEQ ID NO: 34802 - DNA, 1479 bp, synthetic construct
  source 1..1479: mol_type = other DNA
atggccttaccagtgaccgccttgctcctgccgctggccttgctgctccacgccgccaggccggagatcgtgctgacacagtctcccgccacactgtcactgtctccaggcgaaagagccacactgagctgtagcgtgtccagcagcatcagcagcagcaacctgcactggtatcagcagaagcctggacaggcccctcggctgctgatctacgccacatctaatctggcctctggcatccccgccagattttctggctctggaagcggcaccgacttcaccctgaccataagcagcctggaacctgaggacttcgccgtgtactactgccagcagtggtccagctatccccacacatttggcggaggcaccaaggtggaaatcaagagaggcggaggcggaagtggaggcggaggatctggcggcggaggctctcaggttcagctggttcagagcggagccgaagtgaagaaacctggggcctctgtgaaggtgtcctgcaaggcttccggctacacctttaccaactacctgatcgagtgggtccgacaggctccaggacaaggactggaatggatgggcctgattaaccctggcagcggcggcaccaactacaacgagaagttcaagggcagagtgaccatgaccaccgacaccagcacaagcaccgcctacatggaactgcggagcctgagaagcgacgacaccgccgtgtattattgcgccagaagaagccctctcggctcttggatctactacgcctatgacggcgtggcctattggggccagggaacactggttacagtgtcctctacgcgtaaaattgaagttatgtatcctcctccttacctagacaatgagaagagcaatggaaccattatccatgtgaaagggaaacacctttgtccaagtcccctatttcccggaccttctaagcccttttgggtgctggtggtggttgggggagtcctggcttgctatagcttgctagtaacagtggcctttattattttctgggtgaggagtaagaggagcaggctcctgcacagtgactacatgaacatgactccacgccgccccggacccacccgcaagcattaccagccctatgccccaccacgcgacttcgcagcctatcgctccagagtgaagttcagcaggagcgcagacgcccccgcgtaccagcagggccagaaccagctctataacgagctcaatctaggacgaagagaggagtacgatgttttggacaagagacgtggccgggaccctgagatggggggaaagccgagaaggaagaaccctcaggaaggcctgtacaatgaactgcagaaagataagatggcggaggcctacagtgagattgggatgaaaggcgagcgccggaggggcaaggggcacgatggcctttaccagggtctcagtacagccaccaaggacacctacgacgcccttcacatgcaggccctgccccctcgc

SEQ ID NO: 34803 - DNA, 1497 bp, synthetic construct
  source 1..1497: mol_type = other DNA
atggccttaccagtgaccgccttgctcctgccgctggccttgctgctccacgccgccaggccggagatcgtgctgacacagtctcccgccacactgtcactgtctccaggcgaaagagccacactgagctgtagcgtgtccagcagcatcagcagcagcaacctgcactggtatcagcagaagcctggacaggcccctcggctgctgatctacgccacatctaatctggcctctggcatccccgccagattttctggctctggaagcggcaccgacttcaccctgaccataagcagcctggaacctgaggacttcgccgtgtactactgccagcagtggtccagctatccccacacatttggcggaggcaccaaggtggaaatcaagagaggcggaggcggaagtggaggcggaggatctggcggcggaggctctcaggttcagctggttcagagcggagccgaagtgaagaaacctggggcctctgtgaaggtgtcctgcaaggcttccggctacacctttaccaactacctgatcgagtgggtccgacaggctccaggacaaggactggaatggatgggcctgattaaccctggcagcggcggcaccaactacaacgagaagttcaagggcagagtgaccatgaccaccgacaccagcacaagcaccgcctacatggaactgcggagcctgagaagcgacgacaccgccgtgtattattgcgccagaagaagccctctcggctcttggatctactacgcctatgacggcgtggcctattggggccagggaacactggttacagtgtcctctacgcgtgcgaagcccaccacgacgccagcgccgcgaccaccaacaccggcgcccaccatcgcgtcgcagcccctgtccctgcgcccagaggcgtgccggccagcggcggggggcgcagtgcacacgagggggctggacttcgcctgtgacatctacatctgggcgcccttggccgggacttgtggggtccttctcctgtcactggttatcaccctttactgcaaacggggcagaaagaaactcctgtatatattcaaacaaccatttatgagaccagtacaaactactcaagaggaagatggctgtagctgccgatttccagaagaagaagaaggaggatgtgaactgagagtgaagttcagcaggagcgcagacgcccccgcgtaccagcagggccagaaccagctctataacgagctgaatctaggacgaagagaggagtacgatgttttggacaagagacgtggccgggaccctgagatggggggaaagccgagaaggaagaaccctcaggaaggcctgtacaatgaactgcagaaagataagatggcggaggcctacagtgagattgggatgaaaggcgagcgccggaggggcaaggggcacgatggcctttaccagggtctcagtacagccaccaaggacacctacgacgcccttcacatgcaggccctgccccctcgc

SEQ ID NO: 34804 - DNA, 1497 bp, synthetic construct
  source 1..1497: mol_type = other DNA
atggccttaccagtgaccgccttgctcctgccgctggccttgctgctccacgccgccaggccgcaggttcagctggttcagagcggagccgaagtgaagaaacctggggcctctgtgaaggtgtcctgcaaggcttccggctacacctttaccaactacctgatcgagtgggtccgacaggctccaggacaaggactggaatggatgggcctgattaaccctggcagcggcggcaccaactacaacgagaagttcaagggcagagtgaccatgaccaccgacaccagcacaagcaccgcctacatggaactgcggagcctgagaagcgacgacaccgccgtgtattattgcgccagaagaagccctctcggctcttggatctactacgcctatgacggcgtggcctattggggccagggaacactggttacagtgtcctctggcggaggcggaagtggaggcggaggatctggcggcggaggctctgagatcgtgctgacacagtctcccgccacactgtcactgtctccaggcgaaagagccacactgagctgtagcgtgtccagcagcatcagcagcagcaacctgcactggtatcagcagaagcctggacaggcccctcggctgctgatctacgccacatctaatctggcctctggcatccccgccagattttctggctctggaagcggcaccgacttcaccctgaccataagcagcctggaacctgaggacttcgccgtgtactactgccagcagtggtccagctatccccacacatttggcggaggcaccaaggtggaaatcaagagaacgcgtgcgaagcccaccacgacgccagcgccgcgaccaccaacaccggcgcccaccatcgcgtcgcagcccctgtccctgcgcccagaggcgtgccggccagcggcggggggcgcagtgcacacgagggggctggacttcgcctgtgacatctacatctgggcgcccttggccgggacttgtggggtccttctcctgtcactggttatcaccctttactgcaaacggggcagaaagaaactcctgtatatattcaaacaaccatttatgagaccagtacaaactactcaagaggaagatggctgtagctgccgatttccagaagaagaagaaggaggatgtgaactgagagtgaagttcagcaggagcgcagacgcccccgcgtaccagcagggccagaaccagctctataacgagctgaatctaggacgaagagaggagtacgatgttttggacaagagacgtggccgggaccctgagatggggggaaagccgagaaggaagaaccctcaggaaggcctgtacaatgaactgcagaaagataagatggcggaggcctacagtgagattgggatgaaaggcgagcgccggaggggcaaggggcacgatggcctttaccagggtctcagtacagccaccaaggacacctacgacgcccttcacatgcaggccctgccccctcgc

SEQ ID NO: 34805 - DNA, 1896 bp, synthetic construct
  source 1..1896: mol_type = other DNA
atggccttaccagtgaccgccttgctcctgccgctggccttgctgctccacgccgccaggccggagatcgtgctgacacagtctcccgccacactgtcactgtctccaggcgaaagagccacactgagctgtagcgtgtccagcagcatcagcagcagcaacctgcactggtatcagcagaagcctggacaggcccctcggctgctgatctacgccacatctaatctggcctctggcatccccgccagattttctggctctggaagcggcaccgacttcaccctgaccataagcagcctggaacctgaggacttcgccgtgtactactgccagcagtggtccagctatccccacacatttggcggaggcaccaaggtggaaatcaagagactcgagatccagaaccctgatcctgccgtgtaccagctgcgggatagcaagagcagcgacaagagcgtgtgtctgttcaccgacttcgacagccagaccaacgtgtcccagagcaaggactccgacgtgtacatcaccgataagtgcgtgctggacatgcggagcatggacttcaagagcaactccgccgtggcctggtccaacaagtccgatttcgcctgcgccaacgccttcaacaacagcattatccccgaggacacattcttcccaagcagcgacgtgccctgcgacgtgaagctggtggaaaagagcttcgagacagacaccaacctgaacttccagaacctgagcgtgatcggcttcagaatcctgctgctgaaagtggccggctttaacctgctgatgaccctgcggctgtggtccagccgcgccaagagaagcggatctggcgtgaagcagaccctgaatttcgacctgctgaagctggctggcgacgtggaatccaacccaggccctactagtatggactggatttggcgcatccttttccttgtcggcgctgctaccggcgcgcattccttcgaacaggttcagctggttcagagcggagccgaagtgaagaaacctggggcctctgtgaaggtgtcctgcaaggcttccggctacacctttaccaactacctgatcgagtgggtccgacaggctccaggacaaggactggaatggatgggcctgattaaccctggcagcggcggcaccaactacaacgagaagttcaagggcagagtgaccatgaccaccgacaccagcacaagcaccgcctacatggaactgcggagcctgagaagcgacgacaccgccgtgtattattgcgccagaagaagccctctcggctcttggatctactacgcctatgacggcgtggcctattggggccagggaacactggttacagtgtcctctacgcgtgaggacctgaagaacgtgttcccacctgaggtggccgtgttcgagcctagcaaggccgagatcgcccacacccagaaagccaccctcgtgtgcctggctaccggcttctaccccgaccatgtggaactgtcttggtgggtcaacggcaaagaggtgcacagcggcgtgtgtaccgacccccagccactgaaagaacagcccgccctgaacgacagccggtactgcctgagcagcagactgagagtgtccgccaccttctggcagaacccccggaaccacttcagatgccaggtgcagttctacggcctgagcgagaacgacgagtggacccaggacagagccaagcccgtgacccagatcgtgtctgccgaagcctggggcagagccgattgcggcatcaccagcgccagctaccaccagggcgtgctgagcgccaccatcctgtacgagatcctgctgggcaaggccaccctgtacgccgtgctggtgtctgccctggtgctgatggctatggtcaagcggaaggacagccgggga

SEQ ID NO: 34806 - DNA, 1884 bp, synthetic construct
  source 1..1884: mol_type = other DNA
atggccttaccagtgaccgccttgctcctgccgctggccttgctgctccacgccgccaggccggagatcgtgctgacacagtctcccgccacactgtcactgtctccaggcgaaagagccacactgagctgtagcgtgtccagcagcatcagcagcagcaacctgcactggtatcagcagaagcctggacaggcccctcggctgctgatctacgccacatctaatctggcctctggcatccccgccagattttctggctctggaagcggcaccgacttcaccctgaccataagcagcctggaacctgaggacttcgccgtgtactactgccagcagtggtccagctatccccacacatttggcggaggcaccaaggtggaaatcaagagactcgaggacctgaagaacgtgttcccacctgaggtggccgtgttcgagcctagcaaggccgagatcgcccacacccagaaagccaccctcgtgtgcctggctaccggcttctaccccgaccatgtggaactgtcttggtgggtcaacggcaaagaggtgcacagcggcgtgtgtaccgacccccagccactgaaagaacagcccgccctgaacgacagccggtactgcctgagcagcagactgagagtgtccgccaccttctggcagaacccccggaaccacttcagatgccaggtgcagttctacggcctgagcgagaacgacgagtggacccaggacagagccaagcccgtgacccagatcgtgtctgccgaagcctggggcagagccgattgcggcatcaccagcgccagctaccaccagggcgtgctgagcgccaccatcctgtacgagatcctgctgggcaaggccaccctgtacgccgtgctggtgtctgccctggtgctgatggctatggtcaagcggaaggacagccggggaagggccaagcgatctggatctggagcaacaaacttctcactactcaaacaagcaggtgacgtggaggagaatcccgggcctactagtatggactggatttggcgcatccttttccttgtcggcgctgctaccggcgcgcattccttcgaacaggttcagctggttcagagcggagccgaagtgaagaaacctggggcctctgtgaaggtgtcctgcaaggcttccggctacacctttaccaactacctgatcgagtgggtccgacaggctccaggacaaggactggaatggatgggcctgattaaccctggcagcggcggcaccaactacaacgagaagttcaagggcagagtgaccatgaccaccgacaccagcacaagcaccgcctacatggaactgcggagcctgagaagcgacgacaccgccgtgtattattgcgccagaagaagccctctcggctcttggatctactacgcctatgacggcgtggcctattggggccagggaacactggttacagtgtcctctacgcgtatccagaaccctgatcctgccgtgtaccagctgcgggatagcaagagcagcgacaagagcgtgtgtctgttcaccgacttcgacagccagaccaacgtgtcccagagcaaggactccgacgtgtacatcaccgataagtgcgtgctggacatgcggagcatggacttcaagagcaactccgccgtggcctggtccaacaagtccgatttcgcctgcgccaacgccttcaacaacagcattatccccgaggacacattcttcccaagcagcgacgtgccctgcgacgtgaagctggtggaaaagagcttcgagacagacaccaacctgaacttccagaacctgagcgtgatcggcttcagaatcctgctgctgaaagtggccggctttaacctgctgatgaccctgcggctgtggtccagc

SEQ ID NO: 34807 - DNA, 1884 bp, synthetic construct
  source 1..1884: mol_type = other DNA
atggccttaccagtgaccgccttgctcctgccgctggccttgctgctccacgccgccaggccggagatcgtgctgacacagtctcccgccacactgtcactgtctccaggcgaaagagccacactgagctgtagcgtgtccagcagcatcagcagcagcaacctgcactggtatcagcagaagcctggacaggcccctcggctgctgatctacgccacatctaatctggcctctggcatccccgccagattttctggctctggaagcggcaccgacttcaccctgaccataagcagcctggaacctgaggacttcgccgtgtactactgccagcagtggtccagctatccccacacatttggcggaggcaccaaggtggaaatcaagagactcgaggacctgaagaacgtgttcccacctgaggtggccgtgttcgagcctagcgaggccgagatcagccacacccagaaagccaccctcgtgtgcctggctaccggcttctaccccgaccatgtggaactgtcttggtgggtcaacggcaaagaggtgcacagcggcgtgtgtaccgacccccagccactgaaagaacagcccgccctgaacgacagccggtactgcctgagcagcagactgagagtgtccgccaccttctggcagaacccccggaaccacttcagatgccaggtgcagttctacggcctgagcgagaacgacgagtggacccaggacagagccaagcccgtgacccagatcgtgtctgccgaagcctggggcagagccgattgcggctttaccagcgagagctaccagcagggcgtgctgagcgccaccatcctgtacgagatcctgctgggcaaggccaccctgtacgccgtgctggtgtctgccctggtgctgatggctatggtcaagcggaaggacagccggggaagggccaagcgatctggatctggagcaacaaacttctcactactcaaacaagcaggtgacgtggaggagaatcccgggcctactagtatggactggatttggcgcatccttttccttgtcggcgctgctaccggcgcgcattccttcgaacaggttcagctggttcagagcggagccgaagtgaagaaacctggggcctctgtgaaggtgtcctgcaaggcttccggctacacctttaccaactacctgatcgagtgggtccgacaggctccaggacaaggactggaatggatgggcctgattaaccctggcagcggcggcaccaactacaacgagaagttcaagggcagagtgaccatgaccaccgacaccagcacaagcaccgcctacatggaactgcggagcctgagaagcgacgacaccgccgtgtattattgcgccagaagaagccctctcggctcttggatctactacgcctatgacggcgtggcctattggggccagggaacactggttacagtgtcctctacgcgtatccagaaccctgatcctgccgtgtaccagctgcgggatagcaagagcagcgacaagagcgtgtgtctgttcaccgacttcgacagccagaccaacgtgtcccagagcaaggactccgacgtgtacatcaccgataagtgcgtgctggacatgcggagcatggacttcaagagcaactccgccgtggcctggtccaacaagtccgatttcgcctgcgccaacgccttcaacaacagcattatccccgaggacacattcttcccaagccccgagagcagctgcgacgtgaagctggtggaaaagagcttcgagacagacaccaacctgaacttccagaacctgagcgtgatcggcttcagaatcctgctgctgaaagtggccggctttaacctgctgatgaccctgcggctgtggtccagc

SEQ ID NO: 34808 - DNA, 1896 bp, synthetic construct
  source 1..1896: mol_type = other DNA
atggccttaccagtgaccgccttgctcctgccgctggccttgctgctccacgccgccaggccggagatcgtgctgacacagtctcccgccacactgtcactgtctccaggcgaaagagccacactgagctgtagcgtgtccagcagcatcagcagcagcaacctgcactggtatcagcagaagcctggacaggcccctcggctgctgatctacgccacatctaatctggcctctggcatccccgccagattttctggctctggaagcggcaccgacttcaccctgaccataagcagcctggaacctgaggacttcgccgtgtactactgccagcagtggtccagctatccccacacatttggcggaggcaccaaggtggaaatcaagagactcgagatccagaaccctgatcctgccgtgtaccagctgcgggatagcaagagcagcgacaagagcgtgtgtctgttcaccgacttcgacagccagaccaacgtgtcccagagcaaggactccgacgtgtacatcaccgataagtgcgtgctggacatgcggagcatggacttcaagagcaactccgccgtggcctggtccaacaagtccgatttcgcctgcgccaacgccttcaacaacagcattatccccgaggacacattcttcccaagccccgagagcagctgcgacgtgaagctggtggaaaagagcttcgagacagacaccaacctgaacttccagaacctgagcgtgatcggcttcagaatcctgctgctgaaagtggccggctttaacctgctgatgaccctgcggctgtggtccagccgcgccaagagaagcggatctggcgtgaagcagaccctgaatttcgacctgctgaagctggctggcgacgtggaatccaacccaggccctactagtatggactggatttggcgcatccttttccttgtcggcgctgctaccggcgcgcattccttcgaacaggttcagctggttcagagcggagccgaagtgaagaaacctggggcctctgtgaaggtgtcctgcaaggcttccggctacacctttaccaactacctgatcgagtgggtccgacaggctccaggacaaggactggaatggatgggcctgattaaccctggcagcggcggcaccaactacaacgagaagttcaagggcagagtgaccatgaccaccgacaccagcacaagcaccgcctacatggaactgcggagcctgagaagcgacgacaccgccgtgtattattgcgccagaagaagccctctcggctcttggatctactacgcctatgacggcgtggcctattggggccagggaacactggttacagtgtcctctacgcgtgaggacctgaagaacgtgttcccacctgaggtggccgtgttcgagcctagcgaggccgagatcagccacacccagaaagccaccctcgtgtgcctggctaccggcttctaccccgaccatgtggaactgtcttggtgggtcaacggcaaagaggtgcacagcggcgtgtgtaccgacccccagccactgaaagaacagcccgccctgaacgacagccggtactgcctgagcagcagactgagagtgtccgccaccttctggcagaacccccggaaccacttcagatgccaggtgcagttctacggcctgagcgagaacgacgagtggacccaggacagagccaagcccgtgacccagatcgtgtctgccgaagcctggggcagagccgattgcggctttaccagcgagagctaccagcagggcgtgctgagcgccaccatcctgtacgagatcctgctgggcaaggccaccctgtacgccgtgctggtgtctgccctggtgctgatggctatggtcaagcggaaggacagccgggga

SEQ ID NO: 34809 - DNA, 1932 bp, synthetic construct
  source 1..1932: mol_type = other DNA
atggccttaccagtgaccgccttgctcctgccgctggccttgctgctccacgccgccaggccgctcgaggaggacctgaagaacgtgttcccacctgaggtggccgtgttcgagcctagcaaggccgagatcgcccacacccagaaagccaccctcgtgtgcctggctaccggcttctaccccgaccatgtggaactgtcttggtgggtcaacggcaaagaggtgcacagcggcgtgtgtaccgacccccagccactgaaagaacagcccgccctgaacgacagccggtactgcctgagcagcagactgagagtgtccgccaccttctggcagaacccccggaaccacttcagatgccaggtgcagttctacggcctgagcgagaacgacgagtggacccaggacagagccaagcccgtgacccagatcgtgtctgccgaagcctggggcagagccgattgcggcatcaccagcgccagctaccaccagggcgtgctgagcgccaccatcctgtacgagatcctgctgggcaaggccaccctgtacgccgtgctggtgtctgccctggtgctgatggctatggtcaagcggaaggacagccggggaagggccaagcgatctggatctggagcaacaaacttctcactactcaaacaagcaggtgacgtggaggagaatcccgggcctactagcatggccttaccagtgaccgccttgctcctgccgctggccttgctgctccacgccgccaggccggagatcgtgctgacacagtctcccgccacactgtcactgtctccaggcgaaagagccacactgagctgtagcgtgtccagcagcatcagcagcagcaacctgcactggtatcagcagaagcctggacaggcccctcggctgctgatctacgccacatctaatctggcctctggcatccccgccagattttctggctctggaagcggcaccgacttcaccctgaccataagcagcctggaacctgaggacttcgccgtgtactactgccagcagtggtccagctatccccacacatttggcggaggcaccaaggtggaaatcaagagaggcggaggcggaagtggaggcggaggatctggcggcggaggctctcaggttcagctggttcagagcggagccgaagtgaagaaacctggggcctctgtgaaggtgtcctgcaaggcttccggctacacctttaccaactacctgatcgagtgggtccgacaggctccaggacaaggactggaatggatgggcctgattaaccctggcagcggcggcaccaactacaacgagaagttcaagggcagagtgaccatgaccaccgacaccagcacaagcaccgcctacatggaactgcggagcctgagaagcgacgacaccgccgtgtattattgcgccagaagaagccctctcggctcttggatctactacgcctatgacggcgtggcctattggggccagggaacactggttacagtgtcctctacgcgtatccagaaccctgatcctgccgtgtaccagctgcgggatagcaagagcagcgacaagagcgtgtgtctgttcaccgacttcgacagccagaccaacgtgtcccagagcaaggactccgacgtgtacatcaccgataagtgcgtgctggacatgcggagcatggacttcaagagcaactccgccgtggcctggtccaacaagtccgatttcgcctgcgccaacgccttcaacaacagcattatccccgaggacacattcttcccaagcagcgacgtgccctgcgacgtgaagctggtggaaaagagcttcgagacagacaccaacctgaacttccagaacctgagcgtgatcggcttcagaatcctgctgctgaaagtggccggctttaacctgctgatgaccctgcggctgtggtccagc

SEQ ID NO: 34810 - DNA, 1953 bp, synthetic construct
  source 1..1953: mol_type = other DNA
atggccttaccagtgaccgccttgctcctgccgctggccttgctgctccacgccgccaggccgctcgagggctccggcgatcgccctgatcctgccgtgtaccagctgcgggatagcaagagcagcgacaagagcgtgtgtctgttcaccgacttcgacagccagaccaacgtgtcccagagcaaggactccgacgtgtacatcaccgataagtgcgtgctggacatgcggagcatggacttcaagagcaactccgccgtggcctggtccaacaagtccgatttcgcctgcgccaacgccttcaacaacagcattatccccgaggacacattcttcccaagccccgagagcagctgcgacgtgaagctggtggaaaagagcttcgagacagacaccaacctgaacttccagaacctgagcgtgatcggcttcagaatcctgctgctgaaagtggccggctttaacctgctgatgaccctgcggctgtggtccagctctagtcgcgccaagagaagcggatctggcgtgaagcagaccctgaatttcgacctgctgaagctggctggcgacgtggaatccaacccaggccccactagcatggccttaccagtgaccgccttgctcctgccgctggccttgctgctccacgccgccaggccggagatcgtgctgacacagtctcccgccacactgtcactgtctccaggcgaaagagccacactgagctgtagcgtgtccagcagcatcagcagcagcaacctgcactggtatcagcagaagcctggacaggcccctcggctgctgatctacgccacatctaatctggcctctggcatccccgccagattttctggctctggaagcggcaccgacttcaccctgaccataagcagcctggaacctgaggacttcgccgtgtactactgccagcagtggtccagctatccccacacatttggcggaggcaccaaggtggaaatcaagagaggcggaggcggaagtggaggcggaggatctggcggcggaggctctcaggttcagctggttcagagcggagccgaagtgaagaaacctggggcctctgtgaaggtgtcctgcaaggcttccggctacacctttaccaactacctgatcgagtgggtccgacaggctccaggacaaggactggaatggatgggcctgattaaccctggcagcggcggcaccaactacaacgagaagttcaagggcagagtgaccatgaccaccgacaccagcacaagcaccgcctacatggaactgcggagcctgagaagcgacgacaccgccgtgtattattgcgccagaagaagccctctcggctcttggatctactacgcctatgacggcgtggcctattggggccagggaacactggttacagtgtcctctacgcgtgaggacctgaagaacgtgttcccacctgaggtggccgtgttcgagcctagcgaggccgagatcagccacacccagaaagccaccctcgtgtgcctggctaccggcttctaccccgaccatgtggaactgtcttggtgggtcaacggcaaagaggtgcacagcggcgtgtgtaccgacccccagccactgaaagaacagcccgccctgaacgacagccggtactgcctgagcagcagactgagagtgtccgccaccttctggcagaacccccggaaccacttcagatgccaggtgcagttctacggcctgagcgagaacgacgagtggacccaggacagagccaagcccgtgacccagatcgtgtctgccgaagcctggggcagagccgattgcggctttaccagcgagagctaccagcagggcgtgctgagcgccaccatcctgtacgagatcctgctgggcaaggccaccctgtacgccgtgctggtgtctgccctggtgctgatggctatggtcaagcggaaggacagccgggga

SEQ ID NO: 34811 - DNA, 1884 bp, synthetic construct
  source 1..1884: mol_type = other DNA
atggccttaccagtgaccgccttgctcctgccgctggccttgctgctccacgccgccaggccggagatcgtgctgacacagtctcccgccacactgtcactgtctccaggcgaaagagccacactgagctgtagcgtgtccagcagcatcagcagcagcaacctgcactggtatcagcagaagcctggacaggcccctcggctgctgatctacgccacatctaatctggcctctggcatccccgccagattttctggctctggaagcggcaccgacttcaccctgaccataagcagcctggaacctgaggacttcgccgtgtactactgccagcagtggtccagctatccccacacatttggcggaggcaccaaggtggaaatcaagagactcgaggacctgaagaacgtgttcccacctgaggtggccgtgttcgagcctagcgaggccgagatcagccacacccagaaagccaccctcgtgtgcctggctaccggcttctaccccgaccatgtggaactgtcttggtgggtcaacggcaaagaggtgcacagcggcgtgtctaccgacccccagccactgaaagaacagcccgccctgaacgacagccggtactgcctgagcagcagactgagagtgtccgccaccttctggcagaacccccggaaccacttcagatgccaggtgcagttctacggcctgagcgagaacgacgagtggacccaggacagagccaagcccgtgacccagatcgtgtctgccgaagcctggggcagagccgattgcggctttaccagcgagagctaccagcagggcgtgctgagcgccaccatcctgtacgagatcctgctgggcaaggccaccctgtacgccgtgctggtgtctgccctggtgctgatggctatggtcaagcggaaggacagccggggaagggccaagcgatctggatctggagcaacaaacttctcactactcaaacaagcaggtgacgtggaggagaatcccgggcctactagtatggactggatttggcgcatccttttccttgtcggcgctgctaccggcgcgcattccttcgaacaggttcagctggttcagagcggagccgaagtgaagaaacctggggcctctgtgaaggtgtcctgcaaggcttccggctacacctttaccaactacctgatcgagtgggtccgacaggctccaggacaaggactggaatggatgggcctgattaaccctggcagcggcggcaccaactacaacgagaagttcaagggcagagtgaccatgaccaccgacaccagcacaagcaccgcctacatggaactgcggagcctgagaagcgacgacaccgccgtgtattattgcgccagaagaagccctctcggctcttggatctactacgcctatgacggcgtggcctattggggccagggaacactggttacagtgtcctctacgcgtatccagaaccctgatcctgccgtgtaccagctgcgggatagcaagagcagcgacaagagcgtgtgtctgttcaccgacttcgacagccagaccaacgtgtcccagagcaaggactccgacgtgtacatcaccgataagaccgtgctggacatgcggagcatggacttcaagagcaactccgccgtggcctggtccaacaagtccgatttcgcctgcgccaacgccttcaacaacagcattatccccgaggacacattcttcccaagccccgagagcagctgcgacgtgaagctggtggaaaagagcttcgagacagacaccaacctgaacttccagaacctgagcgtgatcggcttcagaatcctgctgctgaaagtggccggctttaacctgctgatgaccctgcggctgtggtccagc

SEQ ID NO: 34812 - DNA, 1908 bp, synthetic construct
  source 1..1908: mol_type = other DNA
atggccttaccagtgaccgccttgctcctgccgctggccttgctgctccacgccgccaggccggagatcgtgctgacacagtctcccgccacactgtcactgtctccaggcgaaagagccacactgagctgtagcgtgtccagcagcatcagcagcagcaacctgcactggtatcagcagaagcctggacaggcccctcggctgctgatctacgccacatctaatctggcctctggcatccccgccagattttctggctctggaagcggcaccgacttcaccctgaccataagcagcctggaacctgaggacttcgccgtgtactactgccagcagtggtccagctatccccacacatttggcggaggcaccaaggtggaaatcaagagactcgaggacaagcagctggacgccgacgtgtcccccaagcctaccatcttcctgccctctatcgccgagacaaagctccagaaggccggcacctacctgtgcctgctggaaaagttcttcccagatgtgattaagatccactggcaggaaaagaagtccaacaccatcctgggcagccaggaaggcaacaccatgaagaccaacgacacctacatgaagttcagctggctgaccgtgcccgagaagtccctggacaaagaacacagatgcatcgtgcggcacgaaaacaacaagaacggcgtggaccaggaaatcatcttcccacccatcaagaccgatgtgattacaatggaccccaaggacaactgctccaaggacgccaacgataccctgctgctccagctgaccaacaccagcgcctactacatgtacttgttgctgctgctgaagtccgtggtgtacttcgccatcatcacatgctgcctgctgcggagaaccgccttctgctgcaacggcgagaagtctagggccaagcgatctggatctggagcaacaaacttctcactactcaaacaagcaggtgacgtggaggagaatcccgggcctactagtatggactggatttggcgcatccttttccttgtcggcgctgctaccggcgcgcattccttcgaacaggttcagctggttcagagcggagccgaagtgaagaaacctggggcctctgtgaaggtgtcctgcaaggcttccggctacacctttaccaactacctgatcgagtgggtccgacaggctccaggacaaggactggaatggatgggcctgattaaccctggcagcggcggcaccaactacaacgagaagttcaagggcagagtgaccatgaccaccgacaccagcacaagcaccgcctacatggaactgcggagcctgagaagcgacgacaccgccgtgtattattgcgccagaagaagccctctcggctcttggatctactacgcctatgacggcgtggcctattggggccagggaacactggttacagtgtcctctacgcgtagccagcctcacaccaagcccagcgtgttcgtgatgaagaacggcaccaacgtggcctgcctcgtgaaagagttctaccccaaggacatcaggatcaacctggtgtccagcaagaagatcaccgagttcgaccccgccatcgtgatctcccccagcggcaagtacaacgccgtgaagctggggaagtacgaggacagcaacagcgtgacctgctccgtgcagcacgacaacaagaccgtgcacagcaccgactttgaagtgaaaaccgactccaccgaccacgtgaagcccaaagagacagagaacaccaagcagcccagcaagagctgccacaagcccaaggccatcgtgcacaccgagaaagtgaacatgatgagcctgaccgtgctgggcctgcggatgctgttcgccaaaaccgtggccgtgaacttcctgctgaccgccaagctgttcttcctc

SEQ ID NO: 34813 - DNA, 1908 bp, synthetic construct
  source 1..1908: mol_type = other DNA
atggccttaccagtgaccgccttgctcctgccgctggccttgctgctccacgccgccaggccggagatcgtgctgacacagtctcccgccacactgtcactgtctccaggcgaaagagccacactgagctgtagcgtgtccagcagcatcagcagcagcaacctgcactggtatcagcagaagcctggacaggcccctcggctgctgatctacgccacatctaatctggcctctggcatccccgccagattttctggctctggaagcggcaccgacttcaccctgaccataagcagcctggaacctgaggacttcgccgtgtactactgccagcagtggtccagctatccccacacatttggcggaggcaccaaggtggaaatcaagagactcgagagccagcctcacaccaagcccagcgtgttcgtgatgaagaacggcaccaacgtggcctgcctcgtgaaagagttctaccccaaggacatcaggatcaacctggtgtccagcaagaagatcaccgagttcgaccccgccatcgtgatctcccccagcggcaagtacaacgccgtgaagctggggaagtacgaggacagcaacagcgtgacctgctccgtgcagcacgacaacaagaccgtgcacagcaccgactttgaagtgaaaaccgactccaccgaccacgtgaagcccaaagagacagagaacaccaagcagcccagcaagagctgccacaagcccaaggccatcgtgcacaccgagaaagtgaacatgatgagcctgaccgtgctgggcctgcggatgctgttcgccaaaaccgtggccgtgaacttcctgctgaccgccaagctgttcttcctcagggccaagcgatctggatctggagcaacaaacttctcactactcaaacaagcaggtgacgtggaggagaatcccgggcctactagtatggactggatttggcgcatccttttccttgtcggcgctgctaccggcgcgcattccttcgaacaggttcagctggttcagagcggagccgaagtgaagaaacctggggcctctgtgaaggtgtcctgcaaggcttccggctacacctttaccaactacctgatcgagtgggtccgacaggctccaggacaaggactggaatggatgggcctgattaaccctggcagcggcggcaccaactacaacgagaagttcaagggcagagtgaccatgaccaccgacaccagcacaagcaccgcctacatggaactgcggagcctgagaagcgacgacaccgccgtgtattattgcgccagaagaagccctctcggctcttggatctactacgcctatgacggcgtggcctattggggccagggaacactggttacagtgtcctctacgcgtgacaagcagctggacgccgacgtgtcccccaagcctaccatcttcctgccctctatcgccgagacaaagctccagaaggccggcacctacctgtgcctgctggaaaagttcttcccagatgtgattaagatccactggcaggaaaagaagtccaacaccatcctgggcagccaggaaggcaacaccatgaagaccaacgacacctacatgaagttcagctggctgaccgtgcccgagaagtccctggacaaagaacacagatgcatcgtgcggcacgaaaacaacaagaacggcgtggaccaggaaatcatcttcccacccatcaagaccgatgtgattacaatggaccccaaggacaactgctccaaggacgccaacgataccctgctgctccagctgaccaacaccagcgcctactacatgtacttgttgctgctgctgaagtccgtggtgtacttcgccatcatcacatgctgcctgctgcggagaaccgccttctgctgcaacggcgagaagtct

SEQ ID NO: 34814 - DNA, 1953 bp, synthetic construct
  source 1..1953: mol_type = other DNA
atggccttaccagtgaccgccttgctcctgccgctggccttgctgctccacgccgccaggccgctcgaggacaagcagctggacgccgacgtgtcccccaagcctaccatcttcctgccctctatcgccgagacaaagctccagaaggccggcacctacctgtgcctgctggaaaagttcttcccagatgtgattaagatccactggcaggaaaagaagtccaacaccatcctgggcagccaggaaggcaacaccatgaagaccaacgacacctacatgaagttcagctggctgaccgtgcccgagaagtccctggacaaagaacacagatgcatcgtgcggcacgaaaacaacaagaacggcgtggaccaggaaatcatcttcccacccatcaagaccgatgtgattacaatggaccccaaggacaactgctccaaggacgccaacgataccctgctgctccagctgaccaacaccagcgcctactacatgtacttgttgctgctgctgaagtccgtggtgtacttcgccatcatcacatgctgcctgctgcggagaaccgccttctgctgcaacggcgagaagtctagggccaagcgatctggatctggagcaacaaacttctcactactcaaacaagcaggtgacgtggaggagaatcccgggcctactagcatggccttaccagtgaccgccttgctcctgccgctggccttgctgctccacgccgccaggccggagatcgtgctgacacagtctcccgccacactgtcactgtctccaggcgaaagagccacactgagctgtagcgtgtccagcagcatcagcagcagcaacctgcactggtatcagcagaagcctggacaggcccctcggctgctgatctacgccacatctaatctggcctctggcatccccgccagattttctggctctggaagcggcaccgacttcaccctgaccataagcagcctggaacctgaggacttcgccgtgtactactgccagcagtggtccagctatccccacacatttggcggaggcaccaaggtggaaatcaagagaggcggaggcggaagtggaggcggaggatctggcggcggaggctctcaggttcagctggttcagagcggagccgaagtgaagaaacctggggcctctgtgaaggtgtcctgcaaggcttccggctacacctttaccaactacctgatcgagtgggtccgacaggctccaggacaaggactggaatggatgggcctgattaaccctggcagcggcggcaccaactacaacgagaagttcaagggcagagtgaccatgaccaccgacaccagcacaagcaccgcctacatggaactgcggagcctgagaagcgacgacaccgccgtgtattattgcgccagaagaagccctctcggctcttggatctactacgcctatgacggcgtggcctattggggccagggaacactggttacagtgtcctctacgcgtagccagcctcacaccaagcccagcgtgttcgtgatgaagaacggcaccaacgtggcctgcctcgtgaaagagttctaccccaaggacatcaggatcaacctggtgtccagcaagaagatcaccgagttcgaccccgccatcgtgatctcccccagcggcaagtacaacgccgtgaagctggggaagtacgaggacagcaacagcgtgacctgctccgtgcagcacgacaacaagaccgtgcacagcaccgactttgaagtgaaaaccgactccaccgaccacgtgaagcccaaagagacagagaacaccaagcagcccagcaagagctgccacaagcccaaggccatcgtgcacaccgagaaagtgaacatgatgagcctgaccgtgctgggcctgcggatgctgttcgccaaaaccgtggccgtgaacttcctgctgaccgccaagctgttcttcctc

SEQ ID NO: 34815 - DNA, 2415 bp, synthetic construct
  source 1..2415: mol_type = other DNA
atggccttaccagtgaccgccttgctcctgccgctggccttgctgctccacgccgccaggccggagatcgtgctgacacagtctcccgccacactgtcactgtctccaggcgaaagagccacactgagctgtagcgtgtccagcagcatcagcagcagcaacctgcactggtatcagcagaagcctggacaggcccctcggctgctgatctacgccacatctaatctggcctctggcatccccgccagattttctggctctggaagcggcaccgacttcaccctgaccataagcagcctggaacctgaggacttcgccgtgtactactgccagcagtggtccagctatccccacacatttggcggaggcaccaaggtggaaatcaagagaggacagcctaaggccaatcctaccgtgacactgttccctccaagcagcgaagaactccaggccaacaaggccacacttgtgtgcctgatctccgacttctaccctggggctgtgacagtggcttggaaggccgatggatctcctgtgaaagccggcgtggaaaccaccaagccatccaagcagagcaacaacaaatacgccgccagctcctacctgagcctgacacctgagcagtggaagtcccacagatcctacagctgccaagtgacccacgaaggcagcaccgtggaaaagacagtggcccctacagagtgcagcggatcccagagcttcggcctgctggaccccaagctgtgctacctgctggatggcatcctgttcatctacggcgtgatcctgaccgccctgttcctgagagtgaagttcagcagaagcgccgacgcccctgcctaccagcagggacagaaccaactgtacaacgagctgaacctgggcagacgggaagagtacgacgtgctggacaagcggagaggcagggaccctgagatgggcggaaagccccagcggagaaagaacccccaggaaggactgtataacgaactccagaaagacaagatggccgaagcctacagcgagatcggcatgaagggcgagcggagaagaggcaagggccacgatggcctgtaccagggcctgagcaccgccaccaaggacacctatgacgccctgcacatgcaggccctgcctccaagaagggccaagcgatctggatctggagcaacaaacttctcactactcaaacaagcaggtgacgtggaggagaatcccgggcctactagtatggactggatttggcgcatccttttccttgtcggcgctgctaccggcgcgcattccttcgaacaggttcagctggttcagagcggagccgaagtgaagaaacctggggcctctgtgaaggtgtcctgcaaggcttccggctacacctttaccaactacctgatcgagtgggtccgacaggctccaggacaaggactggaatggatgggcctgattaaccctggcagcggcggcaccaactacaacgagaagttcaagggcagagtgaccatgaccaccgacaccagcacaagcaccgcctacatggaactgcggagcctgagaagcgacgacaccgccgtgtattattgcgccagaagaagccctctcggctcttggatctactacgcctatgacggcgtggcctattggggccagggaacactggttacagtgtcctctgcctctacaaagggaccctccgtgtttcctctggctcccagcagcaagtctacaagcggaggaacagccgctctgggctgcctggtcaaggattactttcccgagcctgtgaccgtgtcctggaatagcggagcactgacaagcggcgtgcacacctttccagccgtgctgcaaagcagcggcctgtactctctgagcagcgtggtcacagtgcctagctctagcctgggcacccagacctacatctgcaatgtgaaccacaagcctagcaacaccaaggtggacaagagagtggaacccaagagctgtggtacccagagttttgggttgttggaccctaaattgtgctatctgttggacggaatcctgttcatttacggagtgatcctgaccgcattgttcctgcgggttaagttttccagatccgcagacgcacccgcttaccaacaagggcagaaccaactctacaatgaacttaatttggggcggagggaagagtacgacgttctggacaaaaggaggggacgagatcccgagatgggcggaaagcctcagcgaaggaagaatccgcaagaggggctttataacgaactccagaaagataaaatggcagaagcctatagtgagattgggatgaagggagaaaggaggaggggtaaaggtcacgatgggttgtaccaaggattgagcacagccactaaagatacctatgatgcgctccacatgcaggccctgccgccaaga

SEQ ID NO: 34816 - DNA, 2472 bp, synthetic construct
  source 1..2472: mol_type = other DNA
atggccttaccagtgaccgccttgctcctgccgctggccttgctgctccacgccgccaggccggagatcgtgctgacacagtctcccgccacactgtcactgtctccaggcgaaagagccacactgagctgtagcgtgtccagcagcatcagcagcagcaacctgcactggtatcagcagaagcctggacaggcccctcggctgctgatctacgccacatctaatctggcctctggcatccccgccagattttctggctctggaagcggcaccgacttcaccctgaccataagcagcctggaacctgaggacttcgccgtgtactactgccagcagtggtccagctatccccacacatttggcggaggcaccaaggtggaaatcaagagactcgaggacctgaagaacgtgttcccacctgaggtggccgtgttcgagcctagcgaggccgagatcagccacacccagaaagccaccctcgtgtgcctggctaccggcttctaccccgaccatgtggaactgtcttggtgggtcaacggcaaagaggtgcacagcggcgtgtctaccgacccccagccactgaaagaacagcccgccctgaacgacagccggtactgcctgagcagcagactgagagtgtccgccaccttctggcagaacccccggaaccacttcagatgccaggtgcagttctacggcctgagcgagaacgacgagtggacccaggacagagccaagcccgtgacccagatcgtgtctgccgaagcctggggcagagccgattgcggatcccagagcttcggcctgctggaccccaagctgtgctacctgctggatggcatcctgttcatctacggcgtgatcctgaccgccctgttcctgagagtgaagttcagcagaagcgccgacgcccctgcctaccagcagggacagaaccaactgtacaacgagctgaacctgggcagacgggaagagtacgacgtgctggacaagcggagaggcagggaccctgagatgggcggaaagccccagcggagaaagaacccccaggaaggactgtataacgaactccagaaagacaagatggccgaagcctacagcgagatcggcatgaagggcgagcggagaagaggcaagggccacgatggcctgtaccagggcctgagcaccgccaccaaggacacctatgacgccctgcacatgcaggccctgcctccaagaagggccaagcgatctggatctggagcaacaaacttctcactactcaaacaagcaggtgacgtggaggagaatcccgggcctactagtatggactggatttggcgcatccttttccttgtcggcgctgctaccggcgcgcattccttcgaacaggttcagctggttcagagcggagccgaagtgaagaaacctggggcctctgtgaaggtgtcctgcaaggcttccggctacacctttaccaactacctgatcgagtgggtccgacaggctccaggacaaggactggaatggatgggcctgattaaccctggcagcggcggcaccaactacaacgagaagttcaagggcagagtgaccatgaccaccgacaccagcacaagcaccgcctacatggaactgcggagcctgagaagcgacgacaccgccgtgtattattgcgccagaagaagccctctcggctcttggatctactacgcctatgacggcgtggcctattggggccagggaacactggttacagtgtcctctacgcgtatccagaaccctgatcctgccgtgtaccagctgcgggatagcaagagcagcgacaagagcgtgtgtctgttcaccgacttcgacagccagaccaacgtgtcccagagcaaggactccgacgtgtacatcaccgataagaccgtgctggacatgcggagcatggacttcaagagcaactccgccgtggcctggtccaacaagtccgatttcgcctgcgccaacgccttcaacaacagcattatccccgaggacacattcttcccaagccccgagagcagctgcggtacccagagttttgggttgttggaccctaaattgtgctatctgttggacggaatcctgttcatttacggagtgatcctgaccgcattgttcctgcgggttaagttttccagatccgcagacgcacccgcttaccaacaagggcagaaccaactctacaatgaacttaatttggggcggagggaagagtacgacgttctggacaaaaggaggggacgagatcccgagatgggcggaaagcctcagcgaaggaagaatccgcaagaggggctttataacgaactccagaaagataaaatggcagaagcctatagtgagattgggatgaagggagaaaggaggaggggtaaaggtcacgatgggttgtaccaaggattgagcacagccactaaagatacctatgatgcgctccacatgcaggccctgccgccaaga

SEQ ID NO: 34817 - DNA, 2598 bp, synthetic construct
  source 1..2598: mol_type = other DNA
atggccttaccagtgaccgccttgctcctgccgctggccttgctgctccacgccgccaggccggagatcgtgctgacacagtctcccgccacactgtcactgtctccaggcgaaagagccacactgagctgtagcgtgtccagcagcatcagcagcagcaacctgcactggtatcagcagaagcctggacaggcccctcggctgctgatctacgccacatctaatctggcctctggcatccccgccagattttctggctctggaagcggcaccgacttcaccctgaccataagcagcctggaacctgaggacttcgccgtgtactactgccagcagtggtccagctatccccacacatttggcggaggcaccaaggtggaaatcaagagactcgaggaggacctgaagaacgtgttcccacctgaggtggccgtgttcgagcctagcgaggccgagatcagccacacccagaaagccaccctcgtgtgcctggctaccggcttctaccccgaccatgtggaactgtcttggtgggtcaacggcaaagaggtgcacagcggcgtgtctaccgacccccagccactgaaagaacagcccgccctgaacgacagccggtactgcctgagcagcagactgagagtgtccgccaccttctggcagaacccccggaaccacttcagatgccaggtgcagttctacggcctgagcgagaacgacgagtggacccaggacagagccaagcccgtgacccagatcgtgtctgccgaagcctggggcagagccgattgcggatcccagagcttcggcctgctggaccccaagctgtgctacctgctggatggcatcctgttcatctacggcgtgatcctgaccgccctgttcctgagagtgaagttcagcagaagcgccgacgcccctgcctaccagcagggacagaaccaactgtacaacgagctgaacctgggcagacgggaagagtacgacgtgctggacaagcggagaggcagggaccctgagatgggcggaaagccccagcggagaaagaacccccaggaaggactgtataacgaactccagaaagacaagatggccgaagcctacagcgagatcggcatgaagggcgagcggagaagaggcaagggccacgatggcctgtaccagggcctgagcaccgccaccaaggacacctatgacgccctgcacatgcaggccctgcctccaagaagggccaagcgatctggatctggagcaacaaacttctcactactcaaacaagcaggtgacgtggaggagaatcccgggcctactagtatggactggatttggcgcatccttttccttgtcggcgctgctaccggcgcgcattccttcgaacaggttcagctggttcagagcggagccgaagtgaagaaacctggggcctctgtgaaggtgtcctgcaaggcttccggctacacctttaccaactacctgatcgagtgggtccgacaggctccaggacaaggactggaatggatgggcctgattaaccctggcagcggcggcaccaactacaacgagaagttcaagggcagagtgaccatgaccaccgacaccagcacaagcaccgcctacatggaactgcggagcctgagaagcgacgacaccgccgtgtattattgcgccagaagaagccctctcggctcttggatctactacgcctatgacggcgtggcctattggggccagggaacactggttacagtgtcctctacgcgtatccagaaccctgatcctgccgtgtaccagctgcgggatagcaagagcagcgacaagagcgtgtgtctgttcaccgacttcgacagccagaccaacgtgtcccagagcaaggactccgacgtgtacatcaccgataagaccgtgctggacatgcggagcatggacttcaagagcaactccgccgtggcctggtccaacaagtccgatttcgcctgcgccaacgccttcaacaacagcattatccccgaggacacattcttcccaagccccgagagcagctgcggtacccagagttttgggttgttggaccctaaattgtgctatctgttggacggaatcctgttcatttacggagtgatcctgaccgcattgttcctgaggagcaagcggtcacggctgctccacagcgattacatgaatatgacaccacgaagaccgggtcctactcgcaaacactaccaaccctacgcacctccccgcgactttgcagcgtaccgatctcgggttaagttttccagatccgcagacgcacccgcttaccaacaagggcagaaccaactctacaatgaacttaatttggggcggagggaagagtacgacgttctggacaaaaggaggggacgagatcccgagatgggcggaaagcctcagcgaaggaagaatccgcaagaggggctttataacgaactccagaaagataaaatggcagaagcctatagtgagattgggatgaagggagaaaggaggaggggtaaaggtcacgatgggttgtaccaaggattgagcacagccactaaagatacctatgatgcgctccacatgcaggccctgccgccaaga

SEQ ID NO: 34818 - DNA, 2727 bp, synthetic construct
  source 1..2727: mol_type = other DNA
atggccttaccagtgaccgccttgctcctgccgctggccttgctgctccacgccgccaggccggagatcgtgctgacacagtctcccgccacactgtcactgtctccaggcgaaagagccacactgagctgtagcgtgtccagcagcatcagcagcagcaacctgcactggtatcagcagaagcctggacaggcccctcggctgctgatctacgccacatctaatctggcctctggcatccccgccagattttctggctctggaagcggcaccgacttcaccctgaccataagcagcctggaacctgaggacttcgccgtgtactactgccagcagtggtccagctatccccacacatttggcggaggcaccaaggtggaaatcaagagactcgaggaggacctgaagaacgtgttcccacctgaggtggccgtgttcgagcctagcgaggccgagatcagccacacccagaaagccaccctcgtgtgcctggctaccggcttctaccccgaccatgtggaactgtcttggtgggtcaacggcaaagaggtgcacagcggcgtgtctaccgacccccagccactgaaagaacagcccgccctgaacgacagccggtactgcctgagcagcagactgagagtgtccgccaccttctggcagaacccccggaaccacttcagatgccaggtgcagttctacggcctgagcgagaacgacgagtggacccaggacagagccaagcccgtgacccagatcgtgtctgccgaagcctggggcagagccgattgcggatcccagagcttcggcctgctggaccccaagctgtgctacctgctggatggcatcctgttcatctacggcgtgatcctgaccgccctgttcctgaaacggggcagaaagaaactcctgtatatattcaaacaaccatttatgagaccagtacaaactactcaagaggaagatggctgtagctgccgatttccagaagaagaagaaggaggatgtgaactgagagtgaagttcagcagaagcgccgacgcccctgcctaccagcagggacagaaccaactgtacaacgagctgaacctgggcagacgggaagagtacgacgtgctggacaagcggagaggcagggaccctgagatgggcggaaagccccagcggagaaagaacccccaggaaggactgtataacgaactccagaaagacaagatggccgaagcctacagcgagatcggcatgaagggcgagcggagaagaggcaagggccacgatggcctgtaccagggcctgagcaccgccaccaaggacacctatgacgccctgcacatgcaggccctgcctccaagaagggccaagcgatctggatctggagcaacaaacttctcactactcaaacaagcaggtgacgtggaggagaatcccgggcctactagtatggactggatttggcgcatccttttccttgtcggcgctgctaccggcgcgcattccttcgaacaggttcagctggttcagagcggagccgaagtgaagaaacctggggcctctgtgaaggtgtcctgcaaggcttccggctacacctttaccaactacctgatcgagtgggtccgacaggctccaggacaaggactggaatggatgggcctgattaaccctggcagcggcggcaccaactacaacgagaagttcaagggcagagtgaccatgaccaccgacaccagcacaagcaccgcctacatggaactgcggagcctgagaagcgacgacaccgccgtgtattattgcgccagaagaagccctctcggctcttggatctactacgcctatgacggcgtggcctattggggccagggaacactggttacagtgtcctctacgcgtatccagaaccctgatcctgccgtgtaccagctgcgggatagcaagagcagcgacaagagcgtgtgtctgttcaccgacttcgacagccagaccaacgtgtcccagagcaaggactccgacgtgtacatcaccgataagaccgtgctggacatgcggagcatggacttcaagagcaactccgccgtggcctggtccaacaagtccgatttcgcctgcgccaacgccttcaacaacagcattatccccgaggacacattcttcccaagccccgagagcagctgcggtacccagagttttgggttgttggaccctaaattgtgctatctgttggacggaatcctgttcatttacggagtgatcctgaccgcattgttcctgaagagaggccggaagaagctgctgtacatcttcaagcagcctttcatgcggcccgtgcagaccacccaggaagaggacggctgctcctgccggttccccgaggaagaagaaggcggctgcgagctgcgggttaagttttccagatccgcagacgcacccgcttaccaacaagggcagaaccaactctacaatgaacttaatttggggcggagggaagagtacgacgttctggacaaaaggaggggacgagatcccgagatgggcggaaagcctcagcgaaggaagaatccgcaagaggggctttataacgaactccagaaagataaaatggcagaagcctatagtgagattgggatgaagggagaaaggaggaggggtaaaggtcacgatgggttgtaccaaggattgagcacagccactaaagatacctatgatgcgctccacatgcaggccctgccgccaaga

SEQ ID NO: 34819 - DNA, 1788 bp, synthetic construct
  source 1..1788: mol_type = other DNA
atggccttaccagtgaccgccttgctcctgccgctggccttgctgctccacgccgccaggccggagatcgtgctgacacagtctcccgccacactgtcactgtctccaggcgaaagagccacactgagctgtagcgtgtccagcagcatcagcagcagcaacctgcactggtatcagcagaagcctggacaggcccctcggctgctgatctacgccacatctaatctggcctctggcatccccgccagattttctggctctggaagcggcaccgacttcaccctgaccataagcagcctggaacctgaggacttcgccgtgtactactgccagcagtggtccagctatccccacacatttggcggaggcaccaaggtggaaatcaagagactcgagcagagcttcggcctgctggaccccaagctgtgctacctgctggatggcatcctgttcatctacggcgtgatcctgaccgccctgttcctgagagtgaagttcagcagaagcgccgacgcccctgcctaccagcagggacagaaccaactgtacaacgagctgaacctgggcagacgggaagagtacgacgtgctggacaagcggagaggcagggaccctgagatgggcggaaagccccagcggagaaagaacccccaggaaggactgtataacgaactccagaaagacaagatggccgaagcctacagcgagatcggcatgaagggcgagcggagaagaggcaagggccacgatggcctgtaccagggcctgagcaccgccaccaaggacacctatgacgccctgcacatgcaggccctgcctccaagaagggccaagcgatctggatctggagcaacaaacttctcactactcaaacaagcaggtgacgtggaggagaatcccgggcctactagtatggactggatttggcgcatccttttccttgtcggcgctgctaccggcgcgcattccttcgaacaggttcagctggttcagagcggagccgaagtgaagaaacctggggcctctgtgaaggtgtcctgcaaggcttccggctacacctttaccaactacctgatcgagtgggtccgacaggctccaggacaaggactggaatggatgggcctgattaaccctggcagcggcggcaccaactacaacgagaagttcaagggcagagtgaccatgaccaccgacaccagcacaagcaccgcctacatggaactgcggagcctgagaagcgacgacaccgccgtgtattattgcgccagaagaagccctctcggctcttggatctactacgcctatgacggcgtggcctattggggccagggaacactggttacagtgtcctctacgcgtcagagttttgggttgttggaccctaaattgtgctatctgttggacggaatcctgttcatttacggagtgatcctgaccgcattgttcctgcgggttaagttttccagatccgcagacgcacccgcttaccaacaagggcagaaccaactctacaatgaacttaatttggggcggagggaagagtacgacgttctggacaaaaggaggggacgagatcccgagatgggcggaaagcctcagcgaaggaagaatccgcaagaggggctttataacgaactccagaaagataaaatggcagaagcctatagtgagattgggatgaagggagaaaggaggaggggtaaaggtcacgatgggttgtaccaaggattgagcacagccactaaagatacctatgatgcgctccacatgcaggccctgccgccaaga

SEQ ID NO: 34820 - DNA, 1962 bp, synthetic construct
  source 1..1962: mol_type = other DNA
atggccttaccagtgaccgccttgctcctgccgctggccttgctgctccacgccgccaggccggagatcgtgctgacacagtctcccgccacactgtcactgtctccaggcgaaagagccacactgagctgtagcgtgtccagcagcatcagcagcagcaacctgcactggtatcagcagaagcctggacaggcccctcggctgctgatctacgccacatctaatctggcctctggcatccccgccagattttctggctctggaagcggcaccgacttcaccctgaccataagcagcctggaacctgaggacttcgccgtgtactactgccagcagtggtccagctatccccacacatttggcggaggcaccaaggtggaaatcaagagactcgagggacagcctaaggccaatcctaccgtgacactgttccctccaagcagcgaagaactccaggccaacaaggccacacttgtgtgcctgatctccgacttctaccctggggctgtgacagtggcttggaaggccgatggatctcctgtgaaagccggcgtggaaaccaccaagccatccaagcagagcaacaacaaatacgccgccagctcctacctgagcctgacacctgagcagtggaagtcccacagatcctacagctgccaagtgacccacgaaggcagcaccgtggaaaagacagtggcccctacagagtgcagccccatcaagaccgatgtgattacaatggaccccaaggacaactgctccaaggacgccaacgataccctgctgctccagctgaccaacaccagcgcctactacatgtacttgttgctgctgctgaagtccgtggtgtacttcgccatcatcacatgctgcctgctgcggagaaccgccttctgctgcaacggcgagaagtctagggccaagcgatctggatctggagcaacaaacttctcactactcaaacaagcaggtgacgtggaggagaatcccgggcctactagtatggactggatttggcgcatccttttccttgtcggcgctgctaccggcgcgcattccttcgaacaggttcagctggttcagagcggagccgaagtgaagaaacctggggcctctgtgaaggtgtcctgcaaggcttccggctacacctttaccaactacctgatcgagtgggtccgacaggctccaggacaaggactggaatggatgggcctgattaaccctggcagcggcggcaccaactacaacgagaagttcaagggcagagtgaccatgaccaccgacaccagcacaagcaccgcctacatggaactgcggagcctgagaagcgacgacaccgccgtgtattattgcgccagaagaagccctctcggctcttggatctactacgcctatgacggcgtggcctattggggccagggaacactggttacagtgtcctctacgcgtgcctctacaaagggaccctccgtgtttcctctggctcccagcagcaagtctacaagcggaggaacagccgctctgggctgcctggtcaaggattactttcccgagcctgtgaccgtgtcctggaatagcggagcactgacaagcggcgtgcacacctttccagccgtgctgcaaagcagcggcctgtactctctgagcagcgtggtcacagtgcctagctctagcctgggcacccagacctacatctgcaatgtgaaccacaagcctagcaacaccaaggtggacaagagagtggaacccaagagctgtgaagtgaaaaccgactccaccgaccacgtgaagcccaaagagacagagaacaccaagcagcccagcaagagctgccacaagcccaaggccatcgtgcacaccgagaaagtgaacatgatgagcctgaccgtgctgggcctgcggatgctgttcgccaaaaccgtggccgtgaacttcctgctgaccgccaagctgttcttcctc

SEQ ID NO: 34821 - DNA, 1896 bp, synthetic construct
  source 1..1896: mol_type = other DNA
atggccttaccagtgaccgccttgctcctgccgctggccttgctgctccacgccgccaggccggagatcgtgctgacacagtctcccgccacactgtcactgtctccaggcgaaagagccacactgagctgtagcgtgtccagcagcatcagcagcagcaacctgcactggtatcagcagaagcctggacaggcccctcggctgctgatctacgccacatctaatctggcctctggcatccccgccagattttctggctctggaagcggcaccgacttcaccctgaccataagcagcctggaacctgaggacttcgccgtgtactactgccagcagtggtccagctatccccacacatttggcggaggcaccaaggtggaaatcaagagactcgagggacagcctaaggccaatcctaccgtgacactgttccctccaagcagcgaagaactccaggccaacaaggccacacttgtgtgcctgatctccgacttctaccctggggctgtgacagtggcttggaaggccgatggatctcctgtgaaagccggcgtggaaaccaccaagccatccaagcagagcaacaacaaatacgccgccagctcctacctgagcctgacacctgagcagtggaagtcccacagatcctacagctgccaagtgacccacgaaggcagcaccgtggaaaagacagtggcccctacagagtgcagcggcagagccgattgcggcatcaccagcgccagctaccaccagggcgtgctgagcgccaccatcctgtacgagatcctgctgggcaaggccaccctgtacgccgtgctggtgtctgccctggtgctgatggctatggtcaagcggaaggacagccggggaagggccaagcgatctggatctggagcaacaaacttctcactactcaaacaagcaggtgacgtggaggagaatcccgggcctactagtatggactggatttggcgcatccttttccttgtcggcgctgctaccggcgcgcattccttcgaacaggttcagctggttcagagcggagccgaagtgaagaaacctggggcctctgtgaaggtgtcctgcaaggcttccggctacacctttaccaactacctgatcgagtgggtccgacaggctccaggacaaggactggaatggatgggcctgattaaccctggcagcggcggcaccaactacaacgagaagttcaagggcagagtgaccatgaccaccgacaccagcacaagcaccgcctacatggaactgcggagcctgagaagcgacgacaccgccgtgtattattgcgccagaagaagccctctcggctcttggatctactacgcctatgacggcgtggcctattggggccagggaacactggttacagtgtcctctacgcgtgcctctacaaagggaccctccgtgtttcctctggctcccagcagcaagtctacaagcggaggaacagccgctctgggctgcctggtcaaggattactttcccgagcctgtgaccgtgtcctggaatagcggagcactgacaagcggcgtgcacacctttccagccgtgctgcaaagcagcggcctgtactctctgagcagcgtggtcacagtgcctagctctagcctgggcacccagacctacatctgcaatgtgaaccacaagcctagcaacaccaaggtggacaagagagtggaacccaagagctgtatccccgaggacacattcttcccaagcagcgacgtgccctgcgacgtgaagctggtggaaaagagcttcgagacagacaccaacctgaacttccagaacctgagcgtgatcggcttcagaatcctgctgctgaaagtggccggctttaacctgctgatgaccctgcggctgtggtccagc

SEQ ID NO: 34822 - DNA, 1896 bp, synthetic construct
  source 1..1896: mol_type = other DNA
atggccttaccagtgaccgccttgctcctgccgctggccttgctgctccacgccgccaggccggagatcgtgctgacacagtctcccgccacactgtcactgtctccaggcgaaagagccacactgagctgtagcgtgtccagcagcatcagcagcagcaacctgcactggtatcagcagaagcctggacaggcccctcggctgctgatctacgccacatctaatctggcctctggcatccccgccagattttctggctctggaagcggcaccgacttcaccctgaccataagcagcctggaacctgaggacttcgccgtgtactactgccagcagtggtccagctatccccacacatttggcggaggcaccaaggtggaaatcaagagactcgagggacagcctaaggccaatcctaccgtgacactgttccctccaagcagcgaagaactccaggccaacaaggccacacttgtgtgcctgatctccgacttctaccctggggctgtgacagtggcttggaaggccgatggatctcctgtgaaagccggcgtggaaaccaccaagccatccaagcagagcaacaacaaatacgccgccagctcctacctgagcctgacacctgagcagtggaagtcccacagatcctacagctgccaagtgacccacgaaggcagcaccgtggaaaagacagtggcccctacagagtgcagcggcagagccgattgcggctttaccagcgagagctaccagcagggcgtgctgagcgccaccatcctgtacgagatcctgctgggcaaggccaccctgtacgccgtgctggtgtctgccctggtgctgatggctatggtcaagcggaaggacagccggggaagggccaagcgatctggatctggagcaacaaacttctcactactcaaacaagcaggtgacgtggaggagaatcccgggcctactagtatggactggatttggcgcatccttttccttgtcggcgctgctaccggcgcgcattccttcgaacaggttcagctggttcagagcggagccgaagtgaagaaacctggggcctctgtgaaggtgtcctgcaaggcttccggctacacctttaccaactacctgatcgagtgggtccgacaggctccaggacaaggactggaatggatgggcctgattaaccctggcagcggcggcaccaactacaacgagaagttcaagggcagagtgaccatgaccaccgacaccagcacaagcaccgcctacatggaactgcggagcctgagaagcgacgacaccgccgtgtattattgcgccagaagaagccctctcggctcttggatctactacgcctatgacggcgtggcctattggggccagggaacactggttacagtgtcctctacgcgtgcctctacaaagggaccctccgtgtttcctctggctcccagcagcaagtctacaagcggaggaacagccgctctgggctgcctggtcaaggattactttcccgagcctgtgaccgtgtcctggaatagcggagcactgacaagcggcgtgcacacctttccagccgtgctgcaaagcagcggcctgtactctctgagcagcgtggtcacagtgcctagctctagcctgggcacccagacctacatctgcaatgtgaaccacaagcctagcaacaccaaggtggacaagagagtggaacccaagagctgtatccccgaggacacattcttcccaagccccgagagcagctgcgacgtgaagctggtggaaaagagcttcgagacagacaccaacctgaacttccagaacctgagcgtgatcggcttcagaatcctgctgctgaaagtggccggctttaacctgctgatgaccctgcggctgtggtccagc

SEQ ID NO: 34823 - DNA, 1374 bp, synthetic construct
  source 1..1374: mol_type = other DNA
atggccttaccagtgaccgccttgctcctgccgctggccttgctgctccacgccgccaggccggagatcgtgctgacacagtctcccgccacactgtcactgtctccaggcgaaagagccacactgagctgtagcgtgtccagcagcatcagcagcagcaacctgcactggtatcagcagaagcctggacaggcccctcggctgctgatctacgccacatctaatctggcctctggcatccccgccagattttctggctctggaagcggcaccgacttcaccctgaccataagcagcctggaacctgaggacttcgccgtgtactactgccagcagtggtccagctatccccacacatttggcggaggcaccaaggtggaaatcaagagaggcggaggcggaagtggaggcggaggatctggcggcggaggctctcaggttcagctggttcagagcggagccgaagtgaagaaacctggggcctctgtgaaggtgtcctgcaaggcttccggctacacctttaccaactacctgatcgagtgggtccgacaggctccaggacaaggactggaatggatgggcctgattaaccctggcagcggcggcaccaactacaacgagaagttcaagggcagagtgaccatgaccaccgacaccagcacaagcaccgcctacatggaactgcggagcctgagaagcgacgacaccgccgtgtattattgcgccagaagaagccctctcggctcttggatctactacgcctatgacggcgtggcctattggggccagggaacactggttacagtgtcctctacgcgtgacggtaacgaggagatgggaggaatcactcaaaccccttacaaagtctcaatttcaggaacaactgttatccttacatgtccccagtatcctggcagcgagatcctttggcagcataacgacaagaatatagggggagatgaagacgataagaatatcggatctgacgaggatcacttgagcctgaaagagttctccgagcttgaacaaagcggatattatgtgtgctatccgcgcgggtcaaagccggaagacgctaacttttacctttatctccgagccagagtgtgcgaaaattgcatggaaatggacgttatgtccgttgctacaatagttatcgtagatatatgcatcacgggtggactgcttctgctggtttattattggtccaagaatagaaaggccaaagctaaacccgtgaccagaggcgctggcgcaggcggaaggcaaaggggacaaaacaaagaacggccaccaccagtgccaaatccagattatgagcctattcggaaaggacagagggacctgtactctggcctgaatcagagaagaatc

SEQ ID NO: 34824 - DNA, 1269 bp, synthetic construct
  source 1..1269: mol_type = other DNA
atggccttaccagtgaccgccttgctcctgccgctggccttgctgctccacgccgccaggccggagatcgtgctgacacagtctcccgccacactgtcactgtctccaggcgaaagagccacactgagctgtagcgtgtccagcagcatcagcagcagcaacctgcactggtatcagcagaagcctggacaggcccctcggctgctgatctacgccacatctaatctggcctctggcatccccgccagattttctggctctggaagcggcaccgacttcaccctgaccataagcagcctggaacctgaggacttcgccgtgtactactgccagcagtggtccagctatccccacacatttggcggaggcaccaaggtggaaatcaagagaggcggaggcggaagtggaggcggaggatctggcggcggaggctctcaggttcagctggttcagagcggagccgaagtgaagaaacctggggcctctgtgaaggtgtcctgcaaggcttccggctacacctttaccaactacctgatcgagtgggtccgacaggctccaggacaaggactggaatggatgggcctgattaaccctggcagcggcggcaccaactacaacgagaagttcaagggcagagtgaccatgaccaccgacaccagcacaagcaccgcctacatggaactgcggagcctgagaagcgacgacaccgccgtgtattattgcgccagaagaagccctctcggctcttggatctactacgcctatgacggcgtggcctattggggccagggaacactggttacagtgtcctctacgcgtttcaagatccccatcgaggaactggaagatcgggtgttcgtgaactgcaacacctctatcacctgggtggaaggcaccgtgggaacactgctgagcgacatcaccagactggacctcggcaagcggattctggaccctcggggcatctacagatgcaacggcaccgacatctacaaggacaaagaaagcaccgtgcaggtccactacagaatgtgccagtcctgcgtggaactggaccctgctacagtggccggcatcatcgtgaccgatgtgatcgctactctgctgctggctctgggagtgttctgcttcgccggacacgaaacaggcagactgtctggcgctgccgatacacaggccctgctgagaaacgaccaagtgtatcagcccctgcgcgacagagatgatgcccagtattctcacctcggcggcaactgggctagaaacaag

SEQ ID NO: 34825 - DNA, 1299 bp, synthetic construct
  source 1..1299: mol_type = other DNA
atggccttaccagtgaccgccttgctcctgccgctggccttgctgctccacgccgccaggccggagatcgtgctgacacagtctcccgccacactgtcactgtctccaggcgaaagagccacactgagctgtagcgtgtccagcagcatcagcagcagcaacctgcactggtatcagcagaagcctggacaggcccctcggctgctgatctacgccacatctaatctggcctctggcatccccgccagattttctggctctggaagcggcaccgacttcaccctgaccataagcagcctggaacctgaggacttcgccgtgtactactgccagcagtggtccagctatccccacacatttggcggaggcaccaaggtggaaatcaagagaggcggaggcggaagtggaggcggaggatctggcggcggaggctctcaggttcagctggttcagagcggagccgaagtgaagaaacctggggcctctgtgaaggtgtcctgcaaggcttccggctacacctttaccaactacctgatcgagtgggtccgacaggctccaggacaaggactggaatggatgggcctgattaaccctggcagcggcggcaccaactacaacgagaagttcaagggcagagtgaccatgaccaccgacaccagcacaagcaccgcctacatggaactgcggagcctgagaagcgacgacaccgccgtgtattattgcgccagaagaagccctctcggctcttggatctactacgcctatgacggcgtggcctattggggccagggaacactggttacagtgtcctctacgcgtcagagcatcaagggcaaccacctggtcaaggtgtacgactaccaagaggacggcagcgtgctgctgacatgtgatgccgaggccaagaacatcacctggtttaaggacggcaagatgatcggcttcctgaccgaggacaagaagaagtggaacctgggcagcaacgctaaggaccccagaggcatgtatcagtgcaagggcagccagaacaagagcaagcccctccaggtgtactaccggatgtgccagaactgcatcgagctgaacgccgctaccatcagcggctttctgttcgccgagatcgtgtccatcttcgtgctggccgtgggcgtgtactttatcgctggacaggatggcgtgcggcagagcagagcttccgataagcaaaccctgctgcctaacgaccagctgtaccagcctctgaaggacagagaggacgaccagtacagccacctccagggcaatcagctgagaagaaac

SEQ ID NO: 34826 - DNA, 1248 bp, synthetic construct
  source 1..1248: mol_type = other DNA
atggccttaccagtgaccgccttgctcctgccgctggccttgctgctccacgccgccaggccggagatcgtgctgacacagtctcccgccacactgtcactgtctccaggcgaaagagccacactgagctgtagcgtgtccagcagcatcagcagcagcaacctgcactggtatcagcagaagcctggacaggcccctcggctgctgatctacgccacatctaatctggcctctggcatccccgccagattttctggctctggaagcggcaccgacttcaccctgaccataagcagcctggaacctgaggacttcgccgtgtactactgccagcagtggtccagctatccccacacatttggcggaggcaccaaggtggaaatcaagagaggcggaggcggaagtggaggcggaggatctggcggcggaggctctcaggttcagctggttcagagcggagccgaagtgaagaaacctggggcctctgtgaaggtgtcctgcaaggcttccggctacacctttaccaactacctgatcgagtgggtccgacaggctccaggacaaggactggaatggatgggcctgattaaccctggcagcggcggcaccaactacaacgagaagttcaagggcagagtgaccatgaccaccgacaccagcacaagcaccgcctacatggaactgcggagcctgagaagcgacgacaccgccgtgtattattgcgccagaagaagccctctcggctcttggatctactacgcctatgacggcgtggcctattggggccagggaacactggttacagtgtcctctacgcgtcagagttttgggttgttggaccctaaattgtgctatctgttggacggaatcctgttcatttacggagtgatcctgaccgcattgttcctgcgggttaagttttccagatccgcagacgcacccgcttaccaacaagggcagaaccaactctacaatgaacttaatttggggcggagggaagagtacgacgttctggacaaaaggaggggacgagatcccgagatgggcggaaagcctcagcgaaggaagaatccgcaagaggggctttataacgaactccagaaagataaaatggcagaagcctatagtgagattgggatgaagggagaaaggaggaggggtaaaggtcacgatgggttgtaccaaggattgagcacagccactaaagatacctatgatgcgctccacatgcaggccctgccgccaaga

SEQ ID NO: 34827 - DNA, 1533 bp, synthetic construct
  source 1..1533: mol_type = other DNA
atggccttaccagtgaccgccttgctcctgccgctggccttgctgctccacgccgccaggccggagatcgtgctgacacagtctcccgccacactgtcactgtctccaggcgaaagagccacactgagctgtagcgtgtccagcagcatcagcagcagcaacctgcactggtatcagcagaagcctggacaggcccctcggctgctgatctacgccacatctaatctggcctctggcatccccgccagattttctggctctggaagcggcaccgacttcaccctgaccataagcagcctggaacctgaggacttcgccgtgtactactgccagcagtggtccagctatccccacacatttggcggaggcaccaaggtggaaatcaagagaggcggaggcggaagtggaggcggaggatctggcggcggaggctctcaggttcagctggttcagagcggagccgaagtgaagaaacctggggcctctgtgaaggtgtcctgcaaggcttccggctacacctttaccaactacctgatcgagtgggtccgacaggctccaggacaaggactggaatggatgggcctgattaaccctggcagcggcggcaccaactacaacgagaagttcaagggcagagtgaccatgaccaccgacaccagcacaagcaccgcctacatggaactgcggagcctgagaagcgacgacaccgccgtgtattattgcgccagaagaagccctctcggctcttggatctactacgcctatgacggcgtggcctattggggccagggaacactggttacagtgtcctctacgcgtggaatgaggactgaggatcttcccaaagctgtcgtctttctcgaaccccaatggtatcgggtgctcgaaaaagactctgtgacactgaaatgccaaggggcctactctcccgaggacaactccacacagtggtttcataatgagtccctcatcagctctcaggccagctcttatttcattgatgccgctacagtggacgactccggcgagtatcggtgtcagaccaatctgtctacactgtctgaccccgtgcagcttgaggtccacattggatggttgctcttgcaagccccacgctgggttttcaaagaggaagatccaatccatctgcggtgccacagctggaaaaacaccgctctccacaaagtcacatacctgcaaaatggcaaaggacgcaaatacttccatcacaattccgatttttacattccgaaggctaccctgaaagacagcggcagctatttctgccggggactcgtcggctccaagaatgtgtcctccgaaaccgtgaatatcacgattacccaaggactggctgtgcctacaatctctagcttctttccgcctggataccaagtctccttctgtcttgtgatggtcctcctgtttgctgtggacacaggactgtacttttccgtgaaaacgaacatccgcagctccacacgcgattggaaagatcacaagtttaaatggcgcaaagatccccaggacaag

SEQ ID NO: 34828 - DNA, 1458 bp, synthetic construct
  source 1..1458: mol_type = other DNA
atggccttaccagtgaccgccttgctcctgccgctggccttgctgctccacgccgccaggccggagatcgtgctgacacagtctcccgccacactgtcactgtctccaggcgaaagagccacactgagctgtagcgtgtccagcagcatcagcagcagcaacctgcactggtatcagcagaagcctggacaggcccctcggctgctgatctacgccacatctaatctggcctctggcatccccgccagattttctggctctggaagcggcaccgacttcaccctgaccataagcagcctggaacctgaggacttcgccgtgtactactgccagcagtggtccagctatccccacacatttggcggaggcaccaaggtggaaatcaagagaggcggaggcggaagtggaggcggaggatctggcggcggaggctctcaggttcagctggttcagagcggagccgaagtgaagaaacctggggcctctgtgaaggtgtcctgcaaggcttccggctacacctttaccaactacctgatcgagtgggtccgacaggctccaggacaaggactggaatggatgggcctgattaaccctggcagcggcggcaccaactacaacgagaagttcaagggcagagtgaccatgaccaccgacaccagcacaagcaccgcctacatggaactgcggagcctgagaagcgacgacaccgccgtgtattattgcgccagaagaagccctctcggctcttggatctactacgcctatgacggcgtggcctattggggccagggaacactggttacagtgtcctctacgcgtggaatgaggactgaggatcttcccaaagctgtcgtctttctcgaaccccaatggtatcgggtgctcgaaaaagactctgtgacactgaaatgccaaggggcctactctcccgaggacaactccacacagtggtttcataatgagtccctcatcagctctcaggccagctcttatttcattgatgccgctacagtggacgactccggcgagtatcggtgtcagaccaatctgtctacactgtctgaccccgtgcagcttgaggtccacattggatggttgctcttgcaagccccacgctgggttttcaaagaggaagatccaatccatctgcggtgccacagctggaaaaacaccgctctccacaaagtcacatacctgcaaaatggcaaaggacgcaaatacttccatcacaattccgatttttacattccgaaggctaccctgaaagacagcggcagctatttctgccggggactcgtcggctccaagaatgtgtcctccgaaaccgtgaatatcacgattacccaaggactggctgtgcctacaatctctagcttctttccgcctggataccaagtctccttctgtcttgtgatggtcctcctgtttgctgtggacacaggactgtacttttccgtg

SEQ ID NO: 34829 - DNA, 1461 bp, synthetic construct
  source 1..1461: mol_type = other DNA
atggccttaccagtgaccgccttgctcctgccgctggccttgctgctccacgccgccaggccggagatcgtgctgacacagtctcccgccacactgtcactgtctccaggcgaaagagccacactgagctgtagcgtgtccagcagcatcagcagcagcaacctgcactggtatcagcagaagcctggacaggcccctcggctgctgatctacgccacatctaatctggcctctggcatccccgccagattttctggctctggaagcggcaccgacttcaccctgaccataagcagcctggaacctgaggacttcgccgtgtactactgccagcagtggtccagctatccccacacatttggcggaggcaccaaggtggaaatcaagagaggcggaggcggaagtggaggcggaggatctggcggcggaggctctcaggttcagctggttcagagcggagccgaagtgaagaaacctggggcctctgtgaaggtgtcctgcaaggcttccggctacacctttaccaactacctgatcgagtgggtccgacaggctccaggacaaggactggaatggatgggcctgattaaccctggcagcggcggcaccaactacaacgagaagttcaagggcagagtgaccatgaccaccgacaccagcacaagcaccgcctacatggaactgcggagcctgagaagcgacgacaccgccgtgtattattgcgccagaagaagccctctcggctcttggatctactacgcctatgacggcgtggcctattggggccagggaacactggttacagtgtcctctacgcgtggaatgaggactgaggatcttcccaaagctgtcgtctttctcgaaccccaatggtatcgggtgctcgaaaaagactctgtgacactgaaatgccaaggggcctactctcccgaggacaactccacacagtggtttcataatgagtccctcatcagctctcaggccagctcttatttcattgatgccgctacagtggacgactccggcgagtatcggtgtcagaccaatctgtctacactgtctgaccccgtgcagcttgaggtccacattggatggttgctcttgcaagccccacgctgggttttcaaagaggaagatccaatccatctgcggtgccacagctggaaaaacaccgctctccacaaagtcacatacctgcaaaatggcaaaggacgcaaatacttccatcacaattccgatttttacattccgaaggctaccctgaaagacagcggcagctatttctgccggggactcgtcggctccaagaatgtgtcctccgaaaccgtgaatatcacgattacccaaggactggctgtgcctacaatctctagcttctttccgcctggataccaagtctccttctgtcttgtgatggtcctcctgtttgctgtggacacaggactgtacttttccgtgaaa

SEQ ID NO: 34830 - DNA, 2193 bp, synthetic construct
  source 1..2193: mol_type = other DNA
atggccttaccagtgaccgccttgctcctgccgctggccttgctgctccacgccgccaggccggagatcgtgctgacacagtctcccgccacactgtcactgtctccaggcgaaagagccacactgagctgtagcgtgtccagcagcatcagcagcagcaacctgcactggtatcagcagaagcctggacaggcccctcggctgctgatctacgccacatctaatctggcctctggcatccccgccagattttctggctctggaagcggcaccgacttcaccctgaccataagcagcctggaacctgaggacttcgccgtgtactactgccagcagtggtccagctatccccacacatttggcggaggcaccaaggtggaaatcaagagactcgagggacagcctaaggccaatcctaccgtgacactgttccctccaagcagcgaagaactccaggccaacaaggccacacttgtgtgcctgatctccgacttctaccctggggctgtgacagtggcttggaaggccgatggatctcctgtgaaagccggcgtggaaaccaccaagccatccaagcagagcaacaacaaatacgccgccagctcctacctgagcctgacacctgagcagtggaagtcccacagatcctacagctgccaagtgacccacgaaggcagcaccgtggaaaagacagtggcccctacagagtgcagcggatcccagagcttcggcctgctggaccccaagctgtgctacctgctggatggcatcctgttcatctacggcgtgatcctgaccgccctgttcctgagagtgaagttcagcagaagcgccgacgcccctgcctaccagcagggacagaaccaactgtacaacgagctgaacctgggcagacgggaagagtacgacgtgctggacaagcggagaggcagggaccctgagatgggcggaaagccccagcggagaaagaacccccaggaaggactgtataacgaactccagaaagacaagatggccgaagcctacagcgagatcggcatgaagggcgagcggagaagaggcaagggccacgatggcctgtaccagggcctgagcaccgccaccaaggacacctatgacgccctgcacatgcaggccctgcctccaagaagggccaagcgatctggatctggagcaacaaacttctcactactcaaacaagcaggtgacgtggaggagaatcccgggcctactagtatggactggatttggcgcatccttttccttgtcggcgctgctaccggcgcgcattccttcgaacaggttcagctggttcagagcggagccgaagtgaagaaacctggggcctctgtgaaggtgtcctgcaaggcttccggctacacctttaccaactacctgatcgagtgggtccgacaggctccaggacaaggactggaatggatgggcctgattaaccctggcagcggcggcaccaactacaacgagaagttcaagggcagagtgaccatgaccaccgacaccagcacaagcaccgcctacatggaactgcggagcctgagaagcgacgacaccgccgtgtattattgcgccagaagaagccctctcggctcttggatctactacgcctatgacggcgtggcctattggggccagggaacactggttacagtgtcctctacgcgtgcctctacaaagggaccctccgtgtttcctctggctcccagcagcaagtctacaagcggaggaacagccgctctgggctgcctggtcaaggattactttcccgagcctgtgaccgtgtcctggaatagcggagcactgacaagcggcgtgcacacctttccagccgtgctgcaaagcagcggcctgtactctctgagcagcgtggtcacagtgcctagctctagcctgggcacccagacctacatctgcaatgtgaaccacaagcctagcaacaccaaggtggacaagagagtggaacccaagagctgtggtaccatcactcaaggtttggcagtgtcaaccatctcatcattctttccacctggctaccaagtgtccttctgcctggtcatggtgctgctgttcgccgtggataccggcctgtacttcagcgtcaagaccaacatccggtccagcaccagagactggaaggaccacaagttcaagtggcggaaggaccctcaggacaag

SEQ ID NO: 34831 - DNA, 2238 bp, synthetic construct
  source 1..2238: mol_type = other DNA
atggccttaccagtgaccgccttgctcctgccgctggccttgctgctccacgccgccaggccggagatcgtgctgacacagtctcccgccacactgtcactgtctccaggcgaaagagccacactgagctgtagcgtgtccagcagcatcagcagcagcaacctgcactggtatcagcagaagcctggacaggcccctcggctgctgatctacgccacatctaatctggcctctggcatccccgccagattttctggctctggaagcggcaccgacttcaccctgaccataagcagcctggaacctgaggacttcgccgtgtactactgccagcagtggtccagctatccccacacatttggcggaggcaccaaggtggaaatcaagagactcgaggacctgaagaacgtgttcccacctgaggtggccgtgttcgagcctagcgaggccgagatcagccacacccagaaagccaccctcgtgtgcctggctaccggcttctaccccgaccatgtggaactgtcttggtgggtcaacggcaaagaggtgcacagcggcgtgtctaccgacccccagccactgaaagaacagcccgccctgaacgacagccggtactgcctgagcagcagactgagagtgtccgccaccttctggcagaacccccggaaccacttcagatgccaggtgcagttctacggcctgagcgagaacgacgagtggacccaggacagagccaagcccgtgacccagatcgtgtctgccgaagcctggggcagagccgattgcggatcccagagcttcggcctgctggaccccaagctgtgctacctgctggatggcatcctgttcatctacggcgtgatcctgaccgccctgttcctgagagtgaagttcagcagaagcgccgacgcccctgcctaccagcagggacagaaccaactgtacaacgagctgaacctgggcagacgggaagagtacgacgtgctggacaagcggagaggcagggaccctgagatgggcggaaagccccagcggagaaagaacccccaggaaggactgtataacgaactccagaaagacaagatggccgaagcctacagcgagatcggcatgaagggcgagcggagaagaggcaagggccacgatggcctgtaccagggcctgagcaccgccaccaaggacacctatgacgccctgcacatgcaggccctgcctccaagaagggccaagcgatctggatctggagcaacaaacttctcactactcaaacaagcaggtgacgtggaggagaatcccgggcctactagtatggactggatttggcgcatccttttccttgtcggcgctgctaccggcgcgcattccttcgaacaggttcagctggttcagagcggagccgaagtgaagaaacctggggcctctgtgaaggtgtcctgcaaggcttccggctacacctttaccaactacctgatcgagtgggtccgacaggctccaggacaaggactggaatggatgggcctgattaaccctggcagcggcggcaccaactacaacgagaagttcaagggcagagtgaccatgaccaccgacaccagcacaagcaccgcctacatggaactgcggagcctgagaagcgacgacaccgccgtgtattattgcgccagaagaagccctctcggctcttggatctactacgcctatgacggcgtggcctattggggccagggaacactggttacagtgtcctctacgcgtatccagaaccctgatcctgccgtgtaccagctgcgggatagcaagagcagcgacaagagcgtgtgtctgttcaccgacttcgacagccagaccaacgtgtcccagagcaaggactccgacgtgtacatcaccgataagaccgtgctggacatgcggagcatggacttcaagagcaactccgccgtggcctggtccaacaagtccgatttcgcctgcgccaacgccttcaacaacagcattatccccgaggacacattcttcccaagccccgagagcagctgcggtaccatcactcaaggtttggcagtgtcaaccatctcatcattctttccacctggctaccaagtgtccttctgcctggtcatggtgctgctgttcgccgtggataccggcctgtacttcagcgtcaagaccaacatccggtccagcaccagagactggaaggaccacaagttcaagtggcggaaggaccctcaggacaag

SEQ ID NO: 34832 - DNA, 2163 bp, synthetic construct
  source 1..2163: mol_type = other DNA
atggccttaccagtgaccgccttgctcctgccgctggccttgctgctccacgccgccaggccggagatcgtgctgacacagtctcccgccacactgtcactgtctccaggcgaaagagccacactgagctgtagcgtgtccagcagcatcagcagcagcaacctgcactggtatcagcagaagcctggacaggcccctcggctgctgatctacgccacatctaatctggcctctggcatccccgccagattttctggctctggaagcggcaccgacttcaccctgaccataagcagcctggaacctgaggacttcgccgtgtactactgccagcagtggtccagctatccccacacatttggcggaggcaccaaggtggaaatcaagagactcgaggacctgaagaacgtgttcccacctgaggtggccgtgttcgagcctagcgaggccgagatcagccacacccagaaagccaccctcgtgtgcctggctaccggcttctaccccgaccatgtggaactgtcttggtgggtcaacggcaaagaggtgcacagcggcgtgtctaccgacccccagccactgaaagaacagcccgccctgaacgacagccggtactgcctgagcagcagactgagagtgtccgccaccttctggcagaacccccggaaccacttcagatgccaggtgcagttctacggcctgagcgagaacgacgagtggacccaggacagagccaagcccgtgacccagatcgtgtctgccgaagcctggggcagagccgattgcggatcccagagcttcggcctgctggaccccaagctgtgctacctgctggatggcatcctgttcatctacggcgtgatcctgaccgccctgttcctgagagtgaagttcagcagaagcgccgacgcccctgcctaccagcagggacagaaccaactgtacaacgagctgaacctgggcagacgggaagagtacgacgtgctggacaagcggagaggcagggaccctgagatgggcggaaagccccagcggagaaagaacccccaggaaggactgtataacgaactccagaaagacaagatggccgaagcctacagcgagatcggcatgaagggcgagcggagaagaggcaagggccacgatggcctgtaccagggcctgagcaccgccaccaaggacacctatgacgccctgcacatgcaggccctgcctccaagaagggccaagcgatctggatctggagcaacaaacttctcactactcaaacaagcaggtgacgtggaggagaatcccgggcctactagtatggactggatttggcgcatccttttccttgtcggcgctgctaccggcgcgcattccttcgaacaggttcagctggttcagagcggagccgaagtgaagaaacctggggcctctgtgaaggtgtcctgcaaggcttccggctacacctttaccaactacctgatcgagtgggtccgacaggctccaggacaaggactggaatggatgggcctgattaaccctggcagcggcggcaccaactacaacgagaagttcaagggcagagtgaccatgaccaccgacaccagcacaagcaccgcctacatggaactgcggagcctgagaagcgacgacaccgccgtgtattattgcgccagaagaagccctctcggctcttggatctactacgcctatgacggcgtggcctattggggccagggaacactggttacagtgtcctctacgcgtatccagaaccctgatcctgccgtgtaccagctgcgggatagcaagagcagcgacaagagcgtgtgtctgttcaccgacttcgacagccagaccaacgtgtcccagagcaaggactccgacgtgtacatcaccgataagaccgtgctggacatgcggagcatggacttcaagagcaactccgccgtggcctggtccaacaagtccgatttcgcctgcgccaacgccttcaacaacagcattatccccgaggacacattcttcccaagccccgagagcagctgcggtaccatcactcaaggtttggcagtgtcaaccatctcatcattctttccacctggctaccaagtgtccttctgcctggtcatggtgctgctgttcgccgtggataccggcctgtacttcagcgtc

SEQ ID NO: 34833 - DNA, 2166 bp, synthetic construct
  source 1..2166: mol_type = other DNA
atggccttaccagtgaccgccttgctcctgccgctggccttgctgctccacgccgccaggccggagatcgtgctgacacagtctcccgccacactgtcactgtctccaggcgaaagagccacactgagctgtagcgtgtccagcagcatcagcagcagcaacctgcactggtatcagcagaagcctggacaggcccctcggctgctgatctacgccacatctaatctggcctctggcatccccgccagattttctggctctggaagcggcaccgacttcaccctgaccataagcagcctggaacctgaggacttcgccgtgtactactgccagcagtggtccagctatccccacacatttggcggaggcaccaaggtggaaatcaagagactcgaggacctgaagaacgtgttcccacctgaggtggccgtgttcgagcctagcgaggccgagatcagccacacccagaaagccaccctcgtgtgcctggctaccggcttctaccccgaccatgtggaactgtcttggtgggtcaacggcaaagaggtgcacagcggcgtgtctaccgacccccagccactgaaagaacagcccgccctgaacgacagccggtactgcctgagcagcagactgagagtgtccgccaccttctggcagaacccccggaaccacttcagatgccaggtgcagttctacggcctgagcgagaacgacgagtggacccaggacagagccaagcccgtgacccagatcgtgtctgccgaagcctggggcagagccgattgcggatcccagagcttcggcctgctggaccccaagctgtgctacctgctggatggcatcctgttcatctacggcgtgatcctgaccgccctgttcctgagagtgaagttcagcagaagcgccgacgcccctgcctaccagcagggacagaaccaactgtacaacgagctgaacctgggcagacgggaagagtacgacgtgctggacaagcggagaggcagggaccctgagatgggcggaaagccccagcggagaaagaacccccaggaaggactgtataacgaactccagaaagacaagatggccgaagcctacagcgagatcggcatgaagggcgagcggagaagaggcaagggccacgatggcctgtaccagggcctgagcaccgccaccaaggacacctatgacgccctgcacatgcaggccctgcctccaagaagggccaagcgatctggatctggagcaacaaacttctcactactcaaacaagcaggtgacgtggaggagaatcccgggcctactagtatggactggatttggcgcatccttttccttgtcggcgctgctaccggcgcgcattccttcgaacaggttcagctggttcagagcggagccgaagtgaagaaacctggggcctctgtgaaggtgtcctgcaaggcttccggctacacctttaccaactacctgatcgagtgggtccgacaggctccaggacaaggactggaatggatgggcctgattaaccctggcagcggcggcaccaactacaacgagaagttcaagggcagagtgaccatgaccaccgacaccagcacaagcaccgcctacatggaactgcggagcctgagaagcgacgacaccgccgtgtattattgcgccagaagaagccctctcggctcttggatctactacgcctatgacggcgtggcctattggggccagggaacactggttacagtgtcctctacgcgtatccagaaccctgatcctgccgtgtaccagctgcgggatagcaagagcagcgacaagagcgtgtgtctgttcaccgacttcgacagccagaccaacgtgtcccagagcaaggactccgacgtgtacatcaccgataagaccgtgctggacatgcggagcatggacttcaagagcaactccgccgtggcctggtccaacaagtccgatttcgcctgcgccaacgccttcaacaacagcattatccccgaggacacattcttcccaagccccgagagcagctgcggtaccatcactcaaggtttggcagtgtcaaccatctcatcattctttccacctggctaccaagtgtccttctgcctggtcatggtgctgctgttcgccgtggataccggcctgtacttcagcgtcaag

SEQ ID NO: 34834 - DNA, 2169 bp, synthetic construct
  source 1..2169: mol_type = other DNA
atggccttaccagtgaccgccttgctcctgccgctggccttgctgctccacgccgccaggccggagatcgtgctgacacagtctcccgccacactgtcactgtctccaggcgaaagagccacactgagctgtagcgtgtccagcagcatcagcagcagcaacctgcactggtatcagcagaagcctggacaggcccctcggctgctgatctacgccacatctaatctggcctctggcatccccgccagattttctggctctggaagcggcaccgacttcaccctgaccataagcagcctggaacctgaggacttcgccgtgtactactgccagcagtggtccagctatccccacacatttggcggaggcaccaaggtggaaatcaagagactcgaggacctgaagaacgtgttcccacctgaggtggccgtgttcgagcctagcgaggccgagatcagccacacccagaaagccaccctcgtgtgcctggctaccggcttctaccccgaccatgtggaactgtcttggtgggtcaacggcaaagaggtgcacagcggcgtgtctaccgacccccagccactgaaagaacagcccgccctgaacgacagccggtactgcctgagcagcagactgagagtgtccgccaccttctggcagaacccccggaaccacttcagatgccaggtgcagttctacggcctgagcgagaacgacgagtggacccaggacagagccaagcccgtgacccagatcgtgtctgccgaagcctggggcagagccgattgcggatcccagagcttcggcctgctggaccccaagctgtgctacctgctggatggcatcctgttcatctacggcgtgatcctgaccgccctgttcctgagagtgaagttcagcagaagcgccgacgcccctgcctaccagcagggacagaaccaactgtacaacgagctgaacctgggcagacgggaagagtacgacgtgctggacaagcggagaggcagggaccctgagatgggcggaaagccccagcggagaaagaacccccaggaaggactgtataacgaactccagaaagacaagatggccgaagcctacagcgagatcggcatgaagggcgagcggagaagaggcaagggccacgatggcctgtaccagggcctgagcaccgccaccaaggacacctatgacgccctgcacatgcaggccctgcctccaagaagggccaagcgatctggatctggagcaacaaacttctcactactcaaacaagcaggtgacgtggaggagaatcccgggcctactagtatggactggatttggcgcatccttttccttgtcggcgctgctaccggcgcgcattccttcgaacaggttcagctggttcagagcggagccgaagtgaagaaacctggggcctctgtgaaggtgtcctgcaaggcttccggctacacctttaccaactacctgatcgagtgggtccgacaggctccaggacaaggactggaatggatgggcctgattaaccctggcagcggcggcaccaactacaacgagaagttcaagggcagagtgaccatgaccaccgacaccagcacaagcaccgcctacatggaactgcggagcctgagaagcgacgacaccgccgtgtattattgcgccagaagaagccctctcggctcttggatctactacgcctatgacggcgtggcctattggggccagggaacactggttacagtgtcctctacgcgtatccagaaccctgatcctgccgtgtaccagctgcgggatagcaagagcagcgacaagagcgtgtgtctgttcaccgacttcgacagccagaccaacgtgtcccagagcaaggactccgacgtgtacatcaccgataagaccgtgctggacatgcggagcatggacttcaagagcaactccgccgtggcctggtccaacaagtccgatttcgcctgcgccaacgccttcaacaacagcattatccccgaggacacattcttcccaagccccgagagcagctgcggtaccatcactcaaggtttggcagtgtcaaccatctcatcattctttccacctggctaccaagtgtccttctgcctggtcatggtgctgctgttcgccgtggataccggcctgtacttcagcgtcaagacc

SEQ ID NO: 34835 - DNA, 1980 bp, synthetic construct
  source 1..1980: mol_type = other DNA
atggccttaccagtgaccgccttgctcctgccgctggccttgctgctccacgccgccaggccggagatcgtgctgacacagtctcccgccacactgtcactgtctccaggcgaaagagccacactgagctgtagcgtgtccagcagcatcagcagcagcaacctgcactggtatcagcagaagcctggacaggcccctcggctgctgatctacgccacatctaatctggcctctggcatccccgccagattttctggctctggaagcggcaccgacttcaccctgaccataagcagcctggaacctgaggacttcgccgtgtactactgccagcagtggtccagctatccccacacatttggcggaggcaccaaggtggaaatcaagagactcgagggacagcctaaggccaatcctaccgtgacactgttccctccaagcagcgaagaactccaggccaacaaggccacacttgtgtgcctgatctccgacttctaccctggggctgtgacagtggcttggaaggccgatggatctcctgtgaaagccggcgtggaaaccaccaagccatccaagcagagcaacaacaaatacgccgccagctcctacctgagcctgacacctgagcagtggaagtcccacagatcctacagctgccaagtgacccacgaaggcagcaccgtggaaaagacagtggcccctacagagtgcagcggatccctgggagagcctcagctgtgctatatcctggacgccatcctgtttctgtacggcatcgtgctgaccctgctgtactgccggctgaagatccaagtgcggaaggccgccatcaccagctacgagaaatccgacggcgtgtacaccggcctgagcaccagaaatcaagagacatacgagacactgaagcacgaaaagcctccacaaagggccaagcgatctggatctggagcaacaaacttctcactactcaaacaagcaggtgacgtggaggagaatcccgggcctactagtatggactggatttggcgcatccttttccttgtcggcgctgctaccggcgcgcattccttcgaacaggttcagctggttcagagcggagccgaagtgaagaaacctggggcctctgtgaaggtgtcctgcaaggcttccggctacacctttaccaactacctgatcgagtgggtccgacaggctccaggacaaggactggaatggatgggcctgattaaccctggcagcggcggcaccaactacaacgagaagttcaagggcagagtgaccatgaccaccgacaccagcacaagcaccgcctacatggaactgcggagcctgagaagcgacgacaccgccgtgtattattgcgccagaagaagccctctcggctcttggatctactacgcctatgacggcgtggcctattggggccagggaacactggttacagtgtcctctacgcgtgcctctacaaagggaccctccgtgtttcctctggctcccagcagcaagtctacaagcggaggaacagccgctctgggctgcctggtcaaggattactttcccgagcctgtgaccgtgtcctggaatagcggagcactgacaagcggcgtgcacacctttccagccgtgctgcaaagcagcggcctgtactctctgagcagcgtggtcacagtgcctagctctagcctgggcacccagacctacatctgcaatgtgaaccacaagcctagcaacaccaaggtggacaagagagtggaacccaagagctgtggtaccctcggagaaccacagctctgttacattctggatgctatcctgttcctctatgggatcgtcctgacactcctgtattgcagactcaaaattcaagttcgcaaagccgccattacctcttacgagaagagtgatggggtgtacacaggactgtctacccggaatcaagaaacctacgaaaccctcaaacatgagaagccacctcagtaa

SEQ ID NO: 34836 - DNA, 1887 bp, synthetic construct
  source 1..1887: mol_type = other DNA
atggccttaccagtgaccgccttgctcctgccgctggccttgctgctccacgccgccaggccggagatcgtgctgacacagtctcccgccacactgtcactgtctccaggcgaaagagccacactgagctgtagcgtgtccagcagcatcagcagcagcaacctgcactggtatcagcagaagcctggacaggcccctcggctgctgatctacgccacatctaatctggcctctggcatccccgccagattttctggctctggaagcggcaccgacttcaccctgaccataagcagcctggaacctgaggacttcgccgtgtactactgccagcagtggtccagctatccccacacatttggcggaggcaccaaggtggaaatcaagagactcgaggacctgaagaacgtgttcccacctgaggtggccgtgttcgagcctagcgaggccgagatcagccacacccagaaagccaccctcgtgtgcctggctaccggcttctaccccgaccatgtggaactgtcttggtgggtcaacggcaaagaggtgcacagcggcgtgtgtaccgacccccagccactgaaagaacagcccgccctgaacgacagccggtactgcctgagcagcagactgagagtgtccgccaccttctggcagaacccccggaaccacttcagatgccaggtgcagttctacggcctgagcgagaacgacgagtggacccaggacagagccaagcccgtgacccagatcgtgtctgccgaagcctggggcagagccgattgcggctttaccagcgagagctaccagcagggcgtgctgagcgcctactacatgtacttgttgctgctgctgaagtccgtggtgtacttcgccatcatcacatgctgcctgctgcggagaaccgccttctgctgcaacggcgagaagtctagggccaagcgatctggatctggagcaacaaacttctcactactcaaacaagcaggtgacgtggaggagaatcccgggcctactagtatggactggatttggcgcatccttttccttgtcggcgctgctaccggcgcgcattccttcgaacaggttcagctggttcagagcggagccgaagtgaagaaacctggggcctctgtgaaggtgtcctgcaaggcttccggctacacctttaccaactacctgatcgagtgggtccgacaggctccaggacaaggactggaatggatgggcctgattaaccctggcagcggcggcaccaactacaacgagaagttcaagggcagagtgaccatgaccaccgacaccagcacaagcaccgcctacatggaactgcggagcctgagaagcgacgacaccgccgtgtattattgcgccagaagaagccctctcggctcttggatctactacgcctatgacggcgtggcctattggggccagggaacactggttacagtgtcctctacgcgtatccagaaccctgatcctgccgtgtaccagctgcgggatagcaagagcagcgacaagagcgtgtgtctgttcaccgacttcgacagccagaccaacgtgtcccagagcaaggactccgacgtgtacatcaccgataagtgcgtgctggacatgcggagcatggacttcaagagcaactccgccgtggcctggtccaacaagtccgatttcgcctgcgccaacgccttcaacaacagcattatccccgaggacacattcttcccaagccccgagagcagctgcgacgtgaagctggtggaaaagagcttcgagacagacaccaacctgaacttccagaacctgagcgtgatcggcttcagaatcctgctgctgaaagtggccggctttaacctgctgatgaccctgcggctgtggtccagc

SEQ ID NO: 34837 - DNA, 1908 bp, synthetic construct
  source 1..1908: mol_type = other DNA
atggccttaccagtgaccgccttgctcctgccgctggccttgctgctccacgccgccaggccggagatcgtgctgacacagtctcccgccacactgtcactgtctccaggcgaaagagccacactgagctgtagcgtgtccagcagcatcagcagcagcaacctgcactggtatcagcagaagcctggacaggcccctcggctgctgatctacgccacatctaatctggcctctggcatccccgccagattttctggctctggaagcggcaccgacttcaccctgaccataagcagcctggaacctgaggacttcgccgtgtactactgccagcagtggtccagctatccccacacatttggcggaggcaccaaggtggaaatcaagagactcgaggacaagcagctggacgccgacgtgtcccccaagcctaccatcttcctgccctctatcgccgagacaaagctccagaaggccggcacctacctgtgcctgctggaaaagttcttcccagatgtgattaagatccactggcaggaaaagaagtccaacaccatcctgggcagccaggaaggcaacaccatgaagaccaacgacacctacatgaagttcagctggctgaccgtgcccgagaagtccctggacaaagaacacagatgcatcgtgcggcacgaaaacaacaagaacggcgtggaccaggaaatcatcttcccacccatcaagaccgatgtgattacaatggaccccaaggacaactgctccaaggacgccaacgataccctgctgctccagctgaccaacaccagcgcctactacatgtacgagatcctgctgggcaaggccaccctgtacgccgtgctggtgtctgccctggtgctgatggctatggtcaagcggaaggacagccggggaagggccaagcgatctggatctggagcaacaaacttctcactactcaaacaagcaggtgacgtggaggagaatcccgggcctactagtatggactggatttggcgcatccttttccttgtcggcgctgctaccggcgcgcattccttcgaacaggttcagctggttcagagcggagccgaagtgaagaaacctggggcctctgtgaaggtgtcctgcaaggcttccggctacacctttaccaactacctgatcgagtgggtccgacaggctccaggacaaggactggaatggatgggcctgattaaccctggcagcggcggcaccaactacaacgagaagttcaagggcagagtgaccatgaccaccgacaccagcacaagcaccgcctacatggaactgcggagcctgagaagcgacgacaccgccgtgtattattgcgccagaagaagccctctcggctcttggatctactacgcctatgacggcgtggcctattggggccagggaacactggttacagtgtcctctacgcgtagccagcctcacaccaagcccagcgtgttcgtgatgaagaacggcaccaacgtggcctgcctcgtgaaagagttctaccccaaggacatcaggatcaacctggtgtccagcaagaagatcaccgagttcgaccccgccatcgtgatctcccccagcggcaagtacaacgccgtgaagctggggaagtatgaggacagcaacagcgtgacctgctccgtgcagcacgacaacaagaccgtgcacagcaccgactttgaagtgaaaaccgactccaccgaccacgtgaagcccaaagagacagagaacaccaagcagcccagcaagagctgccacaagcccaaggccatcgtgcacaccgagaaagtgaacatgatgagcctgaccgtgatcggcttcagaatcctgctgctgaaagtggccggctttaacctgctgatgaccctgcggctgtggtccagctaa

SEQ ID NO: 34838 - DNA, 1908 bp, synthetic construct
  source 1..1908: mol_type = other DNA
atggccttaccagtgaccgccttgctcctgccgctggccttgctgctccacgccgccaggccggagatcgtgctgacacagtctcccgccacactgtcactgtctccaggcgaaagagccacactgagctgtagcgtgtccagcagcatcagcagcagcaacctgcactggtatcagcagaagcctggacaggcccctcggctgctgatctacgccacatctaatctggcctctggcatccccgccagattttctggctctggaagcggcaccgacttcaccctgaccataagcagcctggaacctgaggacttcgccgtgtactactgccagcagtggtccagctatccccacacatttggcggaggcaccaaggtggaaatcaagagactcgaggacaagcagctggacgccgacgtgtcccccaagcctaccatcttcctgccctctatcgccgagacaaagctccagaaggccggcacctacctgtgcctgctggaaaagttcttcccagatgtgattaagatccactggcaggaaaagaagtccaacaccatcctgggcagccaggaaggcaacaccatgaagaccaacgacacctacatgaagttcagctggctgaccgtgcccgagaagtccctggacaaagaacacagatgcatcgtgcggcacgaaaacaacaagaacggcgtggaccaggaaatcatcttcccacccatcaagaccgatgtgattacaatggaccccaaggacaactgctccaaggacgccaacgataccctgctgctccagctgaccaacaccagcgccaccatcctgtacgagatcctgctgggcaaggccaccctgtacgccgtgctggtgtctgccctggtgctgatggctatggtcaagcggaaggacagccggggaagggccaagcgatctggatctggagcaacaaacttctcactactcaaacaagcaggtgacgtggaggagaatcccgggcctactagtatggactggatttggcgcatccttttccttgtcggcgctgctaccggcgcgcattccttcgaacaggttcagctggttcagagcggagccgaagtgaagaaacctggggcctctgtgaaggtgtcctgcaaggcttccggctacacctttaccaactacctgatcgagtgggtccgacaggctccaggacaaggactggaatggatgggcctgattaaccctggcagcggcggcaccaactacaacgagaagttcaagggcagagtgaccatgaccaccgacaccagcacaagcaccgcctacatggaactgcggagcctgagaagcgacgacaccgccgtgtattattgcgccagaagaagccctctcggctcttggatctactacgcctatgacggcgtggcctattggggccagggaacactggttacagtgtcctctacgcgtagccagcctcacaccaagcccagcgtgttcgtgatgaagaacggcaccaacgtggcctgcctcgtgaaagagttctaccccaaggacatcaggatcaacctggtgtccagcaagaagatcaccgagttcgaccccgccatcgtgatctcccccagcggcaagtacaacgccgtgaagctggggaagtatgaggacagcaacagcgtgacctgctccgtgcagcacgacaacaagaccgtgcacagcaccgactttgaagtgaaaaccgactccaccgaccacgtgaagcccaaagagacagagaacaccaagcagcccagcaagagctgccacaagcccaaggccatcgtgcacaccgagaaagtgaacatgatgagcctgaccgtgatcggcttcagaatcctgctgctgaaagtggccggctttaacctgctgatgaccctgcggctgtggtccagctaa

SEQ ID NO: 34839 - DNA, 1908 bp, synthetic construct
  source 1..1908: mol_type = other DNA
atggccttaccagtgaccgccttgctcctgccgctggccttgctgctccacgccgccaggccggagatcgtgctgacacagtctcccgccacactgtcactgtctccaggcgaaagagccacactgagctgtagcgtgtccagcagcatcagcagcagcaacctgcactggtatcagcagaagcctggacaggcccctcggctgctgatctacgccacatctaatctggcctctggcatccccgccagattttctggctctggaagcggcaccgacttcaccctgaccataagcagcctggaacctgaggacttcgccgtgtactactgccagcagtggtccagctatccccacacatttggcggaggcaccaaggtggaaatcaagagactcgaggacaagcagctggacgccgacgtgtcccccaagcctaccatcttcctgccctctatcgccgagacaaagctccagaaggccggcacctacctgtgcctgctggaaaagttcttcccagatgtgattaagatccactggcaggaaaagaagtccaacaccatcctgggcagccaggaaggcaacaccatgaagaccaacgacacctacatgaagttcagctggctgaccgtgcccgagaagtccctggacaaagaacacagatgcatcgtgcggcacgaaaacaacaagaacggcgtggaccaggaaatcatcttcccacccatcaagaccgatgtgattacaatggaccccaaggacaactgctccaaggacgccaacgataccctgctgctccagctgaccaacaccagcgcctactacatgtacgagatcctgctgggcaaggccaccctgtacgccgtgctggtgtctgccctggtgctgatggctatggtcaagcggaaggacagccggggaagggccaagcgatctggatctggagcaacaaacttctcactactcaaacaagcaggtgacgtggaggagaatcccgggcctactagtatggactggatttggcgcatccttttccttgtcggcgctgctaccggcgcgcattccttcgaacaggttcagctggttcagagcggagccgaagtgaagaaacctggggcctctgtgaaggtgtcctgcaaggcttccggctacacctttaccaactacctgatcgagtgggtccgacaggctccaggacaaggactggaatggatgggcctgattaaccctggcagcggcggcaccaactacaacgagaagttcaagggcagagtgaccatgaccaccgacaccagcacaagcaccgcctacatggaactgcggagcctgagaagcgacgacaccgccgtgtattattgcgccagaagaagccctctcggctcttggatctactacgcctatgacggcgtggcctattggggccagggaacactggttacagtgtcctctacgcgtagccagcctcacaccaagcccagcgtgttcgtgatgaagaacggcaccaacgtggcctgcctcgtgaaagagttctaccccaaggacatcaggatcaacctggtgtccagcaagaagatcaccgagttcgaccccgccatcgtgatctcccccagcggcaagtacaacgccgtgaagctggggaagtacgaggacagcaacagcgtgacctgctccgtgcagcacgacaacaagaccgtgcacagcaccgactttgaagtgaaaaccgactccaccgaccacgtgaagcccaaagagacagagaacaccaagcagcccagcaagagctgccacaagcccaaggccatcgtgcacaccgagaaagtgaacatgatgagcctgaccgtgctgggcttcagaatcctgctgctgaaagtggccggctttaacctgctgatgaccctgcggctgtggtccagctaa

SEQ ID NO: 34840 - DNA, 1908 bp, synthetic construct
  source 1..1908: mol_type = other DNA
atggccttaccagtgaccgccttgctcctgccgctggccttgctgctccacgccgccaggccggagatcgtgctgacacagtctcccgccacactgtcactgtctccaggcgaaagagccacactgagctgtagcgtgtccagcagcatcagcagcagcaacctgcactggtatcagcagaagcctggacaggcccctcggctgctgatctacgccacatctaatctggcctctggcatccccgccagattttctggctctggaagcggcaccgacttcaccctgaccataagcagcctggaacctgaggacttcgccgtgtactactgccagcagtggtccagctatccccacacatttggcggaggcaccaaggtggaaatcaagagactcgaggacaagcagctggacgccgacgtgtcccccaagcctaccatcttcctgccctctatcgccgagacaaagctccagaaggccggcacctacctgtgcctgctggaaaagttcttcccagatgtgattaagatccactggcaggaaaagaagtccaacaccatcctgggcagccaggaaggcaacaccatgaagaccaacgacacctacatgaagttcagctggctgaccgtgcccgagaagtccctggacaaagaacacagatgcatcgtgcggcacgaaaacaacaagaacggcgtggaccaggaaatcatcttcccacccatcaagaccgatgtgattacaatggaccccaaggacaactgctccaaggacgccaacgataccctgctgctccagctgaccaacaccagcgccaccatcctgtacgagatcctgctgggcaaggccaccctgtacgccgtgctggtgtctgccctggtgctgatggctatggtcaagcggaaggacagccggggaagggccaagcgatctggatctggagcaacaaacttctcactactcaaacaagcaggtgacgtggaggagaatcccgggcctactagtatggactggatttggcgcatccttttccttgtcggcgctgctaccggcgcgcattccttcgaacaggttcagctggttcagagcggagccgaagtgaagaaacctggggcctctgtgaaggtgtcctgcaaggcttccggctacacctttaccaactacctgatcgagtgggtccgacaggctccaggacaaggactggaatggatgggcctgattaaccctggcagcggcggcaccaactacaacgagaagttcaagggcagagtgaccatgaccaccgacaccagcacaagcaccgcctacatggaactgcggagcctgagaagcgacgacaccgccgtgtattattgcgccagaagaagccctctcggctcttggatctactacgcctatgacggcgtggcctattggggccagggaacactggttacagtgtcctctacgcgtagccagcctcacaccaagcccagcgtgttcgtgatgaagaacggcaccaacgtggcctgcctcgtgaaagagttctaccccaaggacatcaggatcaacctggtgtccagcaagaagatcaccgagttcgaccccgccatcgtgatctcccccagcggcaagtacaacgccgtgaagctggggaagtacgaggacagcaacagcgtgacctgctccgtgcagcacgacaacaagaccgtgcacagcaccgactttgaagtgaaaaccgactccaccgaccacgtgaagcccaaagagacagagaacaccaagcagcccagcaagagctgccacaagcccaaggccatcgtgcacaccgagaaagtgaacatgatgagcctgaccgtgctgggcttcagaatcctgctgctgaaagtggccggctttaacctgctgatgaccctgcggctgtggtccagctaa

SEQ ID NO: 34841 - DNA, 1890 bp, synthetic construct
  source 1..1890: mol_type = other DNA
atggccttaccagtgaccgccttgctcctgccgctggccttgctgctccacgccgccaggccggagatcgtgctgacacagtctcccgccacactgtcactgtctccaggcgaaagagccacactgagctgtagcgtgtccagcagcatcagcagcagcaacctgcactggtatcagcagaagcctggacaggcccctcggctgctgatctacgccacatctaatctggcctctggcatccccgccagattttctggctctggaagcggcaccgacttcaccctgaccataagcagcctggaacctgaggacttcgccgtgtactactgccagcagtggtccagctatccccacacatttggcggaggcaccaaggtggaaatcaagagactcgaggacctgaagaacgtgttcccacctgaggtggccgtgttcgagcctagcgaggccgagatcagccacacccagaaagccaccctcgtgtgcctggctaccggcttctaccccgaccatgtggaactgtcttggtgggtcaacggcaaagaggtgcacagcggcgtgtgtaccgacccccagccactgaaagaacagcccgccctgaacgacagccggtactgcctgagcagcagactgagagtgtccgccaccttctggcagaacccccggaaccacttcagatgccaggtgcagttctacggcctgagcgagaacgacgagtggacccaggacagagccaagcccgtgacccagatcgtgtctgccgaagcctggggcagagccgattgcggctttaccagcgagagctaccagcagggcgtgctgagcgccaccatcctgtacttgttgctgctgctgaagtccgtggtgtacttcgccatcatcacatgctgcctgctgcggagaaccgccttctgctgcaacggcgagaagtctagggccaagcgatctggatctggagcaacaaacttctcactactcaaacaagcaggtgacgtggaggagaatcccgggcctactagtatggactggatttggcgcatccttttccttgtcggcgctgctaccggcgcgcattccttcgaacaggttcagctggttcagagcggagccgaagtgaagaaacctggggcctctgtgaaggtgtcctgcaaggcttccggctacacctttaccaactacctgatcgagtgggtccgacaggctccaggacaaggactggaatggatgggcctgattaaccctggcagcggcggcaccaactacaacgagaagttcaagggcagagtgaccatgaccaccgacaccagcacaagcaccgcctacatggaactgcggagcctgagaagcgacgacaccgccgtgtattattgcgccagaagaagccctctcggctcttggatctactacgcctatgacggcgtggcctattggggccagggaacactggttacagtgtcctctacgcgtatccagaaccctgatcctgccgtgtaccagctgcgggatagcaagagcagcgacaagagcgtgtgtctgttcaccgacttcgacagccagaccaacgtgtcccagagcaaggactccgacgtgtacatcaccgataagtgcgtgctggacatgcggagcatggacttcaagagcaactccgccgtggcctggtccaacaagtccgatttcgcctgcgccaacgccttcaacaacagcattatccccgaggacacattcttcccaagccccgagagcagctgcgacgtgaagctggtggaaaagagcttcgagacagacaccaacctgaacttccagaacctgagcgtgatcggcctgcggatgctgttcgccaaaaccgtggccgtgaacttcctgctgaccgccaagctgttcttcctctaa

SEQ ID NO: 34842 - DNA, 1977 bp, synthetic construct
  source 1..1977: mol_type = other DNA
atggccttaccagtgaccgccttgctcctgccgctggccttgctgctccacgccgccaggccggagatcgtgctgacacagtctcccgccacactgtcactgtctccaggcgaaagagccacactgagctgtagcgtgtccagcagcatcagcagcagcaacctgcactggtatcagcagaagcctggacaggcccctcggctgctgatctacgccacatctaatctggcctctggcatccccgccagattttctggctctggaagcggcaccgacttcaccctgaccataagcagcctggaacctgaggacttcgccgtgtactactgccagcagtggtccagctatccccacacatttggcggaggcaccaaggtggaaatcaagagactcgaggacctgaagaacgtgttcccacctgaggtggccgtgttcgagcctagcgaggccgagatcagccacacccagaaagccaccctcgtgtgcctggctaccggcttctaccccgaccatgtggaactgtcttggtgggtcaacggcaaagaggtgcacagcggcgtgtctaccgacccccagccactgaaagaacagcccgccctgaacgacagccggtactgcctgagcagcagactgagagtgtccgccaccttctggcagaacccccggaaccacttcagatgccaggtgcagttctacggcctgagcgagaacgacgagtggacccaggacagagccaagcccgtgacccagatcgtgtctgccgaagcctggggcagagccgattgcggatcctccaaggacgccaacgataccctgctgctccagctgaccaacaccagcgcctactacatgtacttgttgctgctgctgaagtccgtggtgtacttcgccatcatcacatgctgcctgctgcggagaaccgccttctgctgcaacggcgagaagtctagggccaagcgatctggatctggagcaacaaacttctcactactcaaacaagcaggtgacgtggaggagaatcccgggcctactagtatggactggatttggcgcatccttttccttgtcggcgctgctaccggcgcgcattccttcgaacaggttcagctggttcagagcggagccgaagtgaagaaacctggggcctctgtgaaggtgtcctgcaaggcttccggctacacctttaccaactacctgatcgagtgggtccgacaggctccaggacaaggactggaatggatgggcctgattaaccctggcagcggcggcaccaactacaacgagaagttcaagggcagagtgaccatgaccaccgacaccagcacaagcaccgcctacatggaactgcggagcctgagaagcgacgacaccgccgtgtattattgcgccagaagaagccctctcggctcttggatctactacgcctatgacggcgtggcctattggggccagggaacactggttacagtgtcctctacgcgtatccagaaccctgatcctgccgtgtaccagctgcgggatagcaagagcagcgacaagagcgtgtgtctgttcaccgacttcgacagccagaccaacgtgtcccagagcaaggactccgacgtgtacatcaccgataagaccgtgctggacatgcggagcatggacttcaagagcaactccgccgtggcctggtccaacaagtccgatttcgcctgcgccaacgccttcaacaacagcattatccccgaggacacattcttcccaagccccgagagcagctgcggtaccgaagtgaaaaccgactccaccgaccacgtgaagcccaaagagacagagaacaccaagcagcccagcaagagctgccacaagcccaaggccatcgtgcacaccgagaaagtgaacatgatgagcctgaccgtgctgggcctgcggatgctgttcgccaaaaccgtggccgtgaacttcctgctgaccgccaagctgttcttcctctaa

SEQ ID NO: 34843 - DNA, 1887 bp, synthetic construct
  source 1..1887: mol_type = other DNA
atggccttaccagtgaccgccttgctcctgccgctggccttgctgctccacgccgccaggccggagatcgtgctgacacagtctcccgccacactgtcactgtctccaggcgaaagagccacactgagctgtagcgtgtccagcagcatcagcagcagcaacctgcactggtatcagcagaagcctggacaggcccctcggctgctgatctacgccacatctaatctggcctctggcatccccgccagattttctggctctggaagcggcaccgacttcaccctgaccataagcagcctggaacctgaggacttcgccgtgtactactgccagcagtggtccagctatccccacacatttggcggaggcaccaaggtggaaatcaagagactcgaggacctgaagaacgtgttcccacctgaggtggccgtgttcgagcctagcgaggccgagatcagccacacccagaaagccaccctcgtgtgcctggctaccggcttctaccccgaccatgtggaactgtcttggtgggtcaacggcaaagaggtgcacagcggcgtgtgtaccgacccccagccactgaaagaacagcccgccctgaacgacagccggtactgcctgagcagcagactgagagtgtccgccaccttctggcagaacccccggaaccacttcagatgccaggtgcagttctacggcctgagcgagaacgacgagtggacccaggacagagccaagcccgtgacccagatcgtgtctgccgaagcctggggcagagccgattgcgacgtgaagctggtggaaaagagcttcgagacagacaccaacctgaacttccagaacctgagcgtgatcggcttcagaatcctgctgctgaaagtggccggctttaacctgctgatgaccctgcggctgtggtccagcagggccaagcgatctggatctggagcaacaaacttctcactactcaaacaagcaggtgacgtggaggagaatcccgggcctactagtatggactggatttggcgcatccttttccttgtcggcgctgctaccggcgcgcattccttcgaacaggttcagctggttcagagcggagccgaagtgaagaaacctggggcctctgtgaaggtgtcctgcaaggcttccggctacacctttaccaactacctgatcgagtgggtccgacaggctccaggacaaggactggaatggatgggcctgattaaccctggcagcggcggcaccaactacaacgagaagttcaagggcagagtgaccatgaccaccgacaccagcacaagcaccgcctacatggaactgcggagcctgagaagcgacgacaccgccgtgtattattgcgccagaagaagccctctcggctcttggatctactacgcctatgacggcgtggcctattggggccagggaacactggttacagtgtcctctacgcgtatccagaaccctgatcctgccgtgtaccagctgcgggatagcaagagcagcgacaagagcgtgtgtctgttcaccgacttcgacagccagaccaacgtgtcccagagcaaggactccgacgtgtacatcaccgataagtgcgtgctggacatgcggagcatggacttcaagagcaactccgccgtggcctggtccaacaagtccgatttcgcctgcgccaacgccttcaacaacagcattatccccgaggacacattcttcccaagccccgagagcagctgcggctttaccagcgagagctaccagcagggcgtgctgagcgccaccatcctgtacgagatcctgctgggcaaggccaccctgtacgccgtgctggtgtctgccctggtgctgatggctatggtcaagcggaaggacagccggggataa

SEQ ID NO: 34844 - DNA, 1887 bp, synthetic construct
  source 1..1887: mol_type = other DNA
atggccttaccagtgaccgccttgctcctgccgctggccttgctgctccacgccgccaggccggagatcgtgctgacacagtctcccgccacactgtcactgtctccaggcgaaagagccacactgagctgtagcgtgtccagcagcatcagcagcagcaacctgcactggtatcagcagaagcctggacaggcccctcggctgctgatctacgccacatctaatctggcctctggcatccccgccagattttctggctctggaagcggcaccgacttcaccctgaccataagcagcctggaacctgaggacttcgccgtgtactactgccagcagtggtccagctatccccacacatttggcggaggcaccaaggtggaaatcaagagactcgaggacctgaagaacgtgttcccacctgaggtggccgtgttcgagcctagcgaggccgagatcagccacacccagaaagccaccctcgtgtgcctggctaccggcttctaccccgaccatgtggaactgtcttggtgggtcaacggcaaagaggtgcacagcggcgtgtgtaccgacccccagccactgaaagaacagcccgccctgaacgacagccggtactgcctgagcagcagactgagagtgtccgccaccttctggcagaacccccggaaccacttcagatgccaggtgcagttctacggcctgagcgagaacgacgagtggacccaggacagagccaagcccgtgacccagatcgtgtctgccgaagcctggggcagagccgattgcggctttaccagcgagagctaccagcagggcgtgctgagcgccaccaacctgagcgtgatcggcttcagaatcctgctgctgaaagtggccggctttaacctgctgatgaccctgcggctgtggtccagcagggccaagcgatctggatctggagcaacaaacttctcactactcaaacaagcaggtgacgtggaggagaatcccgggcctactagtatggactggatttggcgcatccttttccttgtcggcgctgctaccggcgcgcattccttcgaacaggttcagctggttcagagcggagccgaagtgaagaaacctggggcctctgtgaaggtgtcctgcaaggcttccggctacacctttaccaactacctgatcgagtgggtccgacaggctccaggacaaggactggaatggatgggcctgattaaccctggcagcggcggcaccaactacaacgagaagttcaagggcagagtgaccatgaccaccgacaccagcacaagcaccgcctacatggaactgcggagcctgagaagcgacgacaccgccgtgtattattgcgccagaagaagccctctcggctcttggatctactacgcctatgacggcgtggcctattggggccagggaacactggttacagtgtcctctacgcgtatccagaaccctgatcctgccgtgtaccagctgcgggatagcaagagcagcgacaagagcgtgtgtctgttcaccgacttcgacagccagaccaacgtgtcccagagcaaggactccgacgtgtacatcaccgataagtgcgtgctggacatgcggagcatggacttcaagagcaactccgccgtggcctggtccaacaagtccgatttcgcctgcgccaacgccttcaacaacagcattatccccgaggacacattcttcccaagccccgagagcagctgcgacgtgaagctggtggaaaagagcttcgagacagacaccaacctgaacttccagatcctgtacgagatcctgctgggcaaggccaccctgtacgccgtgctggtgtctgccctggtgctgatggctatggtcaagcggaaggacagccggggataa

SEQ ID NO: 34845 - DNA, 1887 bp, synthetic construct; identical to SEQ ID NO: 34843
  source 1..1887: mol_type = other DNA

SEQ ID NO: 34846 - DNA, 1887 bp, synthetic construct; identical to SEQ ID NO: 34844
  source 1..1887: mol_type = other DNA

SEQ ID NO: 34847 - DNA, 1884 bp, synthetic construct
  source 1..1884: mol_type = other DNA
atggccttaccagtgaccgccttgctcctgccgctggccttgctgctccacgccgccaggccggagatcgtgctgacacagtctcccgccacactgtcactgtctccaggcgaaagagccacactgagctgtagcgtgtccagcagcatcagcagcagcaacctgcactggtatcagcagaagcctggacaggcccctcggctgctgatctacgccacatctaatctggcctctggcatccccgccagattttctggctctggaagcggcaccgacttcaccctgaccataagcagcctggaacctgaggacttcgccgtgtactactgccagcagtggtccagctatccccacacatttggcggaggcaccaaggtggaaatcaagagactcgaggacctgaagaacgtgttcccacctgaggtggccgtgttcgagcctagcgaggccgagatcagccacacccagaaagccaccctcgtgtgcctggctaccggcttctaccccgaccatgtggaactgtcttggtgggtcaacggcaaagaggtgcacagcggcgtgtgtaccgacccccagccactgaaagaacagcccgccctgaacgacagccggtactgcctgagcagcagactgagagtgtccgccaccttctggcagaacccccggaaccacttcagatgccaggtgcagttctacggcctgagcgagaacgacgagtggacccaggacagagccaagcccgtgacccagatcgtgtctgccgaagcctggggcagagccgattgcgacgtgaagctggtggaaaagagcttcgagacagacaccaacctgaacttccagaacctgagcgtgatcggcttcagaatcctgctgctgaaagtggccggctttaacctgctgatgaccctgcggctgtggtccagcagggccaagcgatctggatctggagcaacaaacttctcactactcaaacaagcaggtgacgtggaggagaatcccgggcctactagtatggactggatttggcgcatccttttccttgtcggcgctgctaccggcgcgcattccttcgaacaggttcagctggttcagagcggagccgaagtgaagaaacctggggcctctgtgaaggtgtcctgcaaggcttccggctacacctttaccaactacctgatcgagtgggtccgacaggctccaggacaaggactggaatggatgggcctgattaaccctggcagcggcggcaccaactacaacgagaagttcaagggcagagtgaccatgaccaccgacaccagcacaagcaccgcctacatggaactgcggagcctgagaagcgacgacaccgccgtgtattattgcgccagaagaagccctctcggctcttggatctactacgcctatgacggcgtggcctattggggccagggaacactggttacagtgtcctctacgcgtatccagaaccctgatcctgccgtgtaccagctgcgggatagcaagagcagcgacaagagcgtgtgtctgttcaccgacttcgacagccagaccaacgtgtcccagagcaaggactccgacgtgtacatcaccgataagtgcgtgctggacatgcggagcatggacttcaagagcaactccgccgtggcctggtccaacaagtccgatttcgcctgcgccaacgccttcaacaacagcattatccccgaggacacattcttcccaagccccgagagcagctgcggctttaccagcgagagctaccagcagggcgtgctgagcgccaccatcctgtacgagatcctgctgggcaaggccaccctgtacgccgtgctggtgtctgccctggtgctgatggctatggtcaagcggaaggacagccgggga

SEQ ID NO: 34848 - DNA, 1896 bp, synthetic construct
  source 1..1896: mol_type = other DNA
atggccttaccagtgaccgccttgctcctgccgctggccttgctgctccacgccgccaggccggagatcgtgctgacacagtctcccgccacactgtcactgtctccaggcgaaagagccacactgagctgtagcgtgtccagcagcatcagcagcagcaacctgcactggtatcagcagaagcctggacaggcccctcggctgctgatctacgccacatctaatctggcctctggcatccccgccagattttctggctctggaagcggcaccgacttcaccctgaccataagcagcctggaacctgaggacttcgccgtgtactactgccagcagtggtccagctatccccacacatttggcggaggcaccaaggtggaaatcaagagactcgaggccgacgtgtcccccaagcctaccatcttcctgccctctatcgccgagacaaagctccagaaggccggcacctacctgtgcctgctggaaaagttcttcccagatgtgattaagatccactggcaggaaaagaagtccaacaccatcctgggcagccaggaaggcaacaccatgaagaccaacgacacctacatgaagttcagctggctgaccgtgcccgagaagtccctggacaaagaacacagatgcatcgtgcggcacgaaaacaacaagaacggcgtggaccaggaaatcatcttcccacccatcaagaccgatgtgattacaatggaccccaaggacaactgctccaaggacgccaacgataccctgctgctccagctgaccaacaccagcgcctactacatgtacttgttgctgctgctgaagtccgtggtgtacttcgccatcatcacatgctgcctgctgcggagaaccgccttctgctgcaacggcgagaagtctagggccaagcgatctggatctggagcaacaaacttctcactactcaaacaagcaggtgacgtggaggagaatcccgggcctactagtatggactggatttggcgcatccttttccttgtcggcgctgctaccggcgcgcattccttcgaacaggttcagctggttcagagcggagccgaagtgaagaaacctggggcctctgtgaaggtgtcctgcaaggcttccggctacacctttaccaactacctgatcgagtgggtccgacaggctccaggacaaggactggaatggatgggcctgattaaccctggcagcggcggcaccaactacaacgagaagttcaagggcagagtgaccatgaccaccgacaccagcacaagcaccgcctacatggaactgcggagcctgagaagcgacgacaccgccgtgtattattgcgccagaagaagccctctcggctcttggatctactacgcctatgacggcgtggcctattggggccagggaacactggttacagtgtcctctacgcgtagccagcctcacaccaagcccagcgtgttcgtgatgaagaacggcaccaacgtggcctgcctcgtgaaagagttctaccccaaggacatcaggatcaacctggtgtccagcaagaagatcaccgagttcgaccccgccatcgtgatctcccccagcggcaagtacaacgccgtgaagctggggaagtatgaggacagcaacagcgtgacctgctccgtgcagcacgacaacaagaccgtgcacagcaccgactttgaagtgaaaaccgactccaccgaccacgtgaagcccaaagagacagagaacaccaagcagcccagcaagagctgccacaagcccaaggccatcgtgcacaccgagaaagtgaacatgatgagcctgaccgtgatcggcttcagaatcctgctgctgaaagtggccggctttaacctgctgatgaccctgcggctgtggtccagctaa

SEQ ID NO: 34849 - DNA, 1896 bp, synthetic construct
  source 1..1896: mol_type = other DNA
atggccttaccagtgaccgccttgctcctgccgctggccttgctgctccacgccgccaggccggagatcgtgctgacacagtctcccgccacactgtcactgtctccaggcgaaagagccacactgagctgtagcgtgtccagcagcatcagcagcagcaacctgcactggtatcagcagaagcctggacaggcccctcggctgctgatctacgccacatctaatctggcctctggcatccccgccagattttctggctctggaagcggcaccgacttcaccctgaccataagcagcctggaacctgaggacttcgccgtgtactactgccagcagtggtccagctatccccacacatttggcggaggcaccaaggtggaaatcaagagactcgaggccgacgtgtcccccaagcctaccatcttcctgccctctatcgccgagacaaagctccagaaggccggcacctacctgtgcctgctggaaaagttcttcccagatgtgattaagatccactggcaggaaaagaagtccaacaccatcctgggcagccaggaaggcaacaccatgaagaccaacgacacctacatgaagttcagctggctgaccgtgcccgagaagtccctggacaaagaacacagatgcatcgtgcggcacgaaaacaacaagaacggcgtggaccaggaaatcatcttcccacccatcaagaccgatgtgattacaatggaccccaaggacaactgctccaaggacgccaacgataccctgctgctccagctgaccaacaccagcgcctactacatgtacttgttgctgctgctgaagtccgtggtgtacttcgccatcatcacatgctgcctgctgcggagaaccgccttctgctgcaacggcgagaagtctagggccaagcgatctggatctggagcaacaaacttctcactactcaaacaagcaggtgacgtggaggagaatcccgggcctactagtatggactggatttggcgcatccttttccttgtcggcgctgctaccggcgcgcattccttcgaacaggttcagctggttcagagcggagccgaagtgaagaaacctggggcctctgtgaaggtgtcctgcaaggcttccggctacacctttaccaactacctgatcgagtgggtccgacaggctccaggacaaggactggaatggatgggcctgattaaccctggcagcggcggcaccaactacaacgagaagttcaagggcagagtgaccatgaccaccgacaccagcacaagcaccgcctacatggaactgcggagcctgagaagcgacgacaccgccgtgtattattgcgccagaagaagccctctcggctcttggatctactacgcctatgacggcgtggcctattggggccagggaacactggttacagtgtcctctacgcgtagccagcctcacaccaagcccagcgtgttcgtgatgaagaacggcaccaacgtggcctgcctcgtgaaagagttctaccccaaggacatcaggatcaacctggtgtccagcaagaagatcaccgagttcgaccccgccatcgtgatctcccccagcggcaagtacaacgccgtgaagctggggaagtacgaggacagcaacagcgtgacctgctccgtgcagcacgacaacaagaccgtgcacagcaccgactttgaagtgaaaaccgactccaccgaccacgtgaagcccaaagagacagagaacaccaagcagcccagcaagagctgccacaagcccaaggccatcgtgcacaccgagaaagtgaacatgatgagcctgaccgtgctgggcttcagaatcctgctgctgaaagtggccggctttaacctgctgatgaccctgcggctgtggtccagctaa

SEQ ID NO: 34850 - DNA, 1884 bp, synthetic construct; identical to SEQ ID NO: 34847
  source 1..1884: mol_type = other DNA

SEQ ID NO: 34851 - DNA, 1896 bp, synthetic construct
  source 1..1896: mol_type = other DNA
atggccttaccagtgaccgccttgctcctgccgctggccttgctgctccacgccgccaggccggagatcgtgctgacacagtctcccgccacactgtcactgtctccaggcgaaagagccacactgagctgtagcgtgtccagcagcatcagcagcagcaacctgcactggtatcagcagaagcctggacaggcccctcggctgctgatctacgccacatctaatctggcctctggcatccccgccagattttctggctctggaagcggcaccgacttcaccctgaccataagcagcctggaacctgaggacttcgccgtgtactactgccagcagtggtccagctatccccacacatttggcggaggcaccaaggtggaaatcaagagactcgagatccagaaccctgatcctgccgtgtaccagctgcgggatagcaagagcagcgacaagagcgtgtgtctgttcaccgacttcgacagccagaccaacgtgtcccagagcaaggactccgacgtgtacatcaccgataagtgcgtgctggacatgcggagcatggacttcaagagcaactccgccgtggcctggtccaacaagtccgatttcgcctgcgccaacgccttcaacaacagcattatccccgaggacacattcttcccaagccccgagagcagctgcggctttaccagcgagagctaccagcagggcgtgctgagcgccaccatcctgtacgagatcctgctgggcaaggccaccctgtacgccgtgctggtgtctgccctggtgctgatggctatggtcaagcggaaggacagccggggacgcgccaagagaagcggatctggcgtgaagcagaccctgaatttcgacctgctgaagctggctggcgacgtggaatccaacccaggccctactagtatggactggatttggcgcatccttttccttgtcggcgctgctaccggcgcgcattccttcgaacaggttcagctggttcagagcggagccgaagtgaagaaacctggggcctctgtgaaggtgtcctgcaaggcttccggctacacctttaccaactacctgatcgagtgggtccgacaggctccaggacaaggactggaatggatgggcctgattaaccctggcagcggcggcaccaactacaacgagaagttcaagggcagagtgaccatgaccaccgacaccagcacaagcaccgcctacatggaactgcggagcctgagaagcgacgacaccgccgtgtattattgcgccagaagaagccctctcggctcttggatctactacgcctatgacggcgtggcctattggggccagggaacactggttacagtgtcctctacgcgtgaggacctgaagaacgtgttcccacctgaggtggccgtgttcgagcctagcgaggccgagatcagccacacccagaaagccaccctcgtgtgcctggctaccggcttctaccccgaccatgtggaactgtcttggtgggtcaacggcaaagaggtgcacagcggcgtgtgtaccgacccccagccactgaaagaacagcccgccctgaacgacagccggtactgcctgagcagcagactgagagtgtccgccaccttctggcagaacccccggaaccacttcagatgccaggtgcagttctacggcctgagcgagaacgacgagtggacccaggacagagccaagcccgtgacccagatcgtgtctgccgaagcctggggcagagccgattgcgacgtgaagctggtggaaaagagcttcgagacagacaccaacctgaacttccagaacctgagcgtgatcggcttcagaatcctgctgctgaaagtggccggctttaacctgctgatgaccctgcggctgtggtccagc

SEQ ID NO: 34852 - DNA, 2289 bp, synthetic construct
  source 1..2289: mol_type = other DNA
atggccttaccagtgaccgccttgctcctgccgctggccttgctgctccacgccgccaggccggaagtgcagctggttgaatctggcggaggactggttcagcctggcggatctctgagactgtcttgtgccgccagcggcttcagcttcagcgacttttggatgagctgggtccgacaggcccctggcaaaggacttgaatgggtcgccacaatcagccaggccggcagcgagaaggactacgtggactctgtgaagggcagattcaccatcagccgggacaacgccaagaagtccctgtacctccagatgaacagcctgagagccgaggacaccgccgtgtactattgtgcctctggcgtgtacagcttcgactacagaggccagggcaccctggtcacagtctcttctggtaccggcggaggcggatctggcggcggaggtagcggtggcggaggatctgaattcgagatcgtgctgacacagtctcccgccacactgtcactgtctccaggcgaaagagccacactgagctgtagcgtgtccagcagcatcagcagcagcaacctgcactggtatcagcagaagcctggacaggcccctcggctgctgatctacgccacatctaatctggcctctggcatccccgccagattttctggctctggaagcggcaccgacttcaccctgaccataagcagcctggaacctgaggacttcgccgtgtactactgccagcagtggtccagctatccccacacatttggcggaggcaccaaggtggaaatcaagagactcgaggacctgaagaacgtgttcccacctgaggtggccgtgttcgagcctagcgaggccgagatcagccacacccagaaagccaccctcgtgtgcctggctaccggcttctaccccgaccatgtggaactgtcttggtgggtcaacggcaaagaggtgcacagcggcgtgtgtaccgacccccagccactgaaagaacagcccgccctgaacgacagccggtactgcctgagcagcagactgagagtgtccgccaccttctggcagaacccccggaaccacttcagatgccaggtgcagttctacggcctgagcgagaacgacgagtggacccaggacagagccaagcccgtgacccagatcgtgtctgccgaagcctggggcagagccgattgcgacgtgaagctggtggaaaagagcttcgagacagacaccaacctgaacttccagaacctgagcgtgatcggcttcagaatcctgctgctgaaagtggccggctttaacctgctgatgaccctgcggctgtggtccagcagggccaagcgatctggatctggagcaacaaacttctcactactcaaacaagcaggtgacgtggaggagaatcccgggcctactagtatggactggatttggcgcatccttttccttgtcggcgctgctaccggcgcgcattccttcgaacaggttcagctggttcagagcggagccgaagtgaagaaacctggggcctctgtgaaggtgtcctgcaaggcttccggctacacctttaccaactacctgatcgagtgggtccgacaggctccaggacaaggactggaatggatgggcctgattaaccctggcagcggcggcaccaactacaacgagaagttcaagggcagagtgaccatgaccaccgacaccagcacaagcaccgcctacatggaactgcggagcctgagaagcgacgacaccgccgtgtattattgcgccagaagaagccctctcggctcttggatctactacgcctatgacggcgtggcctattggggccagggaacactggttacagtgtcctctacgcgtatccagaaccctgatcctgccgtgtaccagctgcgggatagcaagagcagcgacaagagcgtgtgtctgttcaccgacttcgacagccagaccaacgtgtcccagagcaaggactccgacgtgtacatcaccgataagtgcgtgctggacatgcggagcatggacttcaagagcaactccgccgtggcctggtccaacaagtccgatttcgcctgcgccaacgccttcaacaacagcattatccccgaggacacattcttcccaagccccgagagcagctgcggctttaccagcgagagctaccagcagggcgtgctgagcgccaccatcctgtacgagatcctgctgggcaaggccaccctgtacgccgtgctggtgtctgccctggtgctgatggctatggtcaagcggaaggacagccgggga

SEQ ID NO: 34853 - DNA, 2301 bp, synthetic construct
  source 1..2301: mol_type = other DNA
atggccttaccagtgaccgccttgctcctgccgctggccttgctgctccacgccgccaggccggaagtgcagctggttgaatctggcggaggactggttcagcctggcggatctctgagactgtcttgtgccgccagcggcttcagcttcagcgacttttggatgagctgggtccgacaggcccctggcaaaggacttgaatgggtcgccacaatcagccaggccggcagcgagaaggactacgtggactctgtgaagggcagattcaccatcagccgggacaacgccaagaagtccctgtacctccagatgaacagcctgagagccgaggacaccgccgtgtactattgtgcctctggcgtgtacagcttcgactacagaggccagggcaccctggtcacagtctcttctggtaccggcggaggcggatctggcggcggaggtagcggtggcggaggatctgaattcgagatcgtgctgacacagtctcccgccacactgtcactgtctccaggcgaaagagccacactgagctgtagcgtgtccagcagcatcagcagcagcaacctgcactggtatcagcagaagcctggacaggcccctcggctgctgatctacgccacatctaatctggcctctggcatccccgccagattttctggctctggaagcggcaccgacttcaccctgaccataagcagcctggaacctgaggacttcgccgtgtactactgccagcagtggtccagctatccccacacatttggcggaggcaccaaggtggaaatcaagagactcgagatccagaaccctgatcctgccgtgtaccagctgcgggatagcaagagcagcgacaagagcgtgtgtctgttcaccgacttcgacagccagaccaacgtgtcccagagcaaggactccgacgtgtacatcaccgataagtgcgtgctggacatgcggagcatggacttcaagagcaactccgccgtggcctggtccaacaagtccgatttcgcctgcgccaacgccttcaacaacagcattatccccgaggacacattcttcccaagccccgagagcagctgcggctttaccagcgagagctaccagcagggcgtgctgagcgccaccatcctgtacgagatcctgctgggcaaggccaccctgtacgccgtgctggtgtctgccctggtgctgatggctatggtcaagcggaaggacagccggggacgcgccaagagaagcggatctggcgtgaagcagaccctgaatttcgacctgctgaagctggctggcgacgtggaatccaacccaggccctactagtatggactggatttggcgcatccttttccttgtcggcgctgctaccggcgcgcattccttcgaacaggttcagctggttcagagcggagccgaagtgaagaaacctggggcctctgtgaaggtgtcctgcaaggcttccggctacacctttaccaactacctgatcgagtgggtccgacaggctccaggacaaggactggaatggatgggcctgattaaccctggcagcggcggcaccaactacaacgagaagttcaagggcagagtgaccatgaccaccgacaccagcacaagcaccgcctacatggaactgcggagcctgagaagcgacgacaccgccgtgtattattgcgccagaagaagccctctcggctcttggatctactacgcctatgacggcgtggcctattggggccagggaacactggttacagtgtcctctacgcgtgaggacctgaagaacgtgttcccacctgaggtggccgtgttcgagcctagcgaggccgagatcagccacacccagaaagccaccctcgtgtgcctggctaccggcttctaccccgaccatgtggaactgtcttggtgggtcaacggcaaagaggtgcacagcggcgtgtgtaccgacccccagccactgaaagaacagcccgccctgaacgacagccggtactgcctgagcagcagactgagagtgtccgccaccttctggcagaacccccggaaccacttcagatgccaggtgcagttctacggcctgagcgagaacgacgagtggacccaggacagagccaagcccgtgacccagatcgtgtctgccgaagcctggggcagagccgattgcgacgtgaagctggtggaaaagagcttcgagacagacaccaacctgaacttccagaacctgagcgtgatcggcttcagaatcctgctgctgaaagtggccggctttaacctgctgatgaccctgcggctgtggtccagc

SEQ ID NO: 34854 - DNA, 2700 bp, synthetic construct
  source 1..2700: mol_type = other DNA
atggccttaccagtgaccgccttgctcctgccgctggccttgctgctccacgccgccaggccggaagtgcagctggttgaatctggcggaggactggttcagcctggcggatctctgagactgtcttgtgccgccagcggcttcagcttcagcgacttttggatgagctgggtccgacaggcccctggcaaaggacttgaatgggtcgccacaatcagccaggccggcagcgagaaggactacgtggactctgtgaagggcagattcaccatcagccgggacaacgccaagaagtccctgtacctccagatgaacagcctgagagccgaggacaccgccgtgtactattgtgcctctggcgtgtacagcttcgactacagaggccagggcaccctggtcacagtctcttctggtaccggcggaggcggatctggcggcggaggtagcggtggcggaggatctgaattcgagatcgtgctgacacagtctcccgccacactgtcactgtctccaggcgaaagagccacactgagctgtagcgtgtccagcagcatcagcagcagcaacctgcactggtatcagcagaagcctggacaggcccctcggctgctgatctacgccacatctaatctggcctctggcatccccgccagattttctggctctggaagcggcaccgacttcaccctgaccataagcagcctggaacctgaggacttcgccgtgtactactgccagcagtggtccagctatccccacacatttggcggaggcaccaaggtggaaatcaagagactcgaggacctgaagaacgtgttcccacctgaggtggccgtgttcgagcctagcgaggccgagatcagccacacccagaaagccaccctcgtgtgcctggctaccggcttctaccccgaccatgtggaactgtcttggtgggtcaacggcaaagaggtgcacagcggcgtgtgtaccgacccccagccactgaaagaacagcccgccctgaacgacagccggtactgcctgagcagcagactgagagtgtccgccaccttctggcagaacccccggaaccacttcagatgccaggtgcagttctacggcctgagcgagaacgacgagtggacccaggacagagccaagcccgtgacccagatcgtgtctgccgaagcctggggcagagccgattgcgacgtgaagctggtggaaaagagcttcgagacagacaccaacctgaacttccagaacctgagcgtgatcggcttcagaatcctgctgctgaaagtggccggctttaacctgctgatgaccctgcggctgtggtccagcagggccaagcgatctggatctggagcaacaaacttctcactactcaaacaagcaggtgacgtggaggagaatcccgggcctactagtatggactggatttggcgcatccttttccttgtcggcgctgctaccggcgcgcattccgggccccagctccagctgcaagagtctggacctggcctggtcaagcctagcgagacactgagcctgacctgtaccgtgtccggcgatagcatcagcagcggcgattactactggggctggatcagacagcctcctggcaaaggactggaatggatcggccacatctactacagcggcgtgacctactacaaccccagcctgaagtccagagtgaccatcagcgtggacaccagccggaaccagttctccctgaagctgtctagcgtgacagccgccgataccgccgtgtactactgcaccagagaggacagcagcaactggcggagtagaggccagggaacactggtcacagttagctctggatccggcggaggcggaagtggaggcggaggatctggcggcggaggctctttcgaacaggttcagctggttcagagcggagccgaagtgaagaaacctggggcctctgtgaaggtgtcctgcaaggcttccggctacacctttaccaactacctgatcgagtgggtccgacaggctccaggacaaggactggaatggatgggcctgattaaccctggcagcggcggcaccaactacaacgagaagttcaagggcagagtgaccatgaccaccgacaccagcacaagcaccgcctacatggaactgcggagcctgagaagcgacgacaccgccgtgtattattgcgccagaagaagccctctcggctcttggatctactacgcctatgacggcgtggcctattggggccagggaacactggttacagtgtcctctacgcgtatccagaaccctgatcctgccgtgtaccagctgcgggatagcaagagcagcgacaagagcgtgtgtctgttcaccgacttcgacagccagaccaacgtgtcccagagcaaggactccgacgtgtacatcaccgataagtgcgtgctggacatgcggagcatggacttcaagagcaactccgccgtggcctggtccaacaagtccgatttcgcctgcgccaacgccttcaacaacagcattatccccgaggacacattcttcccaagccccgagagcagctgcggctttaccagcgagagctaccagcagggcgtgctgagcgccaccatcctgtacgagatcctgctgggcaaggccaccctgtacgccgtgctggtgtctgccctggtgctgatggctatggtcaagcggaaggacagccgggga

SEQ ID NO: 34855 - DNA, 2712 bp, synthetic construct
  source 1..2712: mol_type = other DNA
atggccttaccagtgaccgccttgctcctgccgctggccttgctgctccacgccgccaggccggaagtgcagctggttgaatctggcggaggactggttcagcctggcggatctctgagactgtcttgtgccgccagcggcttcagcttcagcgacttttggatgagctgggtccgacaggcccctggcaaaggacttgaatgggtcgccacaatcagccaggccggcagcgagaaggactacgtggactctgtgaagggcagattcaccatcagccgggacaacgccaagaagtccctgtacctccagatgaacagcctgagagccgaggacaccgccgtgtactattgtgcctctggcgtgtacagcttcgactacagaggccagggcaccctggtcacagtctcttctggtaccggcggaggcggatctggcggcggaggtagcggtggcggaggatctgaattcgagatcgtgctgacacagtctcccgccacactgtcactgtctccaggcgaaagagccacactgagctgtagcgtgtccagcagcatcagcagcagcaacctgcactggtatcagcagaagcctggacaggcccctcggctgctgatctacgccacatctaatctggcctctggcatccccgccagattttctggctctggaagcggcaccgacttcaccctgaccataagcagcctggaacctgaggacttcgccgtgtactactgccagcagtggtccagctatccccacacatttggcggaggcaccaaggtggaaatcaagagactcgagatccagaaccctgatcctgccgtgtaccagctgcgggatagcaagagcagcgacaagagcgtgtgtctgttcaccgacttcgacagccagaccaacgtgtcccagagcaaggactccgacgtgtacatcaccgataagtgcgtgctggacatgcggagcatggacttcaagagcaactccgccgtggcctggtccaacaagtccgatttcgcctgcgccaacgccttcaacaacagcattatccccgaggacacattcttcccaagccccgagagcagctgcggctttaccagcgagagctaccagcagggcgtgctgagcgccaccatcctgtacgagatcctgctgggcaaggccaccctgtacgccgtgctggtgtctgccctggtgctgatggctatggtcaagcggaaggacagccggggacgcgccaagagaagcggatctggcgtgaagcagaccctgaatttcgacctgctgaagctggctggcgacgtggaatccaacccaggccctactagtatggactggatttggcgcatccttttccttgtcggcgctgctaccggcgcgcattccgggccccagctccagctgcaagagtctggacctggcctggtcaagcctagcgagacactgagcctgacctgtaccgtgtccggcgatagcatcagcagcggcgattactactggggctggatcagacagcctcctggcaaaggactggaatggatcggccacatctactacagcggcgtgacctactacaaccccagcctgaagtccagagtgaccatcagcgtggacaccagccggaaccagttctccctgaagctgtctagcgtgacagccgccgataccgccgtgtactactgcaccagagaggacagcagcaactggcggagtagaggccagggaacactggtcacagttagctctggatccggcggaggcggaagtggaggcggaggatctggcggcggaggctctttcgaacaggttcagctggttcagagcggagccgaagtgaagaaacctggggcctctgtgaaggtgtcctgcaaggcttccggctacacctttaccaactacctgatcgagtgggtccgacaggctccaggacaaggactggaatggatgggcctgattaaccctggcagcggcggcaccaactacaacgagaagttcaagggcagagtgaccatgaccaccgacaccagcacaagcaccgcctacatggaactgcggagcctgagaagcgacgacaccgccgtgtattattgcgccagaagaagccctctcggctcttggatctactacgcctatgacggcgtggcctattggggccagggaacactggttacagtgtcctctacgcgtgaggacctgaagaacgtgttcccacctgaggtggccgtgttcgagcctagcgaggccgagatcagccacacccagaaagccaccctcgtgtgcctggctaccggcttctaccccgaccatgtggaactgtcttggtgggtcaacggcaaagaggtgcacagcggcgtgtgtaccgacccccagccactgaaagaacagcccgccctgaacgacagccggtactgcctgagcagcagactgagagtgtccgccaccttctggcagaacccccggaaccacttcagatgccaggtgcagttctacggcctgagcgagaacgacgagtggacccaggacagagccaagcccgtgacccagatcgtgtctgccgaagcctggggcagagccgattgcgacgtgaagctggtggaaaagagcttcgagacagacaccaacctgaacttccagaacctgagcgtgatcggcttcagaatcctgctgctgaaagtggccggctttaacctgctgatgaccctgcggctgtggtccagc

SEQ ID NO: 34856 - DNA, 2094 bp, synthetic construct
  source 1..2094: mol_type = other DNA
atggccttaccagtgaccgccttgctcctgccgctggccttgctgctccacgccgccaggccggagatcgtgctgacacagtctcccgccacactgtcactgtctccaggcgaaagagccacactgagctgtagcgtgtccagcagcatcagcagcagcaacctgcactggtatcagcagaagcctggacaggcccctcggctgctgatctacgccacatctaatctggcctctggcatccccgccagattttctggctctggaagcggcaccgacttcaccctgaccataagcagcctggaacctgaggacttcgccgtgtactactgccagcagtggtccagctatccccacacatttggcggaggcaccaaggtggaaatcaagagactcgaggacctgaagaacgtgttcccacctgaggtggccgtgttcgagcctagcgaggccgagatcagccacacccagaaagccaccctcgtgtgcctggctaccggcttctaccccgaccatgtggaactgtcttggtgggtcaacggcaaagaggtgcacagcggcgtgtgtaccgacccccagccactgaaagaacagcccgccctgaacgacagccggtactgcctgagcagcagactgagagtgtccgccaccttctggcagaacccccggaaccacttcagatgccaggtgcagttctacggcctgagcgagaacgacgagtggacccaggacagagccaagcccgtgacccagatcgtgtctgccgaagcctggggcagagccgattgcgacgtgaagctggtggaaaagagcttcgagacagacaccaacctgaacttccagaacctgagcgtgatcggcttcagaatcctgctgctgaaagtggccggctttaacctgctgatgaccctgcggctgtggtccagcagggccaagcgatctggatctggagcaacaaacttctcactactcaaacaagcaggtgacgtggaggagaatcccgggcctactagtatggactggatttggcgcatccttttccttgtcggcgctgctaccggcgcccattccgggcccatggaccccgacctggaaatcagagccgccttcctgcggcagagaaacacagccctgagaacagaggtggccgagctggaacaagaggtgcagcggctggaaaacgaggtgtcccagtacgagacaagatacggccctctcggaggcggaaaaggatccggcggcggaggatctggcggaggcggatctgggggcggaggctctttcgaacaggttcagctggttcagagcggagccgaagtgaagaaacctggggcctctgtgaaggtgtcctgcaaggcttccggctacacctttaccaactacctgatcgagtgggtccgacaggctccaggacaaggactggaatggatgggcctgattaaccctggcagcggcggcaccaactacaacgagaagttcaagggcagagtgaccatgaccaccgacaccagcacaagcaccgcctacatggaactgcggagcctgagaagcgacgacaccgccgtgtattattgcgccagaagaagccctctcggctcttggatctactacgcctatgacggcgtggcctattggggccagggaacactggttacagtgtcctctacgcgtatccagaaccctgatcctgccgtgtaccagctgcgggatagcaagagcagcgacaagagcgtgtgtctgttcaccgacttcgacagccagaccaacgtgtcccagagcaaggactccgacgtgtacatcaccgataagtgcgtgctggacatgcggagcatggacttcaagagcaactccgccgtggcctggtccaacaagtccgatttcgcctgcgccaacgccttcaacaacagcattatccccgaggacacattcttcccaagccccgagagcagctgcggctttaccagcgagagctaccagcagggcgtgctgagcgccaccatcctgtacgagatcctgctgggcaaggccaccctgtacgccgtgctggtgtctgccctggtgctgatggctatggtcaagcggaaggacagccgggga

SEQ ID NO: 34857 - DNA, 2106 bp, synthetic construct
  source 1..2106: mol_type = other DNA
atggccttaccagtgaccgccttgctcctgccgctggccttgctgctccacgccgccaggccggagatcgtgctgacacagtctcccgccacactgtcactgtctccaggcgaaagagccacactgagctgtagcgtgtccagcagcatcagcagcagcaacctgcactggtatcagcagaagcctggacaggcccctcggctgctgatctacgccacatctaatctggcctctggcatccccgccagattttctggctctggaagcggcaccgacttcaccctgaccataagcagcctggaacctgaggacttcgccgtgtactactgccagcagtggtccagctatccccacacatttggcggaggcaccaaggtggaaatcaagagactcgagatccagaaccctgatcctgccgtgtaccagctgcgggatagcaagagcagcgacaagagcgtgtgtctgttcaccgacttcgacagccagaccaacgtgtcccagagcaaggactccgacgtgtacatcaccgataagtgcgtgctggacatgcggagcatggacttcaagagcaactccgccgtggcctggtccaacaagtccgatttcgcctgcgccaacgccttcaacaacagcattatccccgaggacacattcttcccaagccccgagagcagctgcggctttaccagcgagagctaccagcagggcgtgctgagcgccaccatcctgtacgagatcctgctgggcaaggccaccctgtacgccgtgctggtgtctgccctggtgctgatggctatggtcaagcggaaggacagccggggacgcgccaagagaagcggatctggcgtgaagcagaccctgaatttcgacctgctgaagctggctggcgacgtggaatccaacccaggccctactagtatggactggatttggcgcatccttttccttgtcggcgctgctaccggcgcccattccgggcccatggaccccgacctggaaatcagagccgccttcctgcggcagagaaacacagccctgagaacagaggtggccgagctggaacaagaggtgcagcggctggaaaacgaggtgtcccagtacgagacaagatacggccctctcggaggcggaaaaggatccggcggcggaggatctggcggaggcggatctgggggcggaggctctttcgaacaggttcagctggttcagagcggagccgaagtgaagaaacctggggcctctgtgaaggtgtcctgcaaggcttccggctacacctttaccaactacctgatcgagtgggtccgacaggctccaggacaaggactggaatggatgggcctgattaaccctggcagcggcggcaccaactacaacgagaagttcaagggcagagtgaccatgaccaccgacaccagcacaagcaccgcctacatggaactgcggagcctgagaagcgacgacaccgccgtgtattattgcgccagaagaagccctctcggctcttggatctactacgcctatgacggcgtggcctattggggccagggaacactggttacagtgtcctctacgcgtgaggacctgaagaacgtgttcccacctgaggtggccgtgttcgagcctagcgaggccgagatcagccacacccagaaagccaccctcgtgtgcctggctaccggcttctaccccgaccatgtggaactgtcttggtgggtcaacggcaaagaggtgcacagcggcgtgtgtaccgacccccagccactgaaagaacagcccgccctgaacgacagccggtactgcctgagcagcagactgagagtgtccgccaccttctggcagaacccccggaaccacttcagatgccaggtgcagttctacggcctgagcgagaacgacgagtggacccaggacagagccaagcccgtgacccagatcgtgtctgccgaagcctggggcagagccgattgcgacgtgaagctggtggaaaagagcttcgagacagacaccaacctgaacttccagaacctgagcgtgatcggcttcagaatcctgctgctgaaagtggccggctttaacctgctgatgaccctgcggctgtggtccagc

SEQ ID NO: 34858 - DNA, 2025 bp, synthetic construct
  source 1..2025: mol_type = other DNA
atggccttaccagtgaccgccttgctcctgccgctggccttgctgctccacgccgccaggccggagatcgtgctgacacagtctcccgccacactgtcactgtctccaggcgaaagagccacactgagctgtagcgtgtccagcagcatcagcagcagcaacctgcactggtatcagcagaagcctggacaggcccctcggctgctgatctacgccacatctaatctggcctctggcatccccgccagattttctggctctggaagcggcaccgacttcaccctgaccataagcagcctggaacctgaggacttcgccgtgtactactgccagcagtggtccagctatccccacacatttggcggaggcaccaaggtggaaatcaagagactcgaggacctgaagaacgtgttcccacctgaggtggccgtgttcgagcctagcgaggccgagatcagccacacccagaaagccaccctcgtgtgcctggctaccggcttctaccccgaccatgtggaactgtcttggtgggtcaacggcaaagaggtgcacagcggcgtgtgtaccgacccccagccactgaaagaacagcccgccctgaacgacagccggtactgcctgagcagcagactgagagtgtccgccaccttctggcagaacccccggaaccacttcagatgccaggtgcagttctacggcctgagcgagaacgacgagtggacccaggacagagccaagcccgtgacccagatcgtgtctgccgaagcctggggcagagccgattgcgacgtgaagctggtggaaaagagcttcgagacagacaccaacctgaacttccagaacctgagcgtgatcggcttcagaatcctgctgctgaaagtggccggctttaacctgctgatgaccctgcggctgtggtccagcagggccaagcgatctggatctggagcaacaaacttctcactactcaaacaagcaggtgacgtggaggagaatcccgggcctactagtatggactggatttggcgcatccttttccttgtcggcgctgctaccggcgcccattccgggcccgaagttgctgccctcgagaaggaggtagcagctttggaaaaagaagtcgcagcccttgagaaagaagttgcggctctggagaagggatccggcggcggaggatctggcggaggcggatctgggggcggaggctctttcgaacaggttcagctggttcagagcggagccgaagtgaagaaacctggggcctctgtgaaggtgtcctgcaaggcttccggctacacctttaccaactacctgatcgagtgggtccgacaggctccaggacaaggactggaatggatgggcctgattaaccctggcagcggcggcaccaactacaacgagaagttcaagggcagagtgaccatgaccaccgacaccagcacaagcaccgcctacatggaactgcggagcctgagaagcgacgacaccgccgtgtattattgcgccagaagaagccctctcggctcttggatctactacgcctatgacggcgtggcctattggggccagggaacactggttacagtgtcctctacgcgtatccagaaccctgatcctgccgtgtaccagctgcgggatagcaagagcagcgacaagagcgtgtgtctgttcaccgacttcgacagccagaccaacgtgtcccagagcaaggactccgacgtgtacatcaccgataagtgcgtgctggacatgcggagcatggacttcaagagcaactccgccgtggcctggtccaacaagtccgatttcgcctgcgccaacgccttcaacaacagcattatccccgaggacacattcttcccaagccccgagagcagctgcggctttaccagcgagagctaccagcagggcgtgctgagcgccaccatcctgtacgagatcctgctgggcaaggccaccctgtacgccgtgctggtgtctgccctggtgctgatggctatggtcaagcggaaggacagccgggga

SEQ ID NO: 34859 - DNA, 2037 bp, synthetic construct
  source 1..2037: mol_type = other DNA
atggccttaccagtgaccgccttgctcctgccgctggccttgctgctccacgccgccaggccggagatcgtgctgacacagtctcccgccacactgtcactgtctccaggcgaaagagccacactgagctgtagcgtgtccagcagcatcagcagcagcaacctgcactggtatcagcagaagcctggacaggcccctcggctgctgatctacgccacatctaatctggcctctggcatccccgccagattttctggctctggaagcggcaccgacttcaccctgaccataagcagcctggaacctgaggacttcgccgtgtactactgccagcagtggtccagctatccccacacatttggcggaggcaccaaggtggaaatcaagagactcgagatccagaaccctgatcctgccgtgtaccagctgcgggatagcaagagcagcgacaagagcgtgtgtctgttcaccgacttcgacagccagaccaacgtgtcccagagcaaggactccgacgtgtacatcaccgataagtgcgtgctggacatgcggagcatggacttcaagagcaactccgccgtggcctggtccaacaagtccgatttcgcctgcgccaacgccttcaacaacagcattatccccgaggacacattcttcccaagccccgagagcagctgcggctttaccagcgagagctaccagcagggcgtgctgagcgccaccatcctgtacgagatcctgctgggcaaggccaccctgtacgccgtgctggtgtctgccctggtgctgatggctatggtcaagcggaaggacagccggggacgcgccaagagaagcggatctggcgtgaagcagaccctgaatttcgacctgctgaagctggctggcgacgtggaatccaacccaggccctactagtatggactggatttggcgcatccttttccttgtcggcgctgctaccggcgcccattccgggcccgaagttgctgccctcgagaaggaggtagcagctttggaaaaagaagtcgcagcccttgagaaagaagttgcggctctggagaagggatccggcggcggaggatctggcggaggcggatctgggggcggaggctctttcgaacaggttcagctggttcagagcggagccgaagtgaagaaacctggggcctctgtgaaggtgtcctgcaaggcttccggctacacctttaccaactacctgatcgagtgggtccgacaggctccaggacaaggactggaatggatgggcctgattaaccctggcagcggcggcaccaactacaacgagaagttcaagggcagagtgaccatgaccaccgacaccagcacaagcaccgcctacatggaactgcggagcctgagaagcgacgacaccgccgtgtattattgcgccagaagaagccctctcggctcttggatctactacgcctatgacggcgtggcctattggggccagggaacactggttacagtgtcctctacgcgtgaggacctgaagaacgtgttcccacctgaggtggccgtgttcgagcctagcgaggccgagatcagccacacccagaaagccaccctcgtgtgcctggctaccggcttctaccccgaccatgtggaactgtcttggtgggtcaacggcaaagaggtgcacagcggcgtgtgtaccgacccccagccactgaaagaacagcccgccctgaacgacagccggtactgcctgagcagcagactgagagtgtccgccaccttctggcagaacccccggaaccacttcagatgccaggtgcagttctacggcctgagcgagaacgacgagtggacccaggacagagccaagcccgtgacccagatcgtgtctgccgaagcctggggcagagccgattgcgacgtgaagctggtggaaaagagcttcgagacagacaccaacctgaacttccagaacctgagcgtgatcggcttcagaatcctgctgctgaaagtggccggctttaacctgctgatgaccctgcggctgtggtccagc

SEQ ID NO: 34860 - DNA, 2295 bp, synthetic construct
  source 1..2295: mol_type = other DNA
atggccttaccagtgaccgccttgctcctgccgctggccttgctgctccacgccgccaggccggagatcgtgctgacacagtctcccgccacactgtcactgtctccaggcgaaagagccacactgagctgtagcgtgtccagcagcatcagcagcagcaacctgcactggtatcagcagaagcctggacaggcccctcggctgctgatctacgccacatctaatctggcctctggcatccccgccagattttctggctctggaagcggcaccgacttcaccctgaccataagcagcctggaacctgaggacttcgccgtgtactactgccagcagtggtccagctatccccacacatttggcggaggcaccaaggtggaaatcaagagactcgaggacctgaagaacgtgttcccacctgaggtggccgtgttcgagcctagcgaggccgagatcagccacacccagaaagccaccctcgtgtgcctggctaccggcttctaccccgaccatgtggaactgtcttggtgggtcaacggcaaagaggtgcacagcggcgtgtgtaccgacccccagccactgaaagaacagcccgccctgaacgacagccggtactgcctgagcagcagactgagagtgtccgccaccttctggcagaacccccggaaccacttcagatgccaggtgcagttctacggcctgagcgagaacgacgagtggacccaggacagagccaagcccgtgacccagatcgtgtctgccgaagcctggggcagagccgattgcgacgtgaagctggtggaaaagagcttcgagacagacaccaacctgaacttccagaacctgagcgtgatcggcttcagaatcctgctgctgaaagtggccggctttaacctgctgatgaccctgcggctgtggtccagcagggccaagcgatctggatctggagcaacaaacttctcactactcaaacaagcaggtgacgtggaggagaatcccgggcctactagtatggactggatttggcgcatccttttccttgtcggcgctgctaccggcgcccattccgggccccaggttcagctgcaagagtctggcggaggacttgctcaagctggcggaagcctgagactgtcttgtgccgcctctggcagaaccttcagcatgggctggtttagacaggcccctggcaaagagagagagttcgtcgccgccatcacatacagcggcggcagcccttactacgcctcttctgtcagaggccggttcaccatcagccgggacaacgccaagaacaccgtgtacctccagatgaacagcctgaagccagaggacaccgccgtgtactactgtgccgccaatccaacctacggcagcgactggaatgccgagaattggggccagggcacccaagtgacagtgtctagtggatccggcggcggaggatctggcggaggcggatctgggggcggaggctctttcgaacaggttcagctggttcagagcggagccgaagtgaagaaacctggggcctctgtgaaggtgtcctgcaaggcttccggctacacctttaccaactacctgatcgagtgggtccgacaggctccaggacaaggactggaatggatgggcctgattaaccctggcagcggcggcaccaactacaacgagaagttcaagggcagagtgaccatgaccaccgacaccagcacaagcaccgcctacatggaactgcggagcctgagaagcgacgacaccgccgtgtattattgcgccagaagaagccctctcggctcttggatctactacgcctatgacggcgtggcctattggggccagggaacactggttacagtgtcctctacgcgtatccagaaccctgatcctgccgtgtaccagctgcgggatagcaagagcagcgacaagagcgtgtgtctgttcaccgacttcgacagccagaccaacgtgtcccagagcaaggactccgacgtgtacatcaccgataagtgcgtgctggacatgcggagcatggacttcaagagcaactccgccgtggcctggtccaacaagtccgatttcgcctgcgccaacgccttcaacaacagcattatccccgaggacacattcttcccaagccccgagagcagctgcggctttaccagcgagagctaccagcagggcgtgctgagcgccaccatcctgtacgagatcctgctgggcaaggccaccctgtacgccgtgctggtgtctgccctggtgctgatggctatggtcaagcggaaggacagccgggga

SEQ ID NO: 34861 - DNA, 2307 bp, synthetic construct
  source 1..2307: mol_type = other DNA
atggccttaccagtgaccgccttgctcctgccgctggccttgctgctccacgccgccaggccggagatcgtgctgacacagtctcccgccacactgtcactgtctccaggcgaaagagccacactgagctgtagcgtgtccagcagcatcagcagcagcaacctgcactggtatcagcagaagcctggacaggcccctcggctgctgatctacgccacatctaatctggcctctggcatccccgccagattttctggctctggaagcggcaccgacttcaccctgaccataagcagcctggaacctgaggacttcgccgtgtactactgccagcagtggtccagctatccccacacatttggcggaggcaccaaggtggaaatcaagagactcgagatccagaaccctgatcctgccgtgtaccagctgcgggatagcaagagcagcgacaagagcgtgtgtctgttcaccgacttcgacagccagaccaacgtgtcccagagcaaggactccgacgtgtacatcaccgataagtgcgtgctggacatgcggagcatggacttcaagagcaactccgccgtggcctggtccaacaagtccgatttcgcctgcgccaacgccttcaacaacagcattatccccgaggacacattcttcccaagccccgagagcagctgcggctttaccagcgagagctaccagcagggcgtgctgagcgccaccatcctgtacgagatcctgctgggcaaggccaccctgtacgccgtgctggtgtctgccctggtgctgatggctatggtcaagcggaaggacagccggggacgcgccaagagaagcggatctggcgtgaagcagaccctgaatttcgacctgctgaagctggctggcgacgtggaatccaacccaggccctactagtatggactggatttggcgcatccttttccttgtcggcgctgctaccggcgcccattccgggccccaggttcagctgcaagagtctggcggaggacttgctcaagctggcggaagcctgagactgtcttgtgccgcctctggcagaaccttcagcatgggctggtttagacaggcccctggcaaagagagagagttcgtcgccgccatcacatacagcggcggcagcccttactacgcctcttctgtcagaggccggttcaccatcagccgggacaacgccaagaacaccgtgtacctccagatgaacagcctgaagccagaggacaccgccgtgtactactgtgccgccaatccaacctacggcagcgactggaatgccgagaattggggccagggcacccaagtgacagtgtctagtggatccggcggcggaggatctggcggaggcggatctgggggcggaggctctttcgaacaggttcagctggttcagagcggagccgaagtgaagaaacctggggcctctgtgaaggtgtcctgcaaggcttccggctacacctttaccaactacctgatcgagtgggtccgacaggctccaggacaaggactggaatggatgggcctgattaaccctggcagcggcggcaccaactacaacgagaagttcaagggcagagtgaccatgaccaccgacaccagcacaagcaccgcctacatggaactgcggagcctgagaagcgacgacaccgccgtgtattattgcgccagaagaagccctctcggctcttggatctactacgcctatgacggcgtggcctattggggccagggaacactggttacagtgtcctctacgcgtgaggacctgaagaacgtgttcccacctgaggtggccgtgttcgagcctagcgaggccgagatcagccacacccagaaagccaccctcgtgtgcctggctaccggcttctaccccgaccatgtggaactgtcttggtgggtcaacggcaaagaggtgcacagcggcgtgtgtaccgacccccagccactgaaagaacagcccgccctgaacgacagccggtactgcctgagcagcagactgagagtgtccgccaccttctggcagaacccccggaaccacttcagatgccaggtgcagttctacggcctgagcgagaacgacgagtggacccaggacagagccaagcccgtgacccagatcgtgtctgccgaagcctggggcagagccgattgcgacgtgaagctggtggaaaagagcttcgagacagacaccaacctgaacttccagaacctgagcgtgatcggcttcagaatcctgctgctgaaagtggccggctttaacctgctgatgaccctgcggctgtggtccagc

SEQ ID NO: 34862 - DNA, 2313 bp, synthetic construct
  source 1..2313: mol_type = other DNA
atggccttaccagtgaccgccttgctcctgccgctggccttgctgctccacgccgccaggccggaagtgcaactggtggaatctggaggctctctggtgcagccagggggaagcctgagactgtcttgtgccgcttccggcttcaccttcgacgactacgccatgagctgggtgcgccaggtgccaggcaaaggcctggaatgggtgtccagcatcaactggagcggcacccacaccgattacgccgactccgtgaaaggcagattcacaatcagcagaaacaacgccaacaataccctgtacctgcagatgaactccctgaagtctgaggatacagcagtgtattattgcgccaagaactggcgggacgccggcaccacttggtttgagaaaagcggctctgccggacagggaacccaagtgacagtgtcctccggtaccggcggaggcggatctggcggcggaggtagcggtggcggaggatctgaattcgagatcgtgctgacacagtctcccgccacactgtcactgtctccaggcgaaagagccacactgagctgtagcgtgtccagcagcatcagcagcagcaacctgcactggtatcagcagaagcctggacaggcccctcggctgctgatctacgccacatctaatctggcctctggcatccccgccagattttctggctctggaagcggcaccgacttcaccctgaccataagcagcctggaacctgaggacttcgccgtgtactactgccagcagtggtccagctatccccacacatttggcggaggcaccaaggtggaaatcaagagactcgaggacctgaagaacgtgttcccacctgaggtggccgtgttcgagcctagcgaggccgagatcagccacacccagaaagccaccctcgtgtgcctggctaccggcttctaccccgaccatgtggaactgtcttggtgggtcaacggcaaagaggtgcacagcggcgtgtgtaccgacccccagccactgaaagaacagcccgccctgaacgacagccggtactgcctgagcagcagactgagagtgtccgccaccttctggcagaacccccggaaccacttcagatgccaggtgcagttctacggcctgagcgagaacgacgagtggacccaggacagagccaagcccgtgacccagatcgtgtctgccgaagcctggggcagagccgattgcgacgtgaagctggtggaaaagagcttcgagacagacaccaacctgaacttccagaacctgagcgtgatcggcttcagaatcctgctgctgaaagtggccggctttaacctgctgatgaccctgcggctgtggtccagcagggccaagcgatctggatctggagcaacaaacttctcactactcaaacaagcaggtgacgtggaggagaatcccgggcctactagtatggactggatttggcgcatccttttccttgtcggcgctgctaccggcgcgcattccttcgaacaggttcagctggttcagagcggagccgaagtgaagaaacctggggcctctgtgaaggtgtcctgcaaggcttccggctacacctttaccaactacctgatcgagtgggtccgacaggctccaggacaaggactggaatggatgggcctgattaaccctggcagcggcggcaccaactacaacgagaagttcaagggcagagtgaccatgaccaccgacaccagcacaagcaccgcctacatggaactgcggagcctgagaagcgacgacaccgccgtgtattattgcgccagaagaagccctctcggctcttggatctactacgcctatgacggcgtggcctattggggccagggaacactggttacagtgtcctctacgcgtatccagaaccctgatcctgccgtgtaccagctgcgggatagcaagagcagcgacaagagcgtgtgtctgttcaccgacttcgacagccagaccaacgtgtcccagagcaaggactccgacgtgtacatcaccgataagtgcgtgctggacatgcggagcatggacttcaagagcaactccgccgtggcctggtccaacaagtccgatttcgcctgcgccaacgccttcaacaacagcattatccccgaggacacattcttcccaagccccgagagcagctgcggctttaccagcgagagctaccagcagggcgtgctgagcgccaccatcctgtacgagatcctgctgggcaaggccaccctgtacgccgtgctggtgtctgccctggtgctgatggctatggtcaagcggaaggacagccgggga

SEQ ID NO: 34863 - DNA, 2325 bp, synthetic construct
  source 1..2325: mol_type = other DNA
atggccttaccagtgaccgccttgctcctgccgctggccttgctgctccacgccgccaggccggaagtgcaactggtggaatctggaggctctctggtgcagccagggggaagcctgagactgtcttgtgccgcttccggcttcaccttcgacgactacgccatgagctgggtgcgccaggtgccaggcaaaggcctggaatgggtgtccagcatcaactggagcggcacccacaccgattacgccgactccgtgaaaggcagattcacaatcagcagaaacaacgccaacaataccctgtacctgcagatgaactccctgaagtctgaggatacagcagtgtattattgcgccaagaactggcgggacgccggcaccacttggtttgagaaaagcggctctgccggacagggaacccaagtgacagtgtcctccggtaccggcggaggcggatctggcggcggaggtagcggtggcggaggatctgaattcgagatcgtgctgacacagtctcccgccacactgtcactgtctccaggcgaaagagccacactgagctgtagcgtgtccagcagcatcagcagcagcaacctgcactggtatcagcagaagcctggacaggcccctcggctgctgatctacgccacatctaatctggcctctggcatccccgccagattttctggctctggaagcggcaccgacttcaccctgaccataagcagcctggaacctgaggacttcgccgtgtactactgccagcagtggtccagctatccccacacatttggcggaggcaccaaggtggaaatcaagagactcgagatccagaaccctgatcctgccgtgtaccagctgcgggatagcaagagcagcgacaagagcgtgtgtctgttcaccgacttcgacagccagaccaacgtgtcccagagcaaggactccgacgtgtacatcaccgataagtgcgtgctggacatgcggagcatggacttcaagagcaactccgccgtggcctggtccaacaagtccgatttcgcctgcgccaacgccttcaacaacagcattatccccgaggacacattcttcccaagccccgagagcagctgcggctttaccagcgagagctaccagcagggcgtgctgagcgccaccatcctgtacgagatcctgctgggcaaggccaccctgtacgccgtgctggtgtctgccctggtgctgatggctatggtcaagcggaaggacagccggggacgcgccaagagaagcggatctggcgtgaagcagaccctgaatttcgacctgctgaagctggctggcgacgtggaatccaacccaggccctactagtatggactggatttggcgcatccttttccttgtcggcgctgctaccggcgcgcattccttcgaacaggttcagctggttcagagcggagccgaagtgaagaaacctggggcctctgtgaaggtgtcctgcaaggcttccggctacacctttaccaactacctgatcgagtgggtccgacaggctccaggacaaggactggaatggatgggcctgattaaccctggcagcggcggcaccaactacaacgagaagttcaagggcagagtgaccatgaccaccgacaccagcacaagcaccgcctacatggaactgcggagcctgagaagcgacgacaccgccgtgtattattgcgccagaagaagccctctcggctcttggatctactacgcctatgacggcgtggcctattggggccagggaacactggttacagtgtcctctacgcgtgaggacctgaagaacgtgttcccacctgaggtggccgtgttcgagcctagcgaggccgagatcagccacacccagaaagccaccctcgtgtgcctggctaccggcttctaccccgaccatgtggaactgtcttggtgggtcaacggcaaagaggtgcacagcggcgtgtgtaccgacccccagccactgaaagaacagcccgccctgaacgacagccggtactgcctgagcagcagactgagagtgtccgccaccttctggcagaacccccggaaccacttcagatgccaggtgcagttctacggcctgagcgagaacgacgagtggacccaggacagagccaagcccgtgacccagatcgtgtctgccgaagcctggggcagagccgattgcgacgtgaagctggtggaaaagagcttcgagacagacaccaacctgaacttccagaacctgagcgtgatcggcttcagaatcctgctgctgaaagtggccggctttaacctgctgatgaccctgcggctgtggtccagc

SEQ ID NO: 34864 - DNA, 2307 bp, synthetic construct
  source 1..2307: mol_type = other DNA
atggccttaccagtgaccgccttgctcctgccgctggccttgctgctccacgccgccaggccggaagttcagctgcttgagtctggcggaggactggttcaacctggcggaagcctgagactgtcttgtgccgccagcggcttcatcttcagcagctacgccatgagctgggtccgacaggctcctggaaagggccaagaatgggtttccggcgttagcggcacaggcgtgaacacctactacgccgatagcgtgaagggcagattcaccatcagccgggacaacagcaagaacaccctgtacctccagatgaacagcctgagagccgaggacaccgccgtgtactattgtgcctctggcaaaggctgggacagcggctcttggtacgaggactatagaggccagggcaccctggtcacagtttcttcaggtaccggcggaggcggatctggcggcggaggtagcggtggcggaggatctgaattcgagatcgtgctgacacagtctcccgccacactgtcactgtctccaggcgaaagagccacactgagctgtagcgtgtccagcagcatcagcagcagcaacctgcactggtatcagcagaagcctggacaggcccctcggctgctgatctacgccacatctaatctggcctctggcatccccgccagattttctggctctggaagcggcaccgacttcaccctgaccataagcagcctggaacctgaggacttcgccgtgtactactgccagcagtggtccagctatccccacacatttggcggaggcaccaaggtggaaatcaagagactcgaggacctgaagaacgtgttcccacctgaggtggccgtgttcgagcctagcgaggccgagatcagccacacccagaaagccaccctcgtgtgcctggctaccggcttctaccccgaccatgtggaactgtcttggtgggtcaacggcaaagaggtgcacagcggcgtgtgtaccgacccccagccactgaaagaacagcccgccctgaacgacagccggtactgcctgagcagcagactgagagtgtccgccaccttctggcagaacccccggaaccacttcagatgccaggtgcagttctacggcctgagcgagaacgacgagtggacccaggacagagccaagcccgtgacccagatcgtgtctgccgaagcctggggcagagccgattgcgacgtgaagctggtggaaaagagcttcgagacagacaccaacctgaacttccagaacctgagcgtgatcggcttcagaatcctgctgctgaaagtggccggctttaacctgctgatgaccctgcggctgtggtccagcagggccaagcgatctggatctggagcaacaaacttctcactactcaaacaagcaggtgacgtggaggagaatcccgggcctactagtatggactggatttggcgcatccttttccttgtcggcgctgctaccggcgcgcattccttcgaacaggttcagctggttcagagcggagccgaagtgaagaaacctggggcctctgtgaaggtgtcctgcaaggcttccggctacacctttaccaactacctgatcgagtgggtccgacaggctccaggacaaggactggaatggatgggcctgattaaccctggcagcggcggcaccaactacaacgagaagttcaagggcagagtgaccatgaccaccgacaccagcacaagcaccgcctacatggaactgcggagcctgagaagcgacgacaccgccgtgtattattgcgccagaagaagccctctcggctcttggatctactacgcctatgacggcgtggcctattggggccagggaacactggttacagtgtcctctacgcgtatccagaaccctgatcctgccgtgtaccagctgcgggatagcaagagcagcgacaagagcgtgtgtctgttcaccgacttcgacagccagaccaacgtgtcccagagcaaggactccgacgtgtacatcaccgataagtgcgtgctggacatgcggagcatggacttcaagagcaactccgccgtggcctggtccaacaagtccgatttcgcctgcgccaacgccttcaacaacagcattatccccgaggacacattcttcccaagccccgagagcagctgcggctttaccagcgagagctaccagcagggcgtgctgagcgccaccatcctgtacgagatcctgctgggcaaggccaccctgtacgccgtgctggtgtctgccctggtgctgatggctatggtcaagcggaaggacagccgggga

SEQ ID NO: 34865 - DNA, 2319 bp, synthetic construct
  source 1..2319: mol_type = other DNA
atggccttaccagtgaccgccttgctcctgccgctggccttgctgctccacgccgccaggccggaagttcagctgcttgagtctggcggaggactggttcaacctggcggaagcctgagactgtcttgtgccgccagcggcttcatcttcagcagctacgccatgagctgggtccgacaggctcctggaaagggccaagaatgggtttccggcgttagcggcacaggcgtgaacacctactacgccgatagcgtgaagggcagattcaccatcagccgggacaacagcaagaacaccctgtacctccagatgaacagcctgagagccgaggacaccgccgtgtactattgtgcctctggcaaaggctgggacagcggctcttggtacgaggactatagaggccagggcaccctggtcacagtttcttcaggtaccggcggaggcggatctggcggcggaggtagcggtggcggaggatctgaattcgagatcgtgctgacacagtctcccgccacactgtcactgtctccaggcgaaagagccacactgagctgtagcgtgtccagcagcatcagcagcagcaacctgcactggtatcagcagaagcctggacaggcccctcggctgctgatctacgccacatctaatctggcctctggcatccccgccagattttctggctctggaagcggcaccgacttcaccctgaccataagcagcctggaacctgaggacttcgccgtgtactactgccagcagtggtccagctatccccacacatttggcggaggcaccaaggtggaaatcaagagactcgagatccagaaccctgatcctgccgtgtaccagctgcgggatagcaagagcagcgacaagagcgtgtgtctgttcaccgacttcgacagccagaccaacgtgtcccagagcaaggactccgacgtgtacatcaccgataagtgcgtgctggacatgcggagcatggacttcaagagcaactccgccgtggcctggtccaacaagtccgatttcgcctgcgccaacgccttcaacaacagcattatccccgaggacacattcttcccaagccccgagagcagctgcggctttaccagcgagagctaccagcagggcgtgctgagcgccaccatcctgtacgagatcctgctgggcaaggccaccctgtacgccgtgctggtgtctgccctggtgctgatggctatggtcaagcggaaggacagccggggacgcgccaagagaagcggatctggcgtgaagcagaccctgaatttcgacctgctgaagctggctggcgacgtggaatccaacccaggccctactagtatggactggatttggcgcatccttttccttgtcggcgctgctaccggcgcgcattccttcgaacaggttcagctggttcagagcggagccgaagtgaagaaacctggggcctctgtgaaggtgtcctgcaaggcttccggctacacctttaccaactacctgatcgagtgggtccgacaggctccaggacaaggactggaatggatgggcctgattaaccctggcagcggcggcaccaactacaacgagaagttcaagggcagagtgaccatgaccaccgacaccagcacaagcaccgcctacatggaactgcggagcctgagaagcgacgacaccgccgtgtattattgcgccagaagaagccctctcggctcttggatctactacgcctatgacggcgtggcctattggggccagggaacactggttacagtgtcctctacgcgtgaggacctgaagaacgtgttcccacctgaggtggccgtgttcgagcctagcgaggccgagatcagccacacccagaaagccaccctcgtgtgcctggctaccggcttctaccccgaccatgtggaactgtcttggtgggtcaacggcaaagaggtgcacagcggcgtgtgtaccgacccccagccactgaaagaacagcccgccctgaacgacagccggtactgcctgagcagcagactgagagtgtccgccaccttctggcagaacccccggaaccacttcagatgccaggtgcagttctacggcctgagcgagaacgacgagtggacccaggacagagccaagcccgtgacccagatcgtgtctgccgaagcctggggcagagccgattgcgacgtgaagctggtggaaaagagcttcgagacagacaccaacctgaacttccagaacctgagcgtgatcggcttcagaatcctgctgctgaaagtggccggctttaacctgctgatgaccctgcggctgtggtccagc

SEQ ID NO: 34866 - DNA, 2211 bp, synthetic construct
  source 1..2211: mol_type = other DNA
atggccttaccagtgaccgccttgctcctgccgctggccttgctgctccacgccgccaggccgatgctgcccgctcctaagaatctggtggtgtccagaatcaccgaggacagcgccagactgtcttggacagctcctgatgccgccttcgacagcttccccatccggtacatcgagacactgatctggggcgaagccatctggctggatgtgcctggaagcgagagaagctacgacctgaccggactgaagcctggcacagagtatgccgtggtcatcaccggcgtgaaaggcggcagattctctagccctctggtggcctctttcaccaccggtaccggcggaggcggatctggcggcggaggtagcggtggcggaggatctgaattcgagatcgtgctgacacagtctcccgccacactgtcactgtctccaggcgaaagagccacactgagctgtagcgtgtccagcagcatcagcagcagcaacctgcactggtatcagcagaagcctggacaggcccctcggctgctgatctacgccacatctaatctggcctctggcatccccgccagattttctggctctggaagcggcaccgacttcaccctgaccataagcagcctggaacctgaggacttcgccgtgtactactgccagcagtggtccagctatccccacacatttggcggaggcaccaaggtggaaatcaagagactcgaggacctgaagaacgtgttcccacctgaggtggccgtgttcgagcctagcgaggccgagatcagccacacccagaaagccaccctcgtgtgcctggctaccggcttctaccccgaccatgtggaactgtcttggtgggtcaacggcaaagaggtgcacagcggcgtgtgtaccgacccccagccactgaaagaacagcccgccctgaacgacagccggtactgcctgagcagcagactgagagtgtccgccaccttctggcagaacccccggaaccacttcagatgccaggtgcagttctacggcctgagcgagaacgacgagtggacccaggacagagccaagcccgtgacccagatcgtgtctgccgaagcctggggcagagccgattgcgacgtgaagctggtggaaaagagcttcgagacagacaccaacctgaacttccagaacctgagcgtgatcggcttcagaatcctgctgctgaaagtggccggctttaacctgctgatgaccctgcggctgtggtccagcagggccaagcgatctggatctggagcaacaaacttctcactactcaaacaagcaggtgacgtggaggagaatcccgggcctactagtatggactggatttggcgcatccttttccttgtcggcgctgctaccggcgcgcattccttcgaacaggttcagctggttcagagcggagccgaagtgaagaaacctggggcctctgtgaaggtgtcctgcaaggcttccggctacacctttaccaactacctgatcgagtgggtccgacaggctccaggacaaggactggaatggatgggcctgattaaccctggcagcggcggcaccaactacaacgagaagttcaagggcagagtgaccatgaccaccgacaccagcacaagcaccgcctacatggaactgcggagcctgagaagcgacgacaccgccgtgtattattgcgccagaagaagccctctcggctcttggatctactacgcctatgacggcgtggcctattggggccagggaacactggttacagtgtcctctacgcgtatccagaaccctgatcctgccgtgtaccagctgcgggatagcaagagcagcgacaagagcgtgtgtctgttcaccgacttcgacagccagaccaacgtgtcccagagcaaggactccgacgtgtacatcaccgataagtgcgtgctggacatgcggagcatggacttcaagagcaactccgccgtggcctggtccaacaagtccgatttcgcctgcgccaacgccttcaacaacagcattatccccgaggacacattcttcccaagccccgagagcagctgcggctttaccagcgagagctaccagcagggcgtgctgagcgccaccatcctgtacgagatcctgctgggcaaggccaccctgtacgccgtgctggtgtctgccctggtgctgatggctatggtcaagcggaaggacagccgggga

SEQ ID NO: 34867 - DNA, 2223 bp, synthetic construct
  source 1..2223: mol_type = other DNA
atggccttaccagtgaccgccttgctcctgccgctggccttgctgctccacgccgccaggccgatgctgcccgctcctaagaatctggtggtgtccagaatcaccgaggacagcgccagactgtcttggacagctcctgatgccgccttcgacagcttccccatccggtacatcgagacactgatctggggcgaagccatctggctggatgtgcctggaagcgagagaagctacgacctgaccggactgaagcctggcacagagtatgccgtggtcatcaccggcgtgaaaggcggcagattctctagccctctggtggcctctttcaccaccggtaccggcggaggcggatctggcggcggaggtagcggtggcggaggatctgaattcgagatcgtgctgacacagtctcccgccacactgtcactgtctccaggcgaaagagccacactgagctgtagcgtgtccagcagcatcagcagcagcaacctgcactggtatcagcagaagcctggacaggcccctcggctgctgatctacgccacatctaatctggcctctggcatccccgccagattttctggctctggaagcggcaccgacttcaccctgaccataagcagcctggaacctgaggacttcgccgtgtactactgccagcagtggtccagctatccccacacatttggcggaggcaccaaggtggaaatcaagagactcgagatccagaaccctgatcctgccgtgtaccagctgcgggatagcaagagcagcgacaagagcgtgtgtctgttcaccgacttcgacagccagaccaacgtgtcccagagcaaggactccgacgtgtacatcaccgataagtgcgtgctggacatgcggagcatggacttcaagagcaactccgccgtggcctggtccaacaagtccgatttcgcctgcgccaacgccttcaacaacagcattatccccgaggacacattcttcccaagccccgagagcagctgcggctttaccagcgagagctaccagcagggcgtgctgagcgccaccatcctgtacgagatcctgctgggcaaggccaccctgtacgccgtgctggtgtctgccctggtgctgatggctatggtcaagcggaaggacagccggggacgcgccaagagaagcggatctggcgtgaagcagaccctgaatttcgacctgctgaagctggctggcgacgtggaatccaacccaggccctactagtatggactggatttggcgcatccttttccttgtcggcgctgctaccggcgcgcattccttcgaacaggttcagctggttcagagcggagccgaagtgaagaaacctggggcctctgtgaaggtgtcctgcaaggcttccggctacacctttaccaactacctgatcgagtgggtccgacaggctccaggacaaggactggaatggatgggcctgattaaccctggcagcggcggcaccaactacaacgagaagttcaagggcagagtgaccatgaccaccgacaccagcacaagcaccgcctacatggaactgcggagcctgagaagcgacgacaccgccgtgtattattgcgccagaagaagccctctcggctcttggatctactacgcctatgacggcgtggcctattggggccagggaacactggttacagtgtcctctacgcgtgaggacctgaagaacgtgttcccacctgaggtggccgtgttcgagcctagcgaggccgagatcagccacacccagaaagccaccctcgtgtgcctggctaccggcttctaccccgaccatgtggaactgtcttggtgggtcaacggcaaagaggtgcacagcggcgtgtgtaccgacccccagccactgaaagaacagcccgccctgaacgacagccggtactgcctgagcagcagactgagagtgtccgccaccttctggcagaacccccggaaccacttcagatgccaggtgcagttctacggcctgagcgagaacgacgagtggacccaggacagagccaagcccgtgacccagatcgtgtctgccgaagcctggggcagagccgattgcgacgtgaagctggtggaaaagagcttcgagacagacaccaacctgaacttccagaacctgagcgtgatcggcttcagaatcctgctgctgaaagtggccggctttaacctgctgatgaccctgcggctgtggtccagc

SEQ ID NO: 34868 - DNA, 2298 bp, synthetic construct
  source 1..2298: mol_type = other DNA
atggccttaccagtgaccgccttgctcctgccgctggccttgctgctccacgccgccaggccggaggtgcagctggttgaatctggcggaggactggttcagcctggcggatctctgagactgtcttgtgccgccagcggcttcaacatcaaggatacctgtatcggctgggttcgcagagcccctggcaaagaggaagaactggtcgccaaaatctgcaagtacagcggccacaccagatacgccgacagcgtgaagggcagattcaccatcagcgccgacaccagcaagaacaccgcctacctccagatgaacagcctgagagccgaggacaccgccgtgtactattgtgccgctgtgtccgtcagagatgggcactacaattactggggccagggcaccaccgtgaccgtttcttcaggtaccggcggaggcggatctggcggcggaggtagcggtggcggaggatctgaattcgagatcgtgctgacacagtctcccgccacactgtcactgtctccaggcgaaagagccacactgagctgtagcgtgtccagcagcatcagcagcagcaacctgcactggtatcagcagaagcctggacaggcccctcggctgctgatctacgccacatctaatctggcctctggcatccccgccagattttctggctctggaagcggcaccgacttcaccctgaccataagcagcctggaacctgaggacttcgccgtgtactactgccagcagtggtccagctatccccacacatttggcggaggcaccaaggtggaaatcaagagactcgaggacctgaagaacgtgttcccacctgaggtggccgtgttcgagcctagcgaggccgagatcagccacacccagaaagccaccctcgtgtgcctggctaccggcttctaccccgaccatgtggaactgtcttggtgggtcaacggcaaagaggtgcacagcggcgtgtgtaccgacccccagccactgaaagaacagcccgccctgaacgacagccggtactgcctgagcagcagactgagagtgtccgccaccttctggcagaacccccggaaccacttcagatgccaggtgcagttctacggcctgagcgagaacgacgagtggacccaggacagagccaagcccgtgacccagatcgtgtctgccgaagcctggggcagagccgattgcgacgtgaagctggtggaaaagagcttcgagacagacaccaacctgaacttccagaacctgagcgtgatcggcttcagaatcctgctgctgaaagtggccggctttaacctgctgatgaccctgcggctgtggtccagcagggccaagcgatctggatctggagcaacaaacttctcactactcaaacaagcaggtgacgtggaggagaatcccgggcctactagtatggactggatttggcgcatccttttccttgtcggcgctgctaccggcgcgcattccttcgaacaggttcagctggttcagagcggagccgaagtgaagaaacctggggcctctgtgaaggtgtcctgcaaggcttccggctacacctttaccaactacctgatcgagtgggtccgacaggctccaggacaaggactggaatggatgggcctgattaaccctggcagcggcggcaccaactacaacgagaagttcaagggcagagtgaccatgaccaccgacaccagcacaagcaccgcctacatggaactgcggagcctgagaagcgacgacaccgccgtgtattattgcgccagaagaagccctctcggctcttggatctactacgcctatgacggcgtggcctattggggccagggaacactggttacagtgtcctctacgcgtatccagaaccctgatcctgccgtgtaccagctgcgggatagcaagagcagcgacaagagcgtgtgtctgttcaccgacttcgacagccagaccaacgtgtcccagagcaaggactccgacgtgtacatcaccgataagtgcgtgctggacatgcggagcatggacttcaagagcaactccgccgtggcctggtccaacaagtccgatttcgcctgcgccaacgccttcaacaacagcattatccccgaggacacattcttcccaagccccgagagcagctgcggctttaccagcgagagctaccagcagggcgtgctgagcgccaccatcctgtacgagatcctgctgggcaaggccaccctgtacgccgtgctggtgtctgccctggtgctgatggctatggtcaagcggaaggacagccgggga

SEQ ID NO: 34869 - DNA, 2310 bp, synthetic construct
  source 1..2310: mol_type = other DNA
atggccttaccagtgaccgccttgctcctgccgctggccttgctgctccacgccgccaggccggaggtgcagctggttgaatctggcggaggactggttcagcctggcggatctctgagactgtcttgtgccgccagcggcttcaacatcaaggatacctgtatcggctgggttcgcagagcccctggcaaagaggaagaactggtcgccaaaatctgcaagtacagcggccacaccagatacgccgacagcgtgaagggcagattcaccatcagcgccgacaccagcaagaacaccgcctacctccagatgaacagcctgagagccgaggacaccgccgtgtactattgtgccgctgtgtccgtcagagatgggcactacaattactggggccagggcaccaccgtgaccgtttcttcaggtaccggcggaggcggatctggcggcggaggtagcggtggcggaggatctgaattcgagatcgtgctgacacagtctcccgccacactgtcactgtctccaggcgaaagagccacactgagctgtagcgtgtccagcagcatcagcagcagcaacctgcactggtatcagcagaagcctggacaggcccctcggctgctgatctacgccacatctaatctggcctctggcatccccgccagattttctggctctggaagcggcaccgacttcaccctgaccataagcagcctggaacctgaggacttcgccgtgtactactgccagcagtggtccagctatccccacacatttggcggaggcaccaaggtggaaatcaagagactcgagatccagaaccctgatcctgccgtgtaccagctgcgggatagcaagagcagcgacaagagcgtgtgtctgttcaccgacttcgacagccagaccaacgtgtcccagagcaaggactccgacgtgtacatcaccgataagtgcgtgctggacatgcggagcatggacttcaagagcaactccgccgtggcctggtccaacaagtccgatttcgcctgcgccaacgccttcaacaacagcattatccccgaggacacattcttcccaagccccgagagcagctgcggctttaccagcgagagctaccagcagggcgtgctgagcgccaccatcctgtacgagatcctgctgggcaaggccaccctgtacgccgtgctggtgtctgccctggtgctgatggctatggtcaagcggaaggacagccggggacgcgccaagagaagcggatctggcgtgaagcagaccctgaatttcgacctgctgaagctggctggcgacgtggaatccaacccaggccctactagtatggactggatttggcgcatccttttccttgtcggcgctgctaccggcgcgcattccttcgaacaggttcagctggttcagagcggagccgaagtgaagaaacctggggcctctgtgaaggtgtcctgcaaggcttccggctacacctttaccaactacctgatcgagtgggtccgacaggctccaggacaaggactggaatggatgggcctgattaaccctggcagcggcggcaccaactacaacgagaagttcaagggcagagtgaccatgaccaccgacaccagcacaagcaccgcctacatggaactgcggagcctgagaagcgacgacaccgccgtgtattattgcgccagaagaagccctctcggctcttggatctactacgcctatgacggcgtggcctattggggccagggaacactggttacagtgtcctctacgcgtgaggacctgaagaacgtgttcccacctgaggtggccgtgttcgagcctagcgaggccgagatcagccacacccagaaagccaccctcgtgtgcctggctaccggcttctaccccgaccatgtggaactgtcttggtgggtcaacggcaaagaggtgcacagcggcgtgtgtaccgacccccagccactgaaagaacagcccgccctgaacgacagccggtactgcctgagcagcagactgagagtgtccgccaccttctggcagaacccccggaaccacttcagatgccaggtgcagttctacggcctgagcgagaacgacgagtggacccaggacagagccaagcccgtgacccagatcgtgtctgccgaagcctggggcagagccgattgcgacgtgaagctggtggaaaagagcttcgagacagacaccaacctgaacttccagaacctgagcgtgatcggcttcagaatcctgctgctgaaagtggccggctttaacctgctgatgaccctgcggctgtggtccagc

SEQ ID NO: 34870 - DNA, 3414 bp, synthetic construct
  source 1..3414: mol_type = other DNA
atggccttaccagtgaccgccttgctcctgccgctggccttgctgctccacgccgccaggccggaagtgcagctggttgaatctggcggaggactggttcaggctggcggatctctgagactgtcttgtgccgccagcggcagaacctttagcatgggctggtttagacaggcccctggcaaagagagagagttcgtcgccgccatcacatactctggcggcagcccttactacgccgactctgtgaagggcagattcaccatcagccgggacaacgccaagaacaccgtgtacctccagatgaacagcctgaagcctgaggacaccgccgtgtactactgcgccgccaatccaacatacggcagcgactggaacgccgagaattggggccagggaacccaagtgacagtgtctagcggtaccggcggaggcggatctggcggcggaggtagcggtggcggaggatctgaattcgagatcgtgctgacacagtctcccgccacactgtcactgtctccaggcgaaagagccacactgagctgtagcgtgtccagcagcatcagcagcagcaacctgcactggtatcagcagaagcctggacaggcccctcggctgctgatctacgccacatctaatctggcctctggcatccccgccagattttctggctctggaagcggcaccgacttcaccctgaccataagcagcctggaacctgaggacttcgccgtgtactactgccagcagtggtccagctatccccacacatttggcggaggcaccaaggtggaaatcaagagactcgaggacctgaagaacgtgttcccacctgaggtggccgtgttcgagcctagcgaggccgagatcagccacacccagaaagccaccctcgtgtgcctggctaccggcttctaccccgaccatgtggaactgtcttggtgggtcaacggcaaagaggtgcacagcggcgtgtgtaccgacccccagccactgaaagaacagcccgccctgaacgacagccggtactgcctgagcagcagactgagagtgtccgccaccttctggcagaacccccggaaccacttcagatgccaggtgcagttctacggcctgagcgagaacgacgagtggacccaggacagagccaagcccgtgacccagatcgtgtctgccgaagcctggggcagagccgattgcgacgtgaagctggtggaaaagagcttcgagacagacaccaacctgaacttccagaacctgagcgtgatcggcttcagaatcctgctgctgaaagtggccggctttaacctgctgatgaccctgcggctgtggtccagcagggccaagcgatctggatctggagcaacaaacttctcactactcaaacaagcaggtgacgtggaggagaatcccgggcctactagtgccaccatggactggatttggcgcatccttttccttgtcggcgctgctaccggcgcccattccgggcccgaagtgcaactggttgaatccggtggcggcctggtgcaagcaggcggatctctcagacttagctgtgccgcctccggcagaaccttcacaatgggatggtttaggcaggctccagggaaagagagagagttcgtcgccgccatctctctgtctcccacactggcctactacgccgactctgtgaaaggccggttcaccatctccagagataatgccaagaacaccgtggtgctgcaaatgaactctctgaaacccgaggatacagccctgtactattgtgccgctgaccggaagtccgtgatgagcatcagacccgattactggggacagggcacacaagtcacagtgtcctctggatccggcggcggaggatctggcggaggcggatctgggggcggaggctctttcgaacaggttcagctggttcagagcggagccgaagtgaagaaacctggggcctctgtgaaggtgtcctgcaaggcttccggctacacctttaccaactacctgatcgagtgggtccgacaggctccaggacaaggactggaatggatgggcctgattaaccctggcagcggcggcaccaactacaacgagaagttcaagggcagagtgaccatgaccaccgacaccagcacaagcaccgcctacatggaactgcggagcctgagaagcgacgacaccgccgtgtattattgcgccagaagaagccctctcggctcttggatctactacgcctatgacggcgtggcctattggggccagggaacactggttacagtgtcctctacgcgtatccagaaccctgatcctgccgtgtaccagctgcgggatagcaagagcagcgacaagagcgtgtgtctgttcaccgacttcgacagccagaccaacgtgtcccagagcaaggactccgacgtgtacatcaccgataagtgcgtgctggacatgcggagcatggacttcaagagcaactccgccgtggcctggtccaacaagtccgatttcgcctgcgccaacgccttcaacaacagcattatccccgaggacacattcttcccaagccccgagagcagctgcggctttaccagcgagagctaccagcagggcgtgctgagcgccaccatcctgtacgagatcctgctgggcaaggccaccctgtacgccgtgctggtgtctgccctggtgctgatggctatggtcaagcggaaggacagccggggacgcgccaagagaagcggatctggcgtgaagcagaccctgaatttcgacctgctgaagctggctggcgacgtggaatccaacccaggcccttctagaggccatatgaccgagtacaagcccacggtgcgcctcgccacccgcgacgacgtccccagggccgtacgcaccctcgccgccgcgttcgccgactaccccgccacgcgccacaccgtcgatccggaccgccacatcgagcgggtcaccgagctgcaagaactcttcctcacgcgcgtcgggctcgacatcggcaaggtgtgggtcgcggacgacggcgccgcggtggcggtctggaccacgccggagagcgtcgaagcgggggcggtgttcgccgagatcggcccgcgcatggccgagttgagcggttcccggctggccgcgcagcaacagatggaaggcctcctggcgccgcaccggcccaaggagcccgcgtggttcctggccaccgtcggcgtctcgcccgaccaccagggcaagggtctgggcagcgccgtcgtgctccccggagtggaggcggccgagcgcgccggggtgcccgccttcctggagacctccgcgccccgcaacctccccttctacgagcggctcggcttcaccgtcaccgccgacgtcgaggtgcccgaaggaccgcgcacctggtgcatgacccgcaagcccggtgcctga

SEQ ID NO: 34871 - DNA, 2328 bp, synthetic construct
  source 1..2328: mol_type = other DNA
atggccttaccagtgaccgccttgctcctgccgctggccttgctgctccacgccgccaggccggaagtgcagctggttgaatctggcggaggactggttcagcctggcggatctctgagactgtcttgtgccgcctctggcttcgccagcgactactatatcatcggctggttcagacaggcccctggcaaagagagagagggcgtcagctgtatcagcagcagatacgccaacaccaactacgccgacagcgtgaagggcagattcaccatcagccgggacaacgccaagaacaccgtgtacctccagatgaacagcctgaagcctgaggacaccgccgtgtactactgtgccgccgacaccagaagatacacctgtcctgacattgccaccatgcaccggaacttcgattcttggggccagggcacactggtcaccgtttcttctggtaccggcggaggcggatctggcggcggaggtagcggtggcggaggatctgaattcgagatcgtgctgacacagtctcccgccacactgtcactgtctccaggcgaaagagccacactgagctgtagcgtgtccagcagcatcagcagcagcaacctgcactggtatcagcagaagcctggacaggcccctcggctgctgatctacgccacatctaatctggcctctggcatccccgccagattttctggctctggaagcggcaccgacttcaccctgaccataagcagcctggaacctgaggacttcgccgtgtactactgccagcagtggtccagctatccccacacatttggcggaggcaccaaggtggaaatcaagagactcgaggacctgaagaacgtgttcccacctgaggtggccgtgttcgagcctagcgaggccgagatcagccacacccagaaagccaccctcgtgtgcctggctaccggcttctaccccgaccatgtggaactgtcttggtgggtcaacggcaaagaggtgcacagcggcgtgtgtaccgacccccagccactgaaagaacagcccgccctgaacgacagccggtactgcctgagcagcagactgagagtgtccgccaccttctggcagaacccccggaaccacttcagatgccaggtgcagttctacggcctgagcgagaacgacgagtggacccaggacagagccaagcccgtgacccagatcgtgtctgccgaagcctggggcagagccgattgcgacgtgaagctggtggaaaagagcttcgagacagacaccaacctgaacttccagaacctgagcgtgatcggcttcagaatcctgctgctgaaagtggccggctttaacctgctgatgaccctgcggctgtggtccagcagggccaagcgatctggatctggagcaacaaacttctcactactcaaacaagcaggtgacgtggaggagaatcccgggcctactagtatggactggatttggcgcatccttttccttgtcggcgctgctaccggcgcgcattccttcgaacaggttcagctggttcagagcggagccgaagtgaagaaacctggggcctctgtgaaggtgtcctgcaaggcttccggctacacctttaccaactacctgatcgagtgggtccgacaggctccaggacaaggactggaatggatgggcctgattaaccctggcagcggcggcaccaactacaacgagaagttcaagggcagagtgaccatgaccaccgacaccagcacaagcaccgcctacatggaactgcggagcctgagaagcgacgacaccgccgtgtattattgcgccagaagaagccctctcggctcttggatctactacgcctatgacggcgtggcctattggggccagggaacactggttacagtgtcctctacgcgtatccagaaccctgatcctgccgtgtaccagctgcgggatagcaagagcagcgacaagagcgtgtgtctgttcaccgacttcgacagccagaccaacgtgtcccagagcaaggactccgacgtgtacatcaccgataagtgcgtgctggacatgcggagcatggacttcaagagcaactccgccgtggcctggtccaacaagtccgatttcgcctgcgccaacgccttcaacaacagcattatccccgaggacacattcttcccaagccccgagagcagctgcggctttaccagcgagagctaccagcagggcgtgctgagcgccaccatcctgtacgagatcctgctgggcaaggccaccctgtacgccgtgctggtgtctgccctggtgctgatggctatggtcaagcggaaggacagccggggataa

SEQ ID NO: 34872 - DNA, 2328 bp, synthetic construct
  source 1..2328: mol_type = other DNA
atggccttaccagtgaccgccttgctcctgccgctggccttgctgctccacgccgccaggccggaagtgcagctggttgaatctggcggaggactggttcagcctggcggatctctgagactgagctgtgaagccagcggcttcgccagcgacgattacatcatcggctggttcagacaggcccctggcaaagagagagagggcgtcagctgcatcagctctaagtacgccaacaccgtgtacaccgacagcgtgaagggcagattcagactgagcagaggcaccgccaagaataccgtgtacctccagatgagcgccctgaagcctgaggataccgccgtgtactactgcgctatggacagccgcagagtgacatgccctgagatcagcaccatgcaccggaacttcgattcttggggccagggcacactggtcacagtgtcatctggtaccggcggaggcggatctggcggcggaggtagcggtggcggaggatctgaattcgagatcgtgctgacacagtctcccgccacactgtcactgtctccaggcgaaagagccacactgagctgtagcgtgtccagcagcatcagcagcagcaacctgcactggtatcagcagaagcctggacaggcccctcggctgctgatctacgccacatctaatctggcctctggcatccccgccagattttctggctctggaagcggcaccgacttcaccctgaccataagcagcctggaacctgaggacttcgccgtgtactactgccagcagtggtccagctatccccacacatttggcggaggcaccaaggtggaaatcaagagactcgaggacctgaagaacgtgttcccacctgaggtggccgtgttcgagcctagcgaggccgagatcagccacacccagaaagccaccctcgtgtgcctggctaccggcttctaccccgaccatgtggaactgtcttggtgggtcaacggcaaagaggtgcacagcggcgtgtgtaccgacccccagccactgaaagaacagcccgccctgaacgacagccggtactgcctgagcagcagactgagagtgtccgccaccttctggcagaacccccggaaccacttcagatgccaggtgcagttctacggcctgagcgagaacgacgagtggacccaggacagagccaagcccgtgacccagatcgtgtctgccgaagcctggggcagagccgattgcgacgtgaagctggtggaaaagagcttcgagacagacaccaacctgaacttccagaacctgagcgtgatcggcttcagaatcctgctgctgaaagtggccggctttaacctgctgatgaccctgcggctgtggtccagcagggccaagcgatctggatctggagcaacaaacttctcactactcaaacaagcaggtgacgtggaggagaatcccgggcctactagtatggactggatttggcgcatccttttccttgtcggcgctgctaccggcgcgcattccttcgaacaggttcagctggttcagagcggagccgaagtgaagaaacctggggcctctgtgaaggtgtcctgcaaggcttccggctacacctttaccaactacctgatcgagtgggtccgacaggctccaggacaaggactggaatggatgggcctgattaaccctggcagcggcggcaccaactacaacgagaagttcaagggcagagtgaccatgaccaccgacaccagcacaagcaccgcctacatggaactgcggagcctgagaagcgacgacaccgccgtgtattattgcgccagaagaagccctctcggctcttggatctactacgcctatgacggcgtggcctattggggccagggaacactggttacagtgtcctctacgcgtatccagaaccctgatcctgccgtgtaccagctgcgggatagcaagagcagcgacaagagcgtgtgtctgttcaccgacttcgacagccagaccaacgtgtcccagagcaaggactccgacgtgtacatcaccgataagtgcgtgctggacatgcggagcatggacttcaagagcaactccgccgtggcctggtccaacaagtccgatttcgcctgcgccaacgccttcaacaacagcattatccccgaggacacattcttcccaagccccgagagcagctgcggctttaccagcgagagctaccagcagggcgtgctgagcgccaccatcctgtacgagatcctgctgggcaaggccaccctgtacgccgtgctggtgtctgccctggtgctgatggctatggtcaagcggaaggacagccggggataa

SEQ ID NO: 34873 - DNA, 2325 bp, synthetic construct
  source 1..2325: mol_type = other DNA
atggccttaccagtgaccgccttgctcctgccgctggccttgctgctccacgccgccaggccggaagtgcagctggttgaatctggcggaggactggttcagcctggcggatctctgagactgtcttgtgccgcctctggcttcgccagcgactactatatcatcggctggttcagacaggcccctggcaaagagagagagggcgtcagctgtatcagcagcagatacgccaacaccaactacgccgacagcgtgaagggcagattcaccatcagccgggacaacgccaagaacaccgtgtacctccagatgaacagcctgaagcctgaggacaccgccgtgtactactgtgccgccgacaccagaagatacacctgtcctgacattgccaccatgcaccggaacttcgattcttggggccagggcacactggtcaccgtttcttctggtaccggcggaggcggatctggcggcggaggtagcggtggcggaggatctgaattcgagatcgtgctgacacagtctcccgccacactgtcactgtctccaggcgaaagagccacactgagctgtagcgtgtccagcagcatcagcagcagcaacctgcactggtatcagcagaagcctggacaggcccctcggctgctgatctacgccacatctaatctggcctctggcatccccgccagattttctggctctggaagcggcaccgacttcaccctgaccataagcagcctggaacctgaggacttcgccgtgtactactgccagcagtggtccagctatccccacacatttggcggaggcaccaaggtggaaatcaagagactcgagatccagaaccctgatcctgccgtgtaccagctgcgggatagcaagagcagcgacaagagcgtgtgtctgttcaccgacttcgacagccagaccaacgtgtcccagagcaaggactccgacgtgtacatcaccgataagtgcgtgctggacatgcggagcatggacttcaagagcaactccgccgtggcctggtccaacaagtccgatttcgcctgcgccaacgccttcaacaacagcattatccccgaggacacattcttcccaagccccgagagcagctgcggctttaccagcgagagctaccagcagggcgtgctgagcgccaccatcctgtacgagatcctgctgggcaaggccaccctgtacgccgtgctggtgtctgccctggtgctgatggctatggtcaagcggaaggacagccggggaagggccaagcgatctggatctggagcaacaaacttctcactactcaaacaagcaggtgacgtggaggagaatcccgggcctactagtatggactggatttggcgcatccttttccttgtcggcgctgctaccggcgcgcattccttcgaacaggttcagctggttcagagcggagccgaagtgaagaaacctggggcctctgtgaaggtgtcctgcaaggcttccggctacacctttaccaactacctgatcgagtgggtccgacaggctccaggacaaggactggaatggatgggcctgattaaccctggcagcggcggcaccaactacaacgagaagttcaagggcagagtgaccatgaccaccgacaccagcacaagcaccgcctacatggaactgcggagcctgagaagcgacgacaccgccgtgtattattgcgccagaagaagccctctcggctcttggatctactacgcctatgacggcgtggcctattggggccagggaacactggttacagtgtcctctacgcgtgacctgaagaacgtgttcccacctgaggtggccgtgttcgagcctagcgaggccgagatcagccacacccagaaagccaccctcgtgtgcctggctaccggcttctaccccgaccatgtggaactgtcttggtgggtcaacggcaaagaggtgcacagcggcgtgtgtaccgacccccagccactgaaagaacagcccgccctgaacgacagccggtactgcctgagcagcagactgagagtgtccgccaccttctggcagaacccccggaaccacttcagatgccaggtgcagttctacggcctgagcgagaacgacgagtggacccaggacagagccaagcccgtgacccagatcgtgtctgccgaagcctggggcagagccgattgcgacgtgaagctggtggaaaagagcttcgagacagacaccaacctgaacttccagaacctgagcgtgatcggcttcagaatcctgctgctgaaagtggccggctttaacctgctgatgaccctgcggctgtggtccagc

SEQ ID NO: 34874 - DNA, 2325 bp, synthetic construct
  source 1..2325: mol_type = other DNA
atggccttaccagtgaccgccttgctcctgccgctggccttgctgctccacgccgccaggccggaagtgcagctggttgaatctggcggaggactggttcagcctggcggatctctgagactgagctgtgaagccagcggcttcgccagcgacgattacatcatcggctggttcagacaggcccctggcaaagagagagagggcgtcagctgcatcagctctaagtacgccaacaccgtgtacaccgacagcgtgaagggcagattcagactgagcagaggcaccgccaagaataccgtgtacctccagatgagcgccctgaagcctgaggataccgccgtgtactactgcgctatggacagccgcagagtgacatgccctgagatcagcaccatgcaccggaacttcgattcttggggccagggcacactggtcacagtgtcatctggtaccggcggaggcggatctggcggcggaggtagcggtggcggaggatctgaattcgagatcgtgctgacacagtctcccgccacactgtcactgtctccaggcgaaagagccacactgagctgtagcgtgtccagcagcatcagcagcagcaacctgcactggtatcagcagaagcctggacaggcccctcggctgctgatctacgccacatctaatctggcctctggcatccccgccagattttctggctctggaagcggcaccgacttcaccctgaccataagcagcctggaacctgaggacttcgccgtgtactactgccagcagtggtccagctatccccacacatttggcggaggcaccaaggtggaaatcaagagactcgagatccagaaccctgatcctgccgtgtaccagctgcgggatagcaagagcagcgacaagagcgtgtgtctgttcaccgacttcgacagccagaccaacgtgtcccagagcaaggactccgacgtgtacatcaccgataagtgcgtgctggacatgcggagcatggacttcaagagcaactccgccgtggcctggtccaacaagtccgatttcgcctgcgccaacgccttcaacaacagcattatccccgaggacacattcttcccaagccccgagagcagctgcggctttaccagcgagagctaccagcagggcgtgctgagcgccaccatcctgtacgagatcctgctgggcaaggccaccctgtacgccgtgctggtgtctgccctggtgctgatggctatggtcaagcggaaggacagccggggaagggccaagcgatctggatctggagcaacaaacttctcactactcaaacaagcaggtgacgtggaggagaatcccgggcctactagtatggactggatttggcgcatccttttccttgtcggcgctgctaccggcgcgcattccttcgaacaggttcagctggttcagagcggagccgaagtgaagaaacctggggcctctgtgaaggtgtcctgcaaggcttccggctacacctttaccaactacctgatcgagtgggtccgacaggctccaggacaaggactggaatggatgggcctgattaaccctggcagcggcggcaccaactacaacgagaagttcaagggcagagtgaccatgaccaccgacaccagcacaagcaccgcctacatggaactgcggagcctgagaagcgacgacaccgccgtgtattattgcgccagaagaagccctctcggctcttggatctactacgcctatgacggcgtggcctattggggccagggaacactggttacagtgtcctctacgcgtgacctgaagaacgtgttcccacctgaggtggccgtgttcgagcctagcgaggccgagatcagccacacccagaaagccaccctcgtgtgcctggctaccggcttctaccccgaccatgtggaactgtcttggtgggtcaacggcaaagaggtgcacagcggcgtgtgtaccgacccccagccactgaaagaacagcccgccctgaacgacagccggtactgcctgagcagcagactgagagtgtccgccaccttctggcagaacccccggaaccacttcagatgccaggtgcagttctacggcctgagcgagaacgacgagtggacccaggacagagccaagcccgtgacccagatcgtgtctgccgaagcctggggcagagccgattgcgacgtgaagctggtggaaaagagcttcgagacagacaccaacctgaacttccagaacctgagcgtgatcggcttcagaatcctgctgctgaaagtggccggctttaacctgctgatgaccctgcggctgtggtccagc

SEQ ID NO: 34875 - DNA, 2298 bp, synthetic construct
  source 1..2298: mol_type = other DNA
atggccttaccagtgaccgccttgctcctgccgctggccttgctgctccacgccgccaggccgcaagtcaaactggaagaaagcggtggcggcctggtgcaacctggcgaatctctgagactgagctgtagcgccagcggctccatcttcaaggtgttcagagtgttcgccatgagctggtacaggcaaggccctggcaagcagagagagctggtcgcctctatcagcagcggcgagacaaccacatacgccgaatctgtgaaaggccggttcaccatcagccgggataatgccaagaataccgcctatctccagatggactccctgaagcctgaagatacagctgtgtactactgcaacgccgaccataccttcaccggcgatttttggggccagggaacccaagtgaccgtgtctagtggtaccggcggaggcggatctggcggcggaggtagcggtggcggaggatctgaattcgagatcgtgctgacacagtctcccgccacactgtcactgtctccaggcgaaagagccacactgagctgtagcgtgtccagcagcatcagcagcagcaacctgcactggtatcagcagaagcctggacaggcccctcggctgctgatctacgccacatctaatctggcctctggcatccccgccagattttctggctctggaagcggcaccgacttcaccctgaccataagcagcctggaacctgaggacttcgccgtgtactactgccagcagtggtccagctatccccacacatttggcggaggcaccaaggtggaaatcaagagactcgagatccagaaccctgatcctgccgtgtaccagctgcgggatagcaagagcagcgacaagagcgtgtgtctgttcaccgacttcgacagccagaccaacgtgtcccagagcaaggactccgacgtgtacatcaccgataagtgcgtgctggacatgcggagcatggacttcaagagcaactccgccgtggcctggtccaacaagtccgatttcgcctgcgccaacgccttcaacaacagcattatccccgaggacacattcttcccaagccccgagagcagctgcggctttaccagcgagagctaccagcagggcgtgctgagcgccaccatcctgtacgagatcctgctgggcaaggccaccctgtacgccgtgctggtgtctgccctggtgctgatggctatggtcaagcggaaggacagccggggaagggccaagcgatctggatctggagcaacaaacttctcactactcaaacaagcaggtgacgtggaggagaatcccgggcctactagtatggactggatttggcgcatccttttccttgtcggcgctgctaccggcgcgcattccttcgaacaggttcagctggttcagagcggagccgaagtgaagaaacctggggcctctgtgaaggtgtcctgcaaggcttccggctacacctttaccaactacctgatcgagtgggtccgacaggctccaggacaaggactggaatggatgggcctgattaaccctggcagcggcggcaccaactacaacgagaagttcaagggcagagtgaccatgaccaccgacaccagcacaagcaccgcctacatggaactgcggagcctgagaagcgacgacaccgccgtgtattattgcgccagaagaagccctctcggctcttggatctactacgcctatgacggcgtggcctattggggccagggaacactggttacagtgtcctctacgcgtgacctgaagaacgtgttcccacctgaggtggccgtgttcgagcctagcgaggccgagatcagccacacccagaaagccaccctcgtgtgcctggctaccggcttctaccccgaccatgtggaactgtcttggtgggtcaacggcaaagaggtgcacagcggcgtgtgtaccgacccccagccactgaaagaacagcccgccctgaacgacagccggtactgcctgagcagcagactgagagtgtccgccaccttctggcagaacccccggaaccacttcagatgccaggtgcagttctacggcctgagcgagaacgacgagtggacccaggacagagccaagcccgtgacccagatcgtgtctgccgaagcctggggcagagccgattgcgacgtgaagctggtggaaaagagcttcgagacagacaccaacctgaacttccagaacctgagcgtgatcggcttcagaatcctgctgctgaaagtggccggctttaacctgctgatgaccctgcggctgtggtccagc

SEQ ID NO: 34876 - DNA, 2304 bp, synthetic construct
  source 1..2304: mol_type = other DNA
atggccttaccagtgaccgccttgctcctgccgctggccttgctgctccacgccgccaggccggagatcgtgctgacacagtctcccgccacactgtcactgtctccaggcgaaagagccacactgagctgtagcgtgtccagcagcatcagcagcagcaacctgcactggtatcagcagaagcctggacaggcccctcggctgctgatctacgccacatctaatctggcctctggcatccccgccagattttctggctctggaagcggcaccgacttcaccctgaccataagcagcctggaacctgaggacttcgccgtgtactactgccagcagtggtccagctatccccacacatttggcggaggcaccaaggtggaaatcaagagactcgaggacctgaagaacgtgttcccacctgaggtggccgtgttcgagcctagcgaggccgagatcagccacacccagaaagccaccctcgtgtgcctggctaccggcttctaccccgaccatgtggaactgtcttggtgggtcaacggcaaagaggtgcacagcggcgtgtgtaccgacccccagccactgaaagaacagcccgccctgaacgacagccggtactgcctgagcagcagactgagagtgtccgccaccttctggcagaacccccggaaccacttcagatgccaggtgcagttctacggcctgagcgagaacgacgagtggacccaggacagagccaagcccgtgacccagatcgtgtctgccgaagcctggggcagagccgattgcgacgtgaagctggtggaaaagagcttcgagacagacaccaacctgaacttccagaacctgagcgtgatcggcttcagaatcctgctgctgaaagtggccggctttaacctgctgatgaccctgcggctgtggtccagcagggccaagcgatctggatctggagcaacaaacttctcactactcaaacaagcaggtgacgtggaggagaatcccgggcctactagtgccaccatggactggatttggcgcatccttttccttgtcggcgctgctaccggcgcccattccgggcccgaagtgcagctggttgaatctggcggaggactggttcaggctggcggatctctgagactgtcttgtgccgccagcggcagaacctttagcatgggctggtttagacaggcccctggcaaagagagagagttcgtcgccgccatcacatactctggcggcagcccttactacgccgactctgtgaagggcagattcaccatcagccgggacaacgccaagaacaccgtgtacctccagatgaacagcctgaagcctgaggacaccgccgtgtactactgcgccgccaatccaacatacggcagcgactggaacgccgagaattggggccagggaacccaagtgacagtgtctagcggatccggcggcggaggatctggcggaggcggatctgggggcggaggctctttcgaacaggttcagctggttcagagcggagccgaagtgaagaaacctggggcctctgtgaaggtgtcctgcaaggcttccggctacacctttaccaactacctgatcgagtgggtccgacaggctccaggacaaggactggaatggatgggcctgattaaccctggcagcggcggcaccaactacaacgagaagttcaagggcagagtgaccatgaccaccgacaccagcacaagcaccgcctacatggaactgcggagcctgagaagcgacgacaccgccgtgtattattgcgccagaagaagccctctcggctcttggatctactacgcctatgacggcgtggcctattggggccagggaacactggttacagtgtcctctacgcgtatccagaaccctgatcctgccgtgtaccagctgcgggatagcaagagcagcgacaagagcgtgtgtctgttcaccgacttcgacagccagaccaacgtgtcccagagcaaggactccgacgtgtacatcaccgataagtgcgtgctggacatgcggagcatggacttcaagagcaactccgccgtggcctggtccaacaagtccgatttcgcctgcgccaacgccttcaacaacagcattatccccgaggacacattcttcccaagccccgagagcagctgcggctttaccagcgagagctaccagcagggcgtgctgagcgccaccatcctgtacgagatcctgctgggcaaggccaccctgtacgccgtgctggtgtctgccctggtgctgatggctatggtcaagcggaaggacagccggggataa

SEQ ID NO: 34877 - DNA, 2307 bp, synthetic construct
  source 1..2307: mol_type = other DNA
atggccttaccagtgaccgccttgctcctgccgctggccttgctgctccacgccgccaggccggagatcgtgctgacacagtctcccgccacactgtcactgtctccaggcgaaagagccacactgagctgtagcgtgtccagcagcatcagcagcagcaacctgcactggtatcagcagaagcctggacaggcccctcggctgctgatctacgccacatctaatctggcctctggcatccccgccagattttctggctctggaagcggcaccgacttcaccctgaccataagcagcctggaacctgaggacttcgccgtgtactactgccagcagtggtccagctatccccacacatttggcggaggcaccaaggtggaaatcaagagactcgaggacctgaagaacgtgttcccacctgaggtggccgtgttcgagcctagcgaggccgagatcagccacacccagaaagccaccctcgtgtgcctggctaccggcttctaccccgaccatgtggaactgtcttggtgggtcaacggcaaagaggtgcacagcggcgtgtgtaccgacccccagccactgaaagaacagcccgccctgaacgacagccggtactgcctgagcagcagactgagagtgtccgccaccttctggcagaacccccggaaccacttcagatgccaggtgcagttctacggcctgagcgagaacgacgagtggacccaggacagagccaagcccgtgacccagatcgtgtctgccgaagcctggggcagagccgattgcgacgtgaagctggtggaaaagagcttcgagacagacaccaacctgaacttccagaacctgagcgtgatcggcttcagaatcctgctgctgaaagtggccggctttaacctgctgatgaccctgcggctgtggtccagcagggccaagcgatctggatctggagcaacaaacttctcactactcaaacaagcaggtgacgtggaggagaatcccgggcctactagtgccaccatggactggatttggcgcatccttttccttgtcggcgctgctaccggcgcccattccgggcccgaagtgcaactggtggaatctgggggcggactggtgcagccaggcggaagtctgaggctgtcttgtgccgcctccggcagcatcttcggcttcaacgacatggcctggtatcggcaggctcccggaaaacagcgcgagctggtggctctgattagcagagtgggcgtgaccagcagcgccgactctgtgaagggcagattcacaatctccagagtgaacgccaaggatacagtgtacctccagatgaactctctgaaacctgaggatacagcagtgtactattgctacatggaccagcggctggacggcagcacactggcctactggggacagggaactcaagtgacagtgtctagcggatccggcggcggaggatctggcggaggcggatctgggggcggaggctctttcgaacaggttcagctggttcagagcggagccgaagtgaagaaacctggggcctctgtgaaggtgtcctgcaaggcttccggctacacctttaccaactacctgatcgagtgggtccgacaggctccaggacaaggactggaatggatgggcctgattaaccctggcagcggcggcaccaactacaacgagaagttcaagggcagagtgaccatgaccaccgacaccagcacaagcaccgcctacatggaactgcggagcctgagaagcgacgacaccgccgtgtattattgcgccagaagaagccctctcggctcttggatctactacgcctatgacggcgtggcctattggggccagggaacactggttacagtgtcctctacgcgtatccagaaccctgatcctgccgtgtaccagctgcgggatagcaagagcagcgacaagagcgtgtgtctgttcaccgacttcgacagccagaccaacgtgtcccagagcaaggactccgacgtgtacatcaccgataagtgcgtgctggacatgcggagcatggacttcaagagcaactccgccgtggcctggtccaacaagtccgatttcgcctgcgccaacgccttcaacaacagcattatccccgaggacacattcttcccaagccccgagagcagctgcggctttaccagcgagagctaccagcagggcgtgctgagcgccaccatcctgtacgagatcctgctgggcaaggccaccctgtacgccgtgctggtgtctgccctggtgctgatggctatggtcaagcggaaggacagccggggataa

SEQ ID NO: 34878 - DNA, 2295 bp, synthetic construct
  source 1..2295: mol_type = other DNA
atggccttaccagtgaccgccttgctcctgccgctggccttgctgctccacgccgccaggccggagatcgtgctgacacagtctcccgccacactgtcactgtctccaggcgaaagagccacactgagctgtagcgtgtccagcagcatcagcagcagcaacctgcactggtatcagcagaagcctggacaggcccctcggctgctgatctacgccacatctaatctggcctctggcatccccgccagattttctggctctggaagcggcaccgacttcaccctgaccataagcagcctggaacctgaggacttcgccgtgtactactgccagcagtggtccagctatccccacacatttggcggaggcaccaaggtggaaatcaagagactcgaggacctgaagaacgtgttcccacctgaggtggccgtgttcgagcctagcgaggccgagatcagccacacccagaaagccaccctcgtgtgcctggctaccggcttctaccccgaccatgtggaactgtcttggtgggtcaacggcaaagaggtgcacagcggcgtgtgtaccgacccccagccactgaaagaacagcccgccctgaacgacagccggtactgcctgagcagcagactgagagtgtccgccaccttctggcagaacccccggaaccacttcagatgccaggtgcagttctacggcctgagcgagaacgacgagtggacccaggacagagccaagcccgtgacccagatcgtgtctgccgaagcctggggcagagccgattgcgacgtgaagctggtggaaaagagcttcgagacagacaccaacctgaacttccagaacctgagcgtgatcggcttcagaatcctgctgctgaaagtggccggctttaacctgctgatgaccctgcggctgtggtccagcagggccaagcgatctggatctggagcaacaaacttctcactactcaaacaagcaggtgacgtggaggagaatcccgggcctactagtgccaccatggactggatttggcgcatccttttccttgtcggcgctgctaccggcgcccattccgggcccgaggtgcagctggttgaatctggcggaggactggttcaggctggcggatctctgagactgtcttgtgccgccagcggctctgtgttcagcggcaatgtgatgggctggtacagacaggcccctggcaaagaaagagagtgggttgccgccattgccagcggcggcagcatctactacagagactctgtgaagggcagattcaccatcagccgggacaacgccaagaacaccgtgtacctccagatgaacagcctgaagcctgaggacaccgccgtgtactactgcaactctcaccctcctacactgccctattggggcctgggaacccaagtgacagtgtcctctggatccggcggcggaggatctggcggaggcggatctgggggcggaggctctttcgaacaggttcagctggttcagagcggagccgaagtgaagaaacctggggcctctgtgaaggtgtcctgcaaggcttccggctacacctttaccaactacctgatcgagtgggtccgacaggctccaggacaaggactggaatggatgggcctgattaaccctggcagcggcggcaccaactacaacgagaagttcaagggcagagtgaccatgaccaccgacaccagcacaagcaccgcctacatggaactgcggagcctgagaagcgacgacaccgccgtgtattattgcgccagaagaagccctctcggctcttggatctactacgcctatgacggcgtggcctattggggccagggaacactggttacagtgtcctctacgcgtatccagaaccctgatcctgccgtgtaccagctgcgggatagcaagagcagcgacaagagcgtgtgtctgttcaccgacttcgacagccagaccaacgtgtcccagagcaaggactccgacgtgtacatcaccgataagtgcgtgctggacatgcggagcatggacttcaagagcaactccgccgtggcctggtccaacaagtccgatttcgcctgcgccaacgccttcaacaacagcattatccccgaggacacattcttcccaagccccgagagcagctgcggctttaccagcgagagctaccagcagggcgtgctgagcgccaccatcctgtacgagatcctgctgggcaaggccaccctgtacgccgtgctggtgtctgccctggtgctgatggctatggtcaagcggaaggacagccggggataa

SEQ ID NO: 34879 - DNA, 2289 bp, synthetic construct
  source 1..2289: mol_type = other DNA
atggccttaccagtgaccgccttgctcctgccgctggccttgctgctccacgccgccaggccggagatcgtgctgacacagtctcccgccacactgtcactgtctccaggcgaaagagccacactgagctgtagcgtgtccagcagcatcagcagcagcaacctgcactggtatcagcagaagcctggacaggcccctcggctgctgatctacgccacatctaatctggcctctggcatccccgccagattttctggctctggaagcggcaccgacttcaccctgaccataagcagcctggaacctgaggacttcgccgtgtactactgccagcagtggtccagctatccccacacatttggcggaggcaccaaggtggaaatcaagagactcgaggacctgaagaacgtgttcccacctgaggtggccgtgttcgagcctagcgaggccgagatcagccacacccagaaagccaccctcgtgtgcctggctaccggcttctaccccgaccatgtggaactgtcttggtgggtcaacggcaaagaggtgcacagcggcgtgtgtaccgacccccagccactgaaagaacagcccgccctgaacgacagccggtactgcctgagcagcagactgagagtgtccgccaccttctggcagaacccccggaaccacttcagatgccaggtgcagttctacggcctgagcgagaacgacgagtggacccaggacagagccaagcccgtgacccagatcgtgtctgccgaagcctggggcagagccgattgcgacgtgaagctggtggaaaagagcttcgagacagacaccaacctgaacttccagaacctgagcgtgatcggcttcagaatcctgctgctgaaagtggccggctttaacctgctgatgaccctgcggctgtggtccagcagggccaagcgatctggatctggagcaacaaacttctcactactcaaacaagcaggtgacgtggaggagaatcccgggcctactagtgccaccatggactggatttggcgcatccttttccttgtcggcgctgctaccggcgcccattccgggcccgaagttcagctgctggaatctggcggaggactcgttcaacctggcggctctctgagactgagctgtgccgcttctggcttcagcttctctagctacgccctgagctgggttcgacaagctcccggaaagggccttgaatgggtgtccagcatcggcgagaatgacggcaccacagactatgccgatgccgtgaaaggccggtttaccatcagcagagacaattccaagaacacgctctatctgcaaatgaactccctgcgcgtggaagatacagccgtgtattattgcgtgaaggacggcatccactggggacagggaaccctggttacagtgtctagcggatccggcggcggaggatctggcggaggcggatctgggggcggaggctctttcgaacaggttcagctggttcagagcggagccgaagtgaagaaacctggggcctctgtgaaggtgtcctgcaaggcttccggctacacctttaccaactacctgatcgagtgggtccgacaggctccaggacaaggactggaatggatgggcctgattaaccctggcagcggcggcaccaactacaacgagaagttcaagggcagagtgaccatgaccaccgacaccagcacaagcaccgcctacatggaactgcggagcctgagaagcgacgacaccgccgtgtattattgcgccagaagaagccctctcggctcttggatctactacgcctatgacggcgtggcctattggggccagggaacactggttacagtgtcctctacgcgtatccagaaccctgatcctgccgtgtaccagctgcgggatagcaagagcagcgacaagagcgtgtgtctgttcaccgacttcgacagccagaccaacgtgtcccagagcaaggactccgacgtgtacatcaccgataagtgcgtgctggacatgcggagcatggacttcaagagcaactccgccgtggcctggtccaacaagtccgatttcgcctgcgccaacgccttcaacaacagcattatccccgaggacacattcttcccaagccccgagagcagctgcggctttaccagcgagagctaccagcagggcgtgctgagcgccaccatcctgtacgagatcctgctgggcaaggccaccctgtacgccgtgctggtgtctgccctggtgctgatggctatggtcaagcggaaggacagccggggataa

SEQ ID NO: 34880 - DNA, 3396 bp, synthetic construct
  source 1..3396: mol_type = other DNA
atgggacccagactgctgttttgggctctgctgtgtctgctcggcacaggacctgttgaagctggcgtgacacagagccccacacacctgattaagaccagaggccagcaggccacactgagatgcagccctatcagcggccacaccagcgtgtactggtatcagcaggctctcggactgggcctccagttcctgctttggtacgacgagggcgaagagagaaaccggggcaacttccctcctcggttttccggcagacagttccccaactacagcagcgagctgaacgtgaacgccctggaactggaagatagcgccctgtacctgtgtgcctcttctcttggtggacctcgcggactggctggactgagaggggatgagcagtttttcggccctggcaccagactgaccgtgctggaaggtaccggcggaggcggatctggcggcggagaattcgagatcgtgctgacacagtctcccgccacactgtcactgtctccaggcgaaagagccacactgagctgtagcgtgtccagcagcatcagcagcagcaacctgcactggtatcagcagaagcctggacaggcccctcggctgctgatctacgccacatctaatctggcctctggcatccccgccagattttctggctctggaagcggcaccgacttcaccctgaccataagcagcctggaacctgaggacttcgccgtgtactactgccagcagtggtccagctatccccacacatttggcggaggcaccaaggtggaaatcaagagactcgaggacctgaagaacgtgttcccacctgaggtggccgtgttcgagcctagcgaggccgagatcagccacacccagaaagccaccctcgtgtgcctggctaccggcttctaccccgaccatgtggaactgtcttggtgggtcaacggcaaagaggtgcacagcggcgtgtgtaccgacccccagccactgaaagaacagcccgccctgaacgacagccggtactgcctgagcagcagactgagagtgtccgccaccttctggcagaacccccggaaccacttcagatgccaggtgcagttctacggcctgagcgagaacgacgagtggacccaggacagagccaagcccgtgacccagatcgtgtctgccgaagcctggggcagagccgattgcgacgtgaagctggtggaaaagagcttcgagacagacaccaacctgaacttccagaacctgagcgtgatcggcttcagaatcctgctgctgaaagtggccggctttaacctgctgatgaccctgcggctgtggtccagcagggccaagcgatctggatctggagcaacaaacttctcactactcaaacaagcaggtgacgtggaggagaatcccgggcctactagtgccaccatggactggatttggcgcatccttttccttgtcggcgctgctaccggcgcccattccgggcccgaagtgcagctggttgaatctggcggaggactggttcaggctggcggatctctgagactgtcttgtgccgccagcggcagaacctttagcatgggctggtttagacaggcccctggcaaagagagagagttcgtcgccgccatcacatactctggcggcagcccttactacgccgactctgtgaagggcagattcaccatcagccgggacaacgccaagaacaccgtgtacctccagatgaacagcctgaagcctgaggacaccgccgtgtactactgcgccgccaatccaacatacggcagcgactggaacgccgagaattggggccagggaacccaagtgacagtgtctagcggatccggcggcggaggatctggcggaggcggatctgggggcggaggctctttcgaacaggttcagctggttcagagcggagccgaagtgaagaaacctggggcctctgtgaaggtgtcctgcaaggcttccggctacacctttaccaactacctgatcgagtgggtccgacaggctccaggacaaggactggaatggatgggcctgattaaccctggcagcggcggcaccaactacaacgagaagttcaagggcagagtgaccatgaccaccgacaccagcacaagcaccgcctacatggaactgcggagcctgagaagcgacgacaccgccgtgtattattgcgccagaagaagccctctcggctcttggatctactacgcctatgacggcgtggcctattggggccagggaacactggttacagtgtcctctacgcgtatccagaaccctgatcctgccgtgtaccagctgcgggatagcaagagcagcgacaagagcgtgtgtctgttcaccgacttcgacagccagaccaacgtgtcccagagcaaggactccgacgtgtacatcaccgataagtgcgtgctggacatgcggagcatggacttcaagagcaactccgccgtggcctggtccaacaagtccgatttcgcctgcgccaacgccttcaacaacagcattatccccgaggacacattcttcccaagccccgagagcagctgcggctttaccagcgagagctaccagcagggcgtgctgagcgccaccatcctgtacgagatcctgctgggcaaggccaccctgtacgccgtgctggtgtctgccctggtgctgatggctatggtcaagcggaaggacagccggggacgcgccaagagaagcggatctggcgtgaagcagaccctgaatttcgacctgctgaagctggctggcgacgtggaatccaacccaggcccttctagaggccatatgaccgagtacaagcccacggtgcgcctcgccacccgcgacgacgtccccagggccgtacgcaccctcgccgccgcgttcgccgactaccccgccacgcgccacaccgtcgatccggaccgccacatcgagcgggtcaccgagctgcaagaactcttcctcacgcgcgtcgggctcgacatcggcaaggtgtgggtcgcggacgacggcgccgcggtggcggtctggaccacgccggagagcgtcgaagcgggggcggtgttcgccgagatcggcccgcgcatggccgagttgagcggttcccggctggccgcgcagcaacagatggaaggcctcctggcgccgcaccggcccaaggagcccgcgtggttcctggccaccgtcggcgtctcgcccgaccaccagggcaagggtctgggcagcgccgtcgtgctccccggagtggaggcggccgagcgcgccggggtgcccgccttcctggagacctccgcgccccgcaacctccccttctacgagcggctcggcttcaccgtcaccgccgacgtcgaggtgcccgaaggaccgcgcacctggtgcatgacccgcaagcccggtgcctga

SEQ ID NO: 34881 - DNA, 3393 bp, synthetic construct
  source 1..3393: mol_type = other DNA
atgggacccagactgctgttttgggctctgctgtgtctgctcggcacaggacctgttgaagctggcgtgacacagagccccacacacctgattaagaccagaggccagcaggccacactgagatgcagccctatcagcggccacaccagcgtgtactggtatcagcaggctctcggactgggcctccagttcctgctttggtacgacgagggcgaagagagaaaccggggcaacttccctcctcggttttccggcagacagttccccaactacagcagcgagctgaacgtgaacgccctggaactggaagatagcgccctgtacctgtgtgccagctctctcggcggagatgaactgggagccgatggcaacgagcagttctttggccctggcaccagactgaccgtgctggaaggtaccggcggaggcggatctggcggcggaagcgaattcgagatcgtgctgacacagtctcccgccacactgtcactgtctccaggcgaaagagccacactgagctgtagcgtgtccagcagcatcagcagcagcaacctgcactggtatcagcagaagcctggacaggcccctcggctgctgatctacgccacatctaatctggcctctggcatccccgccagattttctggctctggaagcggcaccgacttcaccctgaccataagcagcctggaacctgaggacttcgccgtgtactactgccagcagtggtccagctatccccacacatttggcggaggcaccaaggtggaaatcaagagactcgaggacctgaagaacgtgttcccacctgaggtggccgtgttcgagcctagcgaggccgagatcagccacacccagaaagccaccctcgtgtgcctggctaccggcttctaccccgaccatgtggaactgtcttggtgggtcaacggcaaagaggtgcacagcggcgtgtgtaccgacccccagccactgaaagaacagcccgccctgaacgacagccggtactgcctgagcagcagactgagagtgtccgccaccttctggcagaacccccggaaccacttcagatgccaggtgcagttctacggcctgagcgagaacgacgagtggacccaggacagagccaagcccgtgacccagatcgtgtctgccgaagcctggggcagagccgattgcgacgtgaagctggtggaaaagagcttcgagacagacaccaacctgaacttccagaacctgagcgtgatcggcttcagaatcctgctgctgaaagtggccggctttaacctgctgatgaccctgcggctgtggtccagcagggccaagcgatctggatctggagcaacaaacttctcactactcaaacaagcaggtgacgtggaggagaatcccgggcctactagtgccaccatggactggatttggcgcatccttttccttgtcggcgctgctaccggcgcccattccgggcccgaagtgcagctggttgaatctggcggaggactggttcaggctggcggatctctgagactgtcttgtgccgccagcggcagaacctttagcatgggctggtttagacaggcccctggcaaagagagagagttcgtcgccgccatcacatactctggcggcagcccttactacgccgactctgtgaagggcagattcaccatcagccgggacaacgccaagaacaccgtgtacctccagatgaacagcctgaagcctgaggacaccgccgtgtactactgcgccgccaatccaacatacggcagcgactggaacgccgagaattggggccagggaacccaagtgacagtgtctagcggatccggcggcggaggatctggcggaggcggatctgggggcggaggctctttcgaacaggttcagctggttcagagcggagccgaagtgaagaaacctggggcctctgtgaaggtgtcctgcaaggcttccggctacacctttaccaactacctgatcgagtgggtccgacaggctccaggacaaggactggaatggatgggcctgattaaccctggcagcggcggcaccaactacaacgagaagttcaagggcagagtgaccatgaccaccgacaccagcacaagcaccgcctacatggaactgcggagcctgagaagcgacgacaccgccgtgtattattgcgccagaagaagccctctcggctcttggatctactacgcctatgacggcgtggcctattggggccagggaacactggttacagtgtcctctacgcgtatccagaaccctgatcctgccgtgtaccagctgcgggatagcaagagcagcgacaagagcgtgtgtctgttcaccgacttcgacagccagaccaacgtgtcccagagcaaggactccgacgtgtacatcaccgataagtgcgtgctggacatgcggagcatggacttcaagagcaactccgccgtggcctggtccaacaagtccgatttcgcctgcgccaacgccttcaacaacagcattatccccgaggacacattcttcccaagccccgagagcagctgcggctttaccagcgagagctaccagcagggcgtgctgagcgccaccatcctgtacgagatcctgctgggcaaggccaccctgtacgccgtgctggtgtctgccctggtgctgatggctatggtcaagcggaaggacagccggggacgcgccaagagaagcggatctggcgtgaagcagaccctgaatttcgacctgctgaagctggctggcgacgtggaatccaacccaggcccttctagaggccatatgaccgagtacaagcccacggtgcgcctcgccacccgcgacgacgtccccagggccgtacgcaccctcgccgccgcgttcgccgactaccccgccacgcgccacaccgtcgatccggaccgccacatcgagcgggtcaccgagctgcaagaactcttcctcacgcgcgtcgggctcgacatcggcaaggtgtgggtcgcggacgacggcgccgcggtggcggtctggaccacgccggagagcgtcgaagcgggggcggtgttcgccgagatcggcccgcgcatggccgagttgagcggttcccggctggccgcgcagcaacagatggaaggcctcctggcgccgcaccggcccaaggagcccgcgtggttcctggccaccgtcggcgtctcgcccgaccaccagggcaagggtctgggcagcgccgtcgtgctccccggagtggaggcggccgagcgcgccggggtgcccgccttcctggagacctccgcgccccgcaacctccccttctacgagcggctcggcttcaccgtcaccgccgacgtcgaggtgcccgaaggaccgcgcacctggtgcatgacccgcaagcccggtgcctga

SEQ ID NO: 34882 - DNA, 2868 bp, synthetic construct
  source 1..2868: mol_type = other DNA
atggccttaccagtgaccgccttgctcctgccgctggccttgctgctccacgccgccaggccggagatcgtgctgacacagtctcccgccacactgtcactgtctccaggcgaaagagccacactgagctgtagcgtgtccagcagcatcagcagcagcaacctgcactggtatcagcagaagcctggacaggcccctcggctgctgatctacgccacatctaatctggcctctggcatccccgccagattttctggctctggaagcggcaccgacttcaccctgaccataagcagcctggaacctgaggacttcgccgtgtactactgccagcagtggtccagctatccccacacatttggcggaggcaccaaggtggaaatcaagagactcgaggacctgaagaacgtgttcccacctgaggtggccgtgttcgagcctagcgaggccgagatcagccacacccagaaagccaccctcgtgtgcctggctaccggcttctaccccgaccatgtggaactgtcttggtgggtcaacggcaaagaggtgcacagcggcgtgtgtaccgacccccagccactgaaagaacagcccgccctgaacgacagccggtactgcctgagcagcagactgagagtgtccgccaccttctggcagaacccccggaaccacttcagatgccaggtgcagttctacggcctgagcgagaacgacgagtggacccaggacagagccaagcccgtgacccagatcgtgtctgccgaagcctggggcagagccgattgcgacgtgaagctggtggaaaagagcttcgagacagacaccaacctgaacttccagaacctgagcgtgatcggcttcagaatcctgctgctgaaagtggccggctttaacctgctgatgaccctgcggctgtggtccagcagggccaagcgatctggatctggagcaacaaacttctcactactcaaacaagcaggtgacgtggaggagaatcccgggcctactagtgccaccatggactggatttggcgcatccttttccttgtcggcgctgctaccggcgcccattccgggcccatgggaagctggcttgagttctaccacagactcaacgccattgacagcaggctgtgggcacttggcggaagcgaagctgaactcgccgcttttgaaaaagaaattgccgctttcgagtccgagcttcaggcttacaaaggcaaagggaatcctgaggtcgagagcctgagagatcacgctgcccacattagagagtggttgcaggcataccggcacaatggatccggcggcggaggatctggcggaggcggatctgggggcggaggctctttcgaacaggttcagctggttcagagcggagccgaagtgaagaaacctggggcctctgtgaaggtgtcctgcaaggcttccggctacacctttaccaactacctgatcgagtgggtccgacaggctccaggacaaggactggaatggatgggcctgattaaccctggcagcggcggcaccaactacaacgagaagttcaagggcagagtgaccatgaccaccgacaccagcacaagcaccgcctacatggaactgcggagcctgagaagcgacgacaccgccgtgtattattgcgccagaagaagccctctcggctcttggatctactacgcctatgacggcgtggcctattggggccagggaacactggttacagtgtcctctacgcgtatccagaaccctgatcctgccgtgtaccagctgcgggatagcaagagcagcgacaagagcgtgtgtctgttcaccgacttcgacagccagaccaacgtgtcccagagcaaggactccgacgtgtacatcaccgataagtgcgtgctggacatgcggagcatggacttcaagagcaactccgccgtggcctggtccaacaagtccgatttcgcctgcgccaacgccttcaacaacagcattatccccgaggacacattcttcccaagccccgagagcagctgcggctttaccagcgagagctaccagcagggcgtgctgagcgccaccatcctgtacgagatcctgctgggcaaggccaccctgtacgccgtgctggtgtctgccctggtgctgatggctatggtcaagcggaaggacagccggggacgcgccaagagaagcggatctggcgtgaagcagaccctgaatttcgacctgctgaagctggctggcgacgtggaatccaacccaggcccttctagaggccatatgaccgagtacaagcccacggtgcgcctcgccacccgcgacgacgtccccagggccgtacgcaccctcgccgccgcgttcgccgactaccccgccacgcgccacaccgtcgatccggaccgccacatcgagcgggtcaccgagctgcaagaactcttcctcacgcgcgtcgggctcgacatcggcaaggtgtgggtcgcggacgacggcgccgcggtggcggtctggaccacgccggagagcgtcgaagcgggggcggtgttcgccgagatcggcccgcgcatggccgagttgagcggttcccggctggccgcgcagcaacagatggaaggcctcctggcgccgcaccggcccaaggagcccgcgtggttcctggccaccgtcggcgtctcgcccgaccaccagggcaagggtctgggcagcgccgtcgtgctccccggagtggaggcggccgagcgcgccggggtgcccgccttcctggagacctccgcgccccgcaacctccccttctacgagcggctcggcttcaccgtcaccgccgacgtcgaggtgcccgaaggaccgcgcacctggtgcatgacccgcaagcccggtgcctga

SEQ ID NO: 34883 - DNA, 2868 bp, synthetic construct
  source 1..2868: mol_type = other DNA
atggccttaccagtgaccgccttgctcctgccgctggccttgctgctccacgccgccaggccggcatgcatgggcagttggttcgagttctacgaccggctgaatgccatcgacgccagactgtgggctctcggaggatctgaagctgagctggccgccttcgagaaagagatcgccgcctttgagagcgagctgcaagcctacaaaggcaagggcaaccccgaggtggaaaacctgagagtgcacgccgctgccatcagagaatggctccaggcttacagacacaacggtaccggcggaggcggatctggcggcggaggtagcggtggcggaggatctgaattcgagatcgtgctgacacagtctcccgccacactgtcactgtctccaggcgaaagagccacactgagctgtagcgtgtccagcagcatcagcagcagcaacctgcactggtatcagcagaagcctggacaggcccctcggctgctgatctacgccacatctaatctggcctctggcatccccgccagattttctggctctggaagcggcaccgacttcaccctgaccataagcagcctggaacctgaggacttcgccgtgtactactgccagcagtggtccagctatccccacacatttggcggaggcaccaaggtggaaatcaagagactcgaggacctgaagaacgtgttcccacctgaggtggccgtgttcgagcctagcgaggccgagatcagccacacccagaaagccaccctcgtgtgcctggctaccggcttctaccccgaccatgtggaactgtcttggtgggtcaacggcaaagaggtgcacagcggcgtgtgtaccgacccccagccactgaaagaacagcccgccctgaacgacagccggtactgcctgagcagcagactgagagtgtccgccaccttctggcagaacccccggaaccacttcagatgccaggtgcagttctacggcctgagcgagaacgacgagtggacccaggacagagccaagcccgtgacccagatcgtgtctgccgaagcctggggcagagccgattgcgacgtgaagctggtggaaaagagcttcgagacagacaccaacctgaacttccagaacctgagcgtgatcggcttcagaatcctgctgctgaaagtggccggctttaacctgctgatgaccctgcggctgtggtccagcagggccaagcgatctggatctggagcaacaaacttctcactactcaaacaagcaggtgacgtggaggagaatcccgggcctactagtatggactggatttggcgcatccttttccttgtcggcgctgctaccggcgcgcattccttcgaacaggttcagctggttcagagcggagccgaagtgaagaaacctggggcctctgtgaaggtgtcctgcaaggcttccggctacacctttaccaactacctgatcgagtgggtccgacaggctccaggacaaggactggaatggatgggcctgattaaccctggcagcggcggcaccaactacaacgagaagttcaagggcagagtgaccatgaccaccgacaccagcacaagcaccgcctacatggaactgcggagcctgagaagcgacgacaccgccgtgtattattgcgccagaagaagccctctcggctcttggatctactacgcctatgacggcgtggcctattggggccagggaacactggttacagtgtcctctacgcgtatccagaaccctgatcctgccgtgtaccagctgcgggatagcaagagcagcgacaagagcgtgtgtctgttcaccgacttcgacagccagaccaacgtgtcccagagcaaggactccgacgtgtacatcaccgataagtgcgtgctggacatgcggagcatggacttcaagagcaactccgccgtggcctggtccaacaagtccgatttcgcctgcgccaacgccttcaacaacagcattatccccgaggacacattcttcccaagccccgagagcagctgcggctttaccagcgagagctaccagcagggcgtgctgagcgccaccatcctgtacgagatcctgctgggcaaggccaccctgtacgccgtgctggtgtctgccctggtgctgatggctatggtcaagcggaaggacagccggggacgcgccaagagaagcggatctggcgtgaagcagaccctgaatttcgacctgctgaagctggctggcgacgtggaatccaacccaggcccttctagaggccatatgaccgagtacaagcccacggtgcgcctcgccacccgcgacgacgtccccagggccgtacgcaccctcgccgccgcgttcgccgactaccccgccacgcgccacaccgtcgatccggaccgccacatcgagcgggtcaccgagctgcaagaactcttcctcacgcgcgtcgggctcgacatcggcaaggtgtgggtcgcggacgacggcgccgcggtggcggtctggaccacgccggagagcgtcgaagcgggggcggtgttcgccgagatcggcccgcgcatggccgagttgagcggttcccggctggccgcgcagcaacagatggaaggcctcctggcgccgcaccggcccaaggagcccgcgtggttcctggccaccgtcggcgtctcgcccgaccaccagggcaagggtctgggcagcgccgtcgtgctccccggagtggaggcggccgagcgcgccggggtgcccgccttcctggagacctccgcgccccgcaacctccccttctacgagcggctcggcttcaccgtcaccgccgacgtcgaggtgcccgaaggaccgcgcacctggtgcatgacccgcaagcccggtgcctga

SEQ ID NO: 34884 - DNA, 3219 bp, synthetic construct
  source 1..3219: mol_type = other DNA
atggccttaccagtgaccgccttgctcctgccgctggccttgctgctccacgccgccaggccggcatgcatggaccccgacctggaaatcagagccgccttcctgcggcagagaaacacagccctgagaacagaggtggccgagctggaacaagaggtgcagcggctggaaaacgaggtgtcccagtacgagacaagatacggccctctcggaggcggaaaaggtaccggcggaggcggatctggcggcggaggtagcggtggcggaggatctgaattcgagatcgtgctgacacagtctcccgccacactgtcactgtctccaggcgaaagagccacactgagctgtagcgtgtccagcagcatcagcagcagcaacctgcactggtatcagcagaagcctggacaggcccctcggctgctgatctacgccacatctaatctggcctctggcatccccgccagattttctggctctggaagcggcaccgacttcaccctgaccataagcagcctggaacctgaggacttcgccgtgtactactgccagcagtggtccagctatccccacacatttggcggaggcaccaaggtggaaatcaagagactcgaggacctgaagaacgtgttcccacctgaggtggccgtgttcgagcctagcgaggccgagatcagccacacccagaaagccaccctcgtgtgcctggctaccggcttctaccccgaccatgtggaactgtcttggtgggtcaacggcaaagaggtgcacagcggcgtgtgtaccgacccccagccactgaaagaacagcccgccctgaacgacagccggtactgcctgagcagcagactgagagtgtccgccaccttctggcagaacccccggaaccacttcagatgccaggtgcagttctacggcctgagcgagaacgacgagtggacccaggacagagccaagcccgtgacccagatcgtgtctgccgaagcctggggcagagccgattgcgacgtgaagctggtggaaaagagcttcgagacagacaccaacctgaacttccagaacctgagcgtgatcggcttcagaatcctgctgctgaaagtggccggctttaacctgctgatgaccctgcggctgtggtccagcagggccaagcgatctggatctggagcaacaaacttctcactactcaaacaagcaggtgacgtggaggagaatcccgggcctactagtgccaccatggactggatttggcgcatccttttccttgtcggcgctgctaccggcgcccattccgggcccgaagtgcagctggttgaatctggcggaggactggttcaggctggcggatctctgagactgtcttgtgccgccagcggcagaacctttagcatgggctggtttagacaggcccctggcaaagagagagagttcgtcgccgccatcacatactctggcggcagcccttactacgccgactctgtgaagggcagattcaccatcagccgggacaacgccaagaacaccgtgtacctccagatgaacagcctgaagcctgaggacaccgccgtgtactactgcgccgccaatccaacatacggcagcgactggaacgccgagaattggggccagggaacccaagtgacagtgtctagcggatccggcggcggaggatctggcggaggcggatctgggggcggaggctctttcgaacaggttcagctggttcagagcggagccgaagtgaagaaacctggggcctctgtgaaggtgtcctgcaaggcttccggctacacctttaccaactacctgatcgagtgggtccgacaggctccaggacaaggactggaatggatgggcctgattaaccctggcagcggcggcaccaactacaacgagaagttcaagggcagagtgaccatgaccaccgacaccagcacaagcaccgcctacatggaactgcggagcctgagaagcgacgacaccgccgtgtattattgcgccagaagaagccctctcggctcttggatctactacgcctatgacggcgtggcctattggggccagggaacactggttacagtgtcctctacgcgtatccagaaccctgatcctgccgtgtaccagctgcgggatagcaagagcagcgacaagagcgtgtgtctgttcaccgacttcgacagccagaccaacgtgtcccagagcaaggactccgacgtgtacatcaccgataagtgcgtgctggacatgcggagcatggacttcaagagcaactccgccgtggcctggtccaacaagtccgatttcgcctgcgccaacgccttcaacaacagcattatccccgaggacacattcttcccaagccccgagagcagctgcggctttaccagcgagagctaccagcagggcgtgctgagcgccaccatcctgtacgagatcctgctgggcaaggccaccctgtacgccgtgctggtgtctgccctggtgctgatggctatggtcaagcggaaggacagccggggacgcgccaagagaagcggatctggcgtgaagcagaccctgaatttcgacctgctgaagctggctggcgacgtggaatccaacccaggcccttctagaggccatatgaccgagtacaagcccacggtgcgcctcgccacccgcgacgacgtccccagggccgtacgcaccctcgccgccgcgttcgccgactaccccgccacgcgccacaccgtcgatccggaccgccacatcgagcgggtcaccgagctgcaagaactcttcctcacgcgcgtcgggctcgacatcggcaaggtgtgggtcgcggacgacggcgccgcggtggcggtctggaccacgccggagagcgtcgaagcgggggcggtgttcgccgagatcggcccgcgcatggccgagttgagcggttcccggctggccgcgcagcaacagatggaaggcctcctggcgccgcaccggcccaaggagcccgcgtggttcctggccaccgtcggcgtctcgcccgaccaccagggcaagggtctgggcagcgccgtcgtgctccccggagtggaggcggccgagcgcgccggggtgcccgccttcctggagacctccgcgccccgcaacctccccttctacgagcggctcggcttcaccgtcaccgccgacgtcgaggtgcccgaaggaccgcgcacctggtgcatgacccgcaagcccggtgcctga

SEQ ID NO: 34885 - DNA, 2868 bp, synthetic construct
  source 1..2868: mol_type = other DNA
atggccttaccagtgaccgccttgctcctgccgctggccttgctgctccacgccgccaggccggagatcgtgctgacacagtctcccgccacactgtcactgtctccaggcgaaagagccacactgagctgtagcgtgtccagcagcatcagcagcagcaacctgcactggtatcagcagaagcctggacaggcccctcggctgctgatctacgccacatctaatctggcctctggcatccccgccagattttctggctctggaagcggcaccgacttcaccctgaccataagcagcctggaacctgaggacttcgccgtgtactactgccagcagtggtccagctatccccacacatttggcggaggcaccaaggtggaaatcaagagactcgaggacctgaagaacgtgttcccacctgaggtggccgtgttcgagcctagcgaggccgagatcagccacacccagaaagccaccctcgtgtgcctggctaccggcttctaccccgaccatgtggaactgtcttggtgggtcaacggcaaagaggtgcacagcggcgtgtgtaccgacccccagccactgaaagaacagcccgccctgaacgacagccggtactgcctgagcagcagactgagagtgtccgccaccttctggcagaacccccggaaccacttcagatgccaggtgcagttctacggcctgagcgagaacgacgagtggacccaggacagagccaagcccgtgacccagatcgtgtctgccgaagcctggggcagagccgattgcgacgtgaagctggtggaaaagagcttcgagacagacaccaacctgaacttccagaacctgagcgtgatcggcttcagaatcctgctgctgaaagtggccggctttaacctgctgatgaccctgcggctgtggtccagcagggccaagcgatctggatctggagcaacaaacttctcactactcaaacaagcaggtgacgtggaggagaatcccgggcctactagtgccaccatggactggatttggcgcatccttttccttgtcggcgctgctaccggcgcccattccgggcccatgggatcttggagcgagttttacgatcggctgcacgccattcaccaccggctgtatgctctcggaggaagcgaagctgagctggccgcttttgaaaaagaaattgccgctttcgagtccgagcttcaggcttacaaaggcaaagggaatcctgaggtcgaggccctgagagataccgccgccttcatcagaacccggttgcaggcataccggcacaacggatccggcggcggaggatctggcggaggcggatctgggggcggaggctctttcgaacaggttcagctggttcagagcggagccgaagtgaagaaacctggggcctctgtgaaggtgtcctgcaaggcttccggctacacctttaccaactacctgatcgagtgggtccgacaggctccaggacaaggactggaatggatgggcctgattaaccctggcagcggcggcaccaactacaacgagaagttcaagggcagagtgaccatgaccaccgacaccagcacaagcaccgcctacatggaactgcggagcctgagaagcgacgacaccgccgtgtattattgcgccagaagaagccctctcggctcttggatctactacgcctatgacggcgtggcctattggggccagggaacactggttacagtgtcctctacgcgtatccagaaccctgatcctgccgtgtaccagctgcgggatagcaagagcagcgacaagagcgtgtgtctgttcaccgacttcgacagccagaccaacgtgtcccagagcaaggactccgacgtgtacatcaccgataagtgcgtgctggacatgcggagcatggacttcaagagcaactccgccgtggcctggtccaacaagtccgatttcgcctgcgccaacgccttcaacaacagcattatccccgaggacacattcttcccaagccccgagagcagctgcggctttaccagcgagagctaccagcagggcgtgctgagcgccaccatcctgtacgagatcctgctgggcaaggccaccctgtacgccgtgctggtgtctgccctggtgctgatggctatggtcaagcggaaggacagccggggacgcgccaagagaagcggatctggcgtgaagcagaccctgaatttcgacctgctgaagctggctggcgacgtggaatccaacccaggcccttctagaggccatatgaccgagtacaagcccacggtgcgcctcgccacccgcgacgacgtccccagggccgtacgcaccctcgccgccgcgttcgccgactaccccgccacgcgccacaccgtcgatccggaccgccacatcgagcgggtcaccgagctgcaagaactcttcctcacgcgcgtcgggctcgacatcggcaaggtgtgggtcgcggacgacggcgccgcggtggcggtctggaccacgccggagagcgtcgaagcgggggcggtgttcgccgagatcggcccgcgcatggccgagttgagcggttcccggctggccgcgcagcaacagatggaaggcctcctggcgccgcaccggcccaaggagcccgcgtggttcctggccaccgtcggcgtctcgcccgaccaccagggcaagggtctgggcagcgccgtcgtgctccccggagtggaggcggccgagcgcgccggggtgcccgccttcctggagacctccgcgccccgcaacctccccttctacgagcggctcggcttcaccgtcaccgccgacgtcgaggtgcccgaaggaccgcgcacctggtgcatgacccgcaagcccggtgcctga

SEQ ID NO: 34886 - DNA, 3498 bp, synthetic construct
  source 1..3498: mol_type = other DNA
atggccttaccagtgaccgccttgctcctgccgctggccttgctgctccacgccgccaggccggagatcgtgctgacacagtctcccgccacactgtcactgtctccaggcgaaagagccacactgagctgtagcgtgtccagcagcatcagcagcagcaacctgcactggtatcagcagaagcctggacaggcccctcggctgctgatctacgccacatctaatctggcctctggcatccccgccagattttctggctctggaagcggcaccgacttcaccctgaccataagcagcctggaacctgaggacttcgccgtgtactactgccagcagtggtccagctatccccacacatttggcggaggcaccaaggtggaaatcaagagactcgaggacctgaagaacgtgttcccacctgaggtggccgtgttcgagcctagcgaggccgagatcagccacacccagaaagccaccctcgtgtgcctggctaccggcttctaccccgaccatgtggaactgtcttggtgggtcaacggcaaagaggtgcacagcggcgtgtgtaccgacccccagccactgaaagaacagcccgccctgaacgacagccggtactgcctgagcagcagactgagagtgtccgccaccttctggcagaacccccggaaccacttcagatgccaggtgcagttctacggcctgagcgagaacgacgagtggacccaggacagagccaagcccgtgacccagatcgtgtctgccgaagcctggggcagagccgattgcgacgtgaagctggtggaaaagagcttcgagacagacaccaacctgaacttccagaacctgagcgtgatcggcttcagaatcctgctgctgaaagtggccggctttaacctgctgatgaccctgcggctgtggtccagcagggccaagcgatctggatctggagcaacaaacttctcactactcaaacaagcaggtgacgtggaggagaatcccgggcctactagtaccatggactggatttggcgcatccttttccttgtcggcgctgctaccggcgcccattccctgttcaatcaagaggtgcagatccctctgaccgagagctactgtggcccctgtcctaagaactggatctgctacaagaacaactgctaccagttcttcgacgagagcaagaattggtacgagagccaggccagctgcatgagccagaatgccagcctgctgaaggtgtacagcaaagaggaccaggacctgctgaaactggtcaagagcgcccactggatgggccttgtgcacatccccaccaatggctcttggcagtgggaggacggcagcattctgagccctaacctgctgaccatcatcgagatgcagaagggcgactgcgccctgtacgccagcagctttaagggctacatcgagaattgcagcaccccgaacacctacatctgtatgcagagaaccgtttctggcggaggcggctctggaggaggcggaagtggcggcggaggcgacctctttaatcaagaagtccagattccactcaccgaatcctactgcggaccttgtccaaaaaattggatttgttataagaacaactgttatcaattctttgatgagtctaaaaattggtatgagtcccaggcttcctgcatgtctcagaacgcttctctgctgaaagtctactctaaagaagatcaggatctcctgaagctcgtcaagtctgcccattggatggggctcgtccacattcctaccaacggaagctggcaatgggaagatggctccatcctgtctccaaatctgctcacgattattgaaatgcagaaaggggattgtgctctctacgccagctccttcaagggatatattgagaactgtagcacgcccaatacttatatctgtatgcaacggaccgtgggatccggcggcggaggatctggcggaggcggatctgggggcggaggctctttcgaacaggttcagctggttcagagcggagccgaagtgaagaaacctggggcctctgtgaaggtgtcctgcaaggcttccggctacacctttaccaactacctgatcgagtgggtccgacaggctccaggacaaggactggaatggatgggcctgattaaccctggcagcggcggcaccaactacaacgagaagttcaagggcagagtgaccatgaccaccgacaccagcacaagcaccgcctacatggaactgcggagcctgagaagcgacgacaccgccgtgtattattgcgccagaagaagccctctcggctcttggatctactacgcctatgacggcgtggcctattggggccagggaacactggttacagtgtcctctacgcgtatccagaaccctgatcctgccgtgtaccagctgcgggatagcaagagcagcgacaagagcgtgtgtctgttcaccgacttcgacagccagaccaacgtgtcccagagcaaggactccgacgtgtacatcaccgataagtgcgtgctggacatgcggagcatggacttcaagagcaactccgccgtggcctggtccaacaagtccgatttcgcctgcgccaacgccttcaacaacagcattatccccgaggacacattcttcccaagccccgagagcagctgcggctttaccagcgagagctaccagcagggcgtgctgagcgccaccatcctgtacgagatcctgctgggcaaggccaccctgtacgccgtgctggtgtctgccctggtgctgatggctatggtcaagcggaaggacagccggggacgcgccaagagaagcggatctggcgtgaagcagaccctgaatttcgacctgctgaagctggctggcgacgtggaatccaacccaggcccttctagaggccatatgaccgagtacaagcccacggtgcgcctcgccacccgcgacgacgtccccagggccgtacgcaccctcgccgccgcgttcgccgactaccccgccacgcgccacaccgtcgatccggaccgccacatcgagcgggtcaccgagctgcaagaactcttcctcacgcgcgtcgggctcgacatcggcaaggtgtgggtcgcggacgacggcgccgcggtggcggtctggaccacgccggagagcgtcgaagcgggggcggtgttcgccgagatcggcccgcgcatggccgagttgagcggttcccggctggccgcgcagcaacagatggaaggcctcctggcgccgcaccggcccaaggagcccgcgtggttcctggccaccgtcggcgtctcgcccgaccaccagggcaagggtctgggcagcgccgtcgtgctccccggagtggaggcggccgagcgcgccggggtgcccgccttcctggagacctccgcgccccgcaacctccccttctacgagcggctcggcttcaccgtcaccgccgacgtcgaggtgcccgaaggaccgcgcacctggtgcatgacccgcaagcccggtgcctga

SEQ ID NO: 34887 - DNA, 1884 bp, synthetic construct
  source 1..1884: mol_type = other DNA
atggccttaccagtgaccgccttgctcctgccgctggccttgctgctccacgccgccaggccggagatcgtgctgacacagtctcccgccacactgtcactgtctccaggcgaaagagccacactgagctgtagcgtgtccagcagcatcagcagcagcaacctgcactggtatcagcagaagcctggacaggcccctcggctgctgatctacgccacatctaatctggcctctggcatccccgccagattttctggctctggaagcggcaccgacttcaccctgaccataagcagcctggaacctgaggacttcgccgtgtactactgccagcagtggtccagctatccccacacatttggcggaggcaccaaggtggaaatcaagagactcgaggacctgaagaacgtgttcccacctgaggtggccgtgttcgagcctagcgaggccgagatcagccacacccagaaagccaccctcgtgtgcctggctaccggcttctaccccgaccatgtggaactgtcttggtgggtcaacggcaaagaggtgcacagcggcgtgtgtaccgacccccagccactgaaagaacagcccgccctgaacgacagccggtactgcctgagcagcagactgagagtgtccgccaccttctggcagaacccccggaaccacttcagatgccaggtgcagttctacggcctgagcgagaacgacgagtggacccaggacagagccaagcccgtgacccagatcgtgtctgccgaagcctggggcagagccgattgcggctttaccagcgagagctaccagcagggcgtgctgagcgccaccaacctgagcgtgatcggcttcagaatcctgctgctgaaagtggccggctttaacctgctgatgaccctgcggctgtggtccagcagggccaagcgatctggatctggagcaacaaacttctcactactcaaacaagcaggtgacgtggaggagaatcccgggcctactagtatggactggatttggcgcatccttttccttgtcggcgctgctaccggcgcgcattccttcgaacaggttcagctggttcagagcggagccgaagtgaagaaacctggggcctctgtgaaggtgtcctgcaaggcttccggctacacctttaccaactacctgatcgagtgggtccgacaggctccaggacaaggactggaatggatgggcctgattaaccctggcagcggcggcaccaactacaacgagaagttcaagggcagagtgaccatgaccaccgacaccagcacaagcaccgcctacatggaactgcggagcctgagaagcgacgacaccgccgtgtattattgcgccagaagaagccctctcggctcttggatctactacgcctatgacggcgtggcctattggggccagggaacactggttacagtgtcctctacgcgtatccagaaccctgatcctgccgtgtaccagctgcgggatagcaagagcagcgacaagagcgtgtgtctgttcaccgacttcgacagccagaccaacgtgtcccagagcaaggactccgacgtgtacatcaccgataagtgcgtgctggacatgcggagcatggacttcaagagcaactccgccgtggcctggtccaacaagtccgatttcgcctgcgccaacgccttcaacaacagcattatccccgaggacacattcttcccaagccccgagagcagctgcgacgtgaagctggtggaaaagagcttcgagacagacaccaacctgaacttccagatcctgtacgagatcctgctgggcaaggccaccctgtacgccgtgctggtgtctgccctggtgctgatggctatggtcaagcggaaggacagccgggga

SEQ ID NO: 34888 - DNA, 1896 bp, synthetic construct
  source 1..1896: mol_type = other DNA
atggccttaccagtgaccgccttgctcctgccgctggccttgctgctccacgccgccaggccggagatcgtgctgacacagtctcccgccacactgtcactgtctccaggcgaaagagccacactgagctgtagcgtgtccagcagcatcagcagcagcaacctgcactggtatcagcagaagcctggacaggcccctcggctgctgatctacgccacatctaatctggcctctggcatccccgccagattttctggctctggaagcggcaccgacttcaccctgaccataagcagcctggaacctgaggacttcgccgtgtactactgccagcagtggtccagctatccccacacatttggcggaggcaccaaggtggaaatcaagagactcgagatccagaaccctgatcctgccgtgtaccagctgcgggatagcaagagcagcgacaagagcgtgtgtctgttcaccgacttcgacagccagaccaacgtgtcccagagcaaggactccgacgtgtacatcaccgataagtgcgtgctggacatgcggagcatggacttcaagagcaactccgccgtggcctggtccaacaagtccgatttcgcctgcgccaacgccttcaacaacagcattatccccgaggacacattcttcccaagccccgagagcagctgcgacgtgaagctggtggaaaagagcttcgagacagacaccaacctgaacttccagatcctgtacgagatcctgctgggcaaggccaccctgtacgccgtgctggtgtctgccctggtgctgatggctatggtcaagcggaaggacagccggggacgcgccaagagaagcggatctggcgtgaagcagaccctgaatttcgacctgctgaagctggctggcgacgtggaatccaacccaggccctactagtatggactggatttggcgcatccttttccttgtcggcgctgctaccggcgcgcattccttcgaacaggttcagctggttcagagcggagccgaagtgaagaaacctggggcctctgtgaaggtgtcctgcaaggcttccggctacacctttaccaactacctgatcgagtgggtccgacaggctccaggacaaggactggaatggatgggcctgattaaccctggcagcggcggcaccaactacaacgagaagttcaagggcagagtgaccatgaccaccgacaccagcacaagcaccgcctacatggaactgcggagcctgagaagcgacgacaccgccgtgtattattgcgccagaagaagccctctcggctcttggatctactacgcctatgacggcgtggcctattggggccagggaacactggttacagtgtcctctacgcgtgaggacctgaagaacgtgttcccacctgaggtggccgtgttcgagcctagcgaggccgagatcagccacacccagaaagccaccctcgtgtgcctggctaccggcttctaccccgaccatgtggaactgtcttggtgggtcaacggcaaagaggtgcacagcggcgtgtgtaccgacccccagccactgaaagaacagcccgccctgaacgacagccggtactgcctgagcagcagactgagagtgtccgccaccttctggcagaacccccggaaccacttcagatgccaggtgcagttctacggcctgagcgagaacgacgagtggacccaggacagagccaagcccgtgacccagatcgtgtctgccgaagcctggggcagagccgattgcggctttaccagcgagagctaccagcagggcgtgctgagcgccaccaacctgagcgtgatcggcttcagaatcctgctgctgaaagtggccggctttaacctgctgatgaccctgcggctgtggtccagc

SEQ ID NO: 34889 - DNA, 2289 bp, synthetic construct
  source 1..2289: mol_type = other DNA
atggccttaccagtgaccgccttgctcctgccgctggccttgctgctccacgccgccaggccggaagtgcagctggttgaatctggcggaggactggttcagcctggcggatctctgagactgtcttgtgccgccagcggcttcagcttcagcgacttttggatgagctgggtccgacaggcccctggcaaaggacttgaatgggtcgccacaatcagccaggccggcagcgagaaggactacgtggactctgtgaagggcagattcaccatcagccgggacaacgccaagaagtccctgtacctccagatgaacagcctgagagccgaggacaccgccgtgtactattgtgcctctggcgtgtacagcttcgactacagaggccagggcaccctggtcacagtctcttctggtaccggcggaggcggatctggcggcggaggtagcggtggcggaggatctgaattcgagatcgtgctgacacagtctcccgccacactgtcactgtctccaggcgaaagagccacactgagctgtagcgtgtccagcagcatcagcagcagcaacctgcactggtatcagcagaagcctggacaggcccctcggctgctgatctacgccacatctaatctggcctctggcatccccgccagattttctggctctggaagcggcaccgacttcaccctgaccataagcagcctggaacctgaggacttcgccgtgtactactgccagcagtggtccagctatccccacacatttggcggaggcaccaaggtggaaatcaagagactcgaggacctgaagaacgtgttcccacctgaggtggccgtgttcgagcctagcgaggccgagatcagccacacccagaaagccaccctcgtgtgcctggctaccggcttctaccccgaccatgtggaactgtcttggtgggtcaacggcaaagaggtgcacagcggcgtgtgtaccgacccccagccactgaaagaacagcccgccctgaacgacagccggtactgcctgagcagcagactgagagtgtccgccaccttctggcagaacccccggaaccacttcagatgccaggtgcagttctacggcctgagcgagaacgacgagtggacccaggacagagccaagcccgtgacccagatcgtgtctgccgaagcctggggcagagccgattgcggctttaccagcgagagctaccagcagggcgtgctgagcgccaccaacctgagcgtgatcggcttcagaatcctgctgctgaaagtggccggctttaacctgctgatgaccctgcggctgtggtccagcagggccaagcgatctggatctggagcaacaaacttctcactactcaaacaagcaggtgacgtggaggagaatcccgggcctactagtatggactggatttggcgcatccttttccttgtcggcgctgctaccggcgcgcattccttcgaacaggttcagctggttcagagcggagccgaagtgaagaaacctggggcctctgtgaaggtgtcctgcaaggcttccggctacacctttaccaactacctgatcgagtgggtccgacaggctccaggacaaggactggaatggatgggcctgattaaccctggcagcggcggcaccaactacaacgagaagttcaagggcagagtgaccatgaccaccgacaccagcacaagcaccgcctacatggaactgcggagcctgagaagcgacgacaccgccgtgtattattgcgccagaagaagccctctcggctcttggatctactacgcctatgacggcgtggcctattggggccagggaacactggttacagtgtcctctacgcgtatccagaaccctgatcctgccgtgtaccagctgcgggatagcaagagcagcgacaagagcgtgtgtctgttcaccgacttcgacagccagaccaacgtgtcccagagcaaggactccgacgtgtacatcaccgataagtgcgtgctggacatgcggagcatggacttcaagagcaactccgccgtggcctggtccaacaagtccgatttcgcctgcgccaacgccttcaacaacagcattatccccgaggacacattcttcccaagccccgagagcagctgcgacgtgaagctggtggaaaagagcttcgagacagacaccaacctgaacttccagatcctgtacgagatcctgctgggcaaggccaccctgtacgccgtgctggtgtctgccctggtgctgatggctatggtcaagcggaaggacagccgggga

SEQ ID NO: 34890 - DNA, 2301 bp, synthetic construct
  source 1..2301: mol_type = other DNA
atggccttaccagtgaccgccttgctcctgccgctggccttgctgctccacgccgccaggccggaagtgcagctggttgaatctggcggaggactggttcagcctggcggatctctgagactgtcttgtgccgccagcggcttcagcttcagcgacttttggatgagctgggtccgacaggcccctggcaaaggacttgaatgggtcgccacaatcagccaggccggcagcgagaaggactacgtggactctgtgaagggcagattcaccatcagccgggacaacgccaagaagtccctgtacctccagatgaacagcctgagagccgaggacaccgccgtgtactattgtgcctctggcgtgtacagcttcgactacagaggccagggcaccctggtcacagtctcttctggtaccggcggaggcggatctggcggcggaggtagcggtggcggaggatctgaattcgagatcgtgctgacacagtctcccgccacactgtcactgtctccaggcgaaagagccacactgagctgtagcgtgtccagcagcatcagcagcagcaacctgcactggtatcagcagaagcctggacaggcccctcggctgctgatctacgccacatctaatctggcctctggcatccccgccagattttctggctctggaagcggcaccgacttcaccctgaccataagcagcctggaacctgaggacttcgccgtgtactactgccagcagtggtccagctatccccacacatttggcggaggcaccaaggtggaaatcaagagactcgagatccagaaccctgatcctgccgtgtaccagctgcgggatagcaagagcagcgacaagagcgtgtgtctgttcaccgacttcgacagccagaccaacgtgtcccagagcaaggactccgacgtgtacatcaccgataagtgcgtgctggacatgcggagcatggacttcaagagcaactccgccgtggcctggtccaacaagtccgatttcgcctgcgccaacgccttcaacaacagcattatccccgaggacacattcttcccaagccccgagagcagctgcgacgtgaagctggtggaaaagagcttcgagacagacaccaacctgaacttccagatcctgtacgagatcctgctgggcaaggccaccctgtacgccgtgctggtgtctgccctggtgctgatggctatggtcaagcggaaggacagccggggacgcgccaagagaagcggatctggcgtgaagcagaccctgaatttcgacctgctgaagctggctggcgacgtggaatccaacccaggccctactagtatggactggatttggcgcatccttttccttgtcggcgctgctaccggcgcgcattccttcgaacaggttcagctggttcagagcggagccgaagtgaagaaacctggggcctctgtgaaggtgtcctgcaaggcttccggctacacctttaccaactacctgatcgagtgggtccgacaggctccaggacaaggactggaatggatgggcctgattaaccctggcagcggcggcaccaactacaacgagaagttcaagggcagagtgaccatgaccaccgacaccagcacaagcaccgcctacatggaactgcggagcctgagaagcgacgacaccgccgtgtattattgcgccagaagaagccctctcggctcttggatctactacgcctatgacggcgtggcctattggggccagggaacactggttacagtgtcctctacgcgtgaggacctgaagaacgtgttcccacctgaggtggccgtgttcgagcctagcgaggccgagatcagccacacccagaaagccaccctcgtgtgcctggctaccggcttctaccccgaccatgtggaactgtcttggtgggtcaacggcaaagaggtgcacagcggcgtgtgtaccgacccccagccactgaaagaacagcccgccctgaacgacagccggtactgcctgagcagcagactgagagtgtccgccaccttctggcagaacccccggaaccacttcagatgccaggtgcagttctacggcctgagcgagaacgacgagtggacccaggacagagccaagcccgtgacccagatcgtgtctgccgaagcctggggcagagccgattgcggctttaccagcgagagctaccagcagggcgtgctgagcgccaccaacctgagcgtgatcggcttcagaatcctgctgctgaaagtggccggctttaacctgctgatgaccctgcggctgtggtccagc

SEQ ID NO: 34891 - DNA, 2700 bp, synthetic construct
  source 1..2700: mol_type = other DNA
atggccttaccagtgaccgccttgctcctgccgctggccttgctgctccacgccgccaggccggaagtgcagctggttgaatctggcggaggactggttcagcctggcggatctctgagactgtcttgtgccgccagcggcttcagcttcagcgacttttggatgagctgggtccgacaggcccctggcaaaggacttgaatgggtcgccacaatcagccaggccggcagcgagaaggactacgtggactctgtgaagggcagattcaccatcagccgggacaacgccaagaagtccctgtacctccagatgaacagcctgagagccgaggacaccgccgtgtactattgtgcctctggcgtgtacagcttcgactacagaggccagggcaccctggtcacagtctcttctggtaccggcggaggcggatctggcggcggaggtagcggtggcggaggatctgaattcgagatcgtgctgacacagtctcccgccacactgtcactgtctccaggcgaaagagccacactgagctgtagcgtgtccagcagcatcagcagcagcaacctgcactggtatcagcagaagcctggacaggcccctcggctgctgatctacgccacatctaatctggcctctggcatccccgccagattttctggctctggaagcggcaccgacttcaccctgaccataagcagcctggaacctgaggacttcgccgtgtactactgccagcagtggtccagctatccccacacatttggcggaggcaccaaggtggaaatcaagagactcgaggacctgaagaacgtgttcccacctgaggtggccgtgttcgagcctagcgaggccgagatcagccacacccagaaagccaccctcgtgtgcctggctaccggcttctaccccgaccatgtggaactgtcttggtgggtcaacggcaaagaggtgcacagcggcgtgtgtaccgacccccagccactgaaagaacagcccgccctgaacgacagccggtactgcctgagcagcagactgagagtgtccgccaccttctggcagaacccccggaaccacttcagatgccaggtgcagttctacggcctgagcgagaacgacgagtggacccaggacagagccaagcccgtgacccagatcgtgtctgccgaagcctggggcagagccgattgcggctttaccagcgagagctaccagcagggcgtgctgagcgccaccaacctgagcgtgatcggcttcagaatcctgctgctgaaagtggccggctttaacctgctgatgaccctgcggctgtggtccagcagggccaagcgatctggatctggagcaacaaacttctcactactcaaacaagcaggtgacgtggaggagaatcccgggcctactagtatggactggatttggcgcatccttttccttgtcggcgctgctaccggcgcgcattccgggccccagctccagctgcaagagtctggacctggcctggtcaagcctagcgagacactgagcctgacctgtaccgtgtccggcgatagcatcagcagcggcgattactactggggctggatcagacagcctcctggcaaaggactggaatggatcggccacatctactacagcggcgtgacctactacaaccccagcctgaagtccagagtgaccatcagcgtggacaccagccggaaccagttctccctgaagctgtctagcgtgacagccgccgataccgccgtgtactactgcaccagagaggacagcagcaactggcggagtagaggccagggaacactggtcacagttagctctggatccggcggaggcggaagtggaggcggaggatctggcggcggaggctctttcgaacaggttcagctggttcagagcggagccgaagtgaagaaacctggggcctctgtgaaggtgtcctgcaaggcttccggctacacctttaccaactacctgatcgagtgggtccgacaggctccaggacaaggactggaatggatgggcctgattaaccctggcagcggcggcaccaactacaacgagaagttcaagggcagagtgaccatgaccaccgacaccagcacaagcaccgcctacatggaactgcggagcctgagaagcgacgacaccgccgtgtattattgcgccagaagaagccctctcggctcttggatctactacgcctatgacggcgtggcctattggggccagggaacactggttacagtgtcctctacgcgtatccagaaccctgatcctgccgtgtaccagctgcgggatagcaagagcagcgacaagagcgtgtgtctgttcaccgacttcgacagccagaccaacgtgtcccagagcaaggactccgacgtgtacatcaccgataagtgcgtgctggacatgcggagcatggacttcaagagcaactccgccgtggcctggtccaacaagtccgatttcgcctgcgccaacgccttcaacaacagcattatccccgaggacacattcttcccaagccccgagagcagctgcgacgtgaagctggtggaaaagagcttcgagacagacaccaacctgaacttccagatcctgtacgagatcctgctgggcaaggccaccctgtacgccgtgctggtgtctgccctggtgctgatggctatggtcaagcggaaggacagccgggga

SEQ ID NO: 34892 - DNA, 2712 bp, synthetic construct
  source 1..2712: mol_type = other DNA
atggccttaccagtgaccgccttgctcctgccgctggccttgctgctccacgccgccaggccggaagtgcagctggttgaatctggcggaggactggttcagcctggcggatctctgagactgtcttgtgccgccagcggcttcagcttcagcgacttttggatgagctgggtccgacaggcccctggcaaaggacttgaatgggtcgccacaatcagccaggccggcagcgagaaggactacgtggactctgtgaagggcagattcaccatcagccgggacaacgccaagaagtccctgtacctccagatgaacagcctgagagccgaggacaccgccgtgtactattgtgcctctggcgtgtacagcttcgactacagaggccagggcaccctggtcacagtctcttctggtaccggcggaggcggatctggcggcggaggtagcggtggcggaggatctgaattcgagatcgtgctgacacagtctcccgccacactgtcactgtctccaggcgaaagagccacactgagctgtagcgtgtccagcagcatcagcagcagcaacctgcactggtatcagcagaagcctggacaggcccctcggctgctgatctacgccacatctaatctggcctctggcatccccgccagattttctggctctggaagcggcaccgacttcaccctgaccataagcagcctggaacctgaggacttcgccgtgtactactgccagcagtggtccagctatccccacacatttggcggaggcaccaaggtggaaatcaagagactcgagatccagaaccctgatcctgccgtgtaccagctgcgggatagcaagagcagcgacaagagcgtgtgtctgttcaccgacttcgacagccagaccaacgtgtcccagagcaaggactccgacgtgtacatcaccgataagtgcgtgctggacatgcggagcatggacttcaagagcaactccgccgtggcctggtccaacaagtccgatttcgcctgcgccaacgccttcaacaacagcattatccccgaggacacattcttcccaagccccgagagcagctgcgacgtgaagctggtggaaaagagcttcgagacagacaccaacctgaacttccagatcctgtacgagatcctgctgggcaaggccaccctgtacgccgtgctggtgtctgccctggtgctgatggctatggtcaagcggaaggacagccggggacgcgccaagagaagcggatctggcgtgaagcagaccctgaatttcgacctgctgaagctggctggcgacgtggaatccaacccaggccctactagtatggactggatttggcgcatccttttccttgtcggcgctgctaccggcgcgcattccgggccccagctccagctgcaagagtctggacctggcctggtcaagcctagcgagacactgagcctgacctgtaccgtgtccggcgatagcatcagcagcggcgattactactggggctggatcagacagcctcctggcaaaggactggaatggatcggccacatctactacagcggcgtgacctactacaaccccagcctgaagtccagagtgaccatcagcgtggacaccagccggaaccagttctccctgaagctgtctagcgtgacagccgccgataccgccgtgtactactgcaccagagaggacagcagcaactggcggagtagaggccagggaacactggtcacagttagctctggatccggcggaggcggaagtggaggcggaggatctggcggcggaggctctttcgaacaggttcagctggttcagagcggagccgaagtgaagaaacctggggcctctgtgaaggtgtcctgcaaggcttccggctacacctttaccaactacctgatcgagtgggtccgacaggctccaggacaaggactggaatggatgggcctgattaaccctggcagcggcggcaccaactacaacgagaagttcaagggcagagtgaccatgaccaccgacaccagcacaagcaccgcctacatggaactgcggagcctgagaagcgacgacaccgccgtgtattattgcgccagaagaagccctctcggctcttggatctactacgcctatgacggcgtggcctattggggccagggaacactggttacagtgtcctctacgcgtgaggacctgaagaacgtgttcccacctgaggtggccgtgttcgagcctagcgaggccgagatcagccacacccagaaagccaccctcgtgtgcctggctaccggcttctaccccgaccatgtggaactgtcttggtgggtcaacggcaaagaggtgcacagcggcgtgtgtaccgacccccagccactgaaagaacagcccgccctgaacgacagccggtactgcctgagcagcagactgagagtgtccgccaccttctggcagaacccccggaaccacttcagatgccaggtgcagttctacggcctgagcgagaacgacgagtggacccaggacagagccaagcccgtgacccagatcgtgtctgccgaagcctggggcagagccgattgcggctttaccagcgagagctaccagcagggcgtgctgagcgccaccaacctgagcgtgatcggcttcagaatcctgctgctgaaagtggccggctttaacctgctgatgaccctgcggctgtggtccagc

SEQ ID NO: 34893 - DNA, 2196 bp, synthetic construct
  source 1..2196: mol_type = other DNA
atggccttaccagtgaccgccttgctcctgccgctggccttgctgctccacgccgccaggccggagatcgtgctgacacagtctcccgccacactgtcactgtctccaggcgaaagagccacactgagctgtagcgtgtccagcagcatcagcagcagcaacctgcactggtatcagcagaagcctggacaggcccctcggctgctgatctacgccacatctaatctggcctctggcatccccgccagattttctggctctggaagcggcaccgacttcaccctgaccataagcagcctggaacctgaggacttcgccgtgtactactgccagcagtggtccagctatccccacacatttggcggaggcaccaaggtggaaatcaagagactcgaggacctgaagaacgtgttcccacctgaggtggccgtgttcgagcctagcgaggccgagatcagccacacccagaaagccaccctcgtgtgcctggctaccggcttctaccccgaccatgtggaactgtcttggtgggtcaacggcaaagaggtgcacagcggcgtgtgtaccgacccccagccactgaaagaacagcccgccctgaacgacagccggtactgcctgagcagcagactgagagtgtccgccaccttctggcagaacccccggaaccacttcagatgccaggtgcagttctacggcctgagcgagaacgacgagtggacccaggacagagccaagcccgtgacccagatcgtgtctgccgaagcctggggcagagccgatgatgtgattaagatccactggcaggaaaagaagtccaacaccatcctgggcagccaggaaggcaacaccatgaagaccaacgacacctacatgaagttcagctggctgaccgtgcccgagaagtccctggacaaagaacacagatgcatcgtgcggcacgaaaacaacaagaacggcgtggaccaggaaatcatcttcccacccatcaagaccgatgtgattacaatggaccccaaggacaactgctccaaggacgccaacgataccctgctgctccagctgaccaacaccagcgcctactacatgtacttgttgctgctgctgaagtccgtggtgtacttcgccatcatcacatgctgcctgctgatggctatggtcaagcggaaggacagccggggaagggccaagcgatctggatctggagcaacaaacttctcactactcaaacaagcaggtgacgtggaggagaatcccgggcctactagtatggactggatttggcgcatccttttccttgtcggcgctgctaccggcgcgcattccttcgaacaggttcagctggttcagagcggagccgaagtgaagaaacctggggcctctgtgaaggtgtcctgcaaggcttccggctacacctttaccaactacctgatcgagtgggtccgacaggctccaggacaaggactggaatggatgggcctgattaaccctggcagcggcggcaccaactacaacgagaagttcaagggcagagtgaccatgaccaccgacaccagcacaagcaccgcctacatggaactgcggagcctgagaagcgacgacaccgccgtgtattattgcgccagaagaagccctctcggctcttggatctactacgcctatgacggcgtggcctattggggccagggaacactggttacagtgtcctctacgcgtatccagaaccctgatcctgccgtgtaccagctgcgggatagcaagagcagcgacaagagcgtgtgtctgttcaccgacttcgacagccagaccaacgtgtcccagagcaaggactccgacgtgtacatcaccgataagtgcgtgctggacatgcggagcatggacttcaagagcaactccgccgtggcctggtccaacaagtccgatttcgcctgcgccaacgccttcaacaacagcattatccccgaggacacattcttcccaagccccgagagcagcgactccaccgaccacgtgaagcccaaagagacagagaacaccaagcagcccagcaagagctgccacaagcccaaggccatcgtgcacaccgagaaagtgaacatgatgagcctgaccgtgctgggcctgcggatgctgttcgccaaaaccgtggccgtgaacttcctgctgaccgccaagctgttcttcctcctcaccgcc

SEQ ID NO: 34894 - DNA, 2208 bp, synthetic construct
  source 1..2208: mol_type = other DNA
atggccttaccagtgaccgccttgctcctgccgctggccttgctgctccacgccgccaggccggagatcgtgctgacacagtctcccgccacactgtcactgtctccaggcgaaagagccacactgagctgtagcgtgtccagcagcatcagcagcagcaacctgcactggtatcagcagaagcctggacaggcccctcggctgctgatctacgccacatctaatctggcctctggcatccccgccagattttctggctctggaagcggcaccgacttcaccctgaccataagcagcctggaacctgaggacttcgccgtgtactactgccagcagtggtccagctatccccacacatttggcggaggcaccaaggtggaaatcaagagactcgagatccagaaccctgatcctgccgtgtaccagctgcgggatagcaagagcagcgacaagagcgtgtgtctgttcaccgacttcgacagccagaccaacgtgtcccagagcaaggactccgacgtgtacatcaccgataagtgcgtgctggacatgcggagcatggacttcaagagcaactccgccgtggcctggtccaacaagtccgatttcgcctgcgccaacgccttcaacaacagcattatccccgaggacacattcttcccaagccccgagagcagcgactccaccgaccacgtgaagcccaaagagacagagaacaccaagcagcccagcaagagctgccacaagcccaaggccatcgtgcacaccgagaaagtgaacatgatgagcctgaccgtgctgggcctgcggatgctgttcgccaaaaccgtggccgtgaacttcctgctgaccgccaagctgttcttcctcctcaccgcccgcgccaagagaagcggatctggcgtgaagcagaccctgaatttcgacctgctgaagctggctggcgacgtggaatccaacccaggccctactagtatggactggatttggcgcatccttttccttgtcggcgctgctaccggcgcgcattccttcgaacaggttcagctggttcagagcggagccgaagtgaagaaacctggggcctctgtgaaggtgtcctgcaaggcttccggctacacctttaccaactacctgatcgagtgggtccgacaggctccaggacaaggactggaatggatgggcctgattaaccctggcagcggcggcaccaactacaacgagaagttcaagggcagagtgaccatgaccaccgacaccagcacaagcaccgcctacatggaactgcggagcctgagaagcgacgacaccgccgtgtattattgcgccagaagaagccctctcggctcttggatctactacgcctatgacggcgtggcctattggggccagggaacactggttacagtgtcctctacgcgtgaggacctgaagaacgtgttcccacctgaggtggccgtgttcgagcctagcgaggccgagatcagccacacccagaaagccaccctcgtgtgcctggctaccggcttctaccccgaccatgtggaactgtcttggtgggtcaacggcaaagaggtgcacagcggcgtgtgtaccgacccccagccactgaaagaacagcccgccctgaacgacagccggtactgcctgagcagcagactgagagtgtccgccaccttctggcagaacccccggaaccacttcagatgccaggtgcagttctacggcctgagcgagaacgacgagtggacccaggacagagccaagcccgtgacccagatcgtgtctgccgaagcctggggcagagccgatgatgtgattaagatccactggcaggaaaagaagtccaacaccatcctgggcagccaggaaggcaacaccatgaagaccaacgacacctacatgaagttcagctggctgaccgtgcccgagaagtccctggacaaagaacacagatgcatcgtgcggcacgaaaacaacaagaacggcgtggaccaggaaatcatcttcccacccatcaagaccgatgtgattacaatggaccccaaggacaactgctccaaggacgccaacgataccctgctgctccagctgaccaacaccagcgcctactacatgtacttgttgctgctgctgaagtccgtggtgtacttcgccatcatcacatgctgcctgctgatggctatggtcaagcggaaggacagccgggga

SEQ ID NO: 34895 - DNA, 2601 bp, synthetic construct
  source 1..2601: mol_type = other DNA
atggccttaccagtgaccgccttgctcctgccgctggccttgctgctccacgccgccaggccggaagtgcagctggttgaatctggcggaggactggttcagcctggcggatctctgagactgtcttgtgccgccagcggcttcagcttcagcgacttttggatgagctgggtccgacaggcccctggcaaaggacttgaatgggtcgccacaatcagccaggccggcagcgagaaggactacgtggactctgtgaagggcagattcaccatcagccgggacaacgccaagaagtccctgtacctccagatgaacagcctgagagccgaggacaccgccgtgtactattgtgcctctggcgtgtacagcttcgactacagaggccagggcaccctggtcacagtctcttctggtaccggcggaggcggatctggcggcggaggtagcggtggcggaggatctgaattcgagatcgtgctgacacagtctcccgccacactgtcactgtctccaggcgaaagagccacactgagctgtagcgtgtccagcagcatcagcagcagcaacctgcactggtatcagcagaagcctggacaggcccctcggctgctgatctacgccacatctaatctggcctctggcatccccgccagattttctggctctggaagcggcaccgacttcaccctgaccataagcagcctggaacctgaggacttcgccgtgtactactgccagcagtggtccagctatccccacacatttggcggaggcaccaaggtggaaatcaagagactcgaggacctgaagaacgtgttcccacctgaggtggccgtgttcgagcctagcgaggccgagatcagccacacccagaaagccaccctcgtgtgcctggctaccggcttctaccccgaccatgtggaactgtcttggtgggtcaacggcaaagaggtgcacagcggcgtgtgtaccgacccccagccactgaaagaacagcccgccctgaacgacagccggtactgcctgagcagcagactgagagtgtccgccaccttctggcagaacccccggaaccacttcagatgccaggtgcagttctacggcctgagcgagaacgacgagtggacccaggacagagccaagcccgtgacccagatcgtgtctgccgaagcctggggcagagccgatgatgtgattaagatccactggcaggaaaagaagtccaacaccatcctgggcagccaggaaggcaacaccatgaagaccaacgacacctacatgaagttcagctggctgaccgtgcccgagaagtccctggacaaagaacacagatgcatcgtgcggcacgaaaacaacaagaacggcgtggaccaggaaatcatcttcccacccatcaagaccgatgtgattacaatggaccccaaggacaactgctccaaggacgccaacgataccctgctgctccagctgaccaacaccagcgcctactacatgtacttgttgctgctgctgaagtccgtggtgtacttcgccatcatcacatgctgcctgctgatggctatggtcaagcggaaggacagccggggaagggccaagcgatctggatctggagcaacaaacttctcactactcaaacaagcaggtgacgtggaggagaatcccgggcctactagtatggactggatttggcgcatccttttccttgtcggcgctgctaccggcgcgcattccttcgaacaggttcagctggttcagagcggagccgaagtgaagaaacctggggcctctgtgaaggtgtcctgcaaggcttccggctacacctttaccaactacctgatcgagtgggtccgacaggctccaggacaaggactggaatggatgggcctgattaaccctggcagcggcggcaccaactacaacgagaagttcaagggcagagtgaccatgaccaccgacaccagcacaagcaccgcctacatggaactgcggagcctgagaagcgacgacaccgccgtgtattattgcgccagaagaagccctctcggctcttggatctactacgcctatgacggcgtggcctattggggccagggaacactggttacagtgtcctctacgcgtatccagaaccctgatcctgccgtgtaccagctgcgggatagcaagagcagcgacaagagcgtgtgtctgttcaccgacttcgacagccagaccaacgtgtcccagagcaaggactccgacgtgtacatcaccgataagtgcgtgctggacatgcggagcatggacttcaagagcaactccgccgtggcctggtccaacaagtccgatttcgcctgcgccaacgccttcaacaacagcattatccccgaggacacattcttcccaagccccgagagcagcgactccaccgaccacgtgaagcccaaagagacagagaacaccaagcagcccagcaagagctgccacaagcccaaggccatcgtgcacaccgagaaagtgaacatgatgagcctgaccgtgctgggcctgcggatgctgttcgccaaaaccgtggccgtgaacttcctgctgaccgccaagctgttcttcctcctcaccgcc

SEQ ID NO: 34896 - DNA, 2613 bp, synthetic construct
  source 1..2613: mol_type = other DNA
atggccttaccagtgaccgccttgctcctgccgctggccttgctgctccacgccgccaggccggaagtgcagctggttgaatctggcggaggactggttcagcctggcggatctctgagactgtcttgtgccgccagcggcttcagcttcagcgacttttggatgagctgggtccgacaggcccctggcaaaggacttgaatgggtcgccacaatcagccaggccggcagcgagaaggactacgtggactctgtgaagggcagattcaccatcagccgggacaacgccaagaagtccctgtacctccagatgaacagcctgagagccgaggacaccgccgtgtactattgtgcctctggcgtgtacagcttcgactacagaggccagggcaccctggtcacagtctcttctggtaccggcggaggcggatctggcggcggaggtagcggtggcggaggatctgaattcgagatcgtgctgacacagtctcccgccacactgtcactgtctccaggcgaaagagccacactgagctgtagcgtgtccagcagcatcagcagcagcaacctgcactggtatcagcagaagcctggacaggcccctcggctgctgatctacgccacatctaatctggcctctggcatccccgccagattttctggctctggaagcggcaccgacttcaccctgaccataagcagcctggaacctgaggacttcgccgtgtactactgccagcagtggtccagctatccccacacatttggcggaggcaccaaggtggaaatcaagagactcgagatccagaaccctgatcctgccgtgtaccagctgcgggatagcaagagcagcgacaagagcgtgtgtctgttcaccgacttcgacagccagaccaacgtgtcccagagcaaggactccgacgtgtacatcaccgataagtgcgtgctggacatgcggagcatggacttcaagagcaactccgccgtggcctggtccaacaagtccgatttcgcctgcgccaacgccttcaacaacagcattatccccgaggacacattcttcccaagccccgagagcagcgactccaccgaccacgtgaagcccaaagagacagagaacaccaagcagcccagcaagagctgccacaagcccaaggccatcgtgcacaccgagaaagtgaacatgatgagcctgaccgtgctgggcctgcggatgctgttcgccaaaaccgtggccgtgaacttcctgctgaccgccaagctgttcttcctcctcaccgcccgcgccaagagaagcggatctggcgtgaagcagaccctgaatttcgacctgctgaagctggctggcgacgtggaatccaacccaggccctactagtatggactggatttggcgcatccttttccttgtcggcgctgctaccggcgcgcattccttcgaacaggttcagctggttcagagcggagccgaagtgaagaaacctggggcctctgtgaaggtgtcctgcaaggcttccggctacacctttaccaactacctgatcgagtgggtccgacaggctccaggacaaggactggaatggatgggcctgattaaccctggcagcggcggcaccaactacaacgagaagttcaagggcagagtgaccatgaccaccgacaccagcacaagcaccgcctacatggaactgcggagcctgagaagcgacgacaccgccgtgtattattgcgccagaagaagccctctcggctcttggatctactacgcctatgacggcgtggcctattggggccagggaacactggttacagtgtcctctacgcgtgaggacctgaagaacgtgttcccacctgaggtggccgtgttcgagcctagcgaggccgagatcagccacacccagaaagccaccctcgtgtgcctggctaccggcttctaccccgaccatgtggaactgtcttggtgggtcaacggcaaagaggtgcacagcggcgtgtgtaccgacccccagccactgaaagaacagcccgccctgaacgacagccggtactgcctgagcagcagactgagagtgtccgccaccttctggcagaacccccggaaccacttcagatgccaggtgcagttctacggcctgagcgagaacgacgagtggacccaggacagagccaagcccgtgacccagatcgtgtctgccgaagcctggggcagagccgatgatgtgattaagatccactggcaggaaaagaagtccaacaccatcctgggcagccaggaaggcaacaccatgaagaccaacgacacctacatgaagttcagctggctgaccgtgcccgagaagtccctggacaaagaacacagatgcatcgtgcggcacgaaaacaacaagaacggcgtggaccaggaaatcatcttcccacccatcaagaccgatgtgattacaatggaccccaaggacaactgctccaaggacgccaacgataccctgctgctccagctgaccaacaccagcgcctactacatgtacttgttgctgctgctgaagtccgtggtgtacttcgccatcatcacatgctgcctgctgatggctatggtcaagcggaaggacagccgggga

SEQ ID NO: 34897 - DNA, 3012 bp, synthetic construct
  source 1..3012: mol_type = other DNA
atggccttaccagtgaccgccttgctcctgccgctggccttgctgctccacgccgccaggccggaagtgcagctggttgaatctggcggaggactggttcagcctggcggatctctgagactgtcttgtgccgccagcggcttcagcttcagcgacttttggatgagctgggtccgacaggcccctggcaaaggacttgaatgggtcgccacaatcagccaggccggcagcgagaaggactacgtggactctgtgaagggcagattcaccatcagccgggacaacgccaagaagtccctgtacctccagatgaacagcctgagagccgaggacaccgccgtgtactattgtgcctctggcgtgtacagcttcgactacagaggccagggcaccctggtcacagtctcttctggtaccggcggaggcggatctggcggcggaggtagcggtggcggaggatctgaattcgagatcgtgctgacacagtctcccgccacactgtcactgtctccaggcgaaagagccacactgagctgtagcgtgtccagcagcatcagcagcagcaacctgcactggtatcagcagaagcctggacaggcccctcggctgctgatctacgccacatctaatctggcctctggcatccccgccagattttctggctctggaagcggcaccgacttcaccctgaccataagcagcctggaacctgaggacttcgccgtgtactactgccagcagtggtccagctatccccacacatttggcggaggcaccaaggtggaaatcaagagactcgaggacctgaagaacgtgttcccacctgaggtggccgtgttcgagcctagcgaggccgagatcagccacacccagaaagccaccctcgtgtgcctggctaccggcttctaccccgaccatgtggaactgtcttggtgggtcaacggcaaagaggtgcacagcggcgtgtgtaccgacccccagccactgaaagaacagcccgccctgaacgacagccggtactgcctgagcagcagactgagagtgtccgccaccttctggcagaacccccggaaccacttcagatgccaggtgcagttctacggcctgagcgagaacgacgagtggacccaggacagagccaagcccgtgacccagatcgtgtctgccgaagcctggggcagagccgatgatgtgattaagatccactggcaggaaaagaagtccaacaccatcctgggcagccaggaaggcaacaccatgaagaccaacgacacctacatgaagttcagctggctgaccgtgcccgagaagtccctggacaaagaacacagatgcatcgtgcggcacgaaaacaacaagaacggcgtggaccaggaaatcatcttcccacccatcaagaccgatgtgattacaatggaccccaaggacaactgctccaaggacgccaacgataccctgctgctccagctgaccaacaccagcgcctactacatgtacttgttgctgctgctgaagtccgtggtgtacttcgccatcatcacatgctgcctgctgatggctatggtcaagcggaaggacagccggggaagggccaagcgatctggatctggagcaacaaacttctcactactcaaacaagcaggtgacgtggaggagaatcccgggcctactagtatggactggatttggcgcatccttttccttgtcggcgctgctaccggcgcgcattccgggccccagctccagctgcaagagtctggacctggcctggtcaagcctagcgagacactgagcctgacctgtaccgtgtccggcgatagcatcagcagcggcgattactactggggctggatcagacagcctcctggcaaaggactggaatggatcggccacatctactacagcggcgtgacctactacaaccccagcctgaagtccagagtgaccatcagcgtggacaccagccggaaccagttctccctgaagctgtctagcgtgacagccgccgataccgccgtgtactactgcaccagagaggacagcagcaactggcggagtagaggccagggaacactggtcacagttagctctggatccggcggaggcggaagtggaggcggaggatctggcggcggaggctctttcgaacaggttcagctggttcagagcggagccgaagtgaagaaacctggggcctctgtgaaggtgtcctgcaaggcttccggctacacctttaccaactacctgatcgagtgggtccgacaggctccaggacaaggactggaatggatgggcctgattaaccctggcagcggcggcaccaactacaacgagaagttcaagggcagagtgaccatgaccaccgacaccagcacaagcaccgcctacatggaactgcggagcctgagaagcgacgacaccgccgtgtattattgcgccagaagaagccctctcggctcttggatctactacgcctatgacggcgtggcctattggggccagggaacactggttacagtgtcctctacgcgtatccagaaccctgatcctgccgtgtaccagctgcgggatagcaagagcagcgacaagagcgtgtgtctgttcaccgacttcgacagccagaccaacgtgtcccagagcaaggactccgacgtgtacatcaccgataagtgcgtgctggacatgcggagcatggacttcaagagcaactccgccgtggcctggtccaacaagtccgatttcgcctgcgccaacgccttcaacaacagcattatccccgaggacacattcttcccaagccccgagagcagcgactccaccgaccacgtgaagcccaaagagacagagaacaccaagcagcccagcaagagctgccacaagcccaaggccatcgtgcacaccgagaaagtgaacatgatgagcctgaccgtgctgggcctgcggatgctgttcgccaaaaccgtggccgtgaacttcctgctgaccgccaagctgttcttcctcctcaccgcc

SEQ ID NO: 34898 - DNA, 3024 bp, synthetic construct
  source 1..3024: mol_type = other DNA
atggccttaccagtgaccgccttgctcctgccgctggccttgctgctccacgccgccaggccggaagtgcagctggttgaatctggcggaggactggttcagcctggcggatctctgagactgtcttgtgccgccagcggcttcagcttcagcgacttttggatgagctgggtccgacaggcccctggcaaaggacttgaatgggtcgccacaatcagccaggccggcagcgagaaggactacgtggactctgtgaagggcagattcaccatcagccgggacaacgccaagaagtccctgtacctccagatgaacagcctgagagccgaggacaccgccgtgtactattgtgcctctggcgtgtacagcttcgactacagaggccagggcaccctggtcacagtctcttctggtaccggcggaggcggatctggcggcggaggtagcggtggcggaggatctgaattcgagatcgtgctgacacagtctcccgccacactgtcactgtctccaggcgaaagagccacactgagctgtagcgtgtccagcagcatcagcagcagcaacctgcactggtatcagcagaagcctggacaggcccctcggctgctgatctacgccacatctaatctggcctctggcatccccgccagattttctggctctggaagcggcaccgacttcaccctgaccataagcagcctggaacctgaggacttcgccgtgtactactgccagcagtggtccagctatccccacacatttggcggaggcaccaaggtggaaatcaagagactcgagatccagaaccctgatcctgccgtgtaccagctgcgggatagcaagagcagcgacaagagcgtgtgtctgttcaccgacttcgacagccagaccaacgtgtcccagagcaaggactccgacgtgtacatcaccgataagtgcgtgctggacatgcggagcatggacttcaagagcaactccgccgtggcctggtccaacaagtccgatttcgcctgcgccaacgccttcaacaacagcattatccccgaggacacattcttcccaagccccgagagcagcgactccaccgaccacgtgaagcccaaagagacagagaacaccaagcagcccagcaagagctgccacaagcccaaggccatcgtgcacaccgagaaagtgaacatgatgagcctgaccgtgctgggcctgcggatgctgttcgccaaaaccgtggccgtgaacttcctgctgaccgccaagctgttcttcctcctcaccgcccgcgccaagagaagcggatctggcgtgaagcagaccctgaatttcgacctgctgaagctggctggcgacgtggaatccaacccaggccctactagtatggactggatttggcgcatccttttccttgtcggcgctgctaccggcgcgcattccgggccccagctccagctgcaagagtctggacctggcctggtcaagcctagcgagacactgagcctgacctgtaccgtgtccggcgatagcatcagcagcggcgattactactggggctggatcagacagcctcctggcaaaggactggaatggatcggccacatctactacagcggcgtgacctactacaaccccagcctgaagtccagagtgaccatcagcgtggacaccagccggaaccagttctccctgaagctgtctagcgtgacagccgccgataccgccgtgtactactgcaccagagaggacagcagcaactggcggagtagaggccagggaacactggtcacagttagctctggatccggcggaggcggaagtggaggcggaggatctggcggcggaggctctttcgaacaggttcagctggttcagagcggagccgaagtgaagaaacctggggcctctgtgaaggtgtcctgcaaggcttccggctacacctttaccaactacctgatcgagtgggtccgacaggctccaggacaaggactggaatggatgggcctgattaaccctggcagcggcggcaccaactacaacgagaagttcaagggcagagtgaccatgaccaccgacaccagcacaagcaccgcctacatggaactgcggagcctgagaagcgacgacaccgccgtgtattattgcgccagaagaagccctctcggctcttggatctactacgcctatgacggcgtggcctattggggccagggaacactggttacagtgtcctctacgcgtgaggacctgaagaacgtgttcccacctgaggtggccgtgttcgagcctagcgaggccgagatcagccacacccagaaagccaccctcgtgtgcctggctaccggcttctaccccgaccatgtggaactgtcttggtgggtcaacggcaaagaggtgcacagcggcgtgtgtaccgacccccagccactgaaagaacagcccgccctgaacgacagccggtactgcctgagcagcagactgagagtgtccgccaccttctggcagaacccccggaaccacttcagatgccaggtgcagttctacggcctgagcgagaacgacgagtggacccaggacagagccaagcccgtgacccagatcgtgtctgccgaagcctggggcagagccgatgatgtgattaagatccactggcaggaaaagaagtccaacaccatcctgggcagccaggaaggcaacaccatgaagaccaacgacacctacatgaagttcagctggctgaccgtgcccgagaagtccctggacaaagaacacagatgcatcgtgcggcacgaaaacaacaagaacggcgtggaccaggaaatcatcttcccacccatcaagaccgatgtgattacaatggaccccaaggacaactgctccaaggacgccaacgataccctgctgctccagctgaccaacaccagcgcctactacatgtacttgttgctgctgctgaagtccgtggtgtacttcgccatcatcacatgctgcctgctgatggctatggtcaagcggaaggacagccgggga

SEQ ID NO: 34899 - DNA, 2190 bp, synthetic construct
  source 1..2190: mol_type = other DNA
atggccttaccagtgaccgccttgctcctgccgctggccttgctgctccacgccgccaggccggagatcgtgctgacacagtctcccgccacactgtcactgtctccaggcgaaagagccacactgagctgtagcgtgtccagcagcatcagcagcagcaacctgcactggtatcagcagaagcctggacaggcccctcggctgctgatctacgccacatctaatctggcctctggcatccccgccagattttctggctctggaagcggcaccgacttcaccctgaccataagcagcctggaacctgaggacttcgccgtgtactactgccagcagtggtccagctatccccacacatttggcggaggcaccaaggtggaaatcaagagactcgaggacctgaagaacgtgttcccacctgaggtggccgtgttcgagcctagcgaggccgagatcagccacacccagaaagccaccctcgtgtgcctggctaccggcttctaccccgaccatgtggaactgtcttggtgggtcaacggcaaagaggtgcacagcggcgtgtgtaccgacccccagccactgaaagaacagcccgccctgaacgacagccggtactgcctgagcagcagactgagagtgtccgccaccttctggcagaacccccggaaccacttcagatgccaggtgcagttctacggcctgagcgagaacgacgagtggacccaggacagagccaagcccgtgacccagatcgtgtctgccgaagcctggggcagagccgatgatgtgattaagatccactggcaggaaaagaagtccaacaccatcctgggcagccaggaaggcaacaccatgaagaccaacgacacctacatgaagttcagctggctgaccgtgcccgagaagtccctggacaaagaacacagatgcatcgtgcggcacgaaaacaacaagaacggcgtggaccaggaaatcatcttcccacccatcaagaccgatgtgattacaatggaccccaaggacaactgctccaaggacgccaacgataccctgctgctccagctgaccaacaccagcgcctactacatgtacttgttgctgctgctgaagtccgtggtgtacttcgccatcatcacatgctgcctgctgcggagaaccgccttctgctgcaacggcgagaagtctagggccaagcgatctggatctggagcaacaaacttctcactactcaaacaagcaggtgacgtggaggagaatcccgggcctactagtatggactggatttggcgcatccttttccttgtcggcgctgctaccggcgcgcattccttcgaacaggttcagctggttcagagcggagccgaagtgaagaaacctggggcctctgtgaaggtgtcctgcaaggcttccggctacacctttaccaactacctgatcgagtgggtccgacaggctccaggacaaggactggaatggatgggcctgattaaccctggcagcggcggcaccaactacaacgagaagttcaagggcagagtgaccatgaccaccgacaccagcacaagcaccgcctacatggaactgcggagcctgagaagcgacgacaccgccgtgtattattgcgccagaagaagccctctcggctcttggatctactacgcctatgacggcgtggcctattggggccagggaacactggttacagtgtcctctacgcgtatccagaaccctgatcctgccgtgtaccagctgcgggatagcaagagcagcgacaagagcgtgtgtctgttcaccgacttcgacagccagaccaacgtgtcccagagcaaggactccgacgtgtacatcaccgataagtgcgtgctggacatgcggagcatggacttcaagagcaactccgccgtggcctggtccaacaagtccgatttcgcctgcgccaacgccttcaacaacagcattatccccgaggacacattcttcccaagccccgagagcagcgactccaccgaccacgtgaagcccaaagagacagagaacaccaagcagcccagcaagagctgccacaagcccaaggccatcgtgcacaccgagaaagtgaacatgatgagcctgaccgtgctgggcctgcggatgctgttcgccaaaaccgtggccgtgaacttcctgctgaccgccaagctgttcttcctc

SEQ ID NO: 34900 - DNA, 2202 bp, synthetic construct
  source 1..2202: mol_type = other DNA
atggccttaccagtgaccgccttgctcctgccgctggccttgctgctccacgccgccaggccggagatcgtgctgacacagtctcccgccacactgtcactgtctccaggcgaaagagccacactgagctgtagcgtgtccagcagcatcagcagcagcaacctgcactggtatcagcagaagcctggacaggcccctcggctgctgatctacgccacatctaatctggcctctggcatccccgccagattttctggctctggaagcggcaccgacttcaccctgaccataagcagcctggaacctgaggacttcgccgtgtactactgccagcagtggtccagctatccccacacatttggcggaggcaccaaggtggaaatcaagagactcgagatccagaaccctgatcctgccgtgtaccagctgcgggatagcaagagcagcgacaagagcgtgtgtctgttcaccgacttcgacagccagaccaacgtgtcccagagcaaggactccgacgtgtacatcaccgataagtgcgtgctggacatgcggagcatggacttcaagagcaactccgccgtggcctggtccaacaagtccgatttcgcctgcgccaacgccttcaacaacagcattatccccgaggacacattcttcccaagccccgagagcagcgactccaccgaccacgtgaagcccaaagagacagagaacaccaagcagcccagcaagagctgccacaagcccaaggccatcgtgcacaccgagaaagtgaacatgatgagcctgaccgtgctgggcctgcggatgctgttcgccaaaaccgtggccgtgaacttcctgctgaccgccaagctgttcttcctccgcgccaagagaagcggatctggcgtgaagcagaccctgaatttcgacctgctgaagctggctggcgacgtggaatccaacccaggccctactagtatggactggatttggcgcatccttttccttgtcggcgctgctaccggcgcgcattccttcgaacaggttcagctggttcagagcggagccgaagtgaagaaacctggggcctctgtgaaggtgtcctgcaaggcttccggctacacctttaccaactacctgatcgagtgggtccgacaggctccaggacaaggactggaatggatgggcctgattaaccctggcagcggcggcaccaactacaacgagaagttcaagggcagagtgaccatgaccaccgacaccagcacaagcaccgcctacatggaactgcggagcctgagaagcgacgacaccgccgtgtattattgcgccagaagaagccctctcggctcttggatctactacgcctatgacggcgtggcctattggggccagggaacactggttacagtgtcctctacgcgtgaggacctgaagaacgtgttcccacctgaggtggccgtgttcgagcctagcgaggccgagatcagccacacccagaaagccaccctcgtgtgcctggctaccggcttctaccccgaccatgtggaactgtcttggtgggtcaacggcaaagaggtgcacagcggcgtgtgtaccgacccccagccactgaaagaacagcccgccctgaacgacagccggtactgcctgagcagcagactgagagtgtccgccaccttctggcagaacccccggaaccacttcagatgccaggtgcagttctacggcctgagcgagaacgacgagtggacccaggacagagccaagcccgtgacccagatcgtgtctgccgaagcctggggcagagccgatgatgtgattaagatccactggcaggaaaagaagtccaacaccatcctgggcagccaggaaggcaacaccatgaagaccaacgacacctacatgaagttcagctggctgaccgtgcccgagaagtccctggacaaagaacacagatgcatcgtgcggcacgaaaacaacaagaacggcgtggaccaggaaatcatcttcccacccatcaagaccgatgtgattacaatggaccccaaggacaactgctccaaggacgccaacgataccctgctgctccagctgaccaacaccagcgcctactacatgtacttgttgctgctgctgaagtccgtggtgtacttcgccatcatcacatgctgcctgctgcggagaaccgccttctgctgcaacggcgagaagtct

SEQ ID NO: 34901 - DNA, 2595 bp, synthetic construct
  source 1..2595: mol_type = other DNA
atggccttaccagtgaccgccttgctcctgccgctggccttgctgctccacgccgccaggccggaagtgcagctggttgaatctggcggaggactggttcagcctggcggatctctgagactgtcttgtgccgccagcggcttcagcttcagcgacttttggatgagctgggtccgacaggcccctggcaaaggacttgaatgggtcgccacaatcagccaggccggcagcgagaaggactacgtggactctgtgaagggcagattcaccatcagccgggacaacgccaagaagtccctgtacctccagatgaacagcctgagagccgaggacaccgccgtgtactattgtgcctctggcgtgtacagcttcgactacagaggccagggcaccctggtcacagtctcttctggtaccggcggaggcggatctggcggcggaggtagcggtggcggaggatctgaattcgagatcgtgctgacacagtctcccgccacactgtcactgtctccaggcgaaagagccacactgagctgtagcgtgtccagcagcatcagcagcagcaacctgcactggtatcagcagaagcctggacaggcccctcggctgctgatctacgccacatctaatctggcctctggcatccccgccagattttctggctctggaagcggcaccgacttcaccctgaccataagcagcctggaacctgaggacttcgccgtgtactactgccagcagtggtccagctatccccacacatttggcggaggcaccaaggtggaaatcaagagactcgaggacctgaagaacgtgttcccacctgaggtggccgtgttcgagcctagcgaggccgagatcagccacacccagaaagccaccctcgtgtgcctggctaccggcttctaccccgaccatgtggaactgtcttggtgggtcaacggcaaagaggtgcacagcggcgtgtgtaccgacccccagccactgaaagaacagcccgccctgaacgacagccggtactgcctgagcagcagactgagagtgtccgccaccttctggcagaacccccggaaccacttcagatgccaggtgcagttctacggcctgagcgagaacgacgagtggacccaggacagagccaagcccgtgacccagatcgtgtctgccgaagcctggggcagagccgatgatgtgattaagatccactggcaggaaaagaagtccaacaccatcctgggcagccaggaaggcaacaccatgaagaccaacgacacctacatgaagttcagctggctgaccgtgcccgagaagtccctggacaaagaacacagatgcatcgtgcggcacgaaaacaacaagaacggcgtggaccaggaaatcatcttcccacccatcaagaccgatgtgattacaatggaccccaaggacaactgctccaaggacgccaacgataccctgctgctccagctgaccaacaccagcgcctactacatgtacttgttgctgctgctgaagtccgtggtgtacttcgccatcatcacatgctgcctgctgcggagaaccgccttctgctgcaacggcgagaagtctagggccaagcgatctggatctggagcaacaaacttctcactactcaaacaagcaggtgacgtggaggagaatcccgggcctactagtatggactggatttggcgcatccttttccttgtcggcgctgctaccggcgcgcattccttcgaacaggttcagctggttcagagcggagccgaagtgaagaaacctggggcctctgtgaaggtgtcctgcaaggcttccggctacacctttaccaactacctgatcgagtgggtccgacaggctccaggacaaggactggaatggatgggcctgattaaccctggcagcggcggcaccaactacaacgagaagttcaagggcagagtgaccatgaccaccgacaccagcacaagcaccgcctacatggaactgcggagcctgagaagcgacgacaccgccgtgtattattgcgccagaagaagccctctcggctcttggatctactacgcctatgacggcgtggcctattggggccagggaacactggttacagtgtcctctacgcgtatccagaaccctgatcctgccgtgtaccagctgcgggatagcaagagcagcgacaagagcgtgtgtctgttcaccgacttcgacagccagaccaacgtgtcccagagcaaggactccgacgtgtacatcaccgataagtgcgtgctggacatgcggagcatggacttcaagagcaactccgccgtggcctggtccaacaagtccgatttcgcctgcgccaacgccttcaacaacagcattatccccgaggacacattcttcccaagccccgagagcagcgactccaccgaccacgtgaagcccaaagagacagagaacaccaagcagcccagcaagagctgccacaagcccaaggccatcgtgcacaccgagaaagtgaacatgatgagcctgaccgtgctgggcctgcggatgctgttcgccaaaaccgtggccgtgaacttcctgctgaccgccaagctgttcttcctc

SEQ ID NO: 34902 - DNA, 3006 bp, synthetic construct
  source 1..3006: mol_type = other DNA
atggccttaccagtgaccgccttgctcctgccgctggccttgctgctccacgccgccaggccggaagtgcagctggttgaatctggcggaggactggttcagcctggcggatctctgagactgtcttgtgccgccagcggcttcagcttcagcgacttttggatgagctgggtccgacaggcccctggcaaaggacttgaatgggtcgccacaatcagccaggccggcagcgagaaggactacgtggactctgtgaagggcagattcaccatcagccgggacaacgccaagaagtccctgtacctccagatgaacagcctgagagccgaggacaccgccgtgtactattgtgcctctggcgtgtacagcttcgactacagaggccagggcaccctggtcacagtctcttctggtaccggcggaggcggatctggcggcggaggtagcggtggcggaggatctgaattcgagatcgtgctgacacagtctcccgccacactgtcactgtctccaggcgaaagagccacactgagctgtagcgtgtccagcagcatcagcagcagcaacctgcactggtatcagcagaagcctggacaggcccctcggctgctgatctacgccacatctaatctggcctctggcatccccgccagattttctggctctggaagcggcaccgacttcaccctgaccataagcagcctggaacctgaggacttcgccgtgtactactgccagcagtggtccagctatccccacacatttggcggaggcaccaaggtggaaatcaagagactcgaggacctgaagaacgtgttcccacctgaggtggccgtgttcgagcctagcgaggccgagatcagccacacccagaaagccaccctcgtgtgcctggctaccggcttctaccccgaccatgtggaactgtcttggtgggtcaacggcaaagaggtgcacagcggcgtgtgtaccgacccccagccactgaaagaacagcccgccctgaacgacagccggtactgcctgagcagcagactgagagtgtccgccaccttctggcagaacccccggaaccacttcagatgccaggtgcagttctacggcctgagcgagaacgacgagtggacccaggacagagccaagcccgtgacccagatcgtgtctgccgaagcctggggcagagccgatgatgtgattaagatccactggcaggaaaagaagtccaacaccatcctgggcagccaggaaggcaacaccatgaagaccaacgacacctacatgaagttcagctggctgaccgtgcccgagaagtccctggacaaagaacacagatgcatcgtgcggcacgaaaacaacaagaacggcgtggaccaggaaatcatcttcccacccatcaagaccgatgtgattacaatggaccccaaggacaactgctccaaggacgccaacgataccctgctgctccagctgaccaacaccagcgcctactacatgtacttgttgctgctgctgaagtccgtggtgtacttcgccatcatcacatgctgcctgctgcggagaaccgccttctgctgcaacggcgagaagtctagggccaagcgatctggatctggagcaacaaacttctcactactcaaacaagcaggtgacgtggaggagaatcccgggcctactagtatggactggatttggcgcatccttttccttgtcggcgctgctaccggcgcgcattccgggccccagctccagctgcaagagtctggacctggcctggtcaagcctagcgagacactgagcctgacctgtaccgtgtccggcgatagcatcagcagcggcgattactactggggctggatcagacagcctcctggcaaaggactggaatggatcggccacatctactacagcggcgtgacctactacaaccccagcctgaagtccagagtgaccatcagcgtggacaccagccggaaccagttctccctgaagctgtctagcgtgacagccgccgataccgccgtgtactactgcaccagagaggacagcagcaactggcggagtagaggccagggaacactggtcacagttagctctggatccggcggaggcggaagtggaggcggaggatctggcggcggaggctctttcgaacaggttcagctggttcagagcggagccgaagtgaagaaacctggggcctctgtgaaggtgtcctgcaaggcttccggctacacctttaccaactacctgatcgagtgggtccgacaggctccaggacaaggactggaatggatgggcctgattaaccctggcagcggcggcaccaactacaacgagaagttcaagggcagagtgaccatgaccaccgacaccagcacaagcaccgcctacatggaactgcggagcctgagaagcgacgacaccgccgtgtattattgcgccagaagaagccctctcggctcttggatctactacgcctatgacggcgtggcctattggggccagggaacactggttacagtgtcctctacgcgtatccagaaccctgatcctgccgtgtaccagctgcgggatagcaagagcagcgacaagagcgtgtgtctgttcaccgacttcgacagccagaccaacgtgtcccagagcaaggactccgacgtgtacatcaccgataagtgcgtgctggacatgcggagcatggacttcaagagcaactccgccgtggcctggtccaacaagtccgatttcgcctgcgccaacgccttcaacaacagcattatccccgaggacacattcttcccaagccccgagagcagcgactccaccgaccacgtgaagcccaaagagacagagaacaccaagcagcccagcaagagctgccacaagcccaaggccatcgtgcacaccgagaaagtgaacatgatgagcctgaccgtgctgggcctgcggatgctgttcgccaaaaccgtggccgtgaacttcctgctgaccgccaagctgttcttcctc

SEQ ID NO: 34903 - DNA, 1884 bp, synthetic construct
  source 1..1884: mol_type = other DNA
atggccttaccagtgaccgccttgctcctgccgctggccttgctgctccacgccgccaggccggagatcgtgctgacacagtctcccgccacactgtcactgtctccaggcgaaagagccacactgagctgtagcgtgtccagcagcatcagcagcagcaacctgcactggtatcagcagaagcctggacaggcccctcggctgctgatctacgccacatctaatctggcctctggcatccccgccagattttctggctctggaagcggcaccgacttcaccctgaccataagcagcctggaacctgaggacttcgccgtgtactactgccagcagtggtccagctatccccacacatttggcggaggcaccaaggtggaaatcaagagactcgaggacctgaagaacgtgttcccacctgaggtggccgtgttcgagcctagcgaggccgagatcagccacacccagaaagccaccctcgtgtgcctggctaccggcttctaccccgaccatgtggaactgtcttggtgggtcaacggcaaagaggtgcacagcggcgtgtctaccgacccccagccactgaaagaacagcccgccctgaacgacagccggtactgcctgagcagcagactgagagtgtccgccaccttctggcagaacccccggaaccacttcagatgccaggtgcagttctacggcctgagcgagaacgacgagtggacccaggacagagccaagcccgtgacccagatcgtgtctgccgaagcctggggcagagccgattgcgacgtgaagctggtggaaaagagcttcgagacagacaccaacctgaacttccagaacctgagcgtgatcggcttcagaatcctgctgctgaaagtggccggctttaacctgctgatgaccctgcggctgtggtccagcagggccaagcgatctggatctggagcaacaaacttctcactactcaaacaagcaggtgacgtggaggagaatcccgggcctactagtatggactggatttggcgcatccttttccttgtcggcgctgctaccggcgcgcattccttcgaacaggttcagctggttcagagcggagccgaagtgaagaaacctggggcctctgtgaaggtgtcctgcaaggcttccggctacacctttaccaactacctgatcgagtgggtccgacaggctccaggacaaggactggaatggatgggcctgattaaccctggcagcggcggcaccaactacaacgagaagttcaagggcagagtgaccatgaccaccgacaccagcacaagcaccgcctacatggaactgcggagcctgagaagcgacgacaccgccgtgtattattgcgccagaagaagccctctcggctcttggatctactacgcctatgacggcgtggcctattggggccagggaacactggttacagtgtcctctacgcgtatccagaaccctgatcctgccgtgtaccagctgcgggatagcaagagcagcgacaagagcgtgtgtctgttcaccgacttcgacagccagaccaacgtgtcccagagcaaggactccgacgtgtacatcaccgataagaccgtgctggacatgcggagcatggacttcaagagcaactccgccgtggcctggtccaacaagtccgatttcgcctgcgccaacgccttcaacaacagcattatccccgaggacacattcttcccaagccccgagagcagctgcggctttaccagcgagagctaccagcagggcgtgctgagcgccaccatcctgtacgagatcctgctgggcaaggccaccctgtacgccgtgctggtgtctgccctggtgctgatggctatggtcaagcggaaggacagccgggga

SEQ ID NO: 34904 - DNA, 1884 bp, synthetic construct
  source 1..1884: mol_type = other DNA
atggccttaccagtgaccgccttgctcctgccgctggccttgctgctccacgccgccaggccggagatcgtgctgacacagtctcccgccacactgtcactgtctccaggcgaaagagccacactgagctgtagcgtgtccagcagcatcagcagcagcaacctgcactggtatcagcagaagcctggacaggcccctcggctgctgatctacgccacatctaatctggcctctggcatccccgccagattttctggctctggaagcggcaccgacttcaccctgaccataagcagcctggaacctgaggacttcgccgtgtactactgccagcagtggtccagctatccccacacatttggcggaggcaccaaggtggaaatcaagagactcgaggacctgaagaacgtgttcccacctgaggtggccgtgttcgagcctagcgaggccgagatcagccacacccagaaagccaccctcgtgtgcctggctaccggcttctaccccgaccatgtggaactgtcttggtgggtcaacggcaaagaggtgcacagcggcgtgtctaccgacccccagccactgaaagaacagcccgccctgaacgacagccggtactgcctgagcagcagactgagagtgtccgccaccttctggcagaacccccggaaccacttcagatgccaggtgcagttctacggcctgagcgagaacgacgagtggacccaggacagagccaagcccgtgacccagatcgtgtctgccgaagcctggggcagagccgattgcggctttaccagcgagagctaccagcagggcgtgctgagcgccaccaacctgagcgtgatcggcttcagaatcctgctgctgaaagtggccggctttaacctgctgatgaccctgcggctgtggtccagcagggccaagcgatctggatctggagcaacaaacttctcactactcaaacaagcaggtgacgtggaggagaatcccgggcctactagtatggactggatttggcgcatccttttccttgtcggcgctgctaccggcgcgcattccttcgaacaggttcagctggttcagagcggagccgaagtgaagaaacctggggcctctgtgaaggtgtcctgcaaggcttccggctacacctttaccaactacctgatcgagtgggtccgacaggctccaggacaaggactggaatggatgggcctgattaaccctggcagcggcggcaccaactacaacgagaagttcaagggcagagtgaccatgaccaccgacaccagcacaagcaccgcctacatggaactgcggagcctgagaagcgacgacaccgccgtgtattattgcgccagaagaagccctctcggctcttggatctactacgcctatgacggcgtggcctattggggccagggaacactggttacagtgtcctctacgcgtatccagaaccctgatcctgccgtgtaccagctgcgggatagcaagagcagcgacaagagcgtgtgtctgttcaccgacttcgacagccagaccaacgtgtcccagagcaaggactccgacgtgtacatcaccgataagaccgtgctggacatgcggagcatggacttcaagagcaactccgccgtggcctggtccaacaagtccgatttcgcctgcgccaacgccttcaacaacagcattatccccgaggacacattcttcccaagccccgagagcagctgcgacgtgaagctggtggaaaagagcttcgagacagacaccaacctgaacttccagatcctgtacgagatcctgctgggcaaggccaccctgtacgccgtgctggtgtctgccctggtgctgatggctatggtcaagcggaaggacagccgggga

SEQ ID NO: 34905 - DNA, 2196 bp, synthetic construct
  source 1..2196: mol_type = other DNA
atggccttaccagtgaccgccttgctcctgccgctggccttgctgctccacgccgccaggccggagatcgtgctgacacagtctcccgccacactgtcactgtctccaggcgaaagagccacactgagctgtagcgtgtccagcagcatcagcagcagcaacctgcactggtatcagcagaagcctggacaggcccctcggctgctgatctacgccacatctaatctggcctctggcatccccgccagattttctggctctggaagcggcaccgacttcaccctgaccataagcagcctggaacctgaggacttcgccgtgtactactgccagcagtggtccagctatccccacacatttggcggaggcaccaaggtggaaatcaagagactcgaggacctgaagaacgtgttcccacctgaggtggccgtgttcgagcctagcgaggccgagatcagccacacccagaaagccaccctcgtgtgcctggctaccggcttctaccccgaccatgtggaactgtcttggtgggtcaacggcaaagaggtgcacagcggcgtgtctaccgacccccagccactgaaagaacagcccgccctgaacgacagccggtactgcctgagcagcagactgagagtgtccgccaccttctggcagaacccccggaaccacttcagatgccaggtgcagttctacggcctgagcgagaacgacgagtggacccaggacagagccaagcccgtgacccagatcgtgtctgccgaagcctggggcagagccgatgatgtgattaagatccactggcaggaaaagaagtccaacaccatcctgggcagccaggaaggcaacaccatgaagaccaacgacacctacatgaagttcagctggctgaccgtgcccgagaagtccctggacaaagaacacagatgcatcgtgcggcacgaaaacaacaagaacggcgtggaccaggaaatcatcttcccacccatcaagaccgatgtgattacaatggaccccaaggacaactgctccaaggacgccaacgataccctgctgctccagctgaccaacaccagcgcctactacatgtacttgttgctgctgctgaagtccgtggtgtacttcgccatcatcacatgctgcctgctgatggctatggtcaagcggaaggacagccggggaagggccaagcgatctggatctggagcaacaaacttctcactactcaaacaagcaggtgacgtggaggagaatcccgggcctactagtatggactggatttggcgcatccttttccttgtcggcgctgctaccggcgcgcattccttcgaacaggttcagctggttcagagcggagccgaagtgaagaaacctggggcctctgtgaaggtgtcctgcaaggcttccggctacacctttaccaactacctgatcgagtgggtccgacaggctccaggacaaggactggaatggatgggcctgattaaccctggcagcggcggcaccaactacaacgagaagttcaagggcagagtgaccatgaccaccgacaccagcacaagcaccgcctacatggaactgcggagcctgagaagcgacgacaccgccgtgtattattgcgccagaagaagccctctcggctcttggatctactacgcctatgacggcgtggcctattggggccagggaacactggttacagtgtcctctacgcgtatccagaaccctgatcctgccgtgtaccagctgcgggatagcaagagcagcgacaagagcgtgtgtctgttcaccgacttcgacagccagaccaacgtgtcccagagcaaggactccgacgtgtacatcaccgataagaccgtgctggacatgcggagcatggacttcaagagcaactccgccgtggcctggtccaacaagtccgatttcgcctgcgccaacgccttcaacaacagcattatccccgaggacacattcttcccaagccccgagagcagcgactccaccgaccacgtgaagcccaaagagacagagaacaccaagcagcccagcaagagctgccacaagcccaaggccatcgtgcacaccgagaaagtgaacatgatgagcctgaccgtgctgggcctgcggatgctgttcgccaaaaccgtggccgtgaacttcctgctgaccgccaagctgttcttcctcctcaccgcc

SEQ ID NO: 34906 - DNA, 2190 bp, synthetic construct
  source 1..2190: mol_type = other DNA
atggccttaccagtgaccgccttgctcctgccgctggccttgctgctccacgccgccaggccggagatcgtgctgacacagtctcccgccacactgtcactgtctccaggcgaaagagccacactgagctgtagcgtgtccagcagcatcagcagcagcaacctgcactggtatcagcagaagcctggacaggcccctcggctgctgatctacgccacatctaatctggcctctggcatccccgccagattttctggctctggaagcggcaccgacttcaccctgaccataagcagcctggaacctgaggacttcgccgtgtactactgccagcagtggtccagctatccccacacatttggcggaggcaccaaggtggaaatcaagagactcgaggacctgaagaacgtgttcccacctgaggtggccgtgttcgagcctagcgaggccgagatcagccacacccagaaagccaccctcgtgtgcctggctaccggcttctaccccgaccatgtggaactgtcttggtgggtcaacggcaaagaggtgcacagcggcgtgtctaccgacccccagccactgaaagaacagcccgccctgaacgacagccggtactgcctgagcagcagactgagagtgtccgccaccttctggcagaacccccggaaccacttcagatgccaggtgcagttctacggcctgagcgagaacgacgagtggacccaggacagagccaagcccgtgacccagatcgtgtctgccgaagcctggggcagagccgatgatgtgattaagatccactggcaggaaaagaagtccaacaccatcctgggcagccaggaaggcaacaccatgaagaccaacgacacctacatgaagttcagctggctgaccgtgcccgagaagtccctggacaaagaacacagatgcatcgtgcggcacgaaaacaacaagaacggcgtggaccaggaaatcatcttcccacccatcaagaccgatgtgattacaatggaccccaaggacaactgctccaaggacgccaacgataccctgctgctccagctgaccaacaccagcgcctactacatgtacttgttgctgctgctgaagtccgtggtgtacttcgccatcatcacatgctgcctgctgcggagaaccgccttctgctgcaacggcgagaagtctagggccaagcgatctggatctggagcaacaaacttctcactactcaaacaagcaggtgacgtggaggagaatcccgggcctactagtatggactggatttggcgcatccttttccttgtcggcgctgctaccggcgcgcattccttcgaacaggttcagctggttcagagcggagccgaagtgaagaaacctggggcctctgtgaaggtgtcctgcaaggcttccggctacacctttaccaactacctgatcgagtgggtccgacaggctccaggacaaggactggaatggatgggcctgattaaccctggcagcggcggcaccaactacaacgagaagttcaagggcagagtgaccatgaccaccgacaccagcacaagcaccgcctacatggaactgcggagcctgagaagcgacgacaccgccgtgtattattgcgccagaagaagccctctcggctcttggatctactacgcctatgacggcgtggcctattggggccagggaacactggttacagtgtcctctacgcgtatccagaaccctgatcctgccgtgtaccagctgcgggatagcaagagcagcgacaagagcgtgtgtctgttcaccgacttcgacagccagaccaacgtgtcccagagcaaggactccgacgtgtacatcaccgataagaccgtgctggacatgcggagcatggacttcaagagcaactccgccgtggcctggtccaacaagtccgatttcgcctgcgccaacgccttcaacaacagcattatccccgaggacacattcttcccaagccccgagagcagcgactccaccgaccacgtgaagcccaaagagacagagaacaccaagcagcccagcaagagctgccacaagcccaaggccatcgtgcacaccgagaaagtgaacatgatgagcctgaccgtgctgggcctgcggatgctgttcgccaaaaccgtggccgtgaacttcctgctgaccgccaagctgttcttcctc

SEQ ID NO: 34907 - DNA, 2622 bp, synthetic construct
  source 1..2622: mol_type = other DNA
atggccttaccagtgaccgccttgctcctgccgctggccttgctgctccacgccgccaggccgctcgaggaggacctgaagaacgtgttcccacctgaggtggccgtgttcgagcctagcgaggccgagatcagccacacccagaaagccaccctcgtgtgcctggctaccggcttctaccccgaccatgtggaactgtcttggtgggtcaacggcaaagaggtgcacagcggcgtgtgtaccgacccccagccactgaaagaacagcccgccctgaacgacagccggtactgcctgagcagcagactgagagtgtccgccaccttctggcagaacccccggaaccacttcagatgccaggtgcagttctacggcctgagcgagaacgacgagtggacccaggacagagccaagcccgtgacccagatcgtgtctgccgaagcctggggcagagccgattgcggctttaccagcgagagctaccagcagggcgtgctgagcgccaccaacctgagcgtgatcggcttcagaatcctgctgctgaaagtggccggctttaacctgctgatgaccctgcggctgtggtccagcagggccaagcgatctggatctggagcaacaaacttctcactactcaaacaagcaggtgacgtggaggagaatcccgggcctactagcatggccttaccagtgaccgccttgctcctgccgctggccttgctgctccacgccgccaggccggagatcgtgctgacacagtctcccgccacactgtcactgtctccaggcgaaagagccacactgagctgtagcgtgtccagcagcatcagcagcagcaacctgcactggtatcagcagaagcctggacaggcccctcggctgctgatctacgccacatctaatctggcctctggcatccccgccagattttctggctctggaagcggcaccgacttcaccctgaccataagcagcctggaacctgaggacttcgccgtgtactactgccagcagtggtccagctatccccacacatttggcggaggcaccaaggtggaaatcaagagaggcggaggcggaagtggaggcggaggatctggcggcggaggctctcaggttcagctggttcagagcggagccgaagtgaagaaacctggggcctctgtgaaggtgtcctgcaaggcttccggctacacctttaccaactacctgatcgagtgggtccgacaggctccaggacaaggactggaatggatgggcctgattaaccctggcagcggcggcaccaactacaacgagaagttcaagggcagagtgaccatgaccaccgacaccagcacaagcaccgcctacatggaactgcggagcctgagaagcgacgacaccgccgtgtattattgcgccagaagaagccctctcggctcttggatctactacgcctatgacggcgtggcctattggggccagggaacactggttacagtgtcctctacgcgtatccagaaccctgatcctgccgtgtaccagctgcgggatagcaagagcagcgacaagagcgtgtgtctgttcaccgacttcgacagccagaccaacgtgtcccagagcaaggactccgacgtgtacatcaccgataagtgcgtgctggacatgcggagcatggacttcaagagcaactccgccgtggcctggtccaacaagtccgatttcgcctgcgccaacgccttcaacaacagcattatccccgaggacacattcttcccaagccccgagagcagctgcgacgtgaagctggtggaaaagagcttcgagacagacaccaacctgaacttccagatcctgtacgaggtgatcggcttcagaatcctgctgctgaaagtggccggctttaacctgctgatgaccctgcggctgtggtccagccgcgccaagagaagcggatctggcgtgaagcagaccctgaatttcgacctgctgaagctggctggcgacgtggaatccaacccaggcccttctagaggccatatgaccgagtacaagcccacggtgcgcctcgccacccgcgacgacgtccccagggccgtacgcaccctcgccgccgcgttcgccgactaccccgccacgcgccacaccgtcgatccggaccgccacatcgagcgggtcaccgagctgcaagaactcttcctcacgcgcgtcgggctcgacatcggcaaggtgtgggtcgcggacgacggcgccgcggtggcggtctggaccacgccggagagcgtcgaagcgggggcggtgttcgccgagatcggcccgcgcatggccgagttgagcggttcccggctggccgcgcagcaacagatggaaggcctcctggcgccgcaccggcccaaggagcccgcgtggttcctggccaccgtcggcgtctcgcccgaccaccagggcaagggtctgggcagcgccgtcgtgctccccggagtggaggcggccgagcgcgccggggtgcccgccttcctggagacctccgcgccccgcaacctccccttctacgagcggctcggcttcaccgtcaccgccgacgtcgaggtgcccgaaggaccgcgcacctggtgcatgacccgcaagcccggtgcctga

SEQ ID NO: 34908 - DNA, 2622 bp, synthetic construct
  source 1..2622: mol_type = other DNA
atggccttaccagtgaccgccttgctcctgccgctggccttgctgctccacgccgccaggccgctcgagatccagaaccctgatcctgccgtgtaccagctgcgggatagcaagagcagcgacaagagcgtgtgtctgttcaccgacttcgacagccagaccaacgtgtcccagagcaaggactccgacgtgtacatcaccgataagtgcgtgctggacatgcggagcatggacttcaagagcaactccgccgtggcctggtccaacaagtccgatttcgcctgcgccaacgccttcaacaacagcattatccccgaggacacattcttcccaagccccgagagcagctgcgacgtgaagctggtggaaaagagcttcgagacagacaccaacctgaacttccagatcctgtacgaggtgatcggcttcagaatcctgctgctgaaagtggccggctttaacctgctgatgaccctgcggctgtggtccagcagggccaagcgatctggatctggagcaacaaacttctcactactcaaacaagcaggtgacgtggaggagaatcccgggcctactagcatggccttaccagtgaccgccttgctcctgccgctggccttgctgctccacgccgccaggccggagatcgtgctgacacagtctcccgccacactgtcactgtctccaggcgaaagagccacactgagctgtagcgtgtccagcagcatcagcagcagcaacctgcactggtatcagcagaagcctggacaggcccctcggctgctgatctacgccacatctaatctggcctctggcatccccgccagattttctggctctggaagcggcaccgacttcaccctgaccataagcagcctggaacctgaggacttcgccgtgtactactgccagcagtggtccagctatccccacacatttggcggaggcaccaaggtggaaatcaagagaggcggaggcggaagtggaggcggaggatctggcggcggaggctctcaggttcagctggttcagagcggagccgaagtgaagaaacctggggcctctgtgaaggtgtcctgcaaggcttccggctacacctttaccaactacctgatcgagtgggtccgacaggctccaggacaaggactggaatggatgggcctgattaaccctggcagcggcggcaccaactacaacgagaagttcaagggcagagtgaccatgaccaccgacaccagcacaagcaccgcctacatggaactgcggagcctgagaagcgacgacaccgccgtgtattattgcgccagaagaagccctctcggctcttggatctactacgcctatgacggcgtggcctattggggccagggaacactggttacagtgtcctctacgcgtgaggacctgaagaacgtgttcccacctgaggtggccgtgttcgagcctagcgaggccgagatcagccacacccagaaagccaccctcgtgtgcctggctaccggcttctaccccgaccatgtggaactgtcttggtgggtcaacggcaaagaggtgcacagcggcgtgtgtaccgacccccagccactgaaagaacagcccgccctgaacgacagccggtactgcctgagcagcagactgagagtgtccgccaccttctggcagaacccccggaaccacttcagatgccaggtgcagttctacggcctgagcgagaacgacgagtggacccaggacagagccaagcccgtgacccagatcgtgtctgccgaagcctggggcagagccgattgcggctttaccagcgagagctaccagcagggcgtgctgagcgccaccaacctgagcgtgatcggcttcagaatcctgctgctgaaagtggccggctttaacctgctgatgaccctgcggctgtggtccagccgcgccaagagaagcggatctggcgtgaagcagaccctgaatttcgacctgctgaagctggctggcgacgtggaatccaacccaggcccttctagaggccatatgaccgagtacaagcccacggtgcgcctcgccacccgcgacgacgtccccagggccgtacgcaccctcgccgccgcgttcgccgactaccccgccacgcgccacaccgtcgatccggaccgccacatcgagcgggtcaccgagctgcaagaactcttcctcacgcgcgtcgggctcgacatcggcaaggtgtgggtcgcggacgacggcgccgcggtggcggtctggaccacgccggagagcgtcgaagcgggggcggtgttcgccgagatcggcccgcgcatggccgagttgagcggttcccggctggccgcgcagcaacagatggaaggcctcctggcgccgcaccggcccaaggagcccgcgtggttcctggccaccgtcggcgtctcgcccgaccaccagggcaagggtctgggcagcgccgtcgtgctccccggagtggaggcggccgagcgcgccggggtgcccgccttcctggagacctccgcgccccgcaacctccccttctacgagcggctcggcttcaccgtcaccgccgacgtcgaggtgcccgaaggaccgcgcacctggtgcatgacccgcaagcccggtgcctga

SEQ ID NO: 34909 - DNA, 2622 bp, synthetic construct; identical to SEQ ID NO: 34907
  source 1..2622: mol_type = other DNA

SEQ ID NO: 34910 - DNA, 2946 bp, synthetic construct
  source 1..2946: mol_type = other DNA
atggccttaccagtgaccgccttgctcctgccgctggccttgctgctccacgccgccaggccgctcgaggaggacctgaagaacgtgttcccacctgaggtggccgtgttcgagcctagcgaggccgagatcagccacacccagaaagccaccctcgtgtgcctggctaccggcttctaccccgaccatgtggaactgtcttggtgggtcaacggcaaagaggtgcacagcggcgtgtctaccgacccccagccactgaaagaacagcccgccctgaacgacagccggtactgcctgagcagcagactgagagtgtccgccaccttctggcagaacccccggaaccacttcagatgccaggtgcagttctacggcctgagcgagaacgacgagtggacccaggacagagccaagcccgtgacccagatcgtgtctgccgaagcctggggcagagccgatgatgtgattaagatccactggcaggaaaagaagtccaacaccatcctgggcagccaggaaggcaacaccatgaagaccaacgacacctacatgaagttcagctggctgaccgtgcccgagaagtccctggacaaagaacacagatgcatcgtgcggcacgaaaacaacaagaacggcgtggaccaggaaatcatcttcccacccatcaagaccgatgtgattacaatggaccccaaggacaactgctccaaggacgccaacgataccctgctgctccagctgaccaacaccagcgcctactacatgtacttgttgctgctgctgaagtccgtggtgtacttcgccatcatcacatgctgcctgctgatggctatggtcaagcggaaggacagccggggaagggccaagcgatctggatctggagcaacaaacttctcactactcaaacaagcaggtgacgtggaggagaatcccgggcctactagcatggccttaccagtgaccgccttgctcctgccgctggccttgctgctccacgccgccaggccggagatcgtgctgacacagtctcccgccacactgtcactgtctccaggcgaaagagccacactgagctgtagcgtgtccagcagcatcagcagcagcaacctgcactggtatcagcagaagcctggacaggcccctcggctgctgatctacgccacatctaatctggcctctggcatccccgccagattttctggctctggaagcggcaccgacttcaccctgaccataagcagcctggaacctgaggacttcgccgtgtactactgccagcagtggtccagctatccccacacatttggcggaggcaccaaggtggaaatcaagagaggcggaggcggaagtggaggcggaggatctggcggcggaggctctcaggttcagctggttcagagcggagccgaagtgaagaaacctggggcctctgtgaaggtgtcctgcaaggcttccggctacacctttaccaactacctgatcgagtgggtccgacaggctccaggacaaggactggaatggatgggcctgattaaccctggcagcggcggcaccaactacaacgagaagttcaagggcagagtgaccatgaccaccgacaccagcacaagcaccgcctacatggaactgcggagcctgagaagcgacgacaccgccgtgtattattgcgccagaagaagccctctcggctcttggatctactacgcctatgacggcgtggcctattggggccagggaacactggttacagtgtcctctacgcgtatccagaaccctgatcctgccgtgtaccagctgcgggatagcaagagcagcgacaagagcgtgtgtctgttcaccgacttcgacagccagaccaacgtgtcccagagcaaggactccgacgtgtacatcaccgataagaccgtgctggacatgcggagcatggacttcaagagcaactccgccgtggcctggtccaacaagtccgatttcgcctgcgccaacgccttcaacaacagcattatccccgaggacacattcttcccaagccccgagagcagcgactccaccgaccacgtgaagcccaaagagacagagaacaccaagcagcccagcaagagctgccacaagcccaaggccatcgtgcacaccgagaaagtgaacatgatgagcctgaccgtgctgggcctgcggatgctgttcgccaaaaccgtggccgtgaacttcctgctgaccgccaagctgttcttcctcctcaccgcccgcgccaagagaagcggatctggcgtgaagcagaccctgaatttcgacctgctgaagctggctggcgacgtggaatccaacccaggcccttctagaggccatatgaccgagtacaagcccacggtgcgcctcgccacccgcgacgacgtccccagggccgtacgcaccctcgccgccgcgttcgccgactaccccgccacgcgccacaccgtcgatccggaccgccacatcgagcgggtcaccgagctgcaagaactcttcctcacgcgcgtcgggctcgacatcggcaaggtgtgggtcgcggacgacggcgccgcggtggcggtctggaccacgccggagagcgtcgaagcgggggcggtgttcgccgagatcggcccgcgcatggccgagttgagcggttcccggctggccgcgcagcaacagatggaaggcctcctggcgccgcaccggcccaaggagcccgcgtggttcctggccaccgtcggcgtctcgcccgaccaccagggcaagggtctgggcagcgccgtcgtgctccccggagtggaggcggccgagcgcgccggggtgcccgccttcctggagacctccgcgccccgcaacctccccttctacgagcggctcggcttcaccgtcaccgccgacgtcgaggtgcccgaaggaccgcgcacctggtgcatgacccgcaagcccggtgcctga

SEQ ID NO: 34911 - DNA, 2946 bp, synthetic construct
  source 1..2946: mol_type = other DNA
atggccttaccagtgaccgccttgctcctgccgctggccttgctgctccacgccgccaggccgctcgagatccagaaccctgatcctgccgtgtaccagctgcgggatagcaagagcagcgacaagagcgtgtgtctgttcaccgacttcgacagccagaccaacgtgtcccagagcaaggactccgacgtgtacatcaccgataagaccgtgctggacatgcggagcatggacttcaagagcaactccgccgtggcctggtccaacaagtccgatttcgcctgcgccaacgccttcaacaacagcattatccccgaggacacattcttcccaagccccgagagcagcgactccaccgaccacgtgaagcccaaagagacagagaacaccaagcagcccagcaagagctgccacaagcccaaggccatcgtgcacaccgagaaagtgaacatgatgagcctgaccgtgctgggcctgcggatgctgttcgccaaaaccgtggccgtgaacttcctgctgaccgccaagctgttcttcctcctcaccgccagggccaagcgatctggatctggagcaacaaacttctcactactcaaacaagcaggtgacgtggaggagaatcccgggcctactagcatggccttaccagtgaccgccttgctcctgccgctggccttgctgctccacgccgccaggccggagatcgtgctgacacagtctcccgccacactgtcactgtctccaggcgaaagagccacactgagctgtagcgtgtccagcagcatcagcagcagcaacctgcactggtatcagcagaagcctggacaggcccctcggctgctgatctacgccacatctaatctggcctctggcatccccgccagattttctggctctggaagcggcaccgacttcaccctgaccataagcagcctggaacctgaggacttcgccgtgtactactgccagcagtggtccagctatccccacacatttggcggaggcaccaaggtggaaatcaagagaggcggaggcggaagtggaggcggaggatctggcggcggaggctctcaggttcagctggttcagagcggagccgaagtgaagaaacctggggcctctgtgaaggtgtcctgcaaggcttccggctacacctttaccaactacctgatcgagtgggtccgacaggctccaggacaaggactggaatggatgggcctgattaaccctggcagcggcggcaccaactacaacgagaagttcaagggcagagtgaccatgaccaccgacaccagcacaagcaccgcctacatggaactgcggagcctgagaagcgacgacaccgccgtgtattattgcgccagaagaagccctctcggctcttggatctactacgcctatgacggcgtggcctattggggccagggaacactggttacagtgtcctctacgcgtgaggacctgaagaacgtgttcccacctgaggtggccgtgttcgagcctagcgaggccgagatcagccacacccagaaagccaccctcgtgtgcctggctaccggcttctaccccgaccatgtggaactgtcttggtgggtcaacggcaaagaggtgcacagcggcgtgtctaccgacccccagccactgaaagaacagcccgccctgaacgacagccggtactgcctgagcagcagactgagagtgtccgccaccttctggcagaacccccggaaccacttcagatgccaggtgcagttctacggcctgagcgagaacgacgagtggacccaggacagagccaagcccgtgacccagatcgtgtctgccgaagcctggggcagagccgatgatgtgattaagatccactggcaggaaaagaagtccaacaccatcctgggcagccaggaaggcaacaccatgaagaccaacgacacctacatgaagttcagctggctgaccgtgcccgagaagtccctggacaaagaacacagatgcatcgtgcggcacgaaaacaacaagaacggcgtggaccaggaaatcatcttcccacccatcaagaccgatgtgattacaatggaccccaaggacaactgctccaaggacgccaacgataccctgctgctccagctgaccaacaccagcgcctactacatgtacttgttgctgctgctgaagtccgtggtgtacttcgccatcatcacatgctgcctgctgatggctatggtcaagcggaaggacagccggggacgcgccaagagaagcggatctggcgtgaagcagaccctgaatttcgacctgctgaagctggctggcgacgtggaatccaacccaggcccttctagaggccatatgaccgagtacaagcccacggtgcgcctcgccacccgcgacgacgtccccagggccgtacgcaccctcgccgccgcgttcgccgactaccccgccacgcgccacaccgtcgatccggaccgccacatcgagcgggtcaccgagctgcaagaactcttcctcacgcgcgtcgggctcgacatcggcaaggtgtgggtcgcggacgacggcgccgcggtggcggtctggaccacgccggagagcgtcgaagcgggggcggtgttcgccgagatcggcccgcgcatggccgagttgagcggttcccggctggccgcgcagcaacagatggaaggcctcctggcgccgcaccggcccaaggagcccgcgtggttcctggccaccgtcggcgtctcgcccgaccaccagggcaagggtctgggcagcgccgtcgtgctccccggagtggaggcggccgagcgcgccggggtgcccgccttcctggagacctccgcgccccgcaacctccccttctacgagcggctcggcttcaccgtcaccgccgacgtcgaggtgcccgaaggaccgcgcacctggtgcatgacccgcaagcccggtgcctga

SEQ ID NO: 34912 - DNA, 2940 bp, synthetic construct
  source 1..2940: mol_type = other DNA
atggccttaccagtgaccgccttgctcctgccgctggccttgctgctccacgccgccaggccgctcgaggaggacctgaagaacgtgttcccacctgaggtggccgtgttcgagcctagcgaggccgagatcagccacacccagaaagccaccctcgtgtgcctggctaccggcttctaccccgaccatgtggaactgtcttggtgggtcaacggcaaagaggtgcacagcggcgtgtgtaccgacccccagccactgaaagaacagcccgccctgaacgacagccggtactgcctgagcagcagactgagagtgtccgccaccttctggcagaacccccggaaccacttcagatgccaggtgcagttctacggcctgagcgagaacgacgagtggacccaggacagagccaagcccgtgacccagatcgtgtctgccgaagcctggggcagagccgatgatgtgattaagatccactggcaggaaaagaagtccaacaccatcctgggcagccaggaaggcaacaccatgaagaccaacgacacctacatgaagttcagctggctgaccgtgcccgagaagtccctggacaaagaacacagatgcatcgtgcggcacgaaaacaacaagaacggcgtggaccaggaaatcatcttcccacccatcaagaccgatgtgattacaatggaccccaaggacaactgctccaaggacgccaacgataccctgctgctccagctgaccaacaccagcgcctactacatgtacttgttgctgctgctgaagtccgtggtgtacttcgccatcatcacatgctgcctgctgcggagaaccgccttctgctgcaacggcgagaagtctagggccaagcgatctggatctggagcaacaaacttctcactactcaaacaagcaggtgacgtggaggagaatcccgggcctactagcatggccttaccagtgaccgccttgctcctgccgctggccttgctgctccacgccgccaggccggagatcgtgctgacacagtctcccgccacactgtcactgtctccaggcgaaagagccacactgagctgtagcgtgtccagcagcatcagcagcagcaacctgcactggtatcagcagaagcctggacaggcccctcggctgctgatctacgccacatctaatctggcctctggcatccccgccagattttctggctctggaagcggcaccgacttcaccctgaccataagcagcctggaacctgaggacttcgccgtgtactactgccagcagtggtccagctatccccacacatttggcggaggcaccaaggtggaaatcaagagaggcggaggcggaagtggaggcggaggatctggcggcggaggctctcaggttcagctggttcagagcggagccgaagtgaagaaacctggggcctctgtgaaggtgtcctgcaaggcttccggctacacctttaccaactacctgatcgagtgggtccgacaggctccaggacaaggactggaatggatgggcctgattaaccctggcagcggcggcaccaactacaacgagaagttcaagggcagagtgaccatgaccaccgacaccagcacaagcaccgcctacatggaactgcggagcctgagaagcgacgacaccgccgtgtattattgcgccagaagaagccctctcggctcttggatctactacgcctatgacggcgtggcctattggggccagggaacactggttacagtgtcctctacgcgtatccagaaccctgatcctgccgtgtaccagctgcgggatagcaagagcagcgacaagagcgtgtgtctgttcaccgacttcgacagccagaccaacgtgtcccagagcaaggactccgacgtgtacatcaccgataagtgcgtgctggacatgcggagcatggacttcaagagcaactccgccgtggcctggtccaacaagtccgatttcgcctgcgccaacgccttcaacaacagcattatccccgaggacacattcttcccaagccccgagagcagcgactccaccgaccacgtgaagcccaaagagacagagaacaccaagcagcccagcaagagctgccacaagcccaaggccatcgtgcacaccgagaaagtgaacatgatgagcctgaccgtgctgggcctgcggatgctgttcgccaaaaccgtggccgtgaacttcctgctgaccgccaagctgttcttcctccgcgccaagagaagcggatctggcgtgaagcagaccctgaatttcgacctgctgaagctggctggcgacgtggaatccaacccaggcccttctagaggccatatgaccgagtacaagcccacggtgcgcctcgccacccgcgacgacgtccccagggccgtacgcaccctcgccgccgcgttcgccgactaccccgccacgcgccacaccgtcgatccggaccgccacatcgagcgggtcaccgagctgcaagaactcttcctcacgcgcgtcgggctcgacatcggcaaggtgtgggtcgcggacgacggcgccgcggtggcggtctggaccacgccggagagcgtcgaagcgggggcggtgttcgccgagatcggcccgcgcatggccgagttgagcggttcccggctggccgcgcagcaacagatggaaggcctcctggcgccgcaccggcccaaggagcccgcgtggttcctggccaccgtcggcgtctcgcccgaccaccagggcaagggtctgggcagcgccgtcgtgctccccggagtggaggcggccgagcgcgccggggtgcccgccttcctggagacctccgcgccccgcaacctccccttctacgagcggctcggcttcaccgtcaccgccgacgtcgaggtgcccgaaggaccgcgcacctggtgcatgacccgcaagcccggtgcctga

SEQ ID NO: 34913 - DNA, 2940 bp, synthetic construct
  source 1..2940: mol_type = other DNA
atggccttaccagtgaccgccttgctcctgccgctggccttgctgctccacgccgccaggccgctcgagatccagaaccctgatcctgccgtgtaccagctgcgggatagcaagagcagcgacaagagcgtgtgtctgttcaccgacttcgacagccagaccaacgtgtcccagagcaaggactccgacgtgtacatcaccgataagtgcgtgctggacatgcggagcatggacttcaagagcaactccgccgtggcctggtccaacaagtccgatttcgcctgcgccaacgccttcaacaacagcattatccccgaggacacattcttcccaagccccgagagcagcgactccaccgaccacgtgaagcccaaagagacagagaacaccaagcagcccagcaagagctgccacaagcccaaggccatcgtgcacaccgagaaagtgaacatgatgagcctgaccgtgctgggcctgcggatgctgttcgccaaaaccgtggccgtgaacttcctgctgaccgccaagctgttcttcctcagggccaagcgatctggatctggagcaacaaacttctcactactcaaacaagcaggtgacgtggaggagaatcccgggcctactagcatggccttaccagtgaccgccttgctcctgccgctggccttgctgctccacgccgccaggccggagatcgtgctgacacagtctcccgccacactgtcactgtctccaggcgaaagagccacactgagctgtagcgtgtccagcagcatcagcagcagcaacctgcactggtatcagcagaagcctggacaggcccctcggctgctgatctacgccacatctaatctggcctctggcatccccgccagattttctggctctggaagcggcaccgacttcaccctgaccataagcagcctggaacctgaggacttcgccgtgtactactgccagcagtggtccagctatccccacacatttggcggaggcaccaaggtggaaatcaagagaggcggaggcggaagtggaggcggaggatctggcggcggaggctctcaggttcagctggttcagagcggagccgaagtgaagaaacctggggcctctgtgaaggtgtcctgcaaggcttccggctacacctttaccaactacctgatcgagtgggtccgacaggctccaggacaaggactggaatggatgggcctgattaaccctggcagcggcggcaccaactacaacgagaagttcaagggcagagtgaccatgaccaccgacaccagcacaagcaccgcctacatggaactgcggagcctgagaagcgacgacaccgccgtgtattattgcgccagaagaagccctctcggctcttggatctactacgcctatgacggcgtggcctattggggccagggaacactggttacagtgtcctctacgcgtgaggacctgaagaacgtgttcccacctgaggtggccgtgttcgagcctagcgaggccgagatcagccacacccagaaagccaccctcgtgtgcctggctaccggcttctaccccgaccatgtggaactgtcttggtgggtcaacggcaaagaggtgcacagcggcgtgtgtaccgacccccagccactgaaagaacagcccgccctgaacgacagccggtactgcctgagcagcagactgagagtgtccgccaccttctggcagaacccccggaaccacttcagatgccaggtgcagttctacggcctgagcgagaacgacgagtggacccaggacagagccaagcccgtgacccagatcgtgtctgccgaagcctggggcagagccgatgatgtgattaagatccactggcaggaaaagaagtccaacaccatcctgggcagccaggaaggcaacaccatgaagaccaacgacacctacatgaagttcagctggctgaccgtgcccgagaagtccctggacaaagaacacagatgcatcgtgcggcacgaaaacaacaagaacggcgtggaccaggaaatcatcttcccacccatcaagaccgatgtgattacaatggaccccaaggacaactgctccaaggacgccaacgataccctgctgctccagctgaccaacaccagcgcctactacatgtacttgttgctgctgctgaagtccgtggtgtacttcgccatcatcacatgctgcctgctgcggagaaccgccttctgctgcaacggcgagaagtctcgcgccaagagaagcggatctggcgtgaagcagaccctgaatttcgacctgctgaagctggctggcgacgtggaatccaacccaggcccttctagaggccatatgaccgagtacaagcccacggtgcgcctcgccacccgcgacgacgtccccagggccgtacgcaccctcgccgccgcgttcgccgactaccccgccacgcgccacaccgtcgatccggaccgccacatcgagcgggtcaccgagctgcaagaactcttcctcacgcgcgtcgggctcgacatcggcaaggtgtgggtcgcggacgacggcgccgcggtggcggtctggaccacgccggagagcgtcgaagcgggggcggtgttcgccgagatcggcccgcgcatggccgagttgagcggttcccggctggccgcgcagcaacagatggaaggcctcctggcgccgcaccggcccaaggagcccgcgtggttcctggccaccgtcggcgtctcgcccgaccaccagggcaagggtctgggcagcgccgtcgtgctccccggagtggaggcggccgagcgcgccggggtgcccgccttcctggagacctccgcgccccgcaacctccccttctacgagcggctcggcttcaccgtcaccgccgacgtcgaggtgcccgaaggaccgcgcacctggtgcatgacccgcaagcccggtgcctga

SEQ ID NO: 34914 - DNA, 2940 bp, synthetic construct
  source 1..2940: mol_type = other DNA
atggccttaccagtgaccgccttgctcctgccgctggccttgctgctccacgccgccaggccgctcgaggaggacctgaagaacgtgttcccacctgaggtggccgtgttcgagcctagcgaggccgagatcagccacacccagaaagccaccctcgtgtgcctggctaccggcttctaccccgaccatgtggaactgtcttggtgggtcaacggcaaagaggtgcacagcggcgtgtctaccgacccccagccactgaaagaacagcccgccctgaacgacagccggtactgcctgagcagcagactgagagtgtccgccaccttctggcagaacccccggaaccacttcagatgccaggtgcagttctacggcctgagcgagaacgacgagtggacccaggacagagccaagcccgtgacccagatcgtgtctgccgaagcctggggcagagccgatgatgtgattaagatccactggcaggaaaagaagtccaacaccatcctgggcagccaggaaggcaacaccatgaagaccaacgacacctacatgaagttcagctggctgaccgtgcccgagaagtccctggacaaagaacacagatgcatcgtgcggcacgaaaacaacaagaacggcgtggaccaggaaatcatcttcccacccatcaagaccgatgtgattacaatggaccccaaggacaactgctccaaggacgccaacgataccctgctgctccagctgaccaacaccagcgcctactacatgtacttgttgctgctgctgaagtccgtggtgtacttcgccatcatcacatgctgcctgctgcggagaaccgccttctgctgcaacggcgagaagtctagggccaagcgatctggatctggagcaacaaacttctcactactcaaacaagcaggtgacgtggaggagaatcccgggcctactagcatggccttaccagtgaccgccttgctcctgccgctggccttgctgctccacgccgccaggccggagatcgtgctgacacagtctcccgccacactgtcactgtctccaggcgaaagagccacactgagctgtagcgtgtccagcagcatcagcagcagcaacctgcactggtatcagcagaagcctggacaggcccctcggctgctgatctacgccacatctaatctggcctctggcatccccgccagattttctggctctggaagcggcaccgacttcaccctgaccataagcagcctggaacctgaggacttcgccgtgtactactgccagcagtggtccagctatccccacacatttggcggaggcaccaaggtggaaatcaagagaggcggaggcggaagtggaggcggaggatctggcggcggaggctctcaggttcagctggttcagagcggagccgaagtgaagaaacctggggcctctgtgaaggtgtcctgcaaggcttccggctacacctttaccaactacctgatcgagtgggtccgacaggctccaggacaaggactggaatggatgggcctgattaaccctggcagcggcggcaccaactacaacgagaagttcaagggcagagtgaccatgaccaccgacaccagcacaagcaccgcctacatggaactgcggagcctgagaagcgacgacaccgccgtgtattattgcgccagaagaagccctctcggctcttggatctactacgcctatgacggcgtggcctattggggccagggaacactggttacagtgtcctctacgcgtatccagaaccctgatcctgccgtgtaccagctgcgggatagcaagagcagcgacaagagcgtgtgtctgttcaccgacttcgacagccagaccaacgtgtcccagagcaaggactccgacgtgtacatcaccgataagaccgtgctggacatgcggagcatggacttcaagagcaactccgccgtggcctggtccaacaagtccgatttcgcctgcgccaacgccttcaacaacagcattatccccgaggacacattcttcccaagccccgagagcagcgactccaccgaccacgtgaagcccaaagagacagagaacaccaagcagcccagcaagagctgccacaagcccaaggccatcgtgcacaccgagaaagtgaacatgatgagcctgaccgtgctgggcctgcggatgctgttcgccaaaaccgtggccgtgaacttcctgctgaccgccaagctgttcttcctccgcgccaagagaagcggatctggcgtgaagcagaccctgaatttcgacctgctgaagctggctggcgacgtggaatccaacccaggcccttctagaggccatatgaccgagtacaagcccacggtgcgcctcgccacccgcgacgacgtccccagggccgtacgcaccctcgccgccgcgttcgccgactaccccgccacgcgccacaccgtcgatccggaccgccacatcgagcgggtcaccgagctgcaagaactcttcctcacgcgcgtcgggctcgacatcggcaaggtgtgggtcgcggacgacggcgccgcggtggcggtctggaccacgccggagagcgtcgaagcgggggcggtgttcgccgagatcggcccgcgcatggccgagttgagcggttcccggctggccgcgcagcaacagatggaaggcctcctggcgccgcaccggcccaaggagcccgcgtggttcctggccaccgtcggcgtctcgcccgaccaccagggcaagggtctgggcagcgccgtcgtgctccccggagtggaggcggccgagcgcgccggggtgcccgccttcctggagacctccgcgccccgcaacctccccttctacgagcggctcggcttcaccgtcaccgccgacgtcgaggtgcccgaaggaccgcgcacctggtgcatgacccgcaagcccggtgcctga

SEQ ID NO: 34915 - DNA, 2940 bp, synthetic construct
  source 1..2940: mol_type = other DNA
atggccttaccagtgaccgccttgctcctgccgctggccttgctgctccacgccgccaggccgctcgagatccagaaccctgatcctgccgtgtaccagctgcgggatagcaagagcagcgacaagagcgtgtgtctgttcaccgacttcgacagccagaccaacgtgtcccagagcaaggactccgacgtgtacatcaccgataagaccgtgctggacatgcggagcatggacttcaagagcaactccgccgtggcctggtccaacaagtccgatttcgcctgcgccaacgccttcaacaacagcattatccccgaggacacattcttcccaagccccgagagcagcgactccaccgaccacgtgaagcccaaagagacagagaacaccaagcagcccagcaagagctgccacaagcccaaggccatcgtgcacaccgagaaagtgaacatgatgagcctgaccgtgctgggcctgcggatgctgttcgccaaaaccgtggccgtgaacttcctgctgaccgccaagctgttcttcctcagggccaagcgatctggatctggagcaacaaacttctcactactcaaacaagcaggtgacgtggaggagaatcccgggcctactagcatggccttaccagtgaccgccttgctcctgccgctggccttgctgctccacgccgccaggccggagatcgtgctgacacagtctcccgccacactgtcactgtctccaggcgaaagagccacactgagctgtagcgtgtccagcagcatcagcagcagcaacctgcactggtatcagcagaagcctggacaggcccctcggctgctgatctacgccacatctaatctggcctctggcatccccgccagattttctggctctggaagcggcaccgacttcaccctgaccataagcagcctggaacctgaggacttcgccgtgtactactgccagcagtggtccagctatccccacacatttggcggaggcaccaaggtggaaatcaagagaggcggaggcggaagtggaggcggaggatctggcggcggaggctctcaggttcagctggttcagagcggagccgaagtgaagaaacctggggcctctgtgaaggtgtcctgcaaggcttccggctacacctttaccaactacctgatcgagtgggtccgacaggctccaggacaaggactggaatggatgggcctgattaaccctggcagcggcggcaccaactacaacgagaagttcaagggcagagtgaccatgaccaccgacaccagcacaagcaccgcctacatggaactgcggagcctgagaagcgacgacaccgccgtgtattattgcgccagaagaagccctctcggctcttggatctactacgcctatgacggcgtggcctattggggccagggaacactggttacagtgtcctctacgcgtgaggacctgaagaacgtgttcccacctgaggtggccgtgttcgagcctagcgaggccgagatcagccacacccagaaagccaccctcgtgtgcctggctaccggcttctaccccgaccatgtggaactgtcttggtgggtcaacggcaaagaggtgcacagcggcgtgtctaccgacccccagccactgaaagaacagcccgccctgaacgacagccggtactgcctgagcagcagactgagagtgtccgccaccttctggcagaacccccggaaccacttcagatgccaggtgcagttctacggcctgagcgagaacgacgagtggacccaggacagagccaagcccgtgacccagatcgtgtctgccgaagcctggggcagagccgatgatgtgattaagatccactggcaggaaaagaagtccaacaccatcctgggcagccaggaaggcaacaccatgaagaccaacgacacctacatgaagttcagctggctgaccgtgcccgagaagtccctggacaaagaacacagatgcatcgtgcggcacgaaaacaacaagaacggcgtggaccaggaaatcatcttcccacccatcaagaccgatgtgattacaatggaccccaaggacaactgctccaaggacgccaacgataccctgctgctccagctgaccaacaccagcgcctactacatgtacttgttgctgctgctgaagtccgtggtgtacttcgccatcatcacatgctgcctgctgcggagaaccgccttctgctgcaacggcgagaagtctcgcgccaagagaagcggatctggcgtgaagcagaccctgaatttcgacctgctgaagctggctggcgacgtggaatccaacccaggcccttctagaggccatatgaccgagtacaagcccacggtgcgcctcgccacccgcgacgacgtccccagggccgtacgcaccctcgccgccgcgttcgccgactaccccgccacgcgccacaccgtcgatccggaccgccacatcgagcgggtcaccgagctgcaagaactcttcctcacgcgcgtcgggctcgacatcggcaaggtgtgggtcgcggacgacggcgccgcggtggcggtctggaccacgccggagagcgtcgaagcgggggcggtgttcgccgagatcggcccgcgcatggccgagttgagcggttcccggctggccgcgcagcaacagatggaaggcctcctggcgccgcaccggcccaaggagcccgcgtggttcctggccaccgtcggcgtctcgcccgaccaccagggcaagggtctgggcagcgccgtcgtgctccccggagtggaggcggccgagcgcgccggggtgcccgccttcctggagacctccgcgccccgcaacctccccttctacgagcggctcggcttcaccgtcaccgccgacgtcgaggtgcccgaaggaccgcgcacctggtgcatgacccgcaagcccggtgcctga

SEQ ID NO: 34916 - DNA, 2634 bp, synthetic construct
  source 1..2634: mol_type = other DNA
atggccttaccagtgaccgccttgctcctgccgctggccttgctgctccacgccgccaggccgctcgaggaggacctgaagaacgtgttcccacctgaggtggccgtgttcgagcctagcaaggccgagatcgcccacacccagaaagccaccctcgtgtgcctggctaccggcttctaccccgaccatgtggaactgtcttggtgggtcaacggcaaagaggtgcacagcggcgtgtgtaccgacccccagccactgaaagaacagcccgccctgaacgacagccggtactgcctgagcagcagactgagagtgtccgccaccttctggcagaacccccggaaccacttcagatgccaggtgcagttctacggcctgagcgagaacgacgagtggacccaggacagagccaagcccgtgacccagatcgtgtctgccgaagcctggggcagagccgattgcggcatcaccagcgccagctaccaccagggcgtgctgagcgccaccatcctgtacgagatcctgctgggcaaggccaccctgtacgccgtgctggtgtctgccctggtgctgatggctatggtcaagcggaaggacagccggggaagggccaagcgatctggatctggagcaacaaacttctcactactcaaacaagcaggtgacgtggaggagaatcccgggcctactagcatggccttaccagtgaccgccttgctcctgccgctggccttgctgctccacgccgccaggccggagatcgtgctgacacagtctcccgccacactgtcactgtctccaggcgaaagagccacactgagctgtagcgtgtccagcagcatcagcagcagcaacctgcactggtatcagcagaagcctggacaggcccctcggctgctgatctacgccacatctaatctggcctctggcatccccgccagattttctggctctggaagcggcaccgacttcaccctgaccataagcagcctggaacctgaggacttcgccgtgtactactgccagcagtggtccagctatccccacacatttggcggaggcaccaaggtggaaatcaagagaggcggaggcggaagtggaggcggaggatctggcggcggaggctctcaggttcagctggttcagagcggagccgaagtgaagaaacctggggcctctgtgaaggtgtcctgcaaggcttccggctacacctttaccaactacctgatcgagtgggtccgacaggctccaggacaaggactggaatggatgggcctgattaaccctggcagcggcggcaccaactacaacgagaagttcaagggcagagtgaccatgaccaccgacaccagcacaagcaccgcctacatggaactgcggagcctgagaagcgacgacaccgccgtgtattattgcgccagaagaagccctctcggctcttggatctactacgcctatgacggcgtggcctattggggccagggaacactggttacagtgtcctctacgcgtatccagaaccctgatcctgccgtgtaccagctgcgggatagcaagagcagcgacaagagcgtgtgtctgttcaccgacttcgacagccagaccaacgtgtcccagagcaaggactccgacgtgtacatcaccgataagtgcgtgctggacatgcggagcatggacttcaagagcaactccgccgtggcctggtccaacaagtccgatttcgcctgcgccaacgccttcaacaacagcattatccccgaggacacattcttcccaagcagcgacgtgccctgcgacgtgaagctggtggaaaagagcttcgagacagacaccaacctgaacttccagaacctgagcgtgatcggcttcagaatcctgctgctgaaagtggccggctttaacctgctgatgaccctgcggctgtggtccagccgcgccaagagaagcggatctggcgtgaagcagaccctgaatttcgacctgctgaagctggctggcgacgtggaatccaacccaggcccttctagaggccatatgaccgagtacaagcccacggtgcgcctcgccacccgcgacgacgtccccagggccgtacgcaccctcgccgccgcgttcgccgactaccccgccacgcgccacaccgtcgatccggaccgccacatcgagcgggtcaccgagctgcaagaactcttcctcacgcgcgtcgggctcgacatcggcaaggtgtgggtcgcggacgacggcgccgcggtggcggtctggaccacgccggagagcgtcgaagcgggggcggtgttcgccgagatcggcccgcgcatggccgagttgagcggttcccggctggccgcgcagcaacagatggaaggcctcctggcgccgcaccggcccaaggagcccgcgtggttcctggccaccgtcggcgtctcgcccgaccaccagggcaagggtctgggcagcgccgtcgtgctccccggagtggaggcggccgagcgcgccggggtgcccgccttcctggagacctccgcgccccgcaacctccccttctacgagcggctcggcttcaccgtcaccgccgacgtcgaggtgcccgaaggaccgcgcacctggtgcatgacccgcaagcccggtgcctga

SEQ ID NO: 34917 - DNA, 2634 bp, synthetic construct
  source 1..2634: mol_type = other DNA
atggccttaccagtgaccgccttgctcctgccgctggccttgctgctccacgccgccaggccgctcgagatccagaaccctgatcctgccgtgtaccagctgcgggatagcaagagcagcgacaagagcgtgtgtctgttcaccgacttcgacagccagaccaacgtgtcccagagcaaggactccgacgtgtacatcaccgataagtgcgtgctggacatgcggagcatggacttcaagagcaactccgccgtggcctggtccaacaagtccgatttcgcctgcgccaacgccttcaacaacagcattatccccgaggacacattcttcccaagcagcgacgtgccctgcgacgtgaagctggtggaaaagagcttcgagacagacaccaacctgaacttccagaacctgagcgtgatcggcttcagaatcctgctgctgaaagtggccggctttaacctgctgatgaccctgcggctgtggtccagcagggccaagcgatctggatctggagcaacaaacttctcactactcaaacaagcaggtgacgtggaggagaatcccgggcctactagcatggccttaccagtgaccgccttgctcctgccgctggccttgctgctccacgccgccaggccggagatcgtgctgacacagtctcccgccacactgtcactgtctccaggcgaaagagccacactgagctgtagcgtgtccagcagcatcagcagcagcaacctgcactggtatcagcagaagcctggacaggcccctcggctgctgatctacgccacatctaatctggcctctggcatccccgccagattttctggctctggaagcggcaccgacttcaccctgaccataagcagcctggaacctgaggacttcgccgtgtactactgccagcagtggtccagctatccccacacatttggcggaggcaccaaggtggaaatcaagagaggcggaggcggaagtggaggcggaggatctggcggcggaggctctcaggttcagctggttcagagcggagccgaagtgaagaaacctggggcctctgtgaaggtgtcctgcaaggcttccggctacacctttaccaactacctgatcgagtgggtccgacaggctccaggacaaggactggaatggatgggcctgattaaccctggcagcggcggcaccaactacaacgagaagttcaagggcagagtgaccatgaccaccgacaccagcacaagcaccgcctacatggaactgcggagcctgagaagcgacgacaccgccgtgtattattgcgccagaagaagccctctcggctcttggatctactacgcctatgacggcgtggcctattggggccagggaacactggttacagtgtcctctacgcgtgaggacctgaagaacgtgttcccacctgaggtggccgtgttcgagcctagcaaggccgagatcgcccacacccagaaagccaccctcgtgtgcctggctaccggcttctaccccgaccatgtggaactgtcttggtgggtcaacggcaaagaggtgcacagcggcgtgtgtaccgacccccagccactgaaagaacagcccgccctgaacgacagccggtactgcctgagcagcagactgagagtgtccgccaccttctggcagaacccccggaaccacttcagatgccaggtgcagttctacggcctgagcgagaacgacgagtggacccaggacagagccaagcccgtgacccagatcgtgtctgccgaagcctggggcagagccgattgcggcatcaccagcgccagctaccaccagggcgtgctgagcgccaccatcctgtacgagatcctgctgggcaaggccaccctgtacgccgtgctggtgtctgccctggtgctgatggctatggtcaagcggaaggacagccggggacgcgccaagagaagcggatctggcgtgaagcagaccctgaatttcgacctgctgaagctggctggcgacgtggaatccaacccaggcccttctagaggccatatgaccgagtacaagcccacggtgcgcctcgccacccgcgacgacgtccccagggccgtacgcaccctcgccgccgcgttcgccgactaccccgccacgcgccacaccgtcgatccggaccgccacatcgagcgggtcaccgagctgcaagaactcttcctcacgcgcgtcgggctcgacatcggcaaggtgtgggtcgcggacgacggcgccgcggtggcggtctggaccacgccggagagcgtcgaagcgggggcggtgttcgccgagatcggcccgcgcatggccgagttgagcggttcccggctggccgcgcagcaacagatggaaggcctcctggcgccgcaccggcccaaggagcccgcgtggttcctggccaccgtcggcgtctcgcccgaccaccagggcaagggtctgggcagcgccgtcgtgctccccggagtggaggcggccgagcgcgccggggtgcccgccttcctggagacctccgcgccccgcaacctccccttctacgagcggctcggcttcaccgtcaccgccgacgtcgaggtgcccgaaggaccgcgcacctggtgcatgacccgcaagcccggtgcctga

SEQ ID NO: 34918 - DNA, 2313 bp, synthetic construct
  source 1..2313: mol_type = other DNA
atggccttaccagtgaccgccttgctcctgccgctggccttgctgctccacgccgccaggccgctcgagcagagttttgggttgttggaccctaaattgtgctatctgttggacggaatcctgttcatttacggagtgatcctgaccgcattgttcctgcgggttaagttttccagatccgcagacgcacccgcttaccaacaagggcagaaccaactctacaatgaacttaatttggggcggagggaagagtacgacgttctggacaaaaggaggggacgagatcccgagatgggcggaaagcctcagcgaaggaagaatccgcaagaggggctttataacgaactccagaaagataaaatggcagaagcctatagtgagattgggatgaagggagaaaggaggaggggtaaaggtcacgatgggttgtaccaaggattgagcacagccactaaagatacctatgatgcgctccacatgcaggccctgccgccaagaagggccaagcgatctggatctggagcaacaaacttctcactactcaaacaagcaggtgacgtggaggagaatcccgggcctactagcatggccttaccagtgaccgccttgctcctgccgctggccttgctgctccacgccgccaggccggagatcgtgctgacacagtctcccgccacactgtcactgtctccaggcgaaagagccacactgagctgtagcgtgtccagcagcatcagcagcagcaacctgcactggtatcagcagaagcctggacaggcccctcggctgctgatctacgccacatctaatctggcctctggcatccccgccagattttctggctctggaagcggcaccgacttcaccctgaccataagcagcctggaacctgaggacttcgccgtgtactactgccagcagtggtccagctatccccacacatttggcggaggcaccaaggtggaaatcaagagaggcggaggcggaagtggaggcggaggatctggcggcggaggctctcaggttcagctggttcagagcggagccgaagtgaagaaacctggggcctctgtgaaggtgtcctgcaaggcttccggctacacctttaccaactacctgatcgagtgggtccgacaggctccaggacaaggactggaatggatgggcctgattaaccctggcagcggcggcaccaactacaacgagaagttcaagggcagagtgaccatgaccaccgacaccagcacaagcaccgcctacatggaactgcggagcctgagaagcgacgacaccgccgtgtattattgcgccagaagaagccctctcggctcttggatctactacgcctatgacggcgtggcctattggggccagggaacactggttacagtgtcctctacgcgtgagctgggagagcctcagctgtgctatatcctggacgccatcctgtttctgtacggcatcgtgctgaccctgctgtactgccggctgaagatccaagtgcggaaggccgccatcaccagctacgagaaatccgacggcgtgtacaccggcctgagcaccagaaatcaagagacatacgagacactgaagcacgaaaagcctccacaacgcgccaagagaagcggatctggcgtgaagcagaccctgaatttcgacctgctgaagctggctggcgacgtggaatccaacccaggcccttctagaggccatatgaccgagtacaagcccacggtgcgcctcgccacccgcgacgacgtccccagggccgtacgcaccctcgccgccgcgttcgccgactaccccgccacgcgccacaccgtcgatccggaccgccacatcgagcgggtcaccgagctgcaagaactcttcctcacgcgcgtcgggctcgacatcggcaaggtgtgggtcgcggacgacggcgccgcggtggcggtctggaccacgccggagagcgtcgaagcgggggcggtgttcgccgagatcggcccgcgcatggccgagttgagcggttcccggctggccgcgcagcaacagatggaaggcctcctggcgccgcaccggcccaaggagcccgcgtggttcctggccaccgtcggcgtctcgcccgaccaccagggcaagggtctgggcagcgccgtcgtgctccccggagtggaggcggccgagcgcgccggggtgcccgccttcctggagacctccgcgccccgcaacctccccttctacgagcggctcggcttcaccgtcaccgccgacgtcgaggtgcccgaaggaccgcgcacctggtgcatgacccgcaagcccggtgcctga

SEQ ID NO: 34919 - DNA, 2946 bp, synthetic construct; identical to SEQ ID NO: 34910
  source 1..2946: mol_type = other DNA

SEQ ID NO: 34920 - DNA, 2946 bp, synthetic construct; identical to SEQ ID NO: 34911
  source 1..2946: mol_type = other DNA

SEQ ID NO: 34921 - DNA, 2943 bp, synthetic construct
  source 1..2943: mol_type = other DNA
atggccttaccagtgaccgccttgctcctgccgctggccttgctgctccacgccgccaggccgctcgaggaggaggacctgaagaacgtgttcccacctgaggtggccgtgttcgagcctagcgaggccgagatcagccacacccagaaagccaccctcgtgtgcctggctaccggcttctaccccgaccatgtggaactgtcttggtgggtcaacggcaaagaggtgcacagcggcgtgtgtaccgacccccagccactgaaagaacagcccgccctgaacgacagccggtactgcctgagcagcagactgagagtgtccgccaccttctggcagaacccccggaaccacttcagatgccaggtgcagttctacggcctgagcgagaacgacgagtggacccaggacagagccaagcccgtgacccagatcgtgtctgccgaagcctggggcagagccgatgatgtgattaagatccactggcaggaaaagaagtccaacaccatcctgggcagccaggaaggcaacaccatgaagaccaacgacacctacatgaagttcagctggctgaccgtgcccgagaagtccctggacaaagaacacagatgcatcgtgcggcacgaaaacaacaagaacggcgtggaccaggaaatcatcttcccacccatcaagaccgatgtgattacaatggaccccaaggacaactgctccaaggacgccaacgataccctgctgctccagctgaccaacaccagcgcctactacatgtacttgttgctgctgctgaagtccgtggtgtacttcgccatcatcacatgctgcctgctgcggagaaccgccttctgctgcaacggcgagaagtctagggccaagcgatctggatctggagcaacaaacttctcactactcaaacaagcaggtgacgtggaggagaatcccgggcctactagcatggccttaccagtgaccgccttgctcctgccgctggccttgctgctccacgccgccaggccggagatcgtgctgacacagtctcccgccacactgtcactgtctccaggcgaaagagccacactgagctgtagcgtgtccagcagcatcagcagcagcaacctgcactggtatcagcagaagcctggacaggcccctcggctgctgatctacgccacatctaatctggcctctggcatccccgccagattttctggctctggaagcggcaccgacttcaccctgaccataagcagcctggaacctgaggacttcgccgtgtactactgccagcagtggtccagctatccccacacatttggcggaggcaccaaggtggaaatcaagagaggcggaggcggaagtggaggcggaggatctggcggcggaggctctcaggttcagctggttcagagcggagccgaagtgaagaaacctggggcctctgtgaaggtgtcctgcaaggcttccggctacacctttaccaactacctgatcgagtgggtccgacaggctccaggacaaggactggaatggatgggcctgattaaccctggcagcggcggcaccaactacaacgagaagttcaagggcagagtgaccatgaccaccgacaccagcacaagcaccgcctacatggaactgcggagcctgagaagcgacgacaccgccgtgtattattgcgccagaagaagccctctcggctcttggatctactacgcctatgacggcgtggcctattggggccagggaacactggttacagtgtcctctacgcgtatccagaaccctgatcctgccgtgtaccagctgcgggatagcaagagcagcgacaagagcgtgtgtctgttcaccgacttcgacagccagaccaacgtgtcccagagcaaggactccgacgtgtacatcaccgataagtgcgtgctggacatgcggagcatggacttcaagagcaactccgccgtggcctggtccaacaagtccgatttcgcctgcgccaacgccttcaacaacagcattatccccgaggacacattcttcccaagccccgagagcagcgactccaccgaccacgtgaagcccaaagagacagagaacaccaagcagcccagcaagagctgccacaagcccaaggccatcgtgcacaccgagaaagtgaacatgatgagcctgaccgtgctgggcctgcggatgctgttcgccaaaaccgtggccgtgaacttcctgctgaccgccaagctgttcttcctccgcgccaagagaagcggatctggcgtgaagcagaccctgaatttcgacctgctgaagctggctggcgacgtggaatccaacccaggcccttctagaggccatatgaccgagtacaagcccacggtgcgcctcgccacccgcgacgacgtccccagggccgtacgcaccctcgccgccgcgttcgccgactaccccgccacgcgccacaccgtcgatccggaccgccacatcgagcgggtcaccgagctgcaagaactcttcctcacgcgcgtcgggctcgacatcggcaaggtgtgggtcgcggacgacggcgccgcggtggcggtctggaccacgccggagagcgtcgaagcgggggcggtgttcgccgagatcggcccgcgcatggccgagttgagcggttcccggctggccgcgcagcaacagatggaaggcctcctggcgccgcaccggcccaaggagcccgcgtggttcctggccaccgtcggcgtctcgcccgaccaccagggcaagggtctgggcagcgccgtcgtgctccccggagtggaggcggccgagcgcgccggggtgcccgccttcctggagacctccgcgccccgcaacctccccttctacgagcggctcggcttcaccgtcaccgccgacgtcgaggtgcccgaaggaccgcgcacctggtgcatgacccgcaagcccggtgcctga

SEQ ID NO: 34922 - DNA, 2943 bp, synthetic construct
  source 1..2943: mol_type = other DNA
atggccttaccagtgaccgccttgctcctgccgctggccttgctgctccacgccgccaggccgctcgagatccagaaccctgatcctgccgtgtaccagctgcgggatagcaagagcagcgacaagagcgtgtgtctgttcaccgacttcgacagccagaccaacgtgtcccagagcaaggactccgacgtgtacatcaccgataagtgcgtgctggacatgcggagcatggacttcaagagcaactccgccgtggcctggtccaacaagtccgatttcgcctgcgccaacgccttcaacaacagcattatccccgaggacacattcttcccaagccccgagagcagcgactccaccgaccacgtgaagcccaaagagacagagaacaccaagcagcccagcaagagctgccacaagcccaaggccatcgtgcacaccgagaaagtgaacatgatgagcctgaccgtgctgggcctgcggatgctgttcgccaaaaccgtggccgtgaacttcctgctgaccgccaagctgttcttcctcagggccaagcgatctggatctggagcaacaaacttctcactactcaaacaagcaggtgacgtggaggagaatcccgggcctactagcatggccttaccagtgaccgccttgctcctgccgctggccttgctgctccacgccgccaggccggagatcgtgctgacacagtctcccgccacactgtcactgtctccaggcgaaagagccacactgagctgtagcgtgtccagcagcatcagcagcagcaacctgcactggtatcagcagaagcctggacaggcccctcggctgctgatctacgccacatctaatctggcctctggcatccccgccagattttctggctctggaagcggcaccgacttcaccctgaccataagcagcctggaacctgaggacttcgccgtgtactactgccagcagtggtccagctatccccacacatttggcggaggcaccaaggtggaaatcaagagaggcggaggcggaagtggaggcggaggatctggcggcggaggctctcaggttcagctggttcagagcggagccgaagtgaagaaacctggggcctctgtgaaggtgtcctgcaaggcttccggctacacctttaccaactacctgatcgagtgggtccgacaggctccaggacaaggactggaatggatgggcctgattaaccctggcagcggcggcaccaactacaacgagaagttcaagggcagagtgaccatgaccaccgacaccagcacaagcaccgcctacatggaactgcggagcctgagaagcgacgacaccgccgtgtattattgcgccagaagaagccctctcggctcttggatctactacgcctatgacggcgtggcctattggggccagggaacactggttacagtgtcctctacgcgtgaggaggacctgaagaacgtgttcccacctgaggtggccgtgttcgagcctagcgaggccgagatcagccacacccagaaagccaccctcgtgtgcctggctaccggcttctaccccgaccatgtggaactgtcttggtgggtcaacggcaaagaggtgcacagcggcgtgtgtaccgacccccagccactgaaagaacagcccgccctgaacgacagccggtactgcctgagcagcagactgagagtgtccgccaccttctggcagaacccccggaaccacttcagatgccaggtgcagttctacggcctgagcgagaacgacgagtggacccaggacagagccaagcccgtgacccagatcgtgtctgccgaagcctggggcagagccgatgatgtgattaagatccactggcaggaaaagaagtccaacaccatcctgggcagccaggaaggcaacaccatgaagaccaacgacacctacatgaagttcagctggctgaccgtgcccgagaagtccctggacaaagaacacagatgcatcgtgcggcacgaaaacaacaagaacggcgtggaccaggaaatcatcttcccacccatcaagaccgatgtgattacaatggaccccaaggacaactgctccaaggacgccaacgataccctgctgctccagctgaccaacaccagcgcctactacatgtacttgttgctgctgctgaagtccgtggtgtacttcgccatcatcacatgctgcctgctgcggagaaccgccttctgctgcaacggcgagaagtctcgcgccaagagaagcggatctggcgtgaagcagaccctgaatttcgacctgctgaagctggctggcgacgtggaatccaacccaggcccttctagaggccatatgaccgagtacaagcccacggtgcgcctcgccacccgcgacgacgtccccagggccgtacgcaccctcgccgccgcgttcgccgactaccccgccacgcgccacaccgtcgatccggaccgccacatcgagcgggtcaccgagctgcaagaactcttcctcacgcgcgtcgggctcgacatcggcaaggtgtgggtcgcggacgacggcgccgcggtggcggtctggaccacgccggagagcgtcgaagcgggggcggtgttcgccgagatcggcccgcgcatggccgagttgagcggttcccggctggccgcgcagcaacagatggaaggcctcctggcgccgcaccggcccaaggagcccgcgtggttcctggccaccgtcggcgtctcgcccgaccaccagggcaagggtctgggcagcgccgtcgtgctccccggagtggaggcggccgagcgcgccggggtgcccgccttcctggagacctccgcgccccgcaacctccccttctacgagcggctcggcttcaccgtcaccgccgacgtcgaggtgcccgaaggaccgcgcacctggtgcatgacccgcaagcccggtgcctga

SEQ ID NO: 34923 - DNA, 2634 bp, synthetic construct
  source 1..2634: mol_type = other DNA
atggccttaccagtgaccgccttgctcctgccgctggccttgctgctccacgccgccaggccgctcgaggaggacctgaagaacgtgttcccacctgaggtggccgtgttcgagcctagcgaggccgagatcagccacacccagaaagccaccctcgtgtgcctggctaccggcttctaccccgaccatgtggaactgtcttggtgggtcaacggcaaagaggtgcacagcggcgtgtctaccgacccccagccactgaaagaacagcccgccctgaacgacagccggtactgcctgagcagcagactgagagtgtccgccaccttctggcagaacccccggaaccacttcagatgccaggtgcagttctacggcctgagcgagaacgacgagtggacccaggacagagccaagcccgtgacccagatcgtgtctgccgaagcctggggcagagccgattgcggctttaccagcgagagctaccagcagggcgtgctgagcgccaccaacctgagcgtgatcggcttcagaatcctgctgctgaaagtggccggctttaacctgctgatgaccctgcggctgtggtccagcagggccaagcgatctggatctggagcaacaaacttctcactactcaaacaagcaggtgacgtggaggagaatcccgggcctactagcatggccttaccagtgaccgccttgctcctgccgctggccttgctgctccacgccgccaggccggagatcgtgctgacacagtctcccgccacactgtcactgtctccaggcgaaagagccacactgagctgtagcgtgtccagcagcatcagcagcagcaacctgcactggtatcagcagaagcctggacaggcccctcggctgctgatctacgccacatctaatctggcctctggcatccccgccagattttctggctctggaagcggcaccgacttcaccctgaccataagcagcctggaacctgaggacttcgccgtgtactactgccagcagtggtccagctatccccacacatttggcggaggcaccaaggtggaaatcaagagaggcggaggcggaagtggaggcggaggatctggcggcggaggctctcaggttcagctggttcagagcggagccgaagtgaagaaacctggggcctctgtgaaggtgtcctgcaaggcttccggctacacctttaccaactacctgatcgagtgggtccgacaggctccaggacaaggactggaatggatgggcctgattaaccctggcagcggcggcaccaactacaacgagaagttcaagggcagagtgaccatgaccaccgacaccagcacaagcaccgcctacatggaactgcggagcctgagaagcgacgacaccgccgtgtattattgcgccagaagaagccctctcggctcttggatctactacgcctatgacggcgtggcctattggggccagggaacactggttacagtgtcctctacgcgtatccagaaccctgatcctgccgtgtaccagctgcgggatagcaagagcagcgacaagagcgtgtgtctgttcaccgacttcgacagccagaccaacgtgtcccagagcaaggactccgacgtgtacatcaccgataagaccgtgctggacatgcggagcatggacttcaagagcaactccgccgtggcctggtccaacaagtccgatttcgcctgcgccaacgccttcaacaacagcattatccccgaggacacattcttcccaagccccgagagcagctgcgacgtgaagctggtggaaaagagcttcgagacagacaccaacctgaacttccagatcctgtacgagatcctgctgggcaaggccaccctgtacgccgtgctggtgtctgccctggtgctgatggctatggtcaagcggaaggacagccggggacgcgccaagagaagcggatctggcgtgaagcagaccctgaatttcgacctgctgaagctggctggcgacgtggaatccaacccaggcccttctagaggccatatgaccgagtacaagcccacggtgcgcctcgccacccgcgacgacgtccccagggccgtacgcaccctcgccgccgcgttcgccgactaccccgccacgcgccacaccgtcgatccggaccgccacatcgagcgggtcaccgagctgcaagaactcttcctcacgcgcgtcgggctcgacatcggcaaggtgtgggtcgcggacgacggcgccgcggtggcggtctggaccacgccggagagcgtcgaagcgggggcggtgttcgccgagatcggcccgcgcatggccgagttgagcggttcccggctggccgcgcagcaacagatggaaggcctcctggcgccgcaccggcccaaggagcccgcgtggttcctggccaccgtcggcgtctcgcccgaccaccagggcaagggtctgggcagcgccgtcgtgctccccggagtggaggcggccgagcgcgccggggtgcccgccttcctggagacctccgcgccccgcaacctccccttctacgagcggctcggcttcaccgtcaccgccgacgtcgaggtgcccgaaggaccgcgcacctggtgcatgacccgcaagcccggtgcctga

SEQ ID NO: 34924 - DNA, 2634 bp, synthetic construct
  source 1..2634: mol_type = other DNA
atggccttaccagtgaccgccttgctcctgccgctggccttgctgctccacgccgccaggccgctcgagatccagaaccctgatcctgccgtgtaccagctgcgggatagcaagagcagcgacaagagcgtgtgtctgttcaccgacttcgacagccagaccaacgtgtcccagagcaaggactccgacgtgtacatcaccgataagaccgtgctggacatgcggagcatggacttcaagagcaactccgccgtggcctggtccaacaagtccgatttcgcctgcgccaacgccttcaacaacagcattatccccgaggacacattcttcccaagccccgagagcagctgcgacgtgaagctggtggaaaagagcttcgagacagacaccaacctgaacttccagatcctgtacgagatcctgctgggcaaggccaccctgtacgccgtgctggtgtctgccctggtgctgatggctatggtcaagcggaaggacagccggggaagggccaagcgatctggatctggagcaacaaacttctcactactcaaacaagcaggtgacgtggaggagaatcccgggcctactagcatggccttaccagtgaccgccttgctcctgccgctggccttgctgctccacgccgccaggccggagatcgtgctgacacagtctcccgccacactgtcactgtctccaggcgaaagagccacactgagctgtagcgtgtccagcagcatcagcagcagcaacctgcactggtatcagcagaagcctggacaggcccctcggctgctgatctacgccacatctaatctggcctctggcatccccgccagattttctggctctggaagcggcaccgacttcaccctgaccataagcagcctggaacctgaggacttcgccgtgtactactgccagcagtggtccagctatccccacacatttggcggaggcaccaaggtggaaatcaagagaggcggaggcggaagtggaggcggaggatctggcggcggaggctctcaggttcagctggttcagagcggagccgaagtgaagaaacctggggcctctgtgaaggtgtcctgcaaggcttccggctacacctttaccaactacctgatcgagtgggtccgacaggctccaggacaaggactggaatggatgggcctgattaaccctggcagcggcggcaccaactacaacgagaagttcaagggcagagtgaccatgaccaccgacaccagcacaagcaccgcctacatggaactgcggagcctgagaagcgacgacaccgccgtgtattattgcgccagaagaagccctctcggctcttggatctactacgcctatgacggcgtggcctattggggccagggaacactggttacagtgtcctctacgcgtgaggacctgaagaacgtgttcccacctgaggtggccgtgttcgagcctagcgaggccgagatcagccacacccagaaagccaccctcgtgtgcctggctaccggcttctaccccgaccatgtggaactgtcttggtgggtcaacggcaaagaggtgcacagcggcgtgtctaccgacccccagccactgaaagaacagcccgccctgaacgacagccggtactgcctgagcagcagactgagagtgtccgccaccttctggcagaacccccggaaccacttcagatgccaggtgcagttctacggcctgagcgagaacgacgagtggacccaggacagagccaagcccgtgacccagatcgtgtctgccgaagcctggggcagagccgattgcggctttaccagcgagagctaccagcagggcgtgctgagcgccaccaacctgagcgtgatcggcttcagaatcctgctgctgaaagtggccggctttaacctgctgatgaccctgcggctgtggtccagccgcgccaagagaagcggatctggcgtgaagcagaccctgaatttcgacctgctgaagctggctggcgacgtggaatccaacccaggcccttctagaggccatatgaccgagtacaagcccacggtgcgcctcgccacccgcgacgacgtccccagggccgtacgcaccctcgccgccgcgttcgccgactaccccgccacgcgccacaccgtcgatccggaccgccacatcgagcgggtcaccgagctgcaagaactcttcctcacgcgcgtcgggctcgacatcggcaaggtgtgggtcgcggacgacggcgccgcggtggcggtctggaccacgccggagagcgtcgaagcgggggcggtgttcgccgagatcggcccgcgcatggccgagttgagcggttcccggctggccgcgcagcaacagatggaaggcctcctggcgccgcaccggcccaaggagcccgcgtggttcctggccaccgtcggcgtctcgcccgaccaccagggcaagggtctgggcagcgccgtcgtgctccccggagtggaggcggccgagcgcgccggggtgcccgccttcctggagacctccgcgccccgcaacctccccttctacgagcggctcggcttcaccgtcaccgccgacgtcgaggtgcccgaaggaccgcgcacctggtgcatgacccgcaagcccggtgcctga

SEQ ID NO: 34925 - DNA, 2634 bp, synthetic construct
  source 1..2634: mol_type = other DNA
atggccttaccagtgaccgccttgctcctgccgctggccttgctgctccacgccgccaggccgctcgaggaggacctgaagaacgtgttcccacctgaggtggccgtgttcgagcctagcgaggccgagatcagccacacccagaaagccaccctcgtgtgcctggctaccggcttctaccccgaccatgtggaactgtcttggtgggtcaacggcaaagaggtgcacagcggcgtgtgtaccgacccccagccactgaaagaacagcccgccctgaacgacagccggtactgcctgagcagcagactgagagtgtccgccaccttctggcagaacccccggaaccacttcagatgccaggtgcagttctacggcctgagcgagaacgacgagtggacccaggacagagccaagcccgtgacccagatcgtgtctgccgaagcctggggcagagccgattgcgacgtgaagctggtggaaaagagcttcgagacagacaccaacctgaacttccagaacctgagcgtgatcggcttcagaatcctgctgctgaaagtggccggctttaacctgctgatgaccctgcggctgtggtccagcagggccaagcgatctggatctggagcaacaaacttctcactactcaaacaagcaggtgacgtggaggagaatcccgggcctactagcatggccttaccagtgaccgccttgctcctgccgctggccttgctgctccacgccgccaggccggagatcgtgctgacacagtctcccgccacactgtcactgtctccaggcgaaagagccacactgagctgtagcgtgtccagcagcatcagcagcagcaacctgcactggtatcagcagaagcctggacaggcccctcggctgctgatctacgccacatctaatctggcctctggcatccccgccagattttctggctctggaagcggcaccgacttcaccctgaccataagcagcctggaacctgaggacttcgccgtgtactactgccagcagtggtccagctatccccacacatttggcggaggcaccaaggtggaaatcaagagaggcggaggcggaagtggaggcggaggatctggcggcggaggctctcaggttcagctggttcagagcggagccgaagtgaagaaacctggggcctctgtgaaggtgtcctgcaaggcttccggctacacctttaccaactacctgatcgagtgggtccgacaggctccaggacaaggactggaatggatgggcctgattaaccctggcagcggcggcaccaactacaacgagaagttcaagggcagagtgaccatgaccaccgacaccagcacaagcaccgcctacatggaactgcggagcctgagaagcgacgacaccgccgtgtattattgcgccagaagaagccctctcggctcttggatctactacgcctatgacggcgtggcctattggggccagggaacactggttacagtgtcctctacgcgtatccagaaccctgatcctgccgtgtaccagctgcgggatagcaagagcagcgacaagagcgtgtgtctgttcaccgacttcgacagccagaccaacgtgtcccagagcaaggactccgacgtgtacatcaccgataagtgcgtgctggacatgcggagcatggacttcaagagcaactccgccgtggcctggtccaacaagtccgatttcgcctgcgccaacgccttcaacaacagcattatccccgaggacacattcttcccaagccccgagagcagctgcggctttaccagcgagagctaccagcagggcgtgctgagcgccaccatcctgtacgagatcctgctgggcaaggccaccctgtacgccgtgctggtgtctgccctggtgctgatggctatggtcaagcggaaggacagccggggacgcgccaagagaagcggatctggcgtgaagcagaccctgaatttcgacctgctgaagctggctggcgacgtggaatccaacccaggcccttctagaggccatatgaccgagtacaagcccacggtgcgcctcgccacccgcgacgacgtccccagggccgtacgcaccctcgccgccgcgttcgccgactaccccgccacgcgccacaccgtcgatccggaccgccacatcgagcgggtcaccgagctgcaagaactcttcctcacgcgcgtcgggctcgacatcggcaaggtgtgggtcgcggacgacggcgccgcggtggcggtctggaccacgccggagagcgtcgaagcgggggcggtgttcgccgagatcggcccgcgcatggccgagttgagcggttcccggctggccgcgcagcaacagatggaaggcctcctggcgccgcaccggcccaaggagcccgcgtggttcctggccaccgtcggcgtctcgcccgaccaccagggcaagggtctgggcagcgccgtcgtgctccccggagtggaggcggccgagcgcgccggggtgcccgccttcctggagacctccgcgccccgcaacctccccttctacgagcggctcggcttcaccgtcaccgccgacgtcgaggtgcccgaaggaccgcgcacctggtgcatgacccgcaagcccggtgcctga

SEQ ID NO: 34926 - DNA, 2634 bp, synthetic construct
  source 1..2634: mol_type = other DNA
atggccttaccagtgaccgccttgctcctgccgctggccttgctgctccacgccgccaggccgctcgaggaggacctgaagaacgtgttcccacctgaggtggccgtgttcgagcctagcgaggccgagatcagccacacccagaaagccaccctcgtgtgcctggctaccggcttctaccccgaccatgtggaactgtcttggtgggtcaacggcaaagaggtgcacagcggcgtgtctaccgacccccagccactgaaagaacagcccgccctgaacgacagccggtactgcctgagcagcagactgagagtgtccgccaccttctggcagaacccccggaaccacttcagatgccaggtgcagttctacggcctgagcgagaacgacgagtggacccaggacagagccaagcccgtgacccagatcgtgtctgccgaagcctggggcagagccgattgcgacgtgaagctggtggaaaagagcttcgagacagacaccaacctgaacttccagaacctgagcgtgatcggcttcagaatcctgctgctgaaagtggccggctttaacctgctgatgaccctgcggctgtggtccagcagggccaagcgatctggatctggagcaacaaacttctcactactcaaacaagcaggtgacgtggaggagaatcccgggcctactagcatggccttaccagtgaccgccttgctcctgccgctggccttgctgctccacgccgccaggccggagatcgtgctgacacagtctcccgccacactgtcactgtctccaggcgaaagagccacactgagctgtagcgtgtccagcagcatcagcagcagcaacctgcactggtatcagcagaagcctggacaggcccctcggctgctgatctacgccacatctaatctggcctctggcatccccgccagattttctggctctggaagcggcaccgacttcaccctgaccataagcagcctggaacctgaggacttcgccgtgtactactgccagcagtggtccagctatccccacacatttggcggaggcaccaaggtggaaatcaagagaggcggaggcggaagtggaggcggaggatctggcggcggaggctctcaggttcagctggttcagagcggagccgaagtgaagaaacctggggcctctgtgaaggtgtcctgcaaggcttccggctacacctttaccaactacctgatcgagtgggtccgacaggctccaggacaaggactggaatggatgggcctgattaaccctggcagcggcggcaccaactacaacgagaagttcaagggcagagtgaccatgaccaccgacaccagcacaagcaccgcctacatggaactgcggagcctgagaagcgacgacaccgccgtgtattattgcgccagaagaagccctctcggctcttggatctactacgcctatgacggcgtggcctattggggccagggaacactggttacagtgtcctctacgcgtatccagaaccctgatcctgccgtgtaccagctgcgggatagcaagagcagcgacaagagcgtgtgtctgttcaccgacttcgacagccagaccaacgtgtcccagagcaaggactccgacgtgtacatcaccgataagaccgtgctggacatgcggagcatggacttcaagagcaactccgccgtggcctggtccaacaagtccgatttcgcctgcgccaacgccttcaacaacagcattatccccgaggacacattcttcccaagccccgagagcagctgcggctttaccagcgagagctaccagcagggcgtgctgagcgccaccatcctgtacgagatcctgctgggcaaggccaccctgtacgccgtgctggtgtctgccctggtgctgatggctatggtcaagcggaaggacagccggggacgcgccaagagaagcggatctggcgtgaagcagaccctgaatttcgacctgctgaagctggctggcgacgtggaatccaacccaggcccttctagaggccatatgaccgagtacaagcccacggtgcgcctcgccacccgcgacgacgtccccagggccgtacgcaccctcgccgccgcgttcgccgactaccccgccacgcgccacaccgtcgatccggaccgccacatcgagcgggtcaccgagctgcaagaactcttcctcacgcgcgtcgggctcgacatcggcaaggtgtgggtcgcggacgacggcgccgcggtggcggtctggaccacgccggagagcgtcgaagcgggggcggtgttcgccgagatcggcccgcgcatggccgagttgagcggttcccggctggccgcgcagcaacagatggaaggcctcctggcgccgcaccggcccaaggagcccgcgtggttcctggccaccgtcggcgtctcgcccgaccaccagggcaagggtctgggcagcgccgtcgtgctccccggagtggaggcggccgagcgcgccggggtgcccgccttcctggagacctccgcgccccgcaacctccccttctacgagcggctcggcttcaccgtcaccgccgacgtcgaggtgcccgaaggaccgcgcacctggtgcatgacccgcaagcccggtgcctga

SEQ ID NO: 34927 - DNA, 2943 bp, synthetic construct
  source 1..2943: mol_type = other DNA
atggccttaccagtgaccgccttgctcctgccgctggccttgctgctccacgccgccaggccgctcgaggaggaggacctgaagaacgtgttcccacctgaggtggccgtgttcgagcctagcgaggccgagatcagccacacccagaaagccaccctcgtgtgcctggctaccggcttctaccccgaccatgtggaactgtcttggtgggtcaacggcaaagaggtgcacagcggcgtgtctaccgacccccagccactgaaagaacagcccgccctgaacgacagccggtactgcctgagcagcagactgagagtgtccgccaccttctggcagaacccccggaaccacttcagatgccaggtgcagttctacggcctgagcgagaacgacgagtggacccaggacagagccaagcccgtgacccagatcgtgtctgccgaagcctggggcagagccgatgatgtgattaagatccactggcaggaaaagaagtccaacaccatcctgggcagccaggaaggcaacaccatgaagaccaacgacacctacatgaagttcagctggctgaccgtgcccgagaagtccctggacaaagaacacagatgcatcgtgcggcacgaaaacaacaagaacggcgtggaccaggaaatcatcttcccacccatcaagaccgatgtgattacaatggaccccaaggacaactgctccaaggacgccaacgataccctgctgctccagctgaccaacaccagcgcctactacatgtacttgttgctgctgctgaagtccgtggtgtacttcgccatcatcacatgctgcctgctgcggagaaccgccttctgctgcaacggcgagaagtctagggccaagcgatctggatctggagcaacaaacttctcactactcaaacaagcaggtgacgtggaggagaatcccgggcctactagcatggccttaccagtgaccgccttgctcctgccgctggccttgctgctccacgccgccaggccggagatcgtgctgacacagtctcccgccacactgtcactgtctccaggcgaaagagccacactgagctgtagcgtgtccagcagcatcagcagcagcaacctgcactggtatcagcagaagcctggacaggcccctcggctgctgatctacgccacatctaatctggcctctggcatccccgccagattttctggctctggaagcggcaccgacttcaccctgaccataagcagcctggaacctgaggacttcgccgtgtactactgccagcagtggtccagctatccccacacatttggcggaggcaccaaggtggaaatcaagagaggcggaggcggaagtggaggcggaggatctggcggcggaggctctcaggttcagctggttcagagcggagccgaagtgaagaaacctggggcctctgtgaaggtgtcctgcaaggcttccggctacacctttaccaactacctgatcgagtgggtccgacaggctccaggacaaggactggaatggatgggcctgattaaccctggcagcggcggcaccaactacaacgagaagttcaagggcagagtgaccatgaccaccgacaccagcacaagcaccgcctacatggaactgcggagcctgagaagcgacgacaccgccgtgtattattgcgccagaagaagccctctcggctcttggatctactacgcctatgacggcgtggcctattggggccagggaacactggttacagtgtcctctacgcgtatccagaaccctgatcctgccgtgtaccagctgcgggatagcaagagcagcgacaagagcgtgtgtctgttcaccgacttcgacagccagaccaacgtgtcccagagcaaggactccgacgtgtacatcaccgataagaccgtgctggacatgcggagcatggacttcaagagcaactccgccgtggcctggtccaacaagtccgatttcgcctgcgccaacgccttcaacaacagcattatccccgaggacacattcttcccaagccccgagagcagcgactccaccgaccacgtgaagcccaaagagacagagaacaccaagcagcccagcaagagctgccacaagcccaaggccatcgtgcacaccgagaaagtgaacatgatgagcctgaccgtgctgggcctgcggatgctgttcgccaaaaccgtggccgtgaacttcctgctgaccgccaagctgttcttcctccgcgccaagagaagcggatctggcgtgaagcagaccctgaatttcgacctgctgaagctggctggcgacgtggaatccaacccaggcccttctagaggccatatgaccgagtacaagcccacggtgcgcctcgccacccgcgacgacgtccccagggccgtacgcaccctcgccgccgcgttcgccgactaccccgccacgcgccacaccgtcgatccggaccgccacatcgagcgggtcaccgagctgcaagaactcttcctcacgcgcgtcgggctcgacatcggcaaggtgtgggtcgcggacgacggcgccgcggtggcggtctggaccacgccggagagcgtcgaagcgggggcggtgttcgccgagatcggcccgcgcatggccgagttgagcggttcccggctggccgcgcagcaacagatggaaggcctcctggcgccgcaccggcccaaggagcccgcgtggttcctggccaccgtcggcgtctcgcccgaccaccagggcaagggtctgggcagcgccgtcgtgctccccggagtggaggcggccgagcgcgccggggtgcccgccttcctggagacctccgcgccccgcaacctccccttctacgagcggctcggcttcaccgtcaccgccgacgtcgaggtgcccgaaggaccgcgcacctggtgcatgacccgcaagcccggtgcctga

SEQ ID NO: 34928 - DNA, 2634 bp, synthetic construct
  source 1..2634: mol_type = other DNA
atggccttaccagtgaccgccttgctcctgccgctggccttgctgctccacgccgccaggccgctcgaggaggacctgaagaacgtgttcccacctgaggtggccgtgttcgagcctagcgaggccgagatcagccacacccagaaagccaccctcgtgtgcctggctaccggcttctaccccgaccatgtggaactgtcttggtgggtcaacggcaaagaggtgcacagcggcgtgtgtaccgacccccagccactgaaagaacagcccgccctgaacgacagccggtactgcctgagcagcagactgagagtgtccgccaccttctggcagaacccccggaaccacttcagatgccaggtgcagttctacggcctgagcgagaacgacgagtggacccaggacagagccaagcccgtgacccagatcgtgtctgccgaagcctggggcagagccgattgcggctttaccagcgagagctaccagcagggcgtgctgagcgccaccaacctgagcgtgatcggcttcagaatcctgctgctgaaagtggccggctttaacctgctgatgaccctgcggctgtggtccagcagggccaagcgatctggatctggagcaacaaacttctcactactcaaacaagcaggtgacgtggaggagaatcccgggcctactagcatggccttaccagtgaccgccttgctcctgccgctggccttgctgctccacgccgccaggccggagatcgtgctgacacagtctcccgccacactgtcactgtctccaggcgaaagagccacactgagctgtagcgtgtccagcagcatcagcagcagcaacctgcactggtatcagcagaagcctggacaggcccctcggctgctgatctacgccacatctaatctggcctctggcatccccgccagattttctggctctggaagcggcaccgacttcaccctgaccataagcagcctggaacctgaggacttcgccgtgtactactgccagcagtggtccagctatccccacacatttggcggaggcaccaaggtggaaatcaagagaggcggaggcggaagtggaggcggaggatctggcggcggaggctctcaggttcagctggttcagagcggagccgaagtgaagaaacctggggcctctgtgaaggtgtcctgcaaggcttccggctacacctttaccaactacctgatcgagtgggtccgacaggctccaggacaaggactggaatggatgggcctgattaaccctggcagcggcggcaccaactacaacgagaagttcaagggcagagtgaccatgaccaccgacaccagcacaagcaccgcctacatggaactgcggagcctgagaagcgacgacaccgccgtgtattattgcgccagaagaagccctctcggctcttggatctactacgcctatgacggcgtggcctattggggccagggaacactggttacagtgtcctctacgcgtatccagaaccctgatcctgccgtgtaccagctgcgggatagcaagagcagcgacaagagcgtgtgtctgttcaccgacttcgacagccagaccaacgtgtcccagagcaaggactccgacgtgtacatcaccgataagtgcgtgctggacatgcggagcatggacttcaagagcaactccgccgtggcctggtccaacaagtccgatttcgcctgcgccaacgccttcaacaacagcattatccccgaggacacattcttcccaagccccgagagcagctgcgacgtgaagctggtggaaaagagcttcgagacagacaccaacctgaacttccagatcctgtacgagatcctgctgggcaaggccaccctgtacgccgtgctggtgtctgccctggtgctgatggctatggtcaagcggaaggacagccggggacgcgccaagagaagcggatctggcgtgaagcagaccctgaatttcgacctgctgaagctggctggcgacgtggaatccaacccaggcccttctagaggccatatgaccgagtacaagcccacggtgcgcctcgccacccgcgacgacgtccccagggccgtacgcaccctcgccgccgcgttcgccgactaccccgccacgcgccacaccgtcgatccggaccgccacatcgagcgggtcaccgagctgcaagaactcttcctcacgcgcgtcgggctcgacatcggcaaggtgtgggtcgcggacgacggcgccgcggtggcggtctggaccacgccggagagcgtcgaagcgggggcggtgttcgccgagatcggcccgcgcatggccgagttgagcggttcccggctggccgcgcagcaacagatggaaggcctcctggcgccgcaccggcccaaggagcccgcgtggttcctggccaccgtcggcgtctcgcccgaccaccagggcaagggtctgggcagcgccgtcgtgctccccggagtggaggcggccgagcgcgccggggtgcccgccttcctggagacctccgcgccccgcaacctccccttctacgagcggctcggcttcaccgtcaccgccgacgtcgaggtgcccgaaggaccgcgcacctggtgcatgacccgcaagcccggtgcctga

SEQ ID NO: 34929 - DNA, 2721 bp, synthetic construct
  source 1..2721: mol_type = other DNA
atggccttaccagtgaccgccttgctcctgccgctggccttgctgctccacgccgccaggccgctcgaggaggaggacctgaagaacgtgttcccacctgaggtggccgtgttcgagcctagcgaggccgagatcagccacacccagaaagccaccctcgtgtgcctggctaccggcttctaccccgaccatgtggaactgtcttggtgggtcaacggcaaagaggtgcacagcggcgtgtgtaccgacccccagccactgaaagaacagcccgccctgaacgacagccggtactgcctgagcagcagactgagagtgtccgccaccttctggcagaacccccggaaccacttcagatgccaggtgcagttctacggcctgagcgagaacgacgagtggacccaggacagagccaagcccgtgacccagatcgtgtctgccgaagcctggggcagagccgattgcggctttaccagcgagagctaccagcagggcgtgctgagcgccaccaacctgagcgtgatcggcttcagaatcctgctgctgaaagtggccggctttaacctgctgatgaccctgcggctgtggtccagcagggccaagcgatctggatctggagcaacaaacttctcactactcaaacaagcaggtgacgtggaggagaatcccgggcctactagcatggccttaccagtgaccgccttgctcctgccgctggccttgctgctccacgccgccaggccggagatcgtgctgacacagtctcccgccacactgtcactgtctccaggcgaaagagccacactgagctgtagcgtgtccagcagcatcagcagcagcaacctgcactggtatcagcagaagcctggacaggcccctcggctgctgatctacgccacatctaatctggcctctggcatccccgccagattttctggctctggaagcggcaccgacttcaccctgaccataagcagcctggaacctgaggacttcgccgtgtactactgccagcagtggtccagctatccccacacatttggcggaggcaccaaggtggaaatcaagagaggcggaggcggaagtggaggcggaggatctggcggcggaggctctcaggttcagctggttcagagcggagccgaagtgaagaaacctggggcctctgtgaaggtgtcctgcaaggcttccggctacacctttaccaactacctgatcgagtgggtccgacaggctccaggacaaggactggaatggatgggcctgattaaccctggcagcggcggcaccaactacaacgagaagttcaagggcagagtgaccatgaccaccgacaccagcacaagcaccgcctacatggaactgcggagcctgagaagcgacgacaccgccgtgtattattgcgccagaagaagccctctcggctcttggatctactacgcctatgacggcgtggcctattggggccagggaacactggttacagtgtcctctacgcgtggacagcctaaggccaatcctaccgtgacactgttccctccaagcagcgaagaactccaggccaacaaggccacacttgtgtgcctgatctccgacttctaccctggggctgtgacagtggcttggaaggccgatggatctcctgtgaaagccggcgtggaaaccaccaagccatccaagcagagcaacaacaaatacgccgccagctcctacctgagcctgacacctgagcagtggaagtcccacagatcctacagctgccaagtgacccacgaaggcagcaccgtggaaaagacagtggcccctacagagtgcagccccatcaagaccgatgtgattacaatggaccccaaggacaactgctccaaggacgccaacgataccctgctgctccagctgaccaacaccagcgcctactacatgtacttgttgctgctgctgaagtccgtggtgtacttcgccatcatcacatgctgcctgctgcggagaaccgccttctgctgcaacggcgagaagtctcgcgccaagagaagcggatctggcgtgaagcagaccctgaatttcgacctgctgaagctggctggcgacgtggaatccaacccaggcccttctagaggccatatgaccgagtacaagcccacggtgcgcctcgccacccgcgacgacgtccccagggccgtacgcaccctcgccgccgcgttcgccgactaccccgccacgcgccacaccgtcgatccggaccgccacatcgagcgggtcaccgagctgcaagaactcttcctcacgcgcgtcgggctcgacatcggcaaggtgtgggtcgcggacgacggcgccgcggtggcggtctggaccacgccggagagcgtcgaagcgggggcggtgttcgccgagatcggcccgcgcatggccgagttgagcggttcccggctggccgcgcagcaacagatggaaggcctcctggcgccgcaccggcccaaggagcccgcgtggttcctggccaccgtcggcgtctcgcccgaccaccagggcaagggtctgggcagcgccgtcgtgctccccggagtggaggcggccgagcgcgccggggtgcccgccttcctggagacctccgcgccccgcaacctccccttctacgagcggctcggcttcaccgtcaccgccgacgtcgaggtgcccgaaggaccgcgcacctggtgcatgacccgcaagcccggtgcctga

SEQ ID NO: 34930 - DNA, 2721 bp, synthetic construct
  source 1..2721: mol_type = other DNA
atggccttaccagtgaccgccttgctcctgccgctggccttgctgctccacgccgccaggccgctcgagggacagcctaaggccaatcctaccgtgacactgttccctccaagcagcgaagaactccaggccaacaaggccacacttgtgtgcctgatctccgacttctaccctggggctgtgacagtggcttggaaggccgatggatctcctgtgaaagccggcgtggaaaccaccaagccatccaagcagagcaacaacaaatacgccgccagctcctacctgagcctgacacctgagcagtggaagtcccacagatcctacagctgccaagtgacccacgaaggcagcaccgtggaaaagacagtggcccctacagagtgcagccccatcaagaccgatgtgattacaatggaccccaaggacaactgctccaaggacgccaacgataccctgctgctccagctgaccaacaccagcgcctactacatgtacttgttgctgctgctgaagtccgtggtgtacttcgccatcatcacatgctgcctgctgcggagaaccgccttctgctgcaacggcgagaagtctagggccaagcgatctggatctggagcaacaaacttctcactactcaaacaagcaggtgacgtggaggagaatcccgggcctactagcatggccttaccagtgaccgccttgctcctgccgctggccttgctgctccacgccgccaggccggagatcgtgctgacacagtctcccgccacactgtcactgtctccaggcgaaagagccacactgagctgtagcgtgtccagcagcatcagcagcagcaacctgcactggtatcagcagaagcctggacaggcccctcggctgctgatctacgccacatctaatctggcctctggcatccccgccagattttctggctctggaagcggcaccgacttcaccctgaccataagcagcctggaacctgaggacttcgccgtgtactactgccagcagtggtccagctatccccacacatttggcggaggcaccaaggtggaaatcaagagaggcggaggcggaagtggaggcggaggatctggcggcggaggctctcaggttcagctggttcagagcggagccgaagtgaagaaacctggggcctctgtgaaggtgtcctgcaaggcttccggctacacctttaccaactacctgatcgagtgggtccgacaggctccaggacaaggactggaatggatgggcctgattaaccctggcagcggcggcaccaactacaacgagaagttcaagggcagagtgaccatgaccaccgacaccagcacaagcaccgcctacatggaactgcggagcctgagaagcgacgacaccgccgtgtattattgcgccagaagaagccctctcggctcttggatctactacgcctatgacggcgtggcctattggggccagggaacactggttacagtgtcctctacgcgtgaggaggacctgaagaacgtgttcccacctgaggtggccgtgttcgagcctagcgaggccgagatcagccacacccagaaagccaccctcgtgtgcctggctaccggcttctaccccgaccatgtggaactgtcttggtgggtcaacggcaaagaggtgcacagcggcgtgtgtaccgacccccagccactgaaagaacagcccgccctgaacgacagccggtactgcctgagcagcagactgagagtgtccgccaccttctggcagaacccccggaaccacttcagatgccaggtgcagttctacggcctgagcgagaacgacgagtggacccaggacagagccaagcccgtgacccagatcgtgtctgccgaagcctggggcagagccgattgcggctttaccagcgagagctaccagcagggcgtgctgagcgccaccaacctgagcgtgatcggcttcagaatcctgctgctgaaagtggccggctttaacctgctgatgaccctgcggctgtggtccagccgcgccaagagaagcggatctggcgtgaagcagaccctgaatttcgacctgctgaagctggctggcgacgtggaatccaacccaggcccttctagaggccatatgaccgagtacaagcccacggtgcgcctcgccacccgcgacgacgtccccagggccgtacgcaccctcgccgccgcgttcgccgactaccccgccacgcgccacaccgtcgatccggaccgccacatcgagcgggtcaccgagctgcaagaactcttcctcacgcgcgtcgggctcgacatcggcaaggtgtgggtcgcggacgacggcgccgcggtggcggtctggaccacgccggagagcgtcgaagcgggggcggtgttcgccgagatcggcccgcgcatggccgagttgagcggttcccggctggccgcgcagcaacagatggaaggcctcctggcgccgcaccggcccaaggagcccgcgtggttcctggccaccgtcggcgtctcgcccgaccaccagggcaagggtctgggcagcgccgtcgtgctccccggagtggaggcggccgagcgcgccggggtgcccgccttcctggagacctccgcgccccgcaacctccccttctacgagcggctcggcttcaccgtcaccgccgacgtcgaggtgcccgaaggaccgcgcacctggtgcatgacccgcaagcccggtgcctga

SEQ ID NO: 34931 - DNA, 2712 bp, synthetic construct
  source 1..2712: mol_type = other DNA
atggccttaccagtgaccgccttgctcctgccgctggccttgctgctccacgccgccaggccgctcgaggaggcctctacaaagggaccctccgtgtttcctctggctcccagcagcaagtctacaagcggaggaacagccgctctgggctgcctggtcaaggattactttcccgagcctgtgaccgtgtcctggaatagcggagcactgacaagcggcgtgcacacctttccagccgtgctgcaaagcagcggcctgtactctctgagcagcgtggtcacagtgcctagctctagcctgggcacccagacctacatctgcaatgtgaaccacaagcctagcaacaccaaggtggacaagagagtggaacccaagagctgtcccatcaagaccgatgtgattacaatggaccccaaggacaactgctccaaggacgccaacgataccctgctgctccagctgaccaacaccagcgcctactacatgtacttgttgctgctgctgaagtccgtggtgtacttcgccatcatcacatgctgcctgctgcggagaaccgccttctgctgcaacggcgagaagtctagggccaagcgatctggatctggagcaacaaacttctcactactcaaacaagcaggtgacgtggaggagaatcccgggcctactagcatggccttaccagtgaccgccttgctcctgccgctggccttgctgctccacgccgccaggccggagatcgtgctgacacagtctcccgccacactgtcactgtctccaggcgaaagagccacactgagctgtagcgtgtccagcagcatcagcagcagcaacctgcactggtatcagcagaagcctggacaggcccctcggctgctgatctacgccacatctaatctggcctctggcatccccgccagattttctggctctggaagcggcaccgacttcaccctgaccataagcagcctggaacctgaggacttcgccgtgtactactgccagcagtggtccagctatccccacacatttggcggaggcaccaaggtggaaatcaagagaggcggaggcggaagtggaggcggaggatctggcggcggaggctctcaggttcagctggttcagagcggagccgaagtgaagaaacctggggcctctgtgaaggtgtcctgcaaggcttccggctacacctttaccaactacctgatcgagtgggtccgacaggctccaggacaaggactggaatggatgggcctgattaaccctggcagcggcggcaccaactacaacgagaagttcaagggcagagtgaccatgaccaccgacaccagcacaagcaccgcctacatggaactgcggagcctgagaagcgacgacaccgccgtgtattattgcgccagaagaagccctctcggctcttggatctactacgcctatgacggcgtggcctattggggccagggaacactggttacagtgtcctctacgcgtggacagcctaaggccaatcctaccgtgacactgttccctccaagcagcgaagaactccaggccaacaaggccacacttgtgtgcctgatctccgacttctaccctggggctgtgacagtggcttggaaggccgatggatctcctgtgaaagccggcgtggaaaccaccaagccatccaagcagagcaacaacaaatacgccgccagctcctacctgagcctgacacctgagcagtggaagtcccacagatcctacagctgccaagtgacccacgaaggcagcaccgtggaaaagacagtggcccctacagagtgcagcgaagtgaaaaccgactccaccgaccacgtgaagcccaaagagacagagaacaccaagcagcccagcaagagctgccacaagcccaaggccatcgtgcacaccgagaaagtgaacatgatgagcctgaccgtgctgggcctgcggatgctgttcgccaaaaccgtggccgtgaacttcctgctgaccgccaagctgttcttcctccgcgccaagagaagcggatctggcgtgaagcagaccctgaatttcgacctgctgaagctggctggcgacgtggaatccaacccaggcccttctagaggccatatgaccgagtacaagcccacggtgcgcctcgccacccgcgacgacgtccccagggccgtacgcaccctcgccgccgcgttcgccgactaccccgccacgcgccacaccgtcgatccggaccgccacatcgagcgggtcaccgagctgcaagaactcttcctcacgcgcgtcgggctcgacatcggcaaggtgtgggtcgcggacgacggcgccgcggtggcggtctggaccacgccggagagcgtcgaagcgggggcggtgttcgccgagatcggcccgcgcatggccgagttgagcggttcccggctggccgcgcagcaacagatggaaggcctcctggcgccgcaccggcccaaggagcccgcgtggttcctggccaccgtcggcgtctcgcccgaccaccagggcaagggtctgggcagcgccgtcgtgctccccggagtggaggcggccgagcgcgccggggtgcccgccttcctggagacctccgcgccccgcaacctccccttctacgagcggctcggcttcaccgtcaccgccgacgtcgaggtgcccgaaggaccgcgcacctggtgcatgacccgcaagcccggtgcctga

SEQ ID NO: 34932 - DNA, 2646 bp, synthetic construct
  source 1..2646: mol_type = other DNA
atggccttaccagtgaccgccttgctcctgccgctggccttgctgctccacgccgccaggccgctcgaggaggcctctacaaagggaccctccgtgtttcctctggctcccagcagcaagtctacaagcggaggaacagccgctctgggctgcctggtcaaggattactttcccgagcctgtgaccgtgtcctggaatagcggagcactgacaagcggcgtgcacacctttccagccgtgctgcaaagcagcggcctgtactctctgagcagcgtggtcacagtgcctagctctagcctgggcacccagacctacatctgcaatgtgaaccacaagcctagcaacaccaaggtggacaagagagtggaacccaagagctgtggcagagccgattgcggctttaccagcgagagctaccagcagggcgtgctgagcgccaccatcctgtacgagatcctgctgggcaaggccaccctgtacgccgtgctggtgtctgccctggtgctgatggctatggtcaagcggaaggacagccggggaagggccaagcgatctggatctggagcaacaaacttctcactactcaaacaagcaggtgacgtggaggagaatcccgggcctactagcatggccttaccagtgaccgccttgctcctgccgctggccttgctgctccacgccgccaggccggagatcgtgctgacacagtctcccgccacactgtcactgtctccaggcgaaagagccacactgagctgtagcgtgtccagcagcatcagcagcagcaacctgcactggtatcagcagaagcctggacaggcccctcggctgctgatctacgccacatctaatctggcctctggcatccccgccagattttctggctctggaagcggcaccgacttcaccctgaccataagcagcctggaacctgaggacttcgccgtgtactactgccagcagtggtccagctatccccacacatttggcggaggcaccaaggtggaaatcaagagaggcggaggcggaagtggaggcggaggatctggcggcggaggctctcaggttcagctggttcagagcggagccgaagtgaagaaacctggggcctctgtgaaggtgtcctgcaaggcttccggctacacctttaccaactacctgatcgagtgggtccgacaggctccaggacaaggactggaatggatgggcctgattaaccctggcagcggcggcaccaactacaacgagaagttcaagggcagagtgaccatgaccaccgacaccagcacaagcaccgcctacatggaactgcggagcctgagaagcgacgacaccgccgtgtattattgcgccagaagaagccctctcggctcttggatctactacgcctatgacggcgtggcctattggggccagggaacactggttacagtgtcctctacgcgtggacagcctaaggccaatcctaccgtgacactgttccctccaagcagcgaagaactccaggccaacaaggccacacttgtgtgcctgatctccgacttctaccctggggctgtgacagtggcttggaaggccgatggatctcctgtgaaagccggcgtggaaaccaccaagccatccaagcagagcaacaacaaatacgccgccagctcctacctgagcctgacacctgagcagtggaagtcccacagatcctacagctgccaagtgacccacgaaggcagcaccgtggaaaagacagtggcccctacagagtgcagcatccccgaggacacattcttcccaagccccgagagcagctgcgacgtgaagctggtggaaaagagcttcgagacagacaccaacctgaacttccagaacctgagcgtgatcggcttcagaatcctgctgctgaaagtggccggctttaacctgctgatgaccctgcggctgtggtccagccgcgccaagagaagcggatctggcgtgaagcagaccctgaatttcgacctgctgaagctggctggcgacgtggaatccaacccaggcccttctagaggccatatgaccgagtacaagcccacggtgcgcctcgccacccgcgacgacgtccccagggccgtacgcaccctcgccgccgcgttcgccgactaccccgccacgcgccacaccgtcgatccggaccgccacatcgagcgggtcaccgagctgcaagaactcttcctcacgcgcgtcgggctcgacatcggcaaggtgtgggtcgcggacgacggcgccgcggtggcggtctggaccacgccggagagcgtcgaagcgggggcggtgttcgccgagatcggcccgcgcatggccgagttgagcggttcccggctggccgcgcagcaacagatggaaggcctcctggcgccgcaccggcccaaggagcccgcgtggttcctggccaccgtcggcgtctcgcccgaccaccagggcaagggtctgggcagcgccgtcgtgctccccggagtggaggcggccgagcgcgccggggtgcccgccttcctggagacctccgcgccccgcaacctccccttctacgagcggctcggcttcaccgtcaccgccgacgtcgaggtgcccgaaggaccgcgcacctggtgcatgacccgcaagcccggtgcctga

SEQ ID NO: 34933 - DNA, 2646 bp, synthetic construct
  source 1..2646: mol_type = other DNA
atggccttaccagtgaccgccttgctcctgccgctggccttgctgctccacgccgccaggccgctcgaggaggcctctacaaagggaccctccgtgtttcctctggctcccagcagcaagtctacaagcggaggaacagccgctctgggctgcctggtcaaggattactttcccgagcctgtgaccgtgtcctggaatagcggagcactgacaagcggcgtgcacacctttccagccgtgctgcaaagcagcggcctgtactctctgagcagcgtggtcacagtgcctagctctagcctgggcacccagacctacatctgcaatgtgaaccacaagcctagcaacaccaaggtggacaagagagtggaacccaagagctgtatccccgaggacacattcttcccaagccccgagagcagctgcgacgtgaagctggtggaaaagagcttcgagacagacaccaacctgaacttccagaacctgagcgtgatcggcttcagaatcctgctgctgaaagtggccggctttaacctgctgatgaccctgcggctgtggtccagcagggccaagcgatctggatctggagcaacaaacttctcactactcaaacaagcaggtgacgtggaggagaatcccgggcctactagcatggccttaccagtgaccgccttgctcctgccgctggccttgctgctccacgccgccaggccggagatcgtgctgacacagtctcccgccacactgtcactgtctccaggcgaaagagccacactgagctgtagcgtgtccagcagcatcagcagcagcaacctgcactggtatcagcagaagcctggacaggcccctcggctgctgatctacgccacatctaatctggcctctggcatccccgccagattttctggctctggaagcggcaccgacttcaccctgaccataagcagcctggaacctgaggacttcgccgtgtactactgccagcagtggtccagctatccccacacatttggcggaggcaccaaggtggaaatcaagagaggcggaggcggaagtggaggcggaggatctggcggcggaggctctcaggttcagctggttcagagcggagccgaagtgaagaaacctggggcctctgtgaaggtgtcctgcaaggcttccggctacacctttaccaactacctgatcgagtgggtccgacaggctccaggacaaggactggaatggatgggcctgattaaccctggcagcggcggcaccaactacaacgagaagttcaagggcagagtgaccatgaccaccgacaccagcacaagcaccgcctacatggaactgcggagcctgagaagcgacgacaccgccgtgtattattgcgccagaagaagccctctcggctcttggatctactacgcctatgacggcgtggcctattggggccagggaacactggttacagtgtcctctacgcgtggacagcctaaggccaatcctaccgtgacactgttccctccaagcagcgaagaactccaggccaacaaggccacacttgtgtgcctgatctccgacttctaccctggggctgtgacagtggcttggaaggccgatggatctcctgtgaaagccggcgtggaaaccaccaagccatccaagcagagcaacaacaaatacgccgccagctcctacctgagcctgacacctgagcagtggaagtcccacagatcctacagctgccaagtgacccacgaaggcagcaccgtggaaaagacagtggcccctacagagtgcagcggcagagccgattgcggctttaccagcgagagctaccagcagggcgtgctgagcgccaccatcctgtacgagatcctgctgggcaaggccaccctgtacgccgtgctggtgtctgccctggtgctgatggctatggtcaagcggaaggacagccggggacgcgccaagagaagcggatctggcgtgaagcagaccctgaatttcgacctgctgaagctggctggcgacgtggaatccaacccaggcccttctagaggccatatgaccgagtacaagcccacggtgcgcctcgccacccgcgacgacgtccccagggccgtacgcaccctcgccgccgcgttcgccgactaccccgccacgcgccacaccgtcgatccggaccgccacatcgagcgggtcaccgagctgcaagaactcttcctcacgcgcgtcgggctcgacatcggcaaggtgtgggtcgcggacgacggcgccgcggtggcggtctggaccacgccggagagcgtcgaagcgggggcggtgttcgccgagatcggcccgcgcatggccgagttgagcggttcccggctggccgcgcagcaacagatggaaggcctcctggcgccgcaccggcccaaggagcccgcgtggttcctggccaccgtcggcgtctcgcccgaccaccagggcaagggtctgggcagcgccgtcgtgctccccggagtggaggcggccgagcgcgccggggtgcccgccttcctggagacctccgcgccccgcaacctccccttctacgagcggctcggcttcaccgtcaccgccgacgtcgaggtgcccgaaggaccgcgcacctggtgcatgacccgcaagcccggtgcctga

SEQ ID NO: 34934 - DNA, 1884 bp, synthetic construct
  source 1..1884: mol_type = other DNA
atggccttaccagtgaccgccttgctcctgccgctggccttgctgctccacgccgccaggccggagatcgtgctgacacagtctcccgccacactgtcactgtctccaggcgaaagagccacactgagctgtagcgtgtccagcagcatcagcagcagcaacctgcactggtatcagcagaagcctggacaggcccctcggctgctgatctacgccacatctaatctggcctctggcatccccgccagattttctggctctggaagcggcaccgacttcaccctgaccataagcagcctggaacctgaggacttcgccgtgtactactgccagcagtggtccagctatccccacacatttggcggaggcaccaaggtggaaatcaagagactcgaggacctgaagaacgtgttcccacctgaggtggccgtgttcgagcctagcgaggccgagatcagccacacccagaaagccaccctcgtgtgcctggctaccggcttctaccccgaccatgtggaactgtcttggtgggtcaacggcaaagaggtgcacagcggcgtgtgtaccgacccccagccactgaaagaacagcccgccctgaacgacagccggtactgcctgagcagcagactgagagtgtccgccaccttctggcagaacccccggaaccacttcagatgccaggtgcagttctacggcctgagcgagaacgacgagtggacccaggacagagccaagcccgtgacccagatcgtgtctgccgaagcctggggcagagccgatagcggctttaccagcgagagctaccagcagggcgtgctgagcgccaccatcctgtacgagatcctgctgggcaaggccaccctgtacgccgtgctggtgtctgccctggtgctgatggctatggtcaagcggaaggacagccggggaagggccaagcgatctggatctggagcaacaaacttctcactactcaaacaagcaggtgacgtggaggagaatcccgggcctactagtatggactggatttggcgcatccttttccttgtcggcgctgctaccggcgcgcattccttcgaacaggttcagctggttcagagcggagccgaagtgaagaaacctggggcctctgtgaaggtgtcctgcaaggcttccggctacacctttaccaactacctgatcgagtgggtccgacaggctccaggacaaggactggaatggatgggcctgattaaccctggcagcggcggcaccaactacaacgagaagttcaagggcagagtgaccatgaccaccgacaccagcacaagcaccgcctacatggaactgcggagcctgagaagcgacgacaccgccgtgtattattgcgccagaagaagccctctcggctcttggatctactacgcctatgacggcgtggcctattggggccagggaacactggttacagtgtcctctacgcgtatccagaaccctgatcctgccgtgtaccagctgcgggatagcaagagcagcgacaagagcgtgtgtctgttcaccgacttcgacagccagaccaacgtgtcccagagcaaggactccgacgtgtacatcaccgataagtgcgtgctggacatgcggagcatggacttcaagagcaactccgccgtggcctggtccaacaagtccgatttcgcctgcgccaacgccttcaacaacagcattatccccgaggacacattcttcccaagccccgagagcagcagcgacgtgaagctggtggaaaagagcttcgagacagacaccaacctgaacttccagaacctgagcgtgatcggcttcagaatcctgctgctgaaagtggccggctttaacctgctgatgaccctgcggctgtggtccagc

SEQ ID NO: 34935 - DNA, 2724 bp, synthetic construct
  source 1..2724: mol_type = other DNA
atggccttaccagtgaccgccttgctcctgccgctggccttgctgctccacgccgccaggccggaggttcagctgcttgagtctggcggaggactggttcaacctggcggaagcctgagactgtcttgtgccgcctctggcagaaccttcagcatgggctggtatagacaggcccctggcaagggcctcgaatttgtgtctgccatcacatacagcggcggcagcccttactacgccgattctgtgaagggcagattcaccatcagccgggacaacagcaagaacaccgtgtacctccagatgaacagcctgagagccgaggacaccgccgtgtactactgtgccgccaatccaacctacggcagcgactggaatgccgagaattggggccagggcacactggtcacagtgtctagtggtaccggcggaggcggatctggcggcggaggtagcggtggcggaggatctgaattcgagatcgtgctgacacagtctcccgccacactgtcactgtctccaggcgaaagagccacactgagctgtagcgtgtccagcagcatcagcagcagcaacctgcactggtatcagcagaagcctggacaggcccctcggctgctgatctacgccacatctaatctggcctctggcatccccgccagattttctggctctggaagcggcaccgacttcaccctgaccataagcagcctggaacctgaggacttcgccgtgtactactgccagcagtggtccagctatccccacacatttggcggaggcaccaaggtggaaatcaagagactcgagatccagaaccctgatcctgccgtgtaccagctgcgggatagcaagagcagcgacaagagcgtgtgtctgttcaccgacttcgacagccagaccaacgtgtcccagagcaaggactccgacgtgtacatcaccgataagtgcgtgctggacatgcggagcatggacttcaagagcaactccgccgtggcctggtccaacaagtccgatttcgcctgcgccaacgccttcaacaacagcattatccccgaggacacattcttcccaagcagcgacgtgccctgcgacgtgaagctggtggaaaagagcttcgagacagacaccaacctgaacttccagaacctgagcgtgatcggcttcagaatcctgctgctgaaagtggccggctttaacctgctgatgaccctgcggctgtggtccagccgcgccaagagaagcggatctggcgtgaagcagaccctgaatttcgacctgctgaagctggctggcgacgtggaatccaacccaggccctactagtaccatggactggatttggcgcatccttttccttgtcggcgctgctaccggcacccattccgggcccgaagtgcaactggttgaatccggtggcggcctggtgcaacccggcggatctctcagacttagctgtgccgcctccggcagaaccttcacaatgggatggtacaggcaggctccagggaaagagagagagttcgtcgccgccatctctctgtctcccacactggcctactacgccgactctgtgaaaggccggttcaccatctccagagataatagcaagaacaccgtggtgctgcaaatgaactctctgagagccgaggatacagccctgtactattgtgccgctgaccggaagtccgtgatgagcatcagacccgattactggggacagggcacactggtcacagtgtctagtggatccggcggcggaggatctggcggaggcggatctgggggcggaggctctttcgaacaggttcagctggttcagagcggagccgaagtgaagaaacctggggcctctgtgaaggtgtcctgcaaggcttccggctacacctttaccaactacctgatcgagtgggtccgacaggctccaggacaaggactggaatggatgggcctgattaaccctggcagcggcggcaccaactacaacgagaagttcaagggcagagtgaccatgaccaccgacaccagcacaagcaccgcctacatggaactgcggagcctgagaagcgacgacaccgccgtgtattattgcgccagaagaagccctctcggctcttggatctactacgcctatgacggcgtggcctattggggccagggaacactggttacagtgtcctctacgcgtgaggacctgaagaacgtgttcccacctgaggtggccgtgttcgagcctagcaaggccgagatcgcccacacccagaaagccaccctcgtgtgcctggctaccggcttctaccccgaccatgtggaactgtcttggtgggtcaacggcaaagaggtgcacagcggcgtgtgtaccgacccccagccactgaaagaacagcccgccctgaacgacagccggtactgcctgagcagcagactgagagtgtccgccaccttctggcagaacccccggaaccacttcagatgccaggtgcagttctacggcctgagcgagaacgacgagtggacccaggacagagccaagcccgtgacccagatcgtgtctgccgaagcctggggcagagccgattgcggcatcaccagcgccagctaccaccagggcgtgctgagcgccaccatcctgtacgagatcctgctgggcaaggccaccctgtacgccgtgctggtgtctgccctggtgctgatggctatggtcaagcggaaggacagccggggataa

SEQ ID NO: 34936 - DNA, 2724 bp, synthetic construct
  source 1..2724: mol_type = other DNA
atggccttaccagtgaccgccttgctcctgccgctggccttgctgctccacgccgccaggccggaagtgcagctggttgaatctggcggaggactggttcaggctggcggatctctgagactgtcttgtgccgccagcggcagaacctttagcatgggctggtttagacaggcccctggcaaagagagagagttcgtcgccgccatcacatactctggcggcagcccttactacgccgactctgtgaagggcagattcaccatcagccgggacaacgccaagaacaccgtgtacctccagatgaacagcctgaagcctgaggacaccgccgtgtactactgcgccgccaatccaacatacggcagcgactggaacgccgagaattggggccagggaacccaagtgacagtgtctagcggtaccggcggaggcggatctggcggcggaggtagcggtggcggaggatctgaattcgagatcgtgctgacacagtctcccgccacactgtcactgtctccaggcgaaagagccacactgagctgtagcgtgtccagcagcatcagcagcagcaacctgcactggtatcagcagaagcctggacaggcccctcggctgctgatctacgccacatctaatctggcctctggcatccccgccagattttctggctctggaagcggcaccgacttcaccctgaccataagcagcctggaacctgaggacttcgccgtgtactactgccagcagtggtccagctatccccacacatttggcggaggcaccaaggtggaaatcaagagactcgagatccagaaccctgatcctgccgtgtaccagctgcgggatagcaagagcagcgacaagagcgtgtgtctgttcaccgacttcgacagccagaccaacgtgtcccagagcaaggactccgacgtgtacatcaccgataagtgcgtgctggacatgcggagcatggacttcaagagcaactccgccgtggcctggtccaacaagtccgatttcgcctgcgccaacgccttcaacaacagcattatccccgaggacacattcttcccaagcagcgacgtgccctgcgacgtgaagctggtggaaaagagcttcgagacagacaccaacctgaacttccagaacctgagcgtgatcggcttcagaatcctgctgctgaaagtggccggctttaacctgctgatgaccctgcggctgtggtccagccgcgccaagagaagcggatctggcgtgaagcagaccctgaatttcgacctgctgaagctggctggcgacgtggaatccaacccaggccctactagtaccatggactggatttggcgcatccttttccttgtcggcgctgctaccggcgcccattccgggcccgaagtgcaactggttgaatccggtggcggcctggtgcaacccggcggatctctcagacttagctgtgccgcctccggcagaaccttcacaatgggatggtacaggcaggctccagggaaagagagagagttcgtcgccgccatctctctgtctcccacactggcctactacgccgactctgtgaaaggccggttcaccatctccagagataatagcaagaacaccgtggtgctgcaaatgaactctctgagagccgaggatacagccctgtactattgtgccgctgaccggaagtccgtgatgagcatcagacccgattactggggacagggcacactggtcacagtgtctagtggatccggcggcggaggatctggcggaggcggatctgggggcggaggctctttcgaacaggttcagctggttcagagcggagccgaagtgaagaaacctggggcctctgtgaaggtgtcctgcaaggcttccggctacacctttaccaactacctgatcgagtgggtccgacaggctccaggacaaggactggaatggatgggcctgattaaccctggcagcggcggcaccaactacaacgagaagttcaagggcagagtgaccatgaccaccgacaccagcacaagcaccgcctacatggaactgcggagcctgagaagcgacgacaccgccgtgtattattgcgccagaagaagccctctcggctcttggatctactacgcctatgacggcgtggcctattggggccagggaacactggttacagtgtcctctacgcgtgaggacctgaagaacgtgttcccacctgaggtggccgtgttcgagcctagcaaggccgagatcgcccacacccagaaagccaccctcgtgtgcctggctaccggcttctaccccgaccatgtggaactgtcttggtgggtcaacggcaaagaggtgcacagcggcgtgtgtaccgacccccagccactgaaagaacagcccgccctgaacgacagccggtactgcctgagcagcagactgagagtgtccgccaccttctggcagaacccccggaaccacttcagatgccaggtgcagttctacggcctgagcgagaacgacgagtggacccaggacagagccaagcccgtgacccagatcgtgtctgccgaagcctggggcagagccgattgcggcatcaccagcgccagctaccaccagggcgtgctgagcgccaccatcctgtacgagatcctgctgggcaaggccaccctgtacgccgtgctggtgtctgccctggtgctgatggctatggtcaagcggaaggacagccggggataa

SEQ ID NO: 34937 - DNA, 2715 bp, synthetic construct
  source 1..2715: mol_type = other DNA
atggccttaccagtgaccgccttgctcctgccgctggccttgctgctccacgccgccaggccggaagtgcagctggttgaatctggcggaggactggttcaggctggcggatctctgagactgtcttgtgccgccagcggcagaacctttagcatgggctggtttagacaggcccctggcaaagagagagagttcgtcgccgccatcacatactctggcggcagcccttactacgccgactctgtgaagggcagattcaccatcagccgggacaacgccaagaacaccgtgtacctccagatgaacagcctgaagcctgaggacaccgccgtgtactactgcgccgccaatccaacatacggcagcgactggaacgccgagaattggggccagggaacccaagtgacagtgtctagcggtaccggcggaggcggatctggcggcggaggtagcggtggcggaggatctgaattcgagatcgtgctgacacagtctcccgccacactgtcactgtctccaggcgaaagagccacactgagctgtagcgtgtccagcagcatcagcagcagcaacctgcactggtatcagcagaagcctggacaggcccctcggctgctgatctacgccacatctaatctggcctctggcatccccgccagattttctggctctggaagcggcaccgacttcaccctgaccataagcagcctggaacctgaggacttcgccgtgtactactgccagcagtggtccagctatccccacacatttggcggaggcaccaaggtggaaatcaagagactcgaggacctgaagaacgtgttcccacctgaggtggccgtgttcgagcctagcgaggccgagatcagccacacccagaaagccaccctcgtgtgcctggctaccggcttctaccccgaccatgtggaactgtcttggtgggtcaacggcaaagaggtgcacagcggcgtgtgtaccgacccccagccactgaaagaacagcccgccctgaacgacagccggtactgcctgagcagcagactgagagtgtccgccaccttctggcagaacccccggaaccacttcagatgccaggtgcagttctacggcctgagcgagaacgacgagtggacccaggacagagccaagcccgtgacccagatcgtgtctgccgaagcctggggcagagccgattgcggctttaccagcgagagctaccagcagggcgtgctgagcgccaccatcctgtacgagatcctgctgggcaaggccaccctgtacgccgtgctggtgtctgccctggtgctgatggctatggtcaagcggaaggacagccggggaagggccaagcgatctggatctggagcaacaaacttctcactactcaaacaagcaggtgacgtggaggagaatcccgggcctactagtgccaccatggactggatttggcgcatccttttccttgtcggcgctgctaccggcgcccattccgggcccgaagtgcaactggttgaatccggtggcggcctggtgcaagcaggcggatctctcagacttagctgtgccgcctccggcagaaccttcacaatgggatggtttaggcaggctccagggaaagagagagagttcgtcgccgccatctctctgtctcccacactggcctactacgccgactctgtgaaaggccggttcaccatctccagagataatgccaagaacaccgtggtgctgcaaatgaactctctgaaacccgaggatacagccctgtactattgtgccgctgaccggaagtccgtgatgagcatcagacccgattactggggacagggcacacaagtcacagtgtcctctggatccggcggcggaggatctggcggaggcggatctgggggcggaggctctttcgaacaggttcagctggttcagagcggagccgaagtgaagaaacctggggcctctgtgaaggtgtcctgcaaggcttccggctacacctttaccaactacctgatcgagtgggtccgacaggctccaggacaaggactggaatggatgggcctgattaaccctggcagcggcggcaccaactacaacgagaagttcaagggcagagtgaccatgaccaccgacaccagcacaagcaccgcctacatggaactgcggagcctgagaagcgacgacaccgccgtgtattattgcgccagaagaagccctctcggctcttggatctactacgcctatgacggcgtggcctattggggccagggaacactggttacagtgtcctctacgcgtatccagaaccctgatcctgccgtgtaccagctgcgggatagcaagagcagcgacaagagcgtgtgtctgttcaccgacttcgacagccagaccaacgtgtcccagagcaaggactccgacgtgtacatcaccgataagtgcgtgctggacatgcggagcatggacttcaagagcaactccgccgtggcctggtccaacaagtccgatttcgcctgcgccaacgccttcaacaacagcattatccccgaggacacattcttcccaagccccgagagcagctgcgacgtgaagctggtggaaaagagcttcgagacagacaccaacctgaacttccagaacctgagcgtgatcggcttcagaatcctgctgctgaaagtggccggctttaacctgctgatgaccctgcggctgtggtccagctaa

SEQ ID NO: 34938 - DNA, 2328 bp, synthetic construct
  source 1..2328: mol_type = other DNA
atggccttaccagtgaccgccttgctcctgccgctggccttgctgctccacgccgccaggccggaagtgcagctggttgaatctggcggaggactggttcagcctggcggatctctgagactgagctgtgaagccagcggcttcgccagcgacgattacatcatcggctggttcagacaggcccctggcaaagagagagagggcgtcagctgcatcagctctaagtacgccaacaccgtgtacaccgacagcgtgaagggcagattcagactgagcagaggcaccgccaagaataccgtgtacctccagatgagcgccctgaagcctgaggataccgccgtgtactactgcgctatggacagccgcagagtgacatgccctgagatcagcaccatgcaccggaacttcgattcttggggccagggcacactggtcacagtgtcatctggtaccggcggaggcggatctggcggcggaggtagcggtggcggaggatctgaattcgagatcgtgctgacacagtctcccgccacactgtcactgtctccaggcgaaagagccacactgagctgtagcgtgtccagcagcatcagcagcagcaacctgcactggtatcagcagaagcctggacaggcccctcggctgctgatctacgccacatctaatctggcctctggcatccccgccagattttctggctctggaagcggcaccgacttcaccctgaccataagcagcctggaacctgaggacttcgccgtgtactactgccagcagtggtccagctatccccacacatttggcggaggcaccaaggtggaaatcaagagactcgaggacctgaagaacgtgttcccacctgaggtggccgtgttcgagcctagcaaggccgagatcgcccacacccagaaagccaccctcgtgtgcctggctaccggcttctaccccgaccatgtggaactgtcttggtgggtcaacggcaaagaggtgcacagcggcgtgtgtaccgacccccagccactgaaagaacagcccgccctgaacgacagccggtactgcctgagcagcagactgagagtgtccgccaccttctggcagaacccccggaaccacttcagatgccaggtgcagttctacggcctgagcgagaacgacgagtggacccaggacagagccaagcccgtgacccagatcgtgtctgccgaagcctggggcagagccgattgcggcatcaccagcgccagctaccaccagggcgtgctgagcgccaccatcctgtacgagatcctgctgggcaaggccaccctgtacgccgtgctggtgtctgccctggtgctgatggctatggtcaagcggaaggacagccggggaagggccaagcgatctggatctggagcaacaaacttctcactactcaaacaagcaggtgacgtggaggagaatcccgggcctactagtatggactggatttggcgcatccttttccttgtcggcgctgctaccggcgcgcattccttcgaacaggttcagctggttcagagcggagccgaagtgaagaaacctggggcctctgtgaaggtgtcctgcaaggcttccggctacacctttaccaactacctgatcgagtgggtccgacaggctccaggacaaggactggaatggatgggcctgattaaccctggcagcggcggcaccaactacaacgagaagttcaagggcagagtgaccatgaccaccgacaccagcacaagcaccgcctacatggaactgcggagcctgagaagcgacgacaccgccgtgtattattgcgccagaagaagccctctcggctcttggatctactacgcctatgacggcgtggcctattggggccagggaacactggttacagtgtcctctacgcgtatccagaaccctgatcctgccgtgtaccagctgcgggatagcaagagcagcgacaagagcgtgtgtctgttcaccgacttcgacagccagaccaacgtgtcccagagcaaggactccgacgtgtacatcaccgataagtgcgtgctggacatgcggagcatggacttcaagagcaactccgccgtggcctggtccaacaagtccgatttcgcctgcgccaacgccttcaacaacagcattatccccgaggacacattcttcccaagcagcgacgtgccctgcgacgtgaagctggtggaaaagagcttcgagacagacaccaacctgaacttccagaacctgagcgtgatcggcttcagaatcctgctgctgaaagtggccggctttaacctgctgatgaccctgcggctgtggtccagctaa

SEQ ID NO: 34939 - DNA, 2301 bp, synthetic construct
  source 1..2301: mol_type = other DNA
atggccttaccagtgaccgccttgctcctgccgctggccttgctgctccacgccgccaggccggagatcgtgctgacacagtctcccgccacactgtcactgtctccaggcgaaagagccacactgagctgtagcgtgtccagcagcatcagcagcagcaacctgcactggtatcagcagaagcctggacaggcccctcggctgctgatctacgccacatctaatctggcctctggcatccccgccagattttctggctctggaagcggcaccgacttcaccctgaccataagcagcctggaacctgaggacttcgccgtgtactactgccagcagtggtccagctatccccacacatttggcggaggcaccaaggtggaaatcaagagactcgaggacctgaagaacgtgttcccacctgaggtggccgtgttcgagcctagcgaggccgagatcagccacacccagaaagccaccctcgtgtgcctggctaccggcttctaccccgaccatgtggaactgtcttggtgggtcaacggcaaagaggtgcacagcggcgtgtgtaccgacccccagccactgaaagaacagcccgccctgaacgacagccggtactgcctgagcagcagactgagagtgtccgccaccttctggcagaacccccggaaccacttcagatgccaggtgcagttctacggcctgagcgagaacgacgagtggacccaggacagagccaagcccgtgacccagatcgtgtctgccgaagcctggggcagagccgattgcggctttaccagcgagagctaccagcagggcgtgctgagcgccaccatcctgtacgagatcctgctgggcaaggccaccctgtacgccgtgctggtgtctgccctggtgctgatggctatggtcaagcggaaggacagccggggaagggccaagcgatctggatctggagcaacaaacttctcactactcaaacaagcaggtgacgtggaggagaatcccgggcctactagtaccatggactggatttggcgcatccttttccttgtcggcgctgctaccggcgcccattccgggcccgaagtgcaactggttgaatccggtggcggcctggtgcaacccggcggatctctcagacttagctgtgccgcctccggcagaaccttcacaatgggatggtacaggcaggctccagggaaagagagagagttcgtcgccgccatctctctgtctcccacactggcctactacgccgactctgtgaaaggccggttcaccatctccagagataatagcaagaacaccgtggtgctgcaaatgaactctctgagagccgaggatacagccctgtactattgtgccgctgaccggaagtccgtgatgagcatcagacccgattactggggacagggcacactggtcacagtgtctagtggatccggcggcggaggatctggcggaggcggatctgggggcggaggctctttcgaacaggttcagctggttcagagcggagccgaagtgaagaaacctggggcctctgtgaaggtgtcctgcaaggcttccggctacacctttaccaactacctgatcgagtgggtccgacaggctccaggacaaggactggaatggatgggcctgattaaccctggcagcggcggcaccaactacaacgagaagttcaagggcagagtgaccatgaccaccgacaccagcacaagcaccgcctacatggaactgcggagcctgagaagcgacgacaccgccgtgtattattgcgccagaagaagccctctcggctcttggatctactacgcctatgacggcgtggcctattggggccagggaacactggttacagtgtcctctacgcgtatccagaaccctgatcctgccgtgtaccagctgcgggatagcaagagcagcgacaagagcgtgtgtctgttcaccgacttcgacagccagaccaacgtgtcccagagcaaggactccgacgtgtacatcaccgataagtgcgtgctggacatgcggagcatggacttcaagagcaactccgccgtggcctggtccaacaagtccgatttcgcctgcgccaacgccttcaacaacagcattatccccgaggacacattcttcccaagccccgagagcagctgcgacgtgaagctggtggaaaagagcttcgagacagacaccaacctgaacttccagaacctgagcgtgatcggcttcagaatcctgctgctgaaagtggccggctttaacctgctgatgaccctgcggctgtggtccagctaa

SEQ ID NO: 34940 - DNA, 2319 bp, synthetic construct
  source 1..2319: mol_type = other DNA
atggccttaccagtgaccgccttgctcctgccgctggccttgctgctccacgccgccaggccggagatcgtgctgacacagtctcccgccacactgtcactgtctccaggcgaaagagccacactgagctgtagcgtgtccagcagcatcagcagcagcaacctgcactggtatcagcagaagcctggacaggcccctcggctgctgatctacgccacatctaatctggcctctggcatccccgccagattttctggctctggaagcggcaccgacttcaccctgaccataagcagcctggaacctgaggacttcgccgtgtactactgccagcagtggtccagctatccccacacatttggcggaggcaccaaggtggaaatcaagagactcgaggacctgaagaacgtgttcccacctgaggtggccgtgttcgagcctagcgaggccgagatcagccacacccagaaagccaccctcgtgtgcctggctaccggcttctaccccgaccatgtggaactgtcttggtgggtcaacggcaaagaggtgcacagcggcgtgtgtaccgacccccagccactgaaagaacagcccgccctgaacgacagccggtactgcctgagcagcagactgagagtgtccgccaccttctggcagaacccccggaaccacttcagatgccaggtgcagttctacggcctgagcgagaacgacgagtggacccaggacagagccaagcccgtgacccagatcgtgtctgccgaagcctggggcagagccgattgcggctttaccagcgagagctaccagcagggcgtgctgagcgccaccatcctgtacgagatcctgctgggcaaggccaccctgtacgccgtgctggtgtctgccctggtgctgatggctatggtcaagcggaaggacagccggggaagggccaagcgatctggatctggagcaacaaacttctcactactcaaacaagcaggtgacgtggaggagaatcccgggcctactagtaccatggactggatttggcgcatccttttccttgtcggcgctgctaccggcgcccattccgggccccaggtgcagctggttgaatctggcggaggactggttcagcctggcggatctctgagactgtcttgtgccgccagcggcaacatcaacagcagaaactgcatgggctggttcagacaggcccctggcaagggaagagaaggcgtggcagctatcggccaagtgaccggcagaacctactacgtggacagcgtgaagggcagattcaccatcagcctggacaacagcaagaacaccctgtacctccagatgaacagcctgagagccgaggacaccgccgtgtactattgtgctgctgcccctggctgtctgctgtctgcacttagaagcgccgactacagaaactggggccagggcacactggtcaccgtttcttctggatccggcggcggaggatctggcggaggcggatctgggggcggaggctctttcgaacaggttcagctggttcagagcggagccgaagtgaagaaacctggggcctctgtgaaggtgtcctgcaaggcttccggctacacctttaccaactacctgatcgagtgggtccgacaggctccaggacaaggactggaatggatgggcctgattaaccctggcagcggcggcaccaactacaacgagaagttcaagggcagagtgaccatgaccaccgacaccagcacaagcaccgcctacatggaactgcggagcctgagaagcgacgacaccgccgtgtattattgcgccagaagaagccctctcggctcttggatctactacgcctatgacggcgtggcctattggggccagggaacactggttacagtgtcctctacgcgtatccagaaccctgatcctgccgtgtaccagctgcgggatagcaagagcagcgacaagagcgtgtgtctgttcaccgacttcgacagccagaccaacgtgtcccagagcaaggactccgacgtgtacatcaccgataagtgcgtgctggacatgcggagcatggacttcaagagcaactccgccgtggcctggtccaacaagtccgatttcgcctgcgccaacgccttcaacaacagcattatccccgaggacacattcttcccaagccccgagagcagctgcgacgtgaagctggtggaaaagagcttcgagacagacaccaacctgaacttccagaacctgagcgtgatcggcttcagaatcctgctgctgaaagtggccggctttaacctgctgatgaccctgcggctgtggtccagc

SEQ ID NO: 34941 - DNA, 2322 bp, synthetic construct
  source 1..2322: mol_type = other DNA
atggccttaccagtgaccgccttgctcctgccgctggccttgctgctccacgccgccaggccggagatcgtgctgacacagtctcccgccacactgtcactgtctccaggcgaaagagccacactgagctgtagcgtgtccagcagcatcagcagcagcaacctgcactggtatcagcagaagcctggacaggcccctcggctgctgatctacgccacatctaatctggcctctggcatccccgccagattttctggctctggaagcggcaccgacttcaccctgaccataagcagcctggaacctgaggacttcgccgtgtactactgccagcagtggtccagctatccccacacatttggcggaggcaccaaggtggaaatcaagagactcgaggacctgaagaacgtgttcccacctgaggtggccgtgttcgagcctagcgaggccgagatcagccacacccagaaagccaccctcgtgtgcctggctaccggcttctaccccgaccatgtggaactgtcttggtgggtcaacggcaaagaggtgcacagcggcgtgtgtaccgacccccagccactgaaagaacagcccgccctgaacgacagccggtactgcctgagcagcagactgagagtgtccgccaccttctggcagaacccccggaaccacttcagatgccaggtgcagttctacggcctgagcgagaacgacgagtggacccaggacagagccaagcccgtgacccagatcgtgtctgccgaagcctggggcagagccgattgcggctttaccagcgagagctaccagcagggcgtgctgagcgccaccatcctgtacgagatcctgctgggcaaggccaccctgtacgccgtgctggtgtctgccctggtgctgatggctatggtcaagcggaaggacagccggggaagggccaagcgatctggatctggagcaacaaacttctcactactcaaacaagcaggtgacgtggaggagaatcccgggcctactagtaccatggactggatttggcgcatccttttccttgtcggcgctgctaccggcgcccattccgggccccaggtgcagctggttgaatctggcggaggatctgttcaggctggcggctctctgagactgtcttgtggcgcttccggcaacatcagcagcagaaactgcatgggctggttcagacaggcccctggcaaagagagagaaggcgttgccgccatcggacaagtgaccggcagatcctactacgtggacagcgtgaagggcagattcaccatcagcctggacaacgccaagaacaccctgtacctccagatgaacacactgaagcccgaggacaccgccatgtactactgtgctgctgcccctggctgtctgctgtctgcacttagaagcgccgactacagaaactggggccagggaacccaagtgacagtgtctagtggatccggcggcggaggatctggcggaggcggatctgggggcggaggctctttcgaacaggttcagctggttcagagcggagccgaagtgaagaaacctggggcctctgtgaaggtgtcctgcaaggcttccggctacacctttaccaactacctgatcgagtgggtccgacaggctccaggacaaggactggaatggatgggcctgattaaccctggcagcggcggcaccaactacaacgagaagttcaagggcagagtgaccatgaccaccgacaccagcacaagcaccgcctacatggaactgcggagcctgagaagcgacgacaccgccgtgtattattgcgccagaagaagccctctcggctcttggatctactacgcctatgacggcgtggcctattggggccagggaacactggttacagtgtcctctacgcgtatccagaaccctgatcctgccgtgtaccagctgcgggatagcaagagcagcgacaagagcgtgtgtctgttcaccgacttcgacagccagaccaacgtgtcccagagcaaggactccgacgtgtacatcaccgataagtgcgtgctggacatgcggagcatggacttcaagagcaactccgccgtggcctggtccaacaagtccgatttcgcctgcgccaacgccttcaacaacagcattatccccgaggacacattcttcccaagccccgagagcagctgcgacgtgaagctggtggaaaagagcttcgagacagacaccaacctgaacttccagaacctgagcgtgatcggcttcagaatcctgctgctgaaagtggccggctttaacctgctgatgaccctgcggctgtggtccagctaa

SEQ ID NO: 34942 - DNA, 2745 bp, synthetic construct
  source 1..2745: mol_type = other DNA
atggccttaccagtgaccgccttgctcctgccgctggccttgctgctccacgccgccaggccggaagtgcagctggttgaatctggcggaggactggttcaggctggcggatctctgagactgtcttgtgccgccagcggcagaacctttagcatgggctggtttagacaggcccctggcaaagagagagagttcgtcgccgccatcacatactctggcggcagcccttactacgccgactctgtgaagggcagattcaccatcagccgggacaacgccaagaacaccgtgtacctccagatgaacagcctgaagcctgaggacaccgccgtgtactactgcgccgccaatccaacatacggcagcgactggaacgccgagaattggggccagggaacccaagtgacagtgtctagcggtaccggcggaggcggatctggcggcggaggtagcggtggcggaggatctgaattcgagatcgtgctgacacagtctcccgccacactgtcactgtctccaggcgaaagagccacactgagctgtagcgtgtccagcagcatcagcagcagcaacctgcactggtatcagcagaagcctggacaggcccctcggctgctgatctacgccacatctaatctggcctctggcatccccgccagattttctggctctggaagcggcaccgacttcaccctgaccataagcagcctggaacctgaggacttcgccgtgtactactgccagcagtggtccagctatccccacacatttggcggaggcaccaaggtggaaatcaagagactcgagatccagaaccctgatcctgccgtgtaccagctgcgggatagcaagagcagcgacaagagcgtgtgtctgttcaccgacttcgacagccagaccaacgtgtcccagagcaaggactccgacgtgtacatcaccgataagtgcgtgctggacatgcggagcatggacttcaagagcaactccgccgtggcctggtccaacaagtccgatttcgcctgcgccaacgccttcaacaacagcattatccccgaggacacattcttcccaagcagcgacgtgccctgcgacgtgaagctggtggaaaagagcttcgagacagacaccaacctgaacttccagaacctgagcgtgatcggcttcagaatcctgctgctgaaagtggccggctttaacctgctgatgaccctgcggctgtggtccagccgcgccaagagaagcggatctggcgtgaagcagaccctgaatttcgacctgctgaagctggctggcgacgtggaatccaacccaggccctactagtaccatggactggatttggcgcatccttttccttgtcggcgctgctaccggcgcccattccgggccccaggtgcagctggttgaatctggcggaggatctgttcaggctggcggctctctgagactgtcttgtggcgcttccggcaacatcagcagcagaaactgcatgggctggttcagacaggcccctggcaaagagagagaaggcgttgccgccatcggacaagtgaccggcagatcctactacgtggacagcgtgaagggcagattcaccatcagcctggacaacgccaagaacaccctgtacctccagatgaacacactgaagcccgaggacaccgccatgtactactgtgctgctgcccctggctgtctgctgtctgcacttagaagcgccgactacagaaactggggccagggaacccaagtgacagtgtctagtggatccggcggcggaggatctggcggaggcggatctgggggcggaggctctttcgaacaggttcagctggttcagagcggagccgaagtgaagaaacctggggcctctgtgaaggtgtcctgcaaggcttccggctacacctttaccaactacctgatcgagtgggtccgacaggctccaggacaaggactggaatggatgggcctgattaaccctggcagcggcggcaccaactacaacgagaagttcaagggcagagtgaccatgaccaccgacaccagcacaagcaccgcctacatggaactgcggagcctgagaagcgacgacaccgccgtgtattattgcgccagaagaagccctctcggctcttggatctactacgcctatgacggcgtggcctattggggccagggaacactggttacagtgtcctctacgcgtgaggacctgaagaacgtgttcccacctgaggtggccgtgttcgagcctagcaaggccgagatcgcccacacccagaaagccaccctcgtgtgcctggctaccggcttctaccccgaccatgtggaactgtcttggtgggtcaacggcaaagaggtgcacagcggcgtgtgtaccgacccccagccactgaaagaacagcccgccctgaacgacagccggtactgcctgagcagcagactgagagtgtccgccaccttctggcagaacccccggaaccacttcagatgccaggtgcagttctacggcctgagcgagaacgacgagtggacccaggacagagccaagcccgtgacccagatcgtgtctgccgaagcctggggcagagccgattgcggcatcaccagcgccagctaccaccagggcgtgctgagcgccaccatcctgtacgagatcctgctgggcaaggccaccctgtacgccgtgctggtgtctgccctggtgctgatggctatggtcaagcggaaggacagccggggataa

SEQ ID NO: 34943 - DNA, 2736 bp, synthetic construct
  source 1..2736: mol_type = other DNA
atggccttaccagtgaccgccttgctcctgccgctggccttgctgctccacgccgccaggccgcaggtgcagctggttgaatctggcggaggatctgttcaggctggcggctctctgagactgtcttgtggcgcttccggcaacatcagcagcagaaactgcatgggctggttcagacaggcccctggcaaagagagagaaggcgttgccgccatcggacaagtgaccggcagatcctactacgtggacagcgtgaagggcagattcaccatcagcctggacaacgccaagaacaccctgtacctccagatgaacacactgaagcccgaggacaccgccatgtactactgtgctgctgcccctggctgtctgctgtctgcacttagaagcgccgactacagaaactggggccagggaacccaagtgacagtgtctagtggtaccggcggaggcggatctggcggcggaggtagcggtggcggaggatctgaattcgagatcgtgctgacacagtctcccgccacactgtcactgtctccaggcgaaagagccacactgagctgtagcgtgtccagcagcatcagcagcagcaacctgcactggtatcagcagaagcctggacaggcccctcggctgctgatctacgccacatctaatctggcctctggcatccccgccagattttctggctctggaagcggcaccgacttcaccctgaccataagcagcctggaacctgaggacttcgccgtgtactactgccagcagtggtccagctatccccacacatttggcggaggcaccaaggtggaaatcaagagactcgaggacctgaagaacgtgttcccacctgaggtggccgtgttcgagcctagcgaggccgagatcagccacacccagaaagccaccctcgtgtgcctggctaccggcttctaccccgaccatgtggaactgtcttggtgggtcaacggcaaagaggtgcacagcggcgtgtgtaccgacccccagccactgaaagaacagcccgccctgaacgacagccggtactgcctgagcagcagactgagagtgtccgccaccttctggcagaacccccggaaccacttcagatgccaggtgcagttctacggcctgagcgagaacgacgagtggacccaggacagagccaagcccgtgacccagatcgtgtctgccgaagcctggggcagagccgattgcggctttaccagcgagagctaccagcagggcgtgctgagcgccaccatcctgtacgagatcctgctgggcaaggccaccctgtacgccgtgctggtgtctgccctggtgctgatggctatggtcaagcggaaggacagccggggaagggccaagcgatctggatctggagcaacaaacttctcactactcaaacaagcaggtgacgtggaggagaatcccgggcctactagtgccaccatggactggatttggcgcatccttttccttgtcggcgctgctaccggcgcccattccgggcccgaagtgcaactggttgaatccggtggcggcctggtgcaagcaggcggatctctcagacttagctgtgccgcctccggcagaaccttcacaatgggatggtttaggcaggctccagggaaagagagagagttcgtcgccgccatctctctgtctcccacactggcctactacgccgactctgtgaaaggccggttcaccatctccagagataatgccaagaacaccgtggtgctgcaaatgaactctctgaaacccgaggatacagccctgtactattgtgccgctgaccggaagtccgtgatgagcatcagacccgattactggggacagggcacacaagtcacagtgtcctctggatccggcggcggaggatctggcggaggcggatctgggggcggaggctctttcgaacaggttcagctggttcagagcggagccgaagtgaagaaacctggggcctctgtgaaggtgtcctgcaaggcttccggctacacctttaccaactacctgatcgagtgggtccgacaggctccaggacaaggactggaatggatgggcctgattaaccctggcagcggcggcaccaactacaacgagaagttcaagggcagagtgaccatgaccaccgacaccagcacaagcaccgcctacatggaactgcggagcctgagaagcgacgacaccgccgtgtattattgcgccagaagaagccctctcggctcttggatctactacgcctatgacggcgtggcctattggggccagggaacactggttacagtgtcctctacgcgtatccagaaccctgatcctgccgtgtaccagctgcgggatagcaagagcagcgacaagagcgtgtgtctgttcaccgacttcgacagccagaccaacgtgtcccagagcaaggactccgacgtgtacatcaccgataagtgcgtgctggacatgcggagcatggacttcaagagcaactccgccgtggcctggtccaacaagtccgatttcgcctgcgccaacgccttcaacaacagcattatccccgaggacacattcttcccaagccccgagagcagctgcgacgtgaagctggtggaaaagagcttcgagacagacaccaacctgaacttccagaacctgagcgtgatcggcttcagaatcctgctgctgaaagtggccggctttaacctgctgatgaccctgcggctgtggtccagctaa

SEQ ID NO: 34944 - DNA, 2325 bp, synthetic construct
  source 1..2325: mol_type = other DNA
atggccttaccagtgaccgccttgctcctgccgctggccttgctgctccacgccgccaggccgcaggtgcagctggttgaatctggcggaggatctgttcaggctggcggctctctgagactgtcttgtggcgcttccggcaacatcagcagcagaaactgcatgggctggttcagacaggcccctggcaaagagagagaaggcgttgccgccatcggacaagtgaccggcagatcctactacgtggacagcgtgaagggcagattcaccatcagcctggacaacgccaagaacaccctgtacctccagatgaacacactgaagcccgaggacaccgccatgtactactgtgctgctgcccctggctgtctgctgtctgcacttagaagcgccgactacagaaactggggccagggaacccaagtgacagtgtctagtggtaccggcggaggcggatctggcggcggaggtagcggtggcggaggatctgaattcgagatcgtgctgacacagtctcccgccacactgtcactgtctccaggcgaaagagccacactgagctgtagcgtgtccagcagcatcagcagcagcaacctgcactggtatcagcagaagcctggacaggcccctcggctgctgatctacgccacatctaatctggcctctggcatccccgccagattttctggctctggaagcggcaccgacttcaccctgaccataagcagcctggaacctgaggacttcgccgtgtactactgccagcagtggtccagctatccccacacatttggcggaggcaccaaggtggaaatcaagagactcgaggacctgaagaacgtgttcccacctgaggtggccgtgttcgagcctagcgaggccgagatcagccacacccagaaagccaccctcgtgtgcctggctaccggcttctaccccgaccatgtggaactgtcttggtgggtcaacggcaaagaggtgcacagcggcgtgtgtaccgacccccagccactgaaagaacagcccgccctgaacgacagccggtactgcctgagcagcagactgagagtgtccgccaccttctggcagaacccccggaaccacttcagatgccaggtgcagttctacggcctgagcgagaacgacgagtggacccaggacagagccaagcccgtgacccagatcgtgtctgccgaagcctggggcagagccgattgcggctttaccagcgagagctaccagcagggcgtgctgagcgccaccatcctgtacgagatcctgctgggcaaggccaccctgtacgccgtgctggtgtctgccctggtgctgatggctatggtcaagcggaaggacagccggggaagggccaagcgatctggatctggagcaacaaacttctcactactcaaacaagcaggtgacgtggaggagaatcccgggcctactagtgccaccatggactggatttggcgcatccttttccttgtcggcgctgctaccggcgcccattccttcgaacaggttcagctggttcagagcggagccgaagtgaagaaacctggggcctctgtgaaggtgtcctgcaaggcttccggctacacctttaccaactacctgatcgagtgggtccgacaggctccaggacaaggactggaatggatgggcctgattaaccctggcagcggcggcaccaactacaacgagaagttcaagggcagagtgaccatgaccaccgacaccagcacaagcaccgcctacatggaactgcggagcctgagaagcgacgacaccgccgtgtattattgcgccagaagaagccctctcggctcttggatctactacgcctatgacggcgtggcctattggggccagggaacactggttacagtgtcctctacgcgtatccagaaccctgatcctgccgtgtaccagctgcgggatagcaagagcagcgacaagagcgtgtgtctgttcaccgacttcgacagccagaccaacgtgtcccagagcaaggactccgacgtgtacatcaccgataagtgcgtgctggacatgcggagcatggacttcaagagcaactccgccgtggcctggtccaacaagtccgatttcgcctgcgccaacgccttcaacaacagcattatccccgaggacacattcttcccaagccccgagagcagctgcgacgtgaagctggtggaaaagagcttcgagacagacaccaacctgaacttccagaacctgagcgtgatcggcttcagaatcctgctgctgaaagtggccggctttaacctgctgatgaccctgcggctgtggtccagctaa

SEQ ID NO: 34945 - DNA, 2325 bp, synthetic construct
  source 1..2325: mol_type = other DNA
atggccttaccagtgaccgccttgctcctgccgctggccttgctgctccacgccgccaggccgcaagttcagctggtggaaagcggtggtggcgttgtgcaacctggtggaagtctgaggctgagctgtgccgcttctggcctgagctttagcacctacactgtggcctggttcaggcaggctcccggaaagggtcttgaaggcgtggccgccattccttacaccagccagcacatggtgtacacagacagcgtcagaggccggttcaccatcagcagagacaactccaagaatacgctctatctccagatgaactctctgcgcgccgaagatacagccgtgtattactgcgccaccgacagacggcctggcacctctatgctggctatcaacggctacaacagatggggacagggaaccaccgtgaccgtgtcatctggtaccggcggaggcggatctggcggcggaggtagcggtggcggaggatctgaattcgagatcgtgctgacacagtctcccgccacactgtcactgtctccaggcgaaagagccacactgagctgtagcgtgtccagcagcatcagcagcagcaacctgcactggtatcagcagaagcctggacaggcccctcggctgctgatctacgccacatctaatctggcctctggcatccccgccagattttctggctctggaagcggcaccgacttcaccctgaccataagcagcctggaacctgaggacttcgccgtgtactactgccagcagtggtccagctatccccacacatttggcggaggcaccaaggtggaaatcaagagactcgaggacctgaagaacgtgttcccacctgaggtggccgtgttcgagcctagcgaggccgagatcagccacacccagaaagccaccctcgtgtgcctggctaccggcttctaccccgaccatgtggaactgtcttggtgggtcaacggcaaagaggtgcacagcggcgtgtgtaccgacccccagccactgaaagaacagcccgccctgaacgacagccggtactgcctgagcagcagactgagagtgtccgccaccttctggcagaacccccggaaccacttcagatgccaggtgcagttctacggcctgagcgagaacgacgagtggacccaggacagagccaagcccgtgacccagatcgtgtctgccgaagcctggggcagagccgattgcggctttaccagcgagagctaccagcagggcgtgctgagcgccaccatcctgtacgagatcctgctgggcaaggccaccctgtacgccgtgctggtgtctgccctggtgctgatggctatggtcaagcggaaggacagccggggaagggccaagcgatctggatctggagcaacaaacttctcactactcaaacaagcaggtgacgtggaggagaatcccgggcctactagtgccaccatggactggatttggcgcatccttttccttgtcggcgctgctaccggcgcccattccttcgaacaggttcagctggttcagagcggagccgaagtgaagaaacctggggcctctgtgaaggtgtcctgcaaggcttccggctacacctttaccaactacctgatcgagtgggtccgacaggctccaggacaaggactggaatggatgggcctgattaaccctggcagcggcggcaccaactacaacgagaagttcaagggcagagtgaccatgaccaccgacaccagcacaagcaccgcctacatggaactgcggagcctgagaagcgacgacaccgccgtgtattattgcgccagaagaagccctctcggctcttggatctactacgcctatgacggcgtggcctattggggccagggaacactggttacagtgtcctctacgcgtatccagaaccctgatcctgccgtgtaccagctgcgggatagcaagagcagcgacaagagcgtgtgtctgttcaccgacttcgacagccagaccaacgtgtcccagagcaaggactccgacgtgtacatcaccgataagtgcgtgctggacatgcggagcatggacttcaagagcaactccgccgtggcctggtccaacaagtccgatttcgcctgcgccaacgccttcaacaacagcattatccccgaggacacattcttcccaagccccgagagcagctgcgacgtgaagctggtggaaaagagcttcgagacagacaccaacctgaacttccagaacctgagcgtgatcggcttcagaatcctgctgctgaaagtggccggctttaacctgctgatgaccctgcggctgtggtccagctaa

SEQ ID NO: 34946 - DNA, 2322 bp, synthetic construct
  source 1..2322: mol_type = other DNA
atggccttaccagtgaccgccttgctcctgccgctggccttgctgctccacgccgccaggccggagatcgtgctgacacagtctcccgccacactgtcactgtctccaggcgaaagagccacactgagctgtagcgtgtccagcagcatcagcagcagcaacctgcactggtatcagcagaagcctggacaggcccctcggctgctgatctacgccacatctaatctggcctctggcatccccgccagattttctggctctggaagcggcaccgacttcaccctgaccataagcagcctggaacctgaggacttcgccgtgtactactgccagcagtggtccagctatccccacacatttggcggaggcaccaaggtggaaatcaagagactcgaggacctgaagaacgtgttcccacctgaggtggccgtgttcgagcctagcgaggccgagatcagccacacccagaaagccaccctcgtgtgcctggctaccggcttctaccccgaccatgtggaactgtcttggtgggtcaacggcaaagaggtgcacagcggcgtgtgtaccgacccccagccactgaaagaacagcccgccctgaacgacagccggtactgcctgagcagcagactgagagtgtccgccaccttctggcagaacccccggaaccacttcagatgccaggtgcagttctacggcctgagcgagaacgacgagtggacccaggacagagccaagcccgtgacccagatcgtgtctgccgaagcctggggcagagccgattgcggctttaccagcgagagctaccagcagggcgtgctgagcgccaccatcctgtacgagatcctgctgggcaaggccaccctgtacgccgtgctggtgtctgccctggtgctgatggctatggtcaagcggaaggacagccggggaagggccaagcgatctggatctggagcaacaaacttctcactactcaaacaagcaggtgacgtggaggagaatcccgggcctactagtaccatggactggatttggcgcatccttttccttgtcggcgctgctaccggcgcccattccgggccccaagttcagctggtggaaagcggtggtggcgttgtgcaacctggtggaagtctgaggctgagctgtgccgcttctggcctgagctttagcacctacactgtggcctggttcaggcaggctcccggaaagggtcttgaaggcgtggccgccattccttacaccagccagcacatggtgtacacagacagcgtcagaggccggttcaccatcagcagagacaactccaagaatacgctctatctccagatgaactctctgcgcgccgaagatacagccgtgtattactgcgccaccgacagacggcctggcacctctatgctggctatcaacggctacaacagatggggacagggaaccaccgtgaccgtgtcatctggatccggcggcggaggatctggcggaggcggatctgggggcggaggctctttcgaacaggttcagctggttcagagcggagccgaagtgaagaaacctggggcctctgtgaaggtgtcctgcaaggcttccggctacacctttaccaactacctgatcgagtgggtccgacaggctccaggacaaggactggaatggatgggcctgattaaccctggcagcggcggcaccaactacaacgagaagttcaagggcagagtgaccatgaccaccgacaccagcacaagcaccgcctacatggaactgcggagcctgagaagcgacgacaccgccgtgtattattgcgccagaagaagccctctcggctcttggatctactacgcctatgacggcgtggcctattggggccagggaacactggttacagtgtcctctacgcgtatccagaaccctgatcctgccgtgtaccagctgcgggatagcaagagcagcgacaagagcgtgtgtctgttcaccgacttcgacagccagaccaacgtgtcccagagcaaggactccgacgtgtacatcaccgataagtgcgtgctggacatgcggagcatggacttcaagagcaactccgccgtggcctggtccaacaagtccgatttcgcctgcgccaacgccttcaacaacagcattatccccgaggacacattcttcccaagccccgagagcagctgcgacgtgaagctggtggaaaagagcttcgagacagacaccaacctgaacttccagaacctgagcgtgatcggcttcagaatcctgctgctgaaagtggccggctttaacctgctgatgaccctgcggctgtggtccagctaa

SEQ ID NO: 34947 - DNA, 2328 bp, synthetic construct
  source 1..2328: mol_type = other DNA
atggccttaccagtgaccgccttgctcctgccgctggccttgctgctccacgccgccaggccggagatcgtgctgacacagtctcccgccacactgtcactgtctccaggcgaaagagccacactgagctgtagcgtgtccagcagcatcagcagcagcaacctgcactggtatcagcagaagcctggacaggcccctcggctgctgatctacgccacatctaatctggcctctggcatccccgccagattttctggctctggaagcggcaccgacttcaccctgaccataagcagcctggaacctgaggacttcgccgtgtactactgccagcagtggtccagctatccccacacatttggcggaggcaccaaggtggaaatcaagagactcgaggacctgaagaacgtgttcccacctgaggtggccgtgttcgagcctagcgaggccgagatcagccacacccagaaagccaccctcgtgtgcctggctaccggcttctaccccgaccatgtggaactgtcttggtgggtcaacggcaaagaggtgcacagcggcgtgtgtaccgacccccagccactgaaagaacagcccgccctgaacgacagccggtactgcctgagcagcagactgagagtgtccgccaccttctggcagaacccccggaaccacttcagatgccaggtgcagttctacggcctgagcgagaacgacgagtggacccaggacagagccaagcccgtgacccagatcgtgtctgccgaagcctggggcagagccgattgcggctttaccagcgagagctaccagcagggcgtgctgagcgccaccatcctgtacgagatcctgctgggcaaggccaccctgtacgccgtgctggtgtctgccctggtgctgatggctatggtcaagcggaaggacagccggggaagggccaagcgatctggatctggagcaacaaacttctcactactcaaacaagcaggtgacgtggaggagaatcccgggcctactagtaccatggactggatttggcgcatccttttccttgtcggcgctgctaccggcgcccattccgggcccgaggtgcagctggttgaatctggcggaggatctgttcaggctggcggctctctgagactgtcttgtgccgccagcggctacacctacagcatcaactgcatgggctggttcagacaggcccctggcaaagagagagaaggcgttgccgccatctctaccggcggaggcagaaccgattaccgggattctgtgaagggcagattcaccatcagccaggacaacgccaagaacaccgtgtacctccagatgaacagcctgaagcctgaggacaccgccatgtactactgtgccggcaagaccacctatcctggctacggatgtggcctgggcagaagcgcctacaattattggggccagggcacccaagtgaccgtgtcatctggatccggcggcggaggatctggcggaggcggatctgggggcggaggctctttcgaacaggttcagctggttcagagcggagccgaagtgaagaaacctggggcctctgtgaaggtgtcctgcaaggcttccggctacacctttaccaactacctgatcgagtgggtccgacaggctccaggacaaggactggaatggatgggcctgattaaccctggcagcggcggcaccaactacaacgagaagttcaagggcagagtgaccatgaccaccgacaccagcacaagcaccgcctacatggaactgcggagcctgagaagcgacgacaccgccgtgtattattgcgccagaagaagccctctcggctcttggatctactacgcctatgacggcgtggcctattggggccagggaacactggttacagtgtcctctacgcgtatccagaaccctgatcctgccgtgtaccagctgcgggatagcaagagcagcgacaagagcgtgtgtctgttcaccgacttcgacagccagaccaacgtgtcccagagcaaggactccgacgtgtacatcaccgataagtgcgtgctggacatgcggagcatggacttcaagagcaactccgccgtggcctggtccaacaagtccgatttcgcctgcgccaacgccttcaacaacagcattatccccgaggacacattcttcccaagccccgagagcagctgcgacgtgaagctggtggaaaagagcttcgagacagacaccaacctgaacttccagaacctgagcgtgatcggcttcagaatcctgctgctgaaagtggccggctttaacctgctgatgaccctgcggctgtggtccagctaa

SEQ ID NO: 34948 - DNA, 1884 bp, synthetic construct
  source 1..1884: mol_type = other DNA
atggccttaccagtgaccgccttgctcctgccgctggccttgctgctccacgccgccaggccggagatcgtgctgacacagtctcccgccacactgtcactgtctccaggcgaaagagccacactgagctgtagcgtgtccagcagcatcagcagcagcaacctgcactggtatcagcagaagcctggacaggcccctcggctgctgatctacgccacatctaatctggcctctggcatccccgccagattttctggctctggaagcggcaccgacttcaccctgaccataagcagcctggaacctgaggacttcgccgtgtactactgccagcagtggtccagctatccccacacatttggcggaggcaccaaggtggaaatcaagagactcgaggacctgaagcacgtgttcccacctgaggtggccgtgttcgagcctagcgacgccgagatctggcacacccagaaagccaccctcgtgtgcctggctaccggcttctaccccgaccatgtggaactgtcttggtgggtcaacggcaaagaggtgcacagcggcgtgtctaccgacccccagccactgaaagaacagcccgccctgaacgacagccggtactgcctgagcagcagactgagagtgtccgccaccttctggcagaacccccggaaccacttcagatgccaggtgcagttctacggcctgagcgagaacgacgagtggacccaggacagagccaagcccgtgacccagatcgtgtctgccgaagcctggggcagagccgattgcggctttaccagcgagagctaccagcagggcgtgctgagcgccaccatcctgtacgagatcctgctgggcaaggccaccctgtacgccgtgctggtgtctgccctggtgctgatggctatggtcaagcggaaggacagccggggaagggccaagcgatctggatctggagcaacaaacttctcactactcaaacaagcaggtgacgtggaggagaatcccgggcctactagtatggactggatttggcgcatccttttccttgtcggcgctgctaccggcgcgcattccttcgaacaggttcagctggttcagagcggagccgaagtgaagaaacctggggcctctgtgaaggtgtcctgcaaggcttccggctacacctttaccaactacctgatcgagtgggtccgacaggctccaggacaaggactggaatggatgggcctgattaaccctggcagcggcggcaccaactacaacgagaagttcaagggcagagtgaccatgaccaccgacaccagcacaagcaccgcctacatggaactgcggagcctgagaagcgacgacaccgccgtgtattattgcgccagaagaagccctctcggctcttggatctactacgcctatgacggcgtggcctattggggccagggaacactggttacagtgtcctctacgcgtatccagaaccctgatcctgccgtgtaccagctgcgggatagcaagagcagcgacaagagcgtgtgtctgttcaccgacttcgacagccagaccaacgtgtcccagagcaaggactccgacgtgtacatcaccgataagaccgtgctggacatgcggagcatggacttcaagagcaactccgccgtggcctggtccagcaagtccgatttcgcctgcgccaacgccttcaacaacagcattatccccgaggacacattcttcccaagccccgagatggcctgcgacgtgaagctggtggaaaagagcttcgagacagacaccaacctgaacttccagaacctgctcgtgatctggctgagaatcctgctgctgaaagtggccggctttaacctgctgatgaccctgcggctgtggtccagc

SEQ ID NO: 34949 - DNA, 1884 bp, synthetic construct
  source 1..1884: mol_type = other DNA
atggccttaccagtgaccgccttgctcctgccgctggccttgctgctccacgccgccaggccggagatcgtgctgacacagtctcccgccacactgtcactgtctccaggcgaaagagccacactgagctgtagcgtgtccagcagcatcagcagcagcaacctgcactggtatcagcagaagcctggacaggcccctcggctgctgatctacgccacatctaatctggcctctggcatccccgccagattttctggctctggaagcggcaccgacttcaccctgaccataagcagcctggaacctgaggacttcgccgtgtactactgccagcagtggtccagctatccccacacatttggcggaggcaccaaggtggaaatcaagagactcgaggacctgaagcacgtgttcccacctgaggtggccgtgttcgagcctagcgacgccgagatctggcacacccagaaagccaccctcgtgtgcctggctaccggcttctaccccgaccatgtggaactgtcttggtgggtcaacggcaaagaggtgcacagcggcgtgtctaccgacccccagccactgaaagaacagcccgccctgaacgacagccggtactgcctgagcagcagactgagagtgtccgccaccttctggcagaacccccggaaccacttcagatgccaggtgcagttctacggcctgagcgagaacgacgagtggacccaggacagagccaagcccgtgacccagatcgtgtctgccgaagcctggggcagagccgattgcggctttaccagcgagagctaccagcagggcgtgctgagcgccaccatcctgtacgagatcctgctgggcaaggccaccctgtacgccgtgctggtgtctgccctggtgctgatggctatggtcaagcggaaggacagccggggaagggccaagcgatctggatctggagcaacaaacttctcactactcaaacaagcaggtgacgtggaggagaatcccgggcctactagtatggactggatttggcgcatccttttccttgtcggcgctgctaccggcgcgcattccttcgaacaggttcagctggttcagagcggagccgaagtgaagaaacctggggcctctgtgaaggtgtcctgcaaggcttccggctacacctttaccaactacctgatcgagtgggtccgacaggctccaggacaaggactggaatggatgggcctgattaaccctggcagcggcggcaccaactacaacgagaagttcaagggcagagtgaccatgaccaccgacaccagcacaagcaccgcctacatggaactgcggagcctgagaagcgacgacaccgccgtgtattattgcgccagaagaagccctctcggctcttggatctactacgcctatgacggcgtggcctattggggccagggaacactggttacagtgtcctctacgcgtatccagaaccctgatcctgccgtgtaccagctgcgggatagcaagagcagcgacaagagcgtgtgtctgttcaccgacttcgacagccagaccaacgtgtcccagagcaaggactccgacgtgtacatcaccgataagaccgtgctggacatgcggagcatggacttcaagagcaactccgccgtggcctggtccaccaagtccgatttcgcctgcgccaacgccttcaacaacagcattatccccgaggacacattcttcccaagccccgaggtggtgtgcgacgtgaagctggtggaaaagagcttcgagacagacaccaacctgaacttccagaacctggtggtgatcggcgccagaatcctgctgctgaaagtggccggctttaacctgctgatgaccctgcggctgtggtccagc

SEQ ID NO: 34950 - DNA, 1884 bp, synthetic construct
  source 1..1884: mol_type = other DNA
atggccttaccagtgaccgccttgctcctgccgctggccttgctgctccacgccgccaggccggagatcgtgctgacacagtctcccgccacactgtcactgtctccaggcgaaagagccacactgagctgtagcgtgtccagcagcatcagcagcagcaacctgcactggtatcagcagaagcctggacaggcccctcggctgctgatctacgccacatctaatctggcctctggcatccccgccagattttctggctctggaagcggcaccgacttcaccctgaccataagcagcctggaacctgaggacttcgccgtgtactactgccagcagtggtccagctatccccacacatttggcggaggcaccaaggtggaaatcaagagactcgaggacctgaagaacgtgttcccacctgaggtggccgtgttcgagcctagcaaggccgagatcagcagaacccagaaagccaccctcgtgtgcctggctaccggcttctaccctcctcatgtggaactgtcttggtgggtcaacggcaaagaggtgcacgacggcgtgtgtaccgacccccagccactgaaagaacagcccgccctgaacgacagccggtactgcctgagcagcagactgagagtgtccgccaccttctggcagaacccccggaaccacttcagatgccaggtgcagttctacggcctgagcgagaacgacgagtggacccaggacagagccaagcccgtgacccagatcgtgtctgccgaagcctggggcagagccgattgcggctttaccagcgagagctaccagcagggcgtgctgagcgccaccatcctgtacgagatcctgctgggcaaggccaccctgtacgccgtgctggtgtctgccctggtgctgatggctatggtcaagcggaaggacagccggggaagggccaagcgatctggatctggagcaacaaacttctcactactcaaacaagcaggtgacgtggaggagaatcccgggcctactagtatggactggatttggcgcatccttttccttgtcggcgctgctaccggcgcgcattccttcgaacaggttcagctggttcagagcggagccgaagtgaagaaacctggggcctctgtgaaggtgtcctgcaaggcttccggctacacctttaccaactacctgatcgagtgggtccgacaggctccaggacaaggactggaatggatgggcctgattaaccctggcagcggcggcaccaactacaacgagaagttcaagggcagagtgaccatgaccaccgacaccagcacaagcaccgcctacatggaactgcggagcctgagaagcgacgacaccgccgtgtattattgcgccagaagaagccctctcggctcttggatctactacgcctatgacggcgtggcctattggggccagggaacactggttacagtgtcctctacgcgtatccagaaccctgatcctgccgtgtaccagctgcgggatagcaagagcagcgacaagttcgtgtgtctgttcaccgacttcgacagccagatcaacgtgtcccagagcaaggactccgacgtgtacatcaccgataagtgcgtgctggacatgcggagcatggacttcaagagcaactccgccgtggcctggtccaacaagtccgatttcacctgcgccaacgccttcaacaacagcattatccccgaggacacattcttcccaagccccgagagcagctgcgacgtgaagctggtggaaaagagcttcgagacagacaccaacctgaacttccagaacctgagcgtgatcggcttcagaatcctgctgctgaaagtggccggctttaacctgctgatgaccctgcggctgtggtccagc

SEQ ID NO: 34951 - DNA, 2310 bp, synthetic construct
  source 1..2310: mol_type = other DNA
atggccttaccagtgaccgccttgctcctgccgctggccttgctgctccacgccgccaggccggagatcgtgctgacacagtctcccgccacactgtcactgtctccaggcgaaagagccacactgagctgtagcgtgtccagcagcatcagcagcagcaacctgcactggtatcagcagaagcctggacaggcccctcggctgctgatctacgccacatctaatctggcctctggcatccccgccagattttctggctctggaagcggcaccgacttcaccctgaccataagcagcctggaacctgaggacttcgccgtgtactactgccagcagtggtccagctatccccacacatttggcggaggcaccaaggtggaaatcaagagactcgaggacctgaagaacgtgttcccacctgaggtggccgtgttcgagcctagcgaggccgagatcagccacacccagaaagccaccctcgtgtgcctggctaccggcttctaccccgaccatgtggaactgtcttggtgggtcaacggcaaagaggtgcacagcggcgtgtgtaccgacccccagccactgaaagaacagcccgccctgaacgacagccggtactgcctgagcagcagactgagagtgtccgccaccttctggcagaacccccggaaccacttcagatgccaggtgcagttctacggcctgagcgagaacgacgagtggacccaggacagagccaagcccgtgacccagatcgtgtctgccgaagcctggggcagagccgattgcggctttaccagcgagagctaccagcagggcgtgctgagcgccaccatcctgtacgagatcctgctgggcaaggccaccctgtacgccgtgctggtgtctgccctggtgctgatggctatggtcaagcggaaggacagccggggaagggccaagcgatctggatctggagcaacaaacttctcactactcaaacaagcaggtgacgtggaggagaatcccgggcctactagtaccatggactggatttggcgcatccttttccttgtcggcgctgctaccggcgcccattccgggccccaggtgcagctccaagaaagcggacccggactggttaagccctctcagaccctgtctctgacctgcacagttagcggagccagcattaccacaggcgagtattattggaattggtttcggcagccaccaggcaaggggcttgagtggatgggtgctattgctgcctctggcagcaccacctactctcccagctttgagagcagaacctccatcagccgggacacctccaaaaaccagttctctctgaagctgtcctccgtgaccgctgctgacaccgccgtctattattgtggccggtctttcggcgtggcagctgtgaccacaggacagaacagaggccagggaacacttgtgaccgtgtcctctggatccggcggcggaggatctggcggaggcggatctgggggcggaggctctttcgaacaggttcagctggttcagagcggagccgaagtgaagaaacctggggcctctgtgaaggtgtcctgcaaggcttccggctacacctttaccaactacctgatcgagtgggtccgacaggctccaggacaaggactggaatggatgggcctgattaaccctggcagcggcggcaccaactacaacgagaagttcaagggcagagtgaccatgaccaccgacaccagcacaagcaccgcctacatggaactgcggagcctgagaagcgacgacaccgccgtgtattattgcgccagaagaagccctctcggctcttggatctactacgcctatgacggcgtggcctattggggccagggaacactggttacagtgtcctctacgcgtatccagaaccctgatcctgccgtgtaccagctgcgggatagcaagagcagcgacaagagcgtgtgtctgttcaccgacttcgacagccagaccaacgtgtcccagagcaaggactccgacgtgtacatcaccgataagtgcgtgctggacatgcggagcatggacttcaagagcaactccgccgtggcctggtccaacaagtccgatttcgcctgcgccaacgccttcaacaacagcattatccccgaggacacattcttcccaagccccgagagcagctgcgacgtgaagctggtggaaaagagcttcgagacagacaccaacctgaacttccagaacctgagcgtgatcggcttcagaatcctgctgctgaaagtggccggctttaacctgctgatgaccctgcggctgtggtccagc

SEQ ID NO: 34952 - DNA, 2733 bp, synthetic construct
  source 1..2733: mol_type = other DNA
atggccttaccagtgaccgccttgctcctgccgctggccttgctgctccacgccgccaggccgcaggttcagctgcaagagtctggccctggcctggtcaagcctagccaaacactgagcctgacctgtaccgtgtctggcggctctatcaccaccggcgagttctactggaactggttcagacagcctcctggcaaaggactggaatggatgggagccattgccgccagcggcagcacaacatacagccctagcttcgagagccggaccagcatcagcagagacaccagcaagaatcagttcagcctgaagctgagcagcgtgacagccgccgatacagccgtgtattactgcggcagatcctttggagtggccgccgtgacaaccggccagaatagaggacagggcaccctggtcacagtgtctagcggtaccggcggaggcggatctggcggcggaggtagcggtggcggaggatctgaattcgagatcgtgctgacacagtctcccgccacactgtcactgtctccaggcgaaagagccacactgagctgtagcgtgtccagcagcatcagcagcagcaacctgcactggtatcagcagaagcctggacaggcccctcggctgctgatctacgccacatctaatctggcctctggcatccccgccagattttctggctctggaagcggcaccgacttcaccctgaccataagcagcctggaacctgaggacttcgccgtgtactactgccagcagtggtccagctatccccacacatttggcggaggcaccaaggtggaaatcaagagactcgagatccagaaccctgatcctgccgtgtaccagctgcgggatagcaagagcagcgacaagagcgtgtgtctgttcaccgacttcgacagccagaccaacgtgtcccagagcaaggactccgacgtgtacatcaccgataagtgcgtgctggacatgcggagcatggacttcaagagcaactccgccgtggcctggtccaacaagtccgatttcgcctgcgccaacgccttcaacaacagcattatccccgaggacacattcttcccaagcagcgacgtgccctgcgacgtgaagctggtggaaaagagcttcgagacagacaccaacctgaacttccagaacctgagcgtgatcggcttcagaatcctgctgctgaaagtggccggctttaacctgctgatgaccctgcggctgtggtccagccgcgccaagagaagcggatctggcgtgaagcagaccctgaatttcgacctgctgaagctggctggcgacgtggaatccaacccaggccctactagtaccatggactggatttggcgcatccttttccttgtcggcgctgctaccggcgcccattccgggcccgaagtgcaactggttgaatccggtggcggcctggtgcaacccggcggatctctcagacttagctgtgccgcctccggcagaaccttcacaatgggatggtacaggcaggctccagggaaagagagagagttcgtcgccgccatctctctgtctcccacactggcctactacgccgactctgtgaaaggccggttcaccatctccagagataatagcaagaacaccgtggtgctgcaaatgaactctctgagagccgaggatacagccctgtactattgtgccgctgaccggaagtccgtgatgagcatcagacccgattactggggacagggcacactggtcacagtgtctagtggatccggcggcggaggatctggcggaggcggatctgggggcggaggctctttcgaacaggttcagctggttcagagcggagccgaagtgaagaaacctggggcctctgtgaaggtgtcctgcaaggcttccggctacacctttaccaactacctgatcgagtgggtccgacaggctccaggacaaggactggaatggatgggcctgattaaccctggcagcggcggcaccaactacaacgagaagttcaagggcagagtgaccatgaccaccgacaccagcacaagcaccgcctacatggaactgcggagcctgagaagcgacgacaccgccgtgtattattgcgccagaagaagccctctcggctcttggatctactacgcctatgacggcgtggcctattggggccagggaacactggttacagtgtcctctacgcgtgaggacctgaagaacgtgttcccacctgaggtggccgtgttcgagcctagcaaggccgagatcgcccacacccagaaagccaccctcgtgtgcctggctaccggcttctaccccgaccatgtggaactgtcttggtgggtcaacggcaaagaggtgcacagcggcgtgtgtaccgacccccagccactgaaagaacagcccgccctgaacgacagccggtactgcctgagcagcagactgagagtgtccgccaccttctggcagaacccccggaaccacttcagatgccaggtgcagttctacggcctgagcgagaacgacgagtggacccaggacagagccaagcccgtgacccagatcgtgtctgccgaagcctggggcagagccgattgcggcatcaccagcgccagctaccaccagggcgtgctgagcgccaccatcctgtacgagatcctgctgggcaaggccaccctgtacgccgtgctggtgtctgccctggtgctgatggctatggtcaagcggaaggacagccgggga

SEQ ID NO: 34953 - DNA, 2322 bp, synthetic construct
  source 1..2322: mol_type = other DNA
atggccttaccagtgaccgccttgctcctgccgctggccttgctgctccacgccgccaggccgcaggttcagctgcaagagtctggccctggcctggtcaagcctagccaaacactgagcctgacctgtaccgtgtctggcggctctatcaccaccggcgagttctactggaactggttcagacagcctcctggcaaaggactggaatggatgggagccattgccgccagcggcagcacaacatacagccctagcttcgagagccggaccagcatcagcagagacaccagcaagaatcagttcagcctgaagctgagcagcgtgacagccgccgatacagccgtgtattactgcggcagatcctttggagtggccgccgtgacaaccggccagaatagaggacagggcaccctggtcacagtgtctagcggtaccggcggaggcggatctggcggcggaggtagcggtggcggaggatctgaattcgagatcgtgctgacacagtctcccgccacactgtcactgtctccaggcgaaagagccacactgagctgtagcgtgtccagcagcatcagcagcagcaacctgcactggtatcagcagaagcctggacaggcccctcggctgctgatctacgccacatctaatctggcctctggcatccccgccagattttctggctctggaagcggcaccgacttcaccctgaccataagcagcctggaacctgaggacttcgccgtgtactactgccagcagtggtccagctatccccacacatttggcggaggcaccaaggtggaaatcaagagactcgagatccagaaccctgatcctgccgtgtaccagctgcgggatagcaagagcagcgacaagagcgtgtgtctgttcaccgacttcgacagccagaccaacgtgtcccagagcaaggactccgacgtgtacatcaccgataagtgcgtgctggacatgcggagcatggacttcaagagcaactccgccgtggcctggtccaacaagtccgatttcgcctgcgccaacgccttcaacaacagcattatccccgaggacacattcttcccaagcagcgacgtgccctgcgacgtgaagctggtggaaaagagcttcgagacagacaccaacctgaacttccagaacctgagcgtgatcggcttcagaatcctgctgctgaaagtggccggctttaacctgctgatgaccctgcggctgtggtccagccgcgccaagagaagcggatctggcgtgaagcagaccctgaatttcgacctgctgaagctggctggcgacgtggaatccaacccaggccctactagtaccatggactggatttggcgcatccttttccttgtcggcgctgctaccggcgcccattccttcgaacaggttcagctggttcagagcggagccgaagtgaagaaacctggggcctctgtgaaggtgtcctgcaaggcttccggctacacctttaccaactacctgatcgagtgggtccgacaggctccaggacaaggactggaatggatgggcctgattaaccctggcagcggcggcaccaactacaacgagaagttcaagggcagagtgaccatgaccaccgacaccagcacaagcaccgcctacatggaactgcggagcctgagaagcgacgacaccgccgtgtattattgcgccagaagaagccctctcggctcttggatctactacgcctatgacggcgtggcctattggggccagggaacactggttacagtgtcctctacgcgtgaggacctgaagaacgtgttcccacctgaggtggccgtgttcgagcctagcaaggccgagatcgcccacacccagaaagccaccctcgtgtgcctggctaccggcttctaccccgaccatgtggaactgtcttggtgggtcaacggcaaagaggtgcacagcggcgtgtgtaccgacccccagccactgaaagaacagcccgccctgaacgacagccggtactgcctgagcagcagactgagagtgtccgccaccttctggcagaacccccggaaccacttcagatgccaggtgcagttctacggcctgagcgagaacgacgagtggacccaggacagagccaagcccgtgacccagatcgtgtctgccgaagcctggggcagagccgattgcggcatcaccagcgccagctaccaccagggcgtgctgagcgccaccatcctgtacgagatcctgctgggcaaggccaccctgtacgccgtgctggtgtctgccctggtgctgatggctatggtcaagcggaaggacagccgggga

SEQ ID NO: 34954 - DNA, 2721 bp, synthetic construct
  source 1..2721: mol_type = other DNA
atggccttaccagtgaccgccttgctcctgccgctggccttgctgctccacgccgccaggccggaagtgcagctggttgaatctggcggaggactggttcaggctggcggatctctgagactgtcttgtgccgccagcggcagaacctttagcatgggctggtttagacaggcccctggcaaagagagagagttcgtcgccgccatcacatactctggcggcagcccttactacgccgactctgtgaagggcagattcaccatcagccgggacaacgccaagaacaccgtgtacctccagatgaacagcctgaagcctgaggacaccgccgtgtactactgcgccgccaatccaacatacggcagcgactggaacgccgagaattggggccagggaacccaagtgacagtgtctagcggtaccggcggaggcggatctggcggcggaggtagcggtggcggaggatctgaattcgagatcgtgctgacacagtctcccgccacactgtcactgtctccaggcgaaagagccacactgagctgtagcgtgtccagcagcatcagcagcagcaacctgcactggtatcagcagaagcctggacaggcccctcggctgctgatctacgccacatctaatctggcctctggcatccccgccagattttctggctctggaagcggcaccgacttcaccctgaccataagcagcctggaacctgaggacttcgccgtgtactactgccagcagtggtccagctatccccacacatttggcggaggcaccaaggtggaaatcaagagactcgaggacctgaagaacgtgttcccacctgaggtggccgtgttcgagcctagcgaggccgagatcagccacacccagaaagccaccctcgtgtgcctggctaccggcttctaccccgaccatgtggaactgtcttggtgggtcaacggcaaagaggtgcacagcggcgtgtgtaccgacccccagccactgaaagaacagcccgccctgaacgacagccggtactgcctgagcagcagactgagagtgtccgccaccttctggcagaacccccggaaccacttcagatgccaggtgcagttctacggcctgagcgagaacgacgagtggacccaggacagagccaagcccgtgacccagatcgtgtctgccgaagcctggggcagagccgattgcggctttaccagcgagagctaccagcagggcgtgctgagcgccaccatcctgtacgagatcctgctgggcaaggccaccctgtacgccgtgctggtgtctgccctggtgctgatggctatggtcaagcggaaggacagccggggaagggccaagcgatctggatctggagcaacaaacttctcactactcaaacaagcaggtgacgtggaggagaatcccgggcctactagtaccatggactggatttggcgcatccttttccttgtcggcgctgctaccggcgcccattccgggccccaggtgcagctccaagaaagcggacccggactggttaagccctctcagaccctgtctctgacctgcacagttagcggagccagcattaccacaggcgagtattattggaattggtttcggcagccaccaggcaaggggcttgagtggatgggtgctattgctgcctctggcagcaccacctactctcccagctttgagagcagaacctccatcagccgggacacctccaaaaaccagttctctctgaagctgtcctccgtgaccgctgctgacaccgccgtctattattgtggccggtctttcggcgtggcagctgtgaccacaggacagaacagaggccagggaacacttgtgaccgtgtcctctggatccggcggcggaggatctggcggaggcggatctgggggcggaggctctttcgaacaggttcagctggttcagagcggagccgaagtgaagaaacctggggcctctgtgaaggtgtcctgcaaggcttccggctacacctttaccaactacctgatcgagtgggtccgacaggctccaggacaaggactggaatggatgggcctgattaaccctggcagcggcggcaccaactacaacgagaagttcaagggcagagtgaccatgaccaccgacaccagcacaagcaccgcctacatggaactgcggagcctgagaagcgacgacaccgccgtgtattattgcgccagaagaagccctctcggctcttggatctactacgcctatgacggcgtggcctattggggccagggaacactggttacagtgtcctctacgcgtatccagaaccctgatcctgccgtgtaccagctgcgggatagcaagagcagcgacaagagcgtgtgtctgttcaccgacttcgacagccagaccaacgtgtcccagagcaaggactccgacgtgtacatcaccgataagtgcgtgctggacatgcggagcatggacttcaagagcaactccgccgtggcctggtccaacaagtccgatttcgcctgcgccaacgccttcaacaacagcattatccccgaggacacattcttcccaagccccgagagcagctgcgacgtgaagctggtggaaaagagcttcgagacagacaccaacctgaacttccagaacctgagcgtgatcggcttcagaatcctgctgctgaaagtggccggctttaacctgctgatgaccctgcggctgtggtccagc

SEQ ID NO: 34955 - DNA, 2742 bp, synthetic construct
  source 1..2742: mol_type = other DNA
atggccttaccagtgaccgccttgctcctgccgctggccttgctgctccacgccgccaggccggaagtgcagctggttgaatctggcggaggactggttcaggctggcggatctctgagactgtcttgtgccgccagcggcagaacctttagcatgggctggtttagacaggcccctggcaaagagagagagttcgtcgccgccatcacatactctggcggcagcccttactacgccgactctgtgaagggcagattcaccatcagccgggacaacgccaagaacaccgtgtacctccagatgaacagcctgaagcctgaggacaccgccgtgtactactgcgccgccaatccaacatacggcagcgactggaacgccgagaattggggccagggaacccaagtgacagtgtctagcggtaccggcggaggcggatctggcggcggaggtagcggtggcggaggatctgaattcgagatcgtgctgacacagtctcccgccacactgtcactgtctccaggcgaaagagccacactgagctgtagcgtgtccagcagcatcagcagcagcaacctgcactggtatcagcagaagcctggacaggcccctcggctgctgatctacgccacatctaatctggcctctggcatccccgccagattttctggctctggaagcggcaccgacttcaccctgaccataagcagcctggaacctgaggacttcgccgtgtactactgccagcagtggtccagctatccccacacatttggcggaggcaccaaggtggaaatcaagagactcgagatccagaaccctgatcctgccgtgtaccagctgcgggatagcaagagcagcgacaagagcgtgtgtctgttcaccgacttcgacagccagaccaacgtgtcccagagcaaggactccgacgtgtacatcaccgataagtgcgtgctggacatgcggagcatggacttcaagagcaactccgccgtggcctggtccaacaagtccgatttcgcctgcgccaacgccttcaacaacagcattatccccgaggacacattcttcccaagcagcgacgtgccctgcgacgtgaagctggtggaaaagagcttcgagacagacaccaacctgaacttccagaacctgagcgtgatcggcttcagaatcctgctgctgaaagtggccggctttaacctgctgatgaccctgcggctgtggtccagccgcgccaagagaagcggatctggcgtgaagcagaccctgaatttcgacctgctgaagctggctggcgacgtggaatccaacccaggccctactagtaccatggactggatttggcgcatccttttccttgtcggcgctgctaccggcgcccattccgggccccaggtgcagctggttgaatctggcggaggactggttcagcctggcggatctctgagactgtcttgtgccgccagcggcaacatcaacagcagaaactgcatgggctggttcagacaggcccctggcaagggaagagaaggcgtggcagctatcggccaagtgaccggcagaacctactacgtggacagcgtgaagggcagattcaccatcagcctggacaacagcaagaacaccctgtacctccagatgaacagcctgagagccgaggacaccgccgtgtactattgtgctgctgcccctggctgtctgctgtctgcacttagaagcgccgactacagaaactggggccagggcacactggtcaccgtttcttctggatccggcggcggaggatctggcggaggcggatctgggggcggaggctctttcgaacaggttcagctggttcagagcggagccgaagtgaagaaacctggggcctctgtgaaggtgtcctgcaaggcttccggctacacctttaccaactacctgatcgagtgggtccgacaggctccaggacaaggactggaatggatgggcctgattaaccctggcagcggcggcaccaactacaacgagaagttcaagggcagagtgaccatgaccaccgacaccagcacaagcaccgcctacatggaactgcggagcctgagaagcgacgacaccgccgtgtattattgcgccagaagaagccctctcggctcttggatctactacgcctatgacggcgtggcctattggggccagggaacactggttacagtgtcctctacgcgtgaggacctgaagaacgtgttcccacctgaggtggccgtgttcgagcctagcaaggccgagatcgcccacacccagaaagccaccctcgtgtgcctggctaccggcttctaccccgaccatgtggaactgtcttggtgggtcaacggcaaagaggtgcacagcggcgtgtgtaccgacccccagccactgaaagaacagcccgccctgaacgacagccggtactgcctgagcagcagactgagagtgtccgccaccttctggcagaacccccggaaccacttcagatgccaggtgcagttctacggcctgagcgagaacgacgagtggacccaggacagagccaagcccgtgacccagatcgtgtctgccgaagcctggggcagagccgattgcggcatcaccagcgccagctaccaccagggcgtgctgagcgccaccatcctgtacgagatcctgctgggcaaggccaccctgtacgccgtgctggtgtctgccctggtgctgatggctatggtcaagcggaaggacagccgggga

SEQ ID NO: 34956 - DNA, 2730 bp, synthetic construct
  source 1..2730: mol_type = other DNA
atggccttaccagtgaccgccttgctcctgccgctggccttgctgctccacgccgccaggccggaagtgcagctggttgaatctggcggaggactggttcaggctggcggatctctgagactgtcttgtgccgccagcggcagaacctttagcatgggctggtttagacaggcccctggcaaagagagagagttcgtcgccgccatcacatactctggcggcagcccttactacgccgactctgtgaagggcagattcaccatcagccgggacaacgccaagaacaccgtgtacctccagatgaacagcctgaagcctgaggacaccgccgtgtactactgcgccgccaatccaacatacggcagcgactggaacgccgagaattggggccagggaacccaagtgacagtgtctagcggtaccggcggaggcggatctggcggcggaggtagcggtggcggaggatctgaattcgagatcgtgctgacacagtctcccgccacactgtcactgtctccaggcgaaagagccacactgagctgtagcgtgtccagcagcatcagcagcagcaacctgcactggtatcagcagaagcctggacaggcccctcggctgctgatctacgccacatctaatctggcctctggcatccccgccagattttctggctctggaagcggcaccgacttcaccctgaccataagcagcctggaacctgaggacttcgccgtgtactactgccagcagtggtccagctatccccacacatttggcggaggcaccaaggtggaaatcaagagactcgaggacctgaagaacgtgttcccacctgaggtggccgtgttcgagcctagcgaggccgagatcagccacacccagaaagccaccctcgtgtgcctggctaccggcttctaccccgaccatgtggaactgtcttggtgggtcaacggcaaagaggtgcacagcggcgtgtgtaccgacccccagccactgaaagaacagcccgccctgaacgacagccggtactgcctgagcagcagactgagagtgtccgccaccttctggcagaacccccggaaccacttcagatgccaggtgcagttctacggcctgagcgagaacgacgagtggacccaggacagagccaagcccgtgacccagatcgtgtctgccgaagcctggggcagagccgattgcggctttaccagcgagagctaccagcagggcgtgctgagcgccaccatcctgtacgagatcctgctgggcaaggccaccctgtacgccgtgctggtgtctgccctggtgctgatggctatggtcaagcggaaggacagccggggaagggccaagcgatctggatctggagcaacaaacttctcactactcaaacaagcaggtgacgtggaggagaatcccgggcctactagtaccatggactggatttggcgcatccttttccttgtcggcgctgctaccggcgcccattccgggccccaggtgcagctggttgaatctggcggaggactggttcagcctggcggatctctgagactgtcttgtgccgccagcggcaacatcaacagcagaaactgcatgggctggttcagacaggcccctggcaagggaagagaaggcgtggcagctatcggccaagtgaccggcagaacctactacgtggacagcgtgaagggcagattcaccatcagcctggacaacagcaagaacaccctgtacctccagatgaacagcctgagagccgaggacaccgccgtgtactattgtgctgctgcccctggctgtctgctgtctgcacttagaagcgccgactacagaaactggggccagggcacactggtcaccgtttcttctggatccggcggcggaggatctggcggaggcggatctgggggcggaggctctttcgaacaggttcagctggttcagagcggagccgaagtgaagaaacctggggcctctgtgaaggtgtcctgcaaggcttccggctacacctttaccaactacctgatcgagtgggtccgacaggctccaggacaaggactggaatggatgggcctgattaaccctggcagcggcggcaccaactacaacgagaagttcaagggcagagtgaccatgaccaccgacaccagcacaagcaccgcctacatggaactgcggagcctgagaagcgacgacaccgccgtgtattattgcgccagaagaagccctctcggctcttggatctactacgcctatgacggcgtggcctattggggccagggaacactggttacagtgtcctctacgcgtatccagaaccctgatcctgccgtgtaccagctgcgggatagcaagagcagcgacaagagcgtgtgtctgttcaccgacttcgacagccagaccaacgtgtcccagagcaaggactccgacgtgtacatcaccgataagtgcgtgctggacatgcggagcatggacttcaagagcaactccgccgtggcctggtccaacaagtccgatttcgcctgcgccaacgccttcaacaacagcattatccccgaggacacattcttcccaagccccgagagcagctgcgacgtgaagctggtggaaaagagcttcgagacagacaccaacctgaacttccagaacctgagcgtgatcggcttcagaatcctgctgctgaaagtggccggctttaacctgctgatgaccctgcggctgtggtccagc

SEQ ID NO: 34957 - DNA, 2730 bp, synthetic construct
  source 1..2730: mol_type = other DNA
atggccttaccagtgaccgccttgctcctgccgctggccttgctgctccacgccgccaggccggaagtgcaactggttgaatccggtggcggcctggtgcaagcaggcggatctctcagacttagctgtgccgcctccggcagaaccttcacaatgggatggtttaggcaggctccagggaaagagagagagttcgtcgccgccatctctctgtctcccacactggcctactacgccgactctgtgaaaggccggttcaccatctccagagataatgccaagaacaccgtggtgctgcaaatgaactctctgaaacccgaggatacagccctgtactattgtgccgctgaccggaagtccgtgatgagcatcagacccgattactggggacagggcacacaagtcacagtgtcctctggtaccggcggaggcggatctggcggcggaggtagcggtggcggaggatctgaattcgagatcgtgctgacacagtctcccgccacactgtcactgtctccaggcgaaagagccacactgagctgtagcgtgtccagcagcatcagcagcagcaacctgcactggtatcagcagaagcctggacaggcccctcggctgctgatctacgccacatctaatctggcctctggcatccccgccagattttctggctctggaagcggcaccgacttcaccctgaccataagcagcctggaacctgaggacttcgccgtgtactactgccagcagtggtccagctatccccacacatttggcggaggcaccaaggtggaaatcaagagactcgaggacctgaagaacgtgttcccacctgaggtggccgtgttcgagcctagcgaggccgagatcagccacacccagaaagccaccctcgtgtgcctggctaccggcttctaccccgaccatgtggaactgtcttggtgggtcaacggcaaagaggtgcacagcggcgtgtgtaccgacccccagccactgaaagaacagcccgccctgaacgacagccggtactgcctgagcagcagactgagagtgtccgccaccttctggcagaacccccggaaccacttcagatgccaggtgcagttctacggcctgagcgagaacgacgagtggacccaggacagagccaagcccgtgacccagatcgtgtctgccgaagcctggggcagagccgattgcggctttaccagcgagagctaccagcagggcgtgctgagcgccaccatcctgtacgagatcctgctgggcaaggccaccctgtacgccgtgctggtgtctgccctggtgctgatggctatggtcaagcggaaggacagccggggaagggccaagcgatctggatctggagcaacaaacttctcactactcaaacaagcaggtgacgtggaggagaatcccgggcctactagtaccatggactggatttggcgcatccttttccttgtcggcgctgctaccggcgcccattccgggccccaggtgcagctggttgaatctggcggaggactggttcagcctggcggatctctgagactgtcttgtgccgccagcggcaacatcaacagcagaaactgcatgggctggttcagacaggcccctggcaagggaagagaaggcgtggcagctatcggccaagtgaccggcagaacctactacgtggacagcgtgaagggcagattcaccatcagcctggacaacagcaagaacaccctgtacctccagatgaacagcctgagagccgaggacaccgccgtgtactattgtgctgctgcccctggctgtctgctgtctgcacttagaagcgccgactacagaaactggggccagggcacactggtcaccgtttcttctggatccggcggcggaggatctggcggaggcggatctgggggcggaggctctttcgaacaggttcagctggttcagagcggagccgaagtgaagaaacctggggcctctgtgaaggtgtcctgcaaggcttccggctacacctttaccaactacctgatcgagtgggtccgacaggctccaggacaaggactggaatggatgggcctgattaaccctggcagcggcggcaccaactacaacgagaagttcaagggcagagtgaccatgaccaccgacaccagcacaagcaccgcctacatggaactgcggagcctgagaagcgacgacaccgccgtgtattattgcgccagaagaagccctctcggctcttggatctactacgcctatgacggcgtggcctattggggccagggaacactggttacagtgtcctctacgcgtatccagaaccctgatcctgccgtgtaccagctgcgggatagcaagagcagcgacaagagcgtgtgtctgttcaccgacttcgacagccagaccaacgtgtcccagagcaaggactccgacgtgtacatcaccgataagtgcgtgctggacatgcggagcatggacttcaagagcaactccgccgtggcctggtccaacaagtccgatttcgcctgcgccaacgccttcaacaacagcattatccccgaggacacattcttcccaagccccgagagcagctgcgacgtgaagctggtggaaaagagcttcgagacagacaccaacctgaacttccagaacctgagcgtgatcggcttcagaatcctgctgctgaaagtggccggctttaacctgctgatgaccctgcggctgtggtccagc

SEQ ID NO: 34958 - DNA, 2742 bp, synthetic construct
  source 1..2742: mol_type = other DNA
atggccttaccagtgaccgccttgctcctgccgctggccttgctgctccacgccgccaggccgcaggttcagctgcaagagtctggccctggcctggtcaagcctagccaaacactgagcctgacctgtaccgtgtctggcggctctatcaccaccggcgagttctactggaactggttcagacagcctcctggcaaaggactggaatggatgggagccattgccgccagcggcagcacaacatacagccctagcttcgagagccggaccagcatcagcagagacaccagcaagaatcagttcagcctgaagctgagcagcgtgacagccgccgatacagccgtgtattactgcggcagatcctttggagtggccgccgtgacaaccggccagaatagaggacagggcaccctggtcacagtgtctagcggtaccggcggaggcggatctggcggcggaggtagcggtggcggaggatctgaattcgagatcgtgctgacacagtctcccgccacactgtcactgtctccaggcgaaagagccacactgagctgtagcgtgtccagcagcatcagcagcagcaacctgcactggtatcagcagaagcctggacaggcccctcggctgctgatctacgccacatctaatctggcctctggcatccccgccagattttctggctctggaagcggcaccgacttcaccctgaccataagcagcctggaacctgaggacttcgccgtgtactactgccagcagtggtccagctatccccacacatttggcggaggcaccaaggtggaaatcaagagactcgaggacctgaagaacgtgttcccacctgaggtggccgtgttcgagcctagcgaggccgagatcagccacacccagaaagccaccctcgtgtgcctggctaccggcttctaccccgaccatgtggaactgtcttggtgggtcaacggcaaagaggtgcacagcggcgtgtgtaccgacccccagccactgaaagaacagcccgccctgaacgacagccggtactgcctgagcagcagactgagagtgtccgccaccttctggcagaacccccggaaccacttcagatgccaggtgcagttctacggcctgagcgagaacgacgagtggacccaggacagagccaagcccgtgacccagatcgtgtctgccgaagcctggggcagagccgattgcggctttaccagcgagagctaccagcagggcgtgctgagcgccaccatcctgtacgagatcctgctgggcaaggccaccctgtacgccgtgctggtgtctgccctggtgctgatggctatggtcaagcggaaggacagccggggaagggccaagcgatctggatctggagcaacaaacttctcactactcaaacaagcaggtgacgtggaggagaatcccgggcctactagtaccatggactggatttggcgcatccttttccttgtcggcgctgctaccggcgcccattccgggccccaggtgcagctggttgaatctggcggaggactggttcagcctggcggatctctgagactgtcttgtgccgccagcggcaacatcaacagcagaaactgcatgggctggttcagacaggcccctggcaagggaagagaaggcgtggcagctatcggccaagtgaccggcagaacctactacgtggacagcgtgaagggcagattcaccatcagcctggacaacagcaagaacaccctgtacctccagatgaacagcctgagagccgaggacaccgccgtgtactattgtgctgctgcccctggctgtctgctgtctgcacttagaagcgccgactacagaaactggggccagggcacactggtcaccgtttcttctggatccggcggcggaggatctggcggaggcggatctgggggcggaggctctttcgaacaggttcagctggttcagagcggagccgaagtgaagaaacctggggcctctgtgaaggtgtcctgcaaggcttccggctacacctttaccaactacctgatcgagtgggtccgacaggctccaggacaaggactggaatggatgggcctgattaaccctggcagcggcggcaccaactacaacgagaagttcaagggcagagtgaccatgaccaccgacaccagcacaagcaccgcctacatggaactgcggagcctgagaagcgacgacaccgccgtgtattattgcgccagaagaagccctctcggctcttggatctactacgcctatgacggcgtggcctattggggccagggaacactggttacagtgtcctctacgcgtatccagaaccctgatcctgccgtgtaccagctgcgggatagcaagagcagcgacaagagcgtgtgtctgttcaccgacttcgacagccagaccaacgtgtcccagagcaaggactccgacgtgtacatcaccgataagtgcgtgctggacatgcggagcatggacttcaagagcaactccgccgtggcctggtccaacaagtccgatttcgcctgcgccaacgccttcaacaacagcattatccccgaggacacattcttcccaagccccgagagcagctgcgacgtgaagctggtggaaaagagcttcgagacagacaccaacctgaacttccagaacctgagcgtgatcggcttcagaatcctgctgctgaaagtggccggctttaacctgctgatgaccctgcggctgtggtccagc

SEQ ID NO: 34959 - DNA, 1446 bp, synthetic construct
  source 1..1446: mol_type = other DNA
atggccttaccagtgaccgccttgctcctgccgctggccttgctgctccacgccgccaggccgcagatcgtgctgacacagagccccgccatcatgtctgttagccctggcgagaaagtgaccatgacctgtagcgccagcagcagcgtgaactacatgcactggttccagcagaagcccggcacaagccctaagctgtgggtgtacagcaccagcaatctggcctctggcgtgccagccagattttctggctctggcagcggcaccagctacagcctgacaatcagcagcatggaagccgaggatgccgccacctactattgtcagcagcggagcatctacccaccttggacatttggcggaggcaccaagctggaaatcaaaggcggaggcggaagtggaggcggaggatctggcggcggaggctctgaagttcagctccagcagagcggccctgagcttgtgaaacctggcgcttccgtgaagatcagctgcaaggccagcggctacagcttcaccggctacaccatgaactgggtcaagcagtcccacggcaagaacctggaatggatcggcctgattaacccctacaacggcggcacctcctacaaccagaagttcaaggccaaggccacactgaccgtggacaagagcagcagcacagcctacatgcagctgaagtccctgaccagcgaggacagcgccgtgtactactgcgccagagattacggctacgtgctggactattggggccagggcacaagcgtgacagtgtctagtacgcgtaaaattgaagttatgtatcctcctccttacctagacaatgagaagagcaatggaaccattatccatgtgaaagggaaacacctttgtccaagtcccctatttcccggaccttctaagcccttttgggtgctggtggtggttgggggagtcctggcttgctatagcttgctagtaacagtggcctttattattttctgggtgaggagtaagaggagcaggctcctgcacagtgactacatgaacatgactccacgccgccccggacccacccgcaagcattaccagccctatgccccaccacgcgacttcgcagcctatcgctccagagtgaagttcagcaggagcgcagacgcccccgcgtaccagcagggccagaaccagctctataacgagctcaatctaggacgaagagaggagtacgatgttttggacaagagacgtggccgggaccctgagatggggggaaagccgagaaggaagaaccctcaggaaggcctgtacaatgaactgcagaaagataagatggcggaggcctacagtgagattgggatgaaaggcgagcgccggaggggcaaggggcacgatggcctttaccagggtctcagtacagccaccaaggacacctacgacgcccttcacatgcaggccctgccccctcgc

SEQ ID NO: 34960 - DNA, 1464 bp, synthetic construct
  source 1..1464: mol_type = other DNA
atggccttaccagtgaccgccttgctcctgccgctggccttgctgctccacgccgccaggccgcagatcgtgctgacacagagccccgccatcatgtctgttagccctggcgagaaagtgaccatgacctgtagcgccagcagcagcgtgaactacatgcactggttccagcagaagcccggcacaagccctaagctgtgggtgtacagcaccagcaatctggcctctggcgtgccagccagattttctggctctggcagcggcaccagctacagcctgacaatcagcagcatggaagccgaggatgccgccacctactattgtcagcagcggagcatctacccaccttggacatttggcggaggcaccaagctggaaatcaaaggcggaggcggaagtggaggcggaggatctggcggcggaggctctgaagttcagctccagcagagcggccctgagcttgtgaaacctggcgcttccgtgaagatcagctgcaaggccagcggctacagcttcaccggctacaccatgaactgggtcaagcagtcccacggcaagaacctggaatggatcggcctgattaacccctacaacggcggcacctcctacaaccagaagttcaaggccaaggccacactgaccgtggacaagagcagcagcacagcctacatgcagctgaagtccctgaccagcgaggacagcgccgtgtactactgcgccagagattacggctacgtgctggactattggggccagggcacaagcgtgacagtgtctagtacgcgtgcgaagcccaccacgacgccagcgccgcgaccaccaacaccggcgcccaccatcgcgtcgcagcccctgtccctgcgcccagaggcgtgccggccagcggcggggggcgcagtgcacacgagggggctggacttcgcctgtgacatctacatctgggcgcccttggccgggacttgtggggtccttctcctgtcactggttatcaccctttactgcaaacggggcagaaagaaactcctgtatatattcaaacaaccatttatgagaccagtacaaactactcaagaggaagatggctgtagctgccgatttccagaagaagaagaaggaggatgtgaactgagagtgaagttcagcaggagcgcagacgcccccgcgtaccagcagggccagaaccagctctataacgagctgaatctaggacgaagagaggagtacgatgttttggacaagagacgtggccgggaccctgagatggggggaaagccgagaaggaagaaccctcaggaaggcctgtacaatgaactgcagaaagataagatggcggaggcctacagtgagattgggatgaaaggcgagcgccggaggggcaaggggcacgatggcctttaccagggtctcagtacagccaccaaggacacctacgacgcccttcacatgcaggccctgccccctcgc

SEQ ID NO: 34961 - DNA, 1464 bp, synthetic construct
  source 1..1464: mol_type = other DNA
atggccttaccagtgaccgccttgctcctgccgctggccttgctgctccacgccgccaggccggaagttcagctccagcagagcggccctgagcttgtgaaacctggcgcttccgtgaagatcagctgcaaggccagcggctacagcttcaccggctacaccatgaactgggtcaagcagtcccacggcaagaacctggaatggatcggcctgattaacccctacaacggcggcacctcctacaaccagaagttcaaggccaaggccacactgaccgtggacaagagcagcagcacagcctacatgcagctgaagtccctgaccagcgaggacagcgccgtgtactactgcgccagagattacggctacgtgctggactattggggccagggcacaagcgtgacagtgtctagtggcggaggcggaagtggaggcggaggatctggcggcggaggctctcagatcgtgctgacacagagccccgccatcatgtctgttagccctggcgagaaagtgaccatgacctgtagcgccagcagcagcgtgaactacatgcactggttccagcagaagcccggcacaagccctaagctgtgggtgtacagcaccagcaatctggcctctggcgtgccagccagattttctggctctggcagcggcaccagctacagcctgacaatcagcagcatggaagccgaggatgccgccacctactattgtcagcagcggagcatctacccaccttggacatttggcggaggcaccaagctggaaatcaaaacgcgtgcgaagcccaccacgacgccagcgccgcgaccaccaacaccggcgcccaccatcgcgtcgcagcccctgtccctgcgcccagaggcgtgccggccagcggcggggggcgcagtgcacacgagggggctggacttcgcctgtgacatctacatctgggcgcccttggccgggacttgtggggtccttctcctgtcactggttatcaccctttactgcaaacggggcagaaagaaactcctgtatatattcaaacaaccatttatgagaccagtacaaactactcaagaggaagatggctgtagctgccgatttccagaagaagaagaaggaggatgtgaactgagagtgaagttcagcaggagcgcagacgcccccgcgtaccagcagggccagaaccagctctataacgagctgaatctaggacgaagagaggagtacgatgttttggacaagagacgtggccgggaccctgagatggggggaaagccgagaaggaagaaccctcaggaaggcctgtacaatgaactgcagaaagataagatggcggaggcctacagtgagattgggatgaaaggcgagcgccggaggggcaaggggcacgatggcctttaccagggtctcagtacagccaccaaggacacctacgacgcccttcacatgcaggccctgccccctcgc

SEQ ID NO: 34962 - DNA, 1863 bp, synthetic construct
  source 1..1863: mol_type = other DNA
atggccttaccagtgaccgccttgctcctgccgctggccttgctgctccacgccgccaggccgcagatcgtgctgacacagagccccgccatcatgtctgttagccctggcgagaaagtgaccatgacctgtagcgccagcagcagcgtgaactacatgcactggttccagcagaagcccggcacaagccctaagctgtgggtgtacagcaccagcaatctggcctctggcgtgccagccagattttctggctctggcagcggcaccagctacagcctgacaatcagcagcatggaagccgaggatgccgccacctactattgtcagcagcggagcatctacccaccttggacatttggcggaggcaccaagctggaaatcaaactcgagatccagaaccctgatcctgccgtgtaccagctgcgggatagcaagagcagcgacaagagcgtgtgtctgttcaccgacttcgacagccagaccaacgtgtcccagagcaaggactccgacgtgtacatcaccgataagtgcgtgctggacatgcggagcatggacttcaagagcaactccgccgtggcctggtccaacaagtccgatttcgcctgcgccaacgccttcaacaacagcattatccccgaggacacattcttcccaagcagcgacgtgccctgcgacgtgaagctggtggaaaagagcttcgagacagacaccaacctgaacttccagaacctgagcgtgatcggcttcagaatcctgctgctgaaagtggccggctttaacctgctgatgaccctgcggctgtggtccagccgcgccaagagaagcggatctggcgtgaagcagaccctgaatttcgacctgctgaagctggctggcgacgtggaatccaacccaggccctactagtatggactggatttggcgcatccttttccttgtcggcgctgctaccggcgcgcattccttcgaagaagttcagctccagcagagcggccctgagcttgtgaaacctggcgcttccgtgaagatcagctgcaaggccagcggctacagcttcaccggctacaccatgaactgggtcaagcagtcccacggcaagaacctggaatggatcggcctgattaacccctacaacggcggcacctcctacaaccagaagttcaaggccaaggccacactgaccgtggacaagagcagcagcacagcctacatgcagctgaagtccctgaccagcgaggacagcgccgtgtactactgcgccagagattacggctacgtgctggactattggggccagggcacaagcgtgacagtgtctagtacgcgtgaggacctgaagaacgtgttcccacctgaggtggccgtgttcgagcctagcaaggccgagatcgcccacacccagaaagccaccctcgtgtgcctggctaccggcttctaccccgaccatgtggaactgtcttggtgggtcaacggcaaagaggtgcacagcggcgtgtgtaccgacccccagccactgaaagaacagcccgccctgaacgacagccggtactgcctgagcagcagactgagagtgtccgccaccttctggcagaacccccggaaccacttcagatgccaggtgcagttctacggcctgagcgagaacgacgagtggacccaggacagagccaagcccgtgacccagatcgtgtctgccgaagcctggggcagagccgattgcggcatcaccagcgccagctaccaccagggcgtgctgagcgccaccatcctgtacgagatcctgctgggcaaggccaccctgtacgccgtgctggtgtctgccctggtgctgatggctatggtcaagcggaaggacagccgggga

SEQ ID NO: 34963 - DNA, 1851 bp, synthetic construct
  source 1..1851: mol_type = other DNA
atggccttaccagtgaccgccttgctcctgccgctggccttgctgctccacgccgccaggccgcagatcgtgctgacacagagccccgccatcatgtctgttagccctggcgagaaagtgaccatgacctgtagcgccagcagcagcgtgaactacatgcactggttccagcagaagcccggcacaagccctaagctgtgggtgtacagcaccagcaatctggcctctggcgtgccagccagattttctggctctggcagcggcaccagctacagcctgacaatcagcagcatggaagccgaggatgccgccacctactattgtcagcagcggagcatctacccaccttggacatttggcggaggcaccaagctggaaatcaaactcgaggacctgaagaacgtgttcccacctgaggtggccgtgttcgagcctagcaaggccgagatcgcccacacccagaaagccaccctcgtgtgcctggctaccggcttctaccccgaccatgtggaactgtcttggtgggtcaacggcaaagaggtgcacagcggcgtgtgtaccgacccccagccactgaaagaacagcccgccctgaacgacagccggtactgcctgagcagcagactgagagtgtccgccaccttctggcagaacccccggaaccacttcagatgccaggtgcagttctacggcctgagcgagaacgacgagtggacccaggacagagccaagcccgtgacccagatcgtgtctgccgaagcctggggcagagccgattgcggcatcaccagcgccagctaccaccagggcgtgctgagcgccaccatcctgtacgagatcctgctgggcaaggccaccctgtacgccgtgctggtgtctgccctggtgctgatggctatggtcaagcggaaggacagccggggaagggccaagcgatctggatctggagcaacaaacttctcactactcaaacaagcaggtgacgtggaggagaatcccgggcctactagtatggactggatttggcgcatccttttccttgtcggcgctgctaccggcgcgcattccttcgaagaagttcagctccagcagagcggccctgagcttgtgaaacctggcgcttccgtgaagatcagctgcaaggccagcggctacagcttcaccggctacaccatgaactgggtcaagcagtcccacggcaagaacctggaatggatcggcctgattaacccctacaacggcggcacctcctacaaccagaagttcaaggccaaggccacactgaccgtggacaagagcagcagcacagcctacatgcagctgaagtccctgaccagcgaggacagcgccgtgtactactgcgccagagattacggctacgtgctggactattggggccagggcacaagcgtgacagtgtctagtacgcgtatccagaaccctgatcctgccgtgtaccagctgcgggatagcaagagcagcgacaagagcgtgtgtctgttcaccgacttcgacagccagaccaacgtgtcccagagcaaggactccgacgtgtacatcaccgataagtgcgtgctggacatgcggagcatggacttcaagagcaactccgccgtggcctggtccaacaagtccgatttcgcctgcgccaacgccttcaacaacagcattatccccgaggacacattcttcccaagcagcgacgtgccctgcgacgtgaagctggtggaaaagagcttcgagacagacaccaacctgaacttccagaacctgagcgtgatcggcttcagaatcctgctgctgaaagtggccggctttaacctgctgatgaccctgcggctgtggtccagc

SEQ ID NO: 34964 - DNA, 1851 bp, synthetic construct
  source 1..1851: mol_type = other DNA
atggccttaccagtgaccgccttgctcctgccgctggccttgctgctccacgccgccaggccgcagatcgtgctgacacagagccccgccatcatgtctgttagccctggcgagaaagtgaccatgacctgtagcgccagcagcagcgtgaactacatgcactggttccagcagaagcccggcacaagccctaagctgtgggtgtacagcaccagcaatctggcctctggcgtgccagccagattttctggctctggcagcggcaccagctacagcctgacaatcagcagcatggaagccgaggatgccgccacctactattgtcagcagcggagcatctacccaccttggacatttggcggaggcaccaagctggaaatcaaactcgaggacctgaagaacgtgttcccacctgaggtggccgtgttcgagcctagcgaggccgagatcagccacacccagaaagccaccctcgtgtgcctggctaccggcttctaccccgaccatgtggaactgtcttggtgggtcaacggcaaagaggtgcacagcggcgtgtgtaccgacccccagccactgaaagaacagcccgccctgaacgacagccggtactgcctgagcagcagactgagagtgtccgccaccttctggcagaacccccggaaccacttcagatgccaggtgcagttctacggcctgagcgagaacgacgagtggacccaggacagagccaagcccgtgacccagatcgtgtctgccgaagcctggggcagagccgattgcggctttaccagcgagagctaccagcagggcgtgctgagcgccaccatcctgtacgagatcctgctgggcaaggccaccctgtacgccgtgctggtgtctgccctggtgctgatggctatggtcaagcggaaggacagccggggaagggccaagcgatctggatctggagcaacaaacttctcactactcaaacaagcaggtgacgtggaggagaatcccgggcctactagtatggactggatttggcgcatccttttccttgtcggcgctgctaccggcgcgcattccttcgaagaagttcagctccagcagagcggccctgagcttgtgaaacctggcgcttccgtgaagatcagctgcaaggccagcggctacagcttcaccggctacaccatgaactgggtcaagcagtcccacggcaagaacctggaatggatcggcctgattaacccctacaacggcggcacctcctacaaccagaagttcaaggccaaggccacactgaccgtggacaagagcagcagcacagcctacatgcagctgaagtccctgaccagcgaggacagcgccgtgtactactgcgccagagattacggctacgtgctggactattggggccagggcacaagcgtgacagtgtctagtacgcgtatccagaaccctgatcctgccgtgtaccagctgcgggatagcaagagcagcgacaagagcgtgtgtctgttcaccgacttcgacagccagaccaacgtgtcccagagcaaggactccgacgtgtacatcaccgataagtgcgtgctggacatgcggagcatggacttcaagagcaactccgccgtggcctggtccaacaagtccgatttcgcctgcgccaacgccttcaacaacagcattatccccgaggacacattcttcccaagccccgagagcagctgcgacgtgaagctggtggaaaagagcttcgagacagacaccaacctgaacttccagaacctgagcgtgatcggcttcagaatcctgctgctgaaagtggccggctttaacctgctgatgaccctgcggctgtggtccagc

SEQ ID NO: 34965 - DNA, 1863 bp, synthetic construct
  source 1..1863: mol_type = other DNA
atggccttaccagtgaccgccttgctcctgccgctggccttgctgctccacgccgccaggccgcagatcgtgctgacacagagccccgccatcatgtctgttagccctggcgagaaagtgaccatgacctgtagcgccagcagcagcgtgaactacatgcactggttccagcagaagcccggcacaagccctaagctgtgggtgtacagcaccagcaatctggcctctggcgtgccagccagattttctggctctggcagcggcaccagctacagcctgacaatcagcagcatggaagccgaggatgccgccacctactattgtcagcagcggagcatctacccaccttggacatttggcggaggcaccaagctggaaatcaaactcgagatccagaaccctgatcctgccgtgtaccagctgcgggatagcaagagcagcgacaagagcgtgtgtctgttcaccgacttcgacagccagaccaacgtgtcccagagcaaggactccgacgtgtacatcaccgataagtgcgtgctggacatgcggagcatggacttcaagagcaactccgccgtggcctggtccaacaagtccgatttcgcctgcgccaacgccttcaacaacagcattatccccgaggacacattcttcccaagccccgagagcagctgcgacgtgaagctggtggaaaagagcttcgagacagacaccaacctgaacttccagaacctgagcgtgatcggcttcagaatcctgctgctgaaagtggccggctttaacctgctgatgaccctgcggctgtggtccagccgcgccaagagaagcggatctggcgtgaagcagaccctgaatttcgacctgctgaagctggctggcgacgtggaatccaacccaggccctactagtatggactggatttggcgcatccttttccttgtcggcgctgctaccggcgcgcattccttcgaagaagttcagctccagcagagcggccctgagcttgtgaaacctggcgcttccgtgaagatcagctgcaaggccagcggctacagcttcaccggctacaccatgaactgggtcaagcagtcccacggcaagaacctggaatggatcggcctgattaacccctacaacggcggcacctcctacaaccagaagttcaaggccaaggccacactgaccgtggacaagagcagcagcacagcctacatgcagctgaagtccctgaccagcgaggacagcgccgtgtactactgcgccagagattacggctacgtgctggactattggggccagggcacaagcgtgacagtgtctagtacgcgtgaggacctgaagaacgtgttcccacctgaggtggccgtgttcgagcctagcgaggccgagatcagccacacccagaaagccaccctcgtgtgcctggctaccggcttctaccccgaccatgtggaactgtcttggtgggtcaacggcaaagaggtgcacagcggcgtgtgtaccgacccccagccactgaaagaacagcccgccctgaacgacagccggtactgcctgagcagcagactgagagtgtccgccaccttctggcagaacccccggaaccacttcagatgccaggtgcagttctacggcctgagcgagaacgacgagtggacccaggacagagccaagcccgtgacccagatcgtgtctgccgaagcctggggcagagccgattgcggctttaccagcgagagctaccagcagggcgtgctgagcgccaccatcctgtacgagatcctgctgggcaaggccaccctgtacgccgtgctggtgtctgccctggtgctgatggctatggtcaagcggaaggacagccgggga

SEQ ID NO: 34966 - DNA, 1899 bp, synthetic construct
  source 1..1899: mol_type = other DNA
atggccttaccagtgaccgccttgctcctgccgctggccttgctgctccacgccgccaggccgctcgaggaggacctgaagaacgtgttcccacctgaggtggccgtgttcgagcctagcaaggccgagatcgcccacacccagaaagccaccctcgtgtgcctggctaccggcttctaccccgaccatgtggaactgtcttggtgggtcaacggcaaagaggtgcacagcggcgtgtgtaccgacccccagccactgaaagaacagcccgccctgaacgacagccggtactgcctgagcagcagactgagagtgtccgccaccttctggcagaacccccggaaccacttcagatgccaggtgcagttctacggcctgagcgagaacgacgagtggacccaggacagagccaagcccgtgacccagatcgtgtctgccgaagcctggggcagagccgattgcggcatcaccagcgccagctaccaccagggcgtgctgagcgccaccatcctgtacgagatcctgctgggcaaggccaccctgtacgccgtgctggtgtctgccctggtgctgatggctatggtcaagcggaaggacagccggggaagggccaagcgatctggatctggagcaacaaacttctcactactcaaacaagcaggtgacgtggaggagaatcccgggcctactagcatggccttaccagtgaccgccttgctcctgccgctggccttgctgctccacgccgccaggccgcagatcgtgctgacacagagccccgccatcatgtctgttagccctggcgagaaagtgaccatgacctgtagcgccagcagcagcgtgaactacatgcactggttccagcagaagcccggcacaagccctaagctgtgggtgtacagcaccagcaatctggcctctggcgtgccagccagattttctggctctggcagcggcaccagctacagcctgacaatcagcagcatggaagccgaggatgccgccacctactattgtcagcagcggagcatctacccaccttggacatttggcggaggcaccaagctggaaatcaaaggcggaggcggaagtggaggcggaggatctggcggcggaggctctgaagttcagctccagcagagcggccctgagcttgtgaaacctggcgcttccgtgaagatcagctgcaaggccagcggctacagcttcaccggctacaccatgaactgggtcaagcagtcccacggcaagaacctggaatggatcggcctgattaacccctacaacggcggcacctcctacaaccagaagttcaaggccaaggccacactgaccgtggacaagagcagcagcacagcctacatgcagctgaagtccctgaccagcgaggacagcgccgtgtactactgcgccagagattacggctacgtgctggactattggggccagggcacaagcgtgacagtgtctagtacgcgtatccagaaccctgatcctgccgtgtaccagctgcgggatagcaagagcagcgacaagagcgtgtgtctgttcaccgacttcgacagccagaccaacgtgtcccagagcaaggactccgacgtgtacatcaccgataagtgcgtgctggacatgcggagcatggacttcaagagcaactccgccgtggcctggtccaacaagtccgatttcgcctgcgccaacgccttcaacaacagcattatccccgaggacacattcttcccaagcagcgacgtgccctgcgacgtgaagctggtggaaaagagcttcgagacagacaccaacctgaacttccagaacctgagcgtgatcggcttcagaatcctgctgctgaaagtggccggctttaacctgctgatgaccctgcggctgtggtccagc

SEQ ID NO: 34967 - DNA, 1920 bp, synthetic construct
  source 1..1920: mol_type = other DNA
atggccttaccagtgaccgccttgctcctgccgctggccttgctgctccacgccgccaggccgctcgagggctccggcgatcgccctgatcctgccgtgtaccagctgcgggatagcaagagcagcgacaagagcgtgtgtctgttcaccgacttcgacagccagaccaacgtgtcccagagcaaggactccgacgtgtacatcaccgataagtgcgtgctggacatgcggagcatggacttcaagagcaactccgccgtggcctggtccaacaagtccgatttcgcctgcgccaacgccttcaacaacagcattatccccgaggacacattcttcccaagccccgagagcagctgcgacgtgaagctggtggaaaagagcttcgagacagacaccaacctgaacttccagaacctgagcgtgatcggcttcagaatcctgctgctgaaagtggccggctttaacctgctgatgaccctgcggctgtggtccagctctagtcgcgccaagagaagcggatctggcgtgaagcagaccctgaatttcgacctgctgaagctggctggcgacgtggaatccaacccaggccccactagcatggccttaccagtgaccgccttgctcctgccgctggccttgctgctccacgccgccaggccgcagatcgtgctgacacagagccccgccatcatgtctgttagccctggcgagaaagtgaccatgacctgtagcgccagcagcagcgtgaactacatgcactggttccagcagaagcccggcacaagccctaagctgtgggtgtacagcaccagcaatctggcctctggcgtgccagccagattttctggctctggcagcggcaccagctacagcctgacaatcagcagcatggaagccgaggatgccgccacctactattgtcagcagcggagcatctacccaccttggacatttggcggaggcaccaagctggaaatcaaaggcggaggcggaagtggaggcggaggatctggcggcggaggctctgaagttcagctccagcagagcggccctgagcttgtgaaacctggcgcttccgtgaagatcagctgcaaggccagcggctacagcttcaccggctacaccatgaactgggtcaagcagtcccacggcaagaacctggaatggatcggcctgattaacccctacaacggcggcacctcctacaaccagaagttcaaggccaaggccacactgaccgtggacaagagcagcagcacagcctacatgcagctgaagtccctgaccagcgaggacagcgccgtgtactactgcgccagagattacggctacgtgctggactattggggccagggcacaagcgtgacagtgtctagtacgcgtgaggacctgaagaacgtgttcccacctgaggtggccgtgttcgagcctagcgaggccgagatcagccacacccagaaagccaccctcgtgtgcctggctaccggcttctaccccgaccatgtggaactgtcttggtgggtcaacggcaaagaggtgcacagcggcgtgtgtaccgacccccagccactgaaagaacagcccgccctgaacgacagccggtactgcctgagcagcagactgagagtgtccgccaccttctggcagaacccccggaaccacttcagatgccaggtgcagttctacggcctgagcgagaacgacgagtggacccaggacagagccaagcccgtgacccagatcgtgtctgccgaagcctggggcagagccgattgcggctttaccagcgagagctaccagcagggcgtgctgagcgccaccatcctgtacgagatcctgctgggcaaggccaccctgtacgccgtgctggtgtctgccctggtgctgatggctatggtcaagcggaaggacagccgggga

SEQ ID NO: 34968 - DNA, 1851 bp, synthetic construct
  source 1..1851: mol_type = other DNA
atggccttaccagtgaccgccttgctcctgccgctggccttgctgctccacgccgccaggccgcagatcgtgctgacacagagccccgccatcatgtctgttagccctggcgagaaagtgaccatgacctgtagcgccagcagcagcgtgaactacatgcactggttccagcagaagcccggcacaagccctaagctgtgggtgtacagcaccagcaatctggcctctggcgtgccagccagattttctggctctggcagcggcaccagctacagcctgacaatcagcagcatggaagccgaggatgccgccacctactattgtcagcagcggagcatctacccaccttggacatttggcggaggcaccaagctggaaatcaaactcgaggacctgaagaacgtgttcccacctgaggtggccgtgttcgagcctagcgaggccgagatcagccacacccagaaagccaccctcgtgtgcctggctaccggcttctaccccgaccatgtggaactgtcttggtgggtcaacggcaaagaggtgcacagcggcgtgtctaccgacccccagccactgaaagaacagcccgccctgaacgacagccggtactgcctgagcagcagactgagagtgtccgccaccttctggcagaacccccggaaccacttcagatgccaggtgcagttctacggcctgagcgagaacgacgagtggacccaggacagagccaagcccgtgacccagatcgtgtctgccgaagcctggggcagagccgattgcggctttaccagcgagagctaccagcagggcgtgctgagcgccaccatcctgtacgagatcctgctgggcaaggccaccctgtacgccgtgctggtgtctgccctggtgctgatggctatggtcaagcggaaggacagccggggaagggccaagcgatctggatctggagcaacaaacttctcactactcaaacaagcaggtgacgtggaggagaatcccgggcctactagtatggactggatttggcgcatccttttccttgtcggcgctgctaccggcgcgcattccttcgaagaagttcagctccagcagagcggccctgagcttgtgaaacctggcgcttccgtgaagatcagctgcaaggccagcggctacagcttcaccggctacaccatgaactgggtcaagcagtcccacggcaagaacctggaatggatcggcctgattaacccctacaacggcggcacctcctacaaccagaagttcaaggccaaggccacactgaccgtggacaagagcagcagcacagcctacatgcagctgaagtccctgaccagcgaggacagcgccgtgtactactgcgccagagattacggctacgtgctggactattggggccagggcacaagcgtgacagtgtctagtacgcgtatccagaaccctgatcctgccgtgtaccagctgcgggatagcaagagcagcgacaagagcgtgtgtctgttcaccgacttcgacagccagaccaacgtgtcccagagcaaggactccgacgtgtacatcaccgataagaccgtgctggacatgcggagcatggacttcaagagcaactccgccgtggcctggtccaacaagtccgatttcgcctgcgccaacgccttcaacaacagcattatccccgaggacacattcttcccaagccccgagagcagctgcgacgtgaagctggtggaaaagagcttcgagacagacaccaacctgaacttccagaacctgagcgtgatcggcttcagaatcctgctgctgaaagtggccggctttaacctgctgatgaccctgcggctgtggtccagc

SEQ ID NO: 34969 - DNA, 1875 bp, synthetic construct
  source 1..1875: mol_type = other DNA
atggccttaccagtgaccgccttgctcctgccgctggccttgctgctccacgccgccaggccgcagatcgtgctgacacagagccccgccatcatgtctgttagccctggcgagaaagtgaccatgacctgtagcgccagcagcagcgtgaactacatgcactggttccagcagaagcccggcacaagccctaagctgtgggtgtacagcaccagcaatctggcctctggcgtgccagccagattttctggctctggcagcggcaccagctacagcctgacaatcagcagcatggaagccgaggatgccgccacctactattgtcagcagcggagcatctacccaccttggacatttggcggaggcaccaagctggaaatcaaactcgaggacaagcagctggacgccgacgtgtcccccaagcctaccatcttcctgccctctatcgccgagacaaagctccagaaggccggcacctacctgtgcctgctggaaaagttcttcccagatgtgattaagatccactggcaggaaaagaagtccaacaccatcctgggcagccaggaaggcaacaccatgaagaccaacgacacctacatgaagttcagctggctgaccgtgcccgagaagtccctggacaaagaacacagatgcatcgtgcggcacgaaaacaacaagaacggcgtggaccaggaaatcatcttcccacccatcaagaccgatgtgattacaatggaccccaaggacaactgctccaaggacgccaacgataccctgctgctccagctgaccaacaccagcgcctactacatgtacttgttgctgctgctgaagtccgtggtgtacttcgccatcatcacatgctgcctgctgcggagaaccgccttctgctgcaacggcgagaagtctagggccaagcgatctggatctggagcaacaaacttctcactactcaaacaagcaggtgacgtggaggagaatcccgggcctactagtatggactggatttggcgcatccttttccttgtcggcgctgctaccggcgcgcattccttcgaagaagttcagctccagcagagcggccctgagcttgtgaaacctggcgcttccgtgaagatcagctgcaaggccagcggctacagcttcaccggctacaccatgaactgggtcaagcagtcccacggcaagaacctggaatggatcggcctgattaacccctacaacggcggcacctcctacaaccagaagttcaaggccaaggccacactgaccgtggacaagagcagcagcacagcctacatgcagctgaagtccctgaccagcgaggacagcgccgtgtactactgcgccagagattacggctacgtgctggactattggggccagggcacaagcgtgacagtgtctagtacgcgtagccagcctcacaccaagcccagcgtgttcgtgatgaagaacggcaccaacgtggcctgcctcgtgaaagagttctaccccaaggacatcaggatcaacctggtgtccagcaagaagatcaccgagttcgaccccgccatcgtgatctcccccagcggcaagtacaacgccgtgaagctggggaagtacgaggacagcaacagcgtgacctgctccgtgcagcacgacaacaagaccgtgcacagcaccgactttgaagtgaaaaccgactccaccgaccacgtgaagcccaaagagacagagaacaccaagcagcccagcaagagctgccacaagcccaaggccatcgtgcacaccgagaaagtgaacatgatgagcctgaccgtgctgggcctgcggatgctgttcgccaaaaccgtggccgtgaacttcctgctgaccgccaagctgttcttcctc

SEQ ID NO: 34970 - DNA, 1875 bp, synthetic construct
  source 1..1875: mol_type = other DNA
atggccttaccagtgaccgccttgctcctgccgctggccttgctgctccacgccgccaggccgcagatcgtgctgacacagagccccgccatcatgtctgttagccctggcgagaaagtgaccatgacctgtagcgccagcagcagcgtgaactacatgcactggttccagcagaagcccggcacaagccctaagctgtgggtgtacagcaccagcaatctggcctctggcgtgccagccagattttctggctctggcagcggcaccagctacagcctgacaatcagcagcatggaagccgaggatgccgccacctactattgtcagcagcggagcatctacccaccttggacatttggcggaggcaccaagctggaaatcaaactcgagagccagcctcacaccaagcccagcgtgttcgtgatgaagaacggcaccaacgtggcctgcctcgtgaaagagttctaccccaaggacatcaggatcaacctggtgtccagcaagaagatcaccgagttcgaccccgccatcgtgatctcccccagcggcaagtacaacgccgtgaagctggggaagtacgaggacagcaacagcgtgacctgctccgtgcagcacgacaacaagaccgtgcacagcaccgactttgaagtgaaaaccgactccaccgaccacgtgaagcccaaagagacagagaacaccaagcagcccagcaagagctgccacaagcccaaggccatcgtgcacaccgagaaagtgaacatgatgagcctgaccgtgctgggcctgcggatgctgttcgccaaaaccgtggccgtgaacttcctgctgaccgccaagctgttcttcctcagggccaagcgatctggatctggagcaacaaacttctcactactcaaacaagcaggtgacgtggaggagaatcccgggcctactagtatggactggatttggcgcatccttttccttgtcggcgctgctaccggcgcgcattccttcgaagaagttcagctccagcagagcggccctgagcttgtgaaacctggcgcttccgtgaagatcagctgcaaggccagcggctacagcttcaccggctacaccatgaactgggtcaagcagtcccacggcaagaacctggaatggatcggcctgattaacccctacaacggcggcacctcctacaaccagaagttcaaggccaaggccacactgaccgtggacaagagcagcagcacagcctacatgcagctgaagtccctgaccagcgaggacagcgccgtgtactactgcgccagagattacggctacgtgctggactattggggccagggcacaagcgtgacagtgtctagtacgcgtgacaagcagctggacgccgacgtgtcccccaagcctaccatcttcctgccctctatcgccgagacaaagctccagaaggccggcacctacctgtgcctgctggaaaagttcttcccagatgtgattaagatccactggcaggaaaagaagtccaacaccatcctgggcagccaggaaggcaacaccatgaagaccaacgacacctacatgaagttcagctggctgaccgtgcccgagaagtccctggacaaagaacacagatgcatcgtgcggcacgaaaacaacaagaacggcgtggaccaggaaatcatcttcccacccatcaagaccgatgtgattacaatggaccccaaggacaactgctccaaggacgccaacgataccctgctgctccagctgaccaacaccagcgcctactacatgtacttgttgctgctgctgaagtccgtggtgtacttcgccatcatcacatgctgcctgctgcggagaaccgccttctgctgcaacggcgagaagtct

SEQ ID NO: 34971 - DNA, 1920 bp, synthetic construct
  source 1..1920: mol_type = other DNA
atggccttaccagtgaccgccttgctcctgccgctggccttgctgctccacgccgccaggccgctcgaggacaagcagctggacgccgacgtgtcccccaagcctaccatcttcctgccctctatcgccgagacaaagctccagaaggccggcacctacctgtgcctgctggaaaagttcttcccagatgtgattaagatccactggcaggaaaagaagtccaacaccatcctgggcagccaggaaggcaacaccatgaagaccaacgacacctacatgaagttcagctggctgaccgtgcccgagaagtccctggacaaagaacacagatgcatcgtgcggcacgaaaacaacaagaacggcgtggaccaggaaatcatcttcccacccatcaagaccgatgtgattacaatggaccccaaggacaactgctccaaggacgccaacgataccctgctgctccagctgaccaacaccagcgcctactacatgtacttgttgctgctgctgaagtccgtggtgtacttcgccatcatcacatgctgcctgctgcggagaaccgccttctgctgcaacggcgagaagtctagggccaagcgatctggatctggagcaacaaacttctcactactcaaacaagcaggtgacgtggaggagaatcccgggcctactagcatggccttaccagtgaccgccttgctcctgccgctggccttgctgctccacgccgccaggccgcagatcgtgctgacacagagccccgccatcatgtctgttagccctggcgagaaagtgaccatgacctgtagcgccagcagcagcgtgaactacatgcactggttccagcagaagcccggcacaagccctaagctgtgggtgtacagcaccagcaatctggcctctggcgtgccagccagattttctggctctggcagcggcaccagctacagcctgacaatcagcagcatggaagccgaggatgccgccacctactattgtcagcagcggagcatctacccaccttggacatttggcggaggcaccaagctggaaatcaaaggcggaggcggaagtggaggcggaggatctggcggcggaggctctgaagttcagctccagcagagcggccctgagcttgtgaaacctggcgcttccgtgaagatcagctgcaaggccagcggctacagcttcaccggctacaccatgaactgggtcaagcagtcccacggcaagaacctggaatggatcggcctgattaacccctacaacggcggcacctcctacaaccagaagttcaaggccaaggccacactgaccgtggacaagagcagcagcacagcctacatgcagctgaagtccctgaccagcgaggacagcgccgtgtactactgcgccagagattacggctacgtgctggactattggggccagggcacaagcgtgacagtgtctagtacgcgtagccagcctcacaccaagcccagcgtgttcgtgatgaagaacggcaccaacgtggcctgcctcgtgaaagagttctaccccaaggacatcaggatcaacctggtgtccagcaagaagatcaccgagttcgaccccgccatcgtgatctcccccagcggcaagtacaacgccgtgaagctggggaagtacgaggacagcaacagcgtgacctgctccgtgcagcacgacaacaagaccgtgcacagcaccgactttgaagtgaaaaccgactccaccgaccacgtgaagcccaaagagacagagaacaccaagcagcccagcaagagctgccacaagcccaaggccatcgtgcacaccgagaaagtgaacatgatgagcctgaccgtgctgggcctgcggatgctgttcgccaaaaccgtggccgtgaacttcctgctgaccgccaagctgttcttcctc

SEQ ID NO: 34972 - DNA, 2382 bp, synthetic construct
  source 1..2382: mol_type = other DNA
atggccttaccagtgaccgccttgctcctgccgctggccttgctgctccacgccgccaggccgcagatcgtgctgacacagagccccgccatcatgtctgttagccctggcgagaaagtgaccatgacctgtagcgccagcagcagcgtgaactacatgcactggttccagcagaagcccggcacaagccctaagctgtgggtgtacagcaccagcaatctggcctctggcgtgccagccagattttctggctctggcagcggcaccagctacagcctgacaatcagcagcatggaagccgaggatgccgccacctactattgtcagcagcggagcatctacccaccttggacatttggcggaggcaccaagctggaaatcaaaggacagcctaaggccaatcctaccgtgacactgttccctccaagcagcgaagaactccaggccaacaaggccacacttgtgtgcctgatctccgacttctaccctggggctgtgacagtggcttggaaggccgatggatctcctgtgaaagccggcgtggaaaccaccaagccatccaagcagagcaacaacaaatacgccgccagctcctacctgagcctgacacctgagcagtggaagtcccacagatcctacagctgccaagtgacccacgaaggcagcaccgtggaaaagacagtggcccctacagagtgcagcggatcccagagcttcggcctgctggaccccaagctgtgctacctgctggatggcatcctgttcatctacggcgtgatcctgaccgccctgttcctgagagtgaagttcagcagaagcgccgacgcccctgcctaccagcagggacagaaccaactgtacaacgagctgaacctgggcagacgggaagagtacgacgtgctggacaagcggagaggcagggaccctgagatgggcggaaagccccagcggagaaagaacccccaggaaggactgtataacgaactccagaaagacaagatggccgaagcctacagcgagatcggcatgaagggcgagcggagaagaggcaagggccacgatggcctgtaccagggcctgagcaccgccaccaaggacacctatgacgccctgcacatgcaggccctgcctccaagaagggccaagcgatctggatctggagcaacaaacttctcactactcaaacaagcaggtgacgtggaggagaatcccgggcctactagtatggactggatttggcgcatccttttccttgtcggcgctgctaccggcgcgcattccttcgaagaagttcagctccagcagagcggccctgagcttgtgaaacctggcgcttccgtgaagatcagctgcaaggccagcggctacagcttcaccggctacaccatgaactgggtcaagcagtcccacggcaagaacctggaatggatcggcctgattaacccctacaacggcggcacctcctacaaccagaagttcaaggccaaggccacactgaccgtggacaagagcagcagcacagcctacatgcagctgaagtccctgaccagcgaggacagcgccgtgtactactgcgccagagattacggctacgtgctggactattggggccagggcacaagcgtgacagtgtctagtgcctctacaaagggaccctccgtgtttcctctggctcccagcagcaagtctacaagcggaggaacagccgctctgggctgcctggtcaaggattactttcccgagcctgtgaccgtgtcctggaatagcggagcactgacaagcggcgtgcacacctttccagccgtgctgcaaagcagcggcctgtactctctgagcagcgtggtcacagtgcctagctctagcctgggcacccagacctacatctgcaatgtgaaccacaagcctagcaacaccaaggtggacaagagagtggaacccaagagctgtggtacccagagttttgggttgttggaccctaaattgtgctatctgttggacggaatcctgttcatttacggagtgatcctgaccgcattgttcctgcgggttaagttttccagatccgcagacgcacccgcttaccaacaagggcagaaccaactctacaatgaacttaatttggggcggagggaagagtacgacgttctggacaaaaggaggggacgagatcccgagatgggcggaaagcctcagcgaaggaagaatccgcaagaggggctttataacgaactccagaaagataaaatggcagaagcctatagtgagattgggatgaagggagaaaggaggaggggtaaaggtcacgatgggttgtaccaaggattgagcacagccactaaagatacctatgatgcgctccacatgcaggccctgccgccaaga

SEQ ID NO: 34973 - DNA, 2439 bp, synthetic construct
  source 1..2439: mol_type = other DNA
atggccttaccagtgaccgccttgctcctgccgctggccttgctgctccacgccgccaggccgcagatcgtgctgacacagagccccgccatcatgtctgttagccctggcgagaaagtgaccatgacctgtagcgccagcagcagcgtgaactacatgcactggttccagcagaagcccggcacaagccctaagctgtgggtgtacagcaccagcaatctggcctctggcgtgccagccagattttctggctctggcagcggcaccagctacagcctgacaatcagcagcatggaagccgaggatgccgccacctactattgtcagcagcggagcatctacccaccttggacatttggcggaggcaccaagctggaaatcaaactcgaggacctgaagaacgtgttcccacctgaggtggccgtgttcgagcctagcgaggccgagatcagccacacccagaaagccaccctcgtgtgcctggctaccggcttctaccccgaccatgtggaactgtcttggtgggtcaacggcaaagaggtgcacagcggcgtgtctaccgacccccagccactgaaagaacagcccgccctgaacgacagccggtactgcctgagcagcagactgagagtgtccgccaccttctggcagaacccccggaaccacttcagatgccaggtgcagttctacggcctgagcgagaacgacgagtggacccaggacagagccaagcccgtgacccagatcgtgtctgccgaagcctggggcagagccgattgcggatcccagagcttcggcctgctggaccccaagctgtgctacctgctggatggcatcctgttcatctacggcgtgatcctgaccgccctgttcctgagagtgaagttcagcagaagcgccgacgcccctgcctaccagcagggacagaaccaactgtacaacgagctgaacctgggcagacgggaagagtacgacgtgctggacaagcggagaggcagggaccctgagatgggcggaaagccccagcggagaaagaacccccaggaaggactgtataacgaactccagaaagacaagatggccgaagcctacagcgagatcggcatgaagggcgagcggagaagaggcaagggccacgatggcctgtaccagggcctgagcaccgccaccaaggacacctatgacgccctgcacatgcaggccctgcctccaagaagggccaagcgatctggatctggagcaacaaacttctcactactcaaacaagcaggtgacgtggaggagaatcccgggcctactagtatggactggatttggcgcatccttttccttgtcggcgctgctaccggcgcgcattccttcgaagaagttcagctccagcagagcggccctgagcttgtgaaacctggcgcttccgtgaagatcagctgcaaggccagcggctacagcttcaccggctacaccatgaactgggtcaagcagtcccacggcaagaacctggaatggatcggcctgattaacccctacaacggcggcacctcctacaaccagaagttcaaggccaaggccacactgaccgtggacaagagcagcagcacagcctacatgcagctgaagtccctgaccagcgaggacagcgccgtgtactactgcgccagagattacggctacgtgctggactattggggccagggcacaagcgtgacagtgtctagtacgcgtatccagaaccctgatcctgccgtgtaccagctgcgggatagcaagagcagcgacaagagcgtgtgtctgttcaccgacttcgacagccagaccaacgtgtcccagagcaaggactccgacgtgtacatcaccgataagaccgtgctggacatgcggagcatggacttcaagagcaactccgccgtggcctggtccaacaagtccgatttcgcctgcgccaacgccttcaacaacagcattatccccgaggacacattcttcccaagccccgagagcagctgcggtacccagagttttgggttgttggaccctaaattgtgctatctgttggacggaatcctgttcatttacggagtgatcctgaccgcattgttcctgcgggttaagttttccagatccgcagacgcacccgcttaccaacaagggcagaaccaactctacaatgaacttaatttggggcggagggaagagtacgacgttctggacaaaaggaggggacgagatcccgagatgggcggaaagcctcagcgaaggaagaatccgcaagaggggctttataacgaactccagaaagataaaatggcagaagcctatagtgagattgggatgaagggagaaaggaggaggggtaaaggtcacgatgggttgtaccaaggattgagcacagccactaaagatacctatgatgcgctccacatgcaggccctgccgccaaga

SEQ ID NO: 34974 - DNA, 2565 bp, synthetic construct
  source 1..2565: mol_type = other DNA
atggccttaccagtgaccgccttgctcctgccgctggccttgctgctccacgccgccaggccgcagatcgtgctgacacagagccccgccatcatgtctgttagccctggcgagaaagtgaccatgacctgtagcgccagcagcagcgtgaactacatgcactggttccagcagaagcccggcacaagccctaagctgtgggtgtacagcaccagcaatctggcctctggcgtgccagccagattttctggctctggcagcggcaccagctacagcctgacaatcagcagcatggaagccgaggatgccgccacctactattgtcagcagcggagcatctacccaccttggacatttggcggaggcaccaagctggaaatcaaactcgaggaggacctgaagaacgtgttcccacctgaggtggccgtgttcgagcctagcgaggccgagatcagccacacccagaaagccaccctcgtgtgcctggctaccggcttctaccccgaccatgtggaactgtcttggtgggtcaacggcaaagaggtgcacagcggcgtgtctaccgacccccagccactgaaagaacagcccgccctgaacgacagccggtactgcctgagcagcagactgagagtgtccgccaccttctggcagaacccccggaaccacttcagatgccaggtgcagttctacggcctgagcgagaacgacgagtggacccaggacagagccaagcccgtgacccagatcgtgtctgccgaagcctggggcagagccgattgcggatcccagagcttcggcctgctggaccccaagctgtgctacctgctggatggcatcctgttcatctacggcgtgatcctgaccgccctgttcctgagagtgaagttcagcagaagcgccgacgcccctgcctaccagcagggacagaaccaactgtacaacgagctgaacctgggcagacgggaagagtacgacgtgctggacaagcggagaggcagggaccctgagatgggcggaaagccccagcggagaaagaacccccaggaaggactgtataacgaactccagaaagacaagatggccgaagcctacagcgagatcggcatgaagggcgagcggagaagaggcaagggccacgatggcctgtaccagggcctgagcaccgccaccaaggacacctatgacgccctgcacatgcaggccctgcctccaagaagggccaagcgatctggatctggagcaacaaacttctcactactcaaacaagcaggtgacgtggaggagaatcccgggcctactagtatggactggatttggcgcatccttttccttgtcggcgctgctaccggcgcgcattccttcgaagaagttcagctccagcagagcggccctgagcttgtgaaacctggcgcttccgtgaagatcagctgcaaggccagcggctacagcttcaccggctacaccatgaactgggtcaagcagtcccacggcaagaacctggaatggatcggcctgattaacccctacaacggcggcacctcctacaaccagaagttcaaggccaaggccacactgaccgtggacaagagcagcagcacagcctacatgcagctgaagtccctgaccagcgaggacagcgccgtgtactactgcgccagagattacggctacgtgctggactattggggccagggcacaagcgtgacagtgtctagtacgcgtatccagaaccctgatcctgccgtgtaccagctgcgggatagcaagagcagcgacaagagcgtgtgtctgttcaccgacttcgacagccagaccaacgtgtcccagagcaaggactccgacgtgtacatcaccgataagaccgtgctggacatgcggagcatggacttcaagagcaactccgccgtggcctggtccaacaagtccgatttcgcctgcgccaacgccttcaacaacagcattatccccgaggacacattcttcccaagccccgagagcagctgcggtacccagagttttgggttgttggaccctaaattgtgctatctgttggacggaatcctgttcatttacggagtgatcctgaccgcattgttcctgaggagcaagcggtcacggctgctccacagcgattacatgaatatgacaccacgaagaccgggtcctactcgcaaacactaccaaccctacgcacctccccgcgactttgcagcgtaccgatctcgggttaagttttccagatccgcagacgcacccgcttaccaacaagggcagaaccaactctacaatgaacttaatttggggcggagggaagagtacgacgttctggacaaaaggaggggacgagatcccgagatgggcggaaagcctcagcgaaggaagaatccgcaagaggggctttataacgaactccagaaagataaaatggcagaagcctatagtgagattgggatgaagggagaaaggaggaggggtaaaggtcacgatgggttgtaccaaggattgagcacagccactaaagatacctatgatgcgctccacatgcaggccctgccgccaaga

SEQ ID NO: 34975 - DNA, 2694 bp, synthetic construct
  source 1..2694: mol_type = other DNA
atggccttaccagtgaccgccttgctcctgccgctggccttgctgctccacgccgccaggccgcagatcgtgctgacacagagccccgccatcatgtctgttagccctggcgagaaagtgaccatgacctgtagcgccagcagcagcgtgaactacatgcactggttccagcagaagcccggcacaagccctaagctgtgggtgtacagcaccagcaatctggcctctggcgtgccagccagattttctggctctggcagcggcaccagctacagcctgacaatcagcagcatggaagccgaggatgccgccacctactattgtcagcagcggagcatctacccaccttggacatttggcggaggcaccaagctggaaatcaaactcgaggaggacctgaagaacgtgttcccacctgaggtggccgtgttcgagcctagcgaggccgagatcagccacacccagaaagccaccctcgtgtgcctggctaccggcttctaccccgaccatgtggaactgtcttggtgggtcaacggcaaagaggtgcacagcggcgtgtctaccgacccccagccactgaaagaacagcccgccctgaacgacagccggtactgcctgagcagcagactgagagtgtccgccaccttctggcagaacccccggaaccacttcagatgccaggtgcagttctacggcctgagcgagaacgacgagtggacccaggacagagccaagcccgtgacccagatcgtgtctgccgaagcctggggcagagccgattgcggatcccagagcttcggcctgctggaccccaagctgtgctacctgctggatggcatcctgttcatctacggcgtgatcctgaccgccctgttcctgaaacggggcagaaagaaactcctgtatatattcaaacaaccatttatgagaccagtacaaactactcaagaggaagatggctgtagctgccgatttccagaagaagaagaaggaggatgtgaactgagagtgaagttcagcagaagcgccgacgcccctgcctaccagcagggacagaaccaactgtacaacgagctgaacctgggcagacgggaagagtacgacgtgctggacaagcggagaggcagggaccctgagatgggcggaaagccccagcggagaaagaacccccaggaaggactgtataacgaactccagaaagacaagatggccgaagcctacagcgagatcggcatgaagggcgagcggagaagaggcaagggccacgatggcctgtaccagggcctgagcaccgccaccaaggacacctatgacgccctgcacatgcaggccctgcctccaagaagggccaagcgatctggatctggagcaacaaacttctcactactcaaacaagcaggtgacgtggaggagaatcccgggcctactagtatggactggatttggcgcatccttttccttgtcggcgctgctaccggcgcgcattccttcgaagaagttcagctccagcagagcggccctgagcttgtgaaacctggcgcttccgtgaagatcagctgcaaggccagcggctacagcttcaccggctacaccatgaactgggtcaagcagtcccacggcaagaacctggaatggatcggcctgattaacccctacaacggcggcacctcctacaaccagaagttcaaggccaaggccacactgaccgtggacaagagcagcagcacagcctacatgcagctgaagtccctgaccagcgaggacagcgccgtgtactactgcgccagagattacggctacgtgctggactattggggccagggcacaagcgtgacagtgtctagtacgcgtatccagaaccctgatcctgccgtgtaccagctgcgggatagcaagagcagcgacaagagcgtgtgtctgttcaccgacttcgacagccagaccaacgtgtcccagagcaaggactccgacgtgtacatcaccgataagaccgtgctggacatgcggagcatggacttcaagagcaactccgccgtggcctggtccaacaagtccgatttcgcctgcgccaacgccttcaacaacagcattatccccgaggacacattcttcccaagccccgagagcagctgcggtacccagagttttgggttgttggaccctaaattgtgctatctgttggacggaatcctgttcatttacggagtgatcctgaccgcattgttcctgaagagaggccggaagaagctgctgtacatcttcaagcagcctttcatgcggcccgtgcagaccacccaggaagaggacggctgctcctgccggttccccgaggaagaagaaggcggctgcgagctgcgggttaagttttccagatccgcagacgcacccgcttaccaacaagggcagaaccaactctacaatgaacttaatttggggcggagggaagagtacgacgttctggacaaaaggaggggacgagatcccgagatgggcggaaagcctcagcgaaggaagaatccgcaagaggggctttataacgaactccagaaagataaaatggcagaagcctatagtgagattgggatgaagggagaaaggaggaggggtaaaggtcacgatgggttgtaccaaggattgagcacagccactaaagatacctatgatgcgctccacatgcaggccctgccgccaaga

SEQ ID NO: 34976 - DNA, 1755 bp, synthetic construct
  source 1..1755: mol_type = other DNA
atggccttaccagtgaccgccttgctcctgccgctggccttgctgctccacgccgccaggccgcagatcgtgctgacacagagccccgccatcatgtctgttagccctggcgagaaagtgaccatgacctgtagcgccagcagcagcgtgaactacatgcactggttccagcagaagcccggcacaagccctaagctgtgggtgtacagcaccagcaatctggcctctggcgtgccagccagattttctggctctggcagcggcaccagctacagcctgacaatcagcagcatggaagccgaggatgccgccacctactattgtcagcagcggagcatctacccaccttggacatttggcggaggcaccaagctggaaatcaaactcgagcagagcttcggcctgctggaccccaagctgtgctacctgctggatggcatcctgttcatctacggcgtgatcctgaccgccctgttcctgagagtgaagttcagcagaagcgccgacgcccctgcctaccagcagggacagaaccaactgtacaacgagctgaacctgggcagacgggaagagtacgacgtgctggacaagcggagaggcagggaccctgagatgggcggaaagccccagcggagaaagaacccccaggaaggactgtataacgaactccagaaagacaagatggccgaagcctacagcgagatcggcatgaagggcgagcggagaagaggcaagggccacgatggcctgtaccagggcctgagcaccgccaccaaggacacctatgacgccctgcacatgcaggccctgcctccaagaagggccaagcgatctggatctggagcaacaaacttctcactactcaaacaagcaggtgacgtggaggagaatcccgggcctactagtatggactggatttggcgcatccttttccttgtcggcgctgctaccggcgcgcattccttcgaagaagttcagctccagcagagcggccctgagcttgtgaaacctggcgcttccgtgaagatcagctgcaaggccagcggctacagcttcaccggctacaccatgaactgggtcaagcagtcccacggcaagaacctggaatggatcggcctgattaacccctacaacggcggcacctcctacaaccagaagttcaaggccaaggccacactgaccgtggacaagagcagcagcacagcctacatgcagctgaagtccctgaccagcgaggacagcgccgtgtactactgcgccagagattacggctacgtgctggactattggggccagggcacaagcgtgacagtgtctagtacgcgtcagagttttgggttgttggaccctaaattgtgctatctgttggacggaatcctgttcatttacggagtgatcctgaccgcattgttcctgcgggttaagttttccagatccgcagacgcacccgcttaccaacaagggcagaaccaactctacaatgaacttaatttggggcggagggaagagtacgacgttctggacaaaaggaggggacgagatcccgagatgggcggaaagcctcagcgaaggaagaatccgcaagaggggctttataacgaactccagaaagataaaatggcagaagcctatagtgagattgggatgaagggagaaaggaggaggggtaaaggtcacgatgggttgtaccaaggattgagcacagccactaaagatacctatgatgcgctccacatgcaggccctgccgccaaga

SEQ ID NO: 34977 - DNA, 1929 bp, synthetic construct
  source 1..1929: mol_type = other DNA
atggccttaccagtgaccgccttgctcctgccgctggccttgctgctccacgccgccaggccgcagatcgtgctgacacagagccccgccatcatgtctgttagccctggcgagaaagtgaccatgacctgtagcgccagcagcagcgtgaactacatgcactggttccagcagaagcccggcacaagccctaagctgtgggtgtacagcaccagcaatctggcctctggcgtgccagccagattttctggctctggcagcggcaccagctacagcctgacaatcagcagcatggaagccgaggatgccgccacctactattgtcagcagcggagcatctacccaccttggacatttggcggaggcaccaagctggaaatcaaactcgagggacagcctaaggccaatcctaccgtgacactgttccctccaagcagcgaagaactccaggccaacaaggccacacttgtgtgcctgatctccgacttctaccctggggctgtgacagtggcttggaaggccgatggatctcctgtgaaagccggcgtggaaaccaccaagccatccaagcagagcaacaacaaatacgccgccagctcctacctgagcctgacacctgagcagtggaagtcccacagatcctacagctgccaagtgacccacgaaggcagcaccgtggaaaagacagtggcccctacagagtgcagccccatcaagaccgatgtgattacaatggaccccaaggacaactgctccaaggacgccaacgataccctgctgctccagctgaccaacaccagcgcctactacatgtacttgttgctgctgctgaagtccgtggtgtacttcgccatcatcacatgctgcctgctgcggagaaccgccttctgctgcaacggcgagaagtctagggccaagcgatctggatctggagcaacaaacttctcactactcaaacaagcaggtgacgtggaggagaatcccgggcctactagtatggactggatttggcgcatccttttccttgtcggcgctgctaccggcgcgcattccttcgaagaagttcagctccagcagagcggccctgagcttgtgaaacctggcgcttccgtgaagatcagctgcaaggccagcggctacagcttcaccggctacaccatgaactgggtcaagcagtcccacggcaagaacctggaatggatcggcctgattaacccctacaacggcggcacctcctacaaccagaagttcaaggccaaggccacactgaccgtggacaagagcagcagcacagcctacatgcagctgaagtccctgaccagcgaggacagcgccgtgtactactgcgccagagattacggctacgtgctggactattggggccagggcacaagcgtgacagtgtctagtacgcgtgcctctacaaagggaccctccgtgtttcctctggctcccagcagcaagtctacaagcggaggaacagccgctctgggctgcctggtcaaggattactttcccgagcctgtgaccgtgtcctggaatagcggagcactgacaagcggcgtgcacacctttccagccgtgctgcaaagcagcggcctgtactctctgagcagcgtggtcacagtgcctagctctagcctgggcacccagacctacatctgcaatgtgaaccacaagcctagcaacaccaaggtggacaagagagtggaacccaagagctgtgaagtgaaaaccgactccaccgaccacgtgaagcccaaagagacagagaacaccaagcagcccagcaagagctgccacaagcccaaggccatcgtgcacaccgagaaagtgaacatgatgagcctgaccgtgctgggcctgcggatgctgttcgccaaaaccgtggccgtgaacttcctgctgaccgccaagctgttcttcctc

SEQ ID NO: 34978 - DNA, 1863 bp, synthetic construct
  source 1..1863: mol_type = other DNA
atggccttaccagtgaccgccttgctcctgccgctggccttgctgctccacgccgccaggccgcagatcgtgctgacacagagccccgccatcatgtctgttagccctggcgagaaagtgaccatgacctgtagcgccagcagcagcgtgaactacatgcactggttccagcagaagcccggcacaagccctaagctgtgggtgtacagcaccagcaatctggcctctggcgtgccagccagattttctggctctggcagcggcaccagctacagcctgacaatcagcagcatggaagccgaggatgccgccacctactattgtcagcagcggagcatctacccaccttggacatttggcggaggcaccaagctggaaatcaaactcgagggacagcctaaggccaatcctaccgtgacactgttccctccaagcagcgaagaactccaggccaacaaggccacacttgtgtgcctgatctccgacttctaccctggggctgtgacagtggcttggaaggccgatggatctcctgtgaaagccggcgtggaaaccaccaagccatccaagcagagcaacaacaaatacgccgccagctcctacctgagcctgacacctgagcagtggaagtcccacagatcctacagctgccaagtgacccacgaaggcagcaccgtggaaaagacagtggcccctacagagtgcagcggcagagccgattgcggcatcaccagcgccagctaccaccagggcgtgctgagcgccaccatcctgtacgagatcctgctgggcaaggccaccctgtacgccgtgctggtgtctgccctggtgctgatggctatggtcaagcggaaggacagccggggaagggccaagcgatctggatctggagcaacaaacttctcactactcaaacaagcaggtgacgtggaggagaatcccgggcctactagtatggactggatttggcgcatccttttccttgtcggcgctgctaccggcgcgcattccttcgaagaagttcagctccagcagagcggccctgagcttgtgaaacctggcgcttccgtgaagatcagctgcaaggccagcggctacagcttcaccggctacaccatgaactgggtcaagcagtcccacggcaagaacctggaatggatcggcctgattaacccctacaacggcggcacctcctacaaccagaagttcaaggccaaggccacactgaccgtggacaagagcagcagcacagcctacatgcagctgaagtccctgaccagcgaggacagcgccgtgtactactgcgccagagattacggctacgtgctggactattggggccagggcacaagcgtgacagtgtctagtacgcgtgcctctacaaagggaccctccgtgtttcctctggctcccagcagcaagtctacaagcggaggaacagccgctctgggctgcctggtcaaggattactttcccgagcctgtgaccgtgtcctggaatagcggagcactgacaagcggcgtgcacacctttccagccgtgctgcaaagcagcggcctgtactctctgagcagcgtggtcacagtgcctagctctagcctgggcacccagacctacatctgcaatgtgaaccacaagcctagcaacaccaaggtggacaagagagtggaacccaagagctgtatccccgaggacacattcttcccaagcagcgacgtgccctgcgacgtgaagctggtggaaaagagcttcgagacagacaccaacctgaacttccagaacctgagcgtgatcggcttcagaatcctgctgctgaaagtggccggctttaacctgctgatgaccctgcggctgtggtccagc

SEQ ID NO: 34979 - DNA, 1863 bp, synthetic construct
  source 1..1863: mol_type = other DNA
atggccttaccagtgaccgccttgctcctgccgctggccttgctgctccacgccgccaggccgcagatcgtgctgacacagagccccgccatcatgtctgttagccctggcgagaaagtgaccatgacctgtagcgccagcagcagcgtgaactacatgcactggttccagcagaagcccggcacaagccctaagctgtgggtgtacagcaccagcaatctggcctctggcgtgccagccagattttctggctctggcagcggcaccagctacagcctgacaatcagcagcatggaagccgaggatgccgccacctactattgtcagcagcggagcatctacccaccttggacatttggcggaggcaccaagctggaaatcaaactcgagggacagcctaaggccaatcctaccgtgacactgttccctccaagcagcgaagaactccaggccaacaaggccacacttgtgtgcctgatctccgacttctaccctggggctgtgacagtggcttggaaggccgatggatctcctgtgaaagccggcgtggaaaccaccaagccatccaagcagagcaacaacaaatacgccgccagctcctacctgagcctgacacctgagcagtggaagtcccacagatcctacagctgccaagtgacccacgaaggcagcaccgtggaaaagacagtggcccctacagagtgcagcggcagagccgattgcggctttaccagcgagagctaccagcagggcgtgctgagcgccaccatcctgtacgagatcctgctgggcaaggccaccctgtacgccgtgctggtgtctgccctggtgctgatggctatggtcaagcggaaggacagccggggaagggccaagcgatctggatctggagcaacaaacttctcactactcaaacaagcaggtgacgtggaggagaatcccgggcctactagtatggactggatttggcgcatccttttccttgtcggcgctgctaccggcgcgcattccttcgaagaagttcagctccagcagagcggccctgagcttgtgaaacctggcgcttccgtgaagatcagctgcaaggccagcggctacagcttcaccggctacaccatgaactgggtcaagcagtcccacggcaagaacctggaatggatcggcctgattaacccctacaacggcggcacctcctacaaccagaagttcaaggccaaggccacactgaccgtggacaagagcagcagcacagcctacatgcagctgaagtccctgaccagcgaggacagcgccgtgtactactgcgccagagattacggctacgtgctggactattggggccagggcacaagcgtgacagtgtctagtacgcgtgcctctacaaagggaccctccgtgtttcctctggctcccagcagcaagtctacaagcggaggaacagccgctctgggctgcctggtcaaggattactttcccgagcctgtgaccgtgtcctggaatagcggagcactgacaagcggcgtgcacacctttccagccgtgctgcaaagcagcggcctgtactctctgagcagcgtggtcacagtgcctagctctagcctgggcacccagacctacatctgcaatgtgaaccacaagcctagcaacaccaaggtggacaagagagtggaacccaagagctgtatccccgaggacacattcttcccaagccccgagagcagctgcgacgtgaagctggtggaaaagagcttcgagacagacaccaacctgaacttccagaacctgagcgtgatcggcttcagaatcctgctgctgaaagtggccggctttaacctgctgatgaccctgcggctgtggtccagc

SEQ ID NO: 34980 - DNA, 1341 bp, synthetic construct
  source 1..1341: mol_type = other DNA
atggccttaccagtgaccgccttgctcctgccgctggccttgctgctccacgccgccaggccgcagatcgtgctgacacagagccccgccatcatgtctgttagccctggcgagaaagtgaccatgacctgtagcgccagcagcagcgtgaactacatgcactggttccagcagaagcccggcacaagccctaagctgtgggtgtacagcaccagcaatctggcctctggcgtgccagccagattttctggctctggcagcggcaccagctacagcctgacaatcagcagcatggaagccgaggatgccgccacctactattgtcagcagcggagcatctacccaccttggacatttggcggaggcaccaagctggaaatcaaaggcggaggcggaagtggaggcggaggatctggcggcggaggctctgaagttcagctccagcagagcggccctgagcttgtgaaacctggcgcttccgtgaagatcagctgcaaggccagcggctacagcttcaccggctacaccatgaactgggtcaagcagtcccacggcaagaacctggaatggatcggcctgattaacccctacaacggcggcacctcctacaaccagaagttcaaggccaaggccacactgaccgtggacaagagcagcagcacagcctacatgcagctgaagtccctgaccagcgaggacagcgccgtgtactactgcgccagagattacggctacgtgctggactattggggccagggcacaagcgtgacagtgtctagtacgcgtgacggtaacgaggagatgggaggaatcactcaaaccccttacaaagtctcaatttcaggaacaactgttatccttacatgtccccagtatcctggcagcgagatcctttggcagcataacgacaagaatatagggggagatgaagacgataagaatatcggatctgacgaggatcacttgagcctgaaagagttctccgagcttgaacaaagcggatattatgtgtgctatccgcgcgggtcaaagccggaagacgctaacttttacctttatctccgagccagagtgtgcgaaaattgcatggaaatggacgttatgtccgttgctacaatagttatcgtagatatatgcatcacgggtggactgcttctgctggtttattattggtccaagaatagaaaggccaaagctaaacccgtgaccagaggcgctggcgcaggcggaaggcaaaggggacaaaacaaagaacggccaccaccagtgccaaatccagattatgagcctattcggaaaggacagagggacctgtactctggcctgaatcagagaagaatc

SEQ ID NO: 34981 - DNA, 1236 bp, synthetic construct
  source 1..1236: mol_type = other DNA
atggccttaccagtgaccgccttgctcctgccgctggccttgctgctccacgccgccaggccgcagatcgtgctgacacagagccccgccatcatgtctgttagccctggcgagaaagtgaccatgacctgtagcgccagcagcagcgtgaactacatgcactggttccagcagaagcccggcacaagccctaagctgtgggtgtacagcaccagcaatctggcctctggcgtgccagccagattttctggctctggcagcggcaccagctacagcctgacaatcagcagcatggaagccgaggatgccgccacctactattgtcagcagcggagcatctacccaccttggacatttggcggaggcaccaagctggaaatcaaaggcggaggcggaagtggaggcggaggatctggcggcggaggctctgaagttcagctccagcagagcggccctgagcttgtgaaacctggcgcttccgtgaagatcagctgcaaggccagcggctacagcttcaccggctacaccatgaactgggtcaagcagtcccacggcaagaacctggaatggatcggcctgattaacccctacaacggcggcacctcctacaaccagaagttcaaggccaaggccacactgaccgtggacaagagcagcagcacagcctacatgcagctgaagtccctgaccagcgaggacagcgccgtgtactactgcgccagagattacggctacgtgctggactattggggccagggcacaagcgtgacagtgtctagtacgcgtttcaagatccccatcgaggaactggaagatcgggtgttcgtgaactgcaacacctctatcacctgggtggaaggcaccgtgggaacactgctgagcgacatcaccagactggacctcggcaagcggattctggaccctcggggcatctacagatgcaacggcaccgacatctacaaggacaaagaaagcaccgtgcaggtccactacagaatgtgccagtcctgcgtggaactggaccctgctacagtggccggcatcatcgtgaccgatgtgatcgctactctgctgctggctctgggagtgttctgcttcgccggacacgaaacaggcagactgtctggcgctgccgatacacaggccctgctgagaaacgaccaagtgtatcagcccctgcgcgacagagatgatgcccagtattctcacctcggcggcaactgggctagaaacaag

SEQ ID NO: 34982 - DNA, 1266 bp, synthetic construct
  source 1..1266: mol_type = other DNA
atggccttaccagtgaccgccttgctcctgccgctggccttgctgctccacgccgccaggccgcagatcgtgctgacacagagccccgccatcatgtctgttagccctggcgagaaagtgaccatgacctgtagcgccagcagcagcgtgaactacatgcactggttccagcagaagcccggcacaagccctaagctgtgggtgtacagcaccagcaatctggcctctggcgtgccagccagattttctggctctggcagcggcaccagctacagcctgacaatcagcagcatggaagccgaggatgccgccacctactattgtcagcagcggagcatctacccaccttggacatttggcggaggcaccaagctggaaatcaaaggcggaggcggaagtggaggcggaggatctggcggcggaggctctgaagttcagctccagcagagcggccctgagcttgtgaaacctggcgcttccgtgaagatcagctgcaaggccagcggctacagcttcaccggctacaccatgaactgggtcaagcagtcccacggcaagaacctggaatggatcggcctgattaacccctacaacggcggcacctcctacaaccagaagttcaaggccaaggccacactgaccgtggacaagagcagcagcacagcctacatgcagctgaagtccctgaccagcgaggacagcgccgtgtactactgcgccagagattacggctacgtgctggactattggggccagggcacaagcgtgacagtgtctagtacgcgtcagagcatcaagggcaaccacctggtcaaggtgtacgactaccaagaggacggcagcgtgctgctgacatgtgatgccgaggccaagaacatcacctggtttaaggacggcaagatgatcggcttcctgaccgaggacaagaagaagtggaacctgggcagcaacgctaaggaccccagaggcatgtatcagtgcaagggcagccagaacaagagcaagcccctccaggtgtactaccggatgtgccagaactgcatcgagctgaacgccgctaccatcagcggctttctgttcgccgagatcgtgtccatcttcgtgctggccgtgggcgtgtactttatcgctggacaggatggcgtgcggcagagcagagcttccgataagcaaaccctgctgcctaacgaccagctgtaccagcctctgaaggacagagaggacgaccagtacagccacctccagggcaatcagctgagaagaaac

SEQ ID NO: 34983 - DNA, 1215 bp, synthetic construct
  source 1..1215: mol_type = other DNA
atggccttaccagtgaccgccttgctcctgccgctggccttgctgctccacgccgccaggccgcagatcgtgctgacacagagccccgccatcatgtctgttagccctggcgagaaagtgaccatgacctgtagcgccagcagcagcgtgaactacatgcactggttccagcagaagcccggcacaagccctaagctgtgggtgtacagcaccagcaatctggcctctggcgtgccagccagattttctggctctggcagcggcaccagctacagcctgacaatcagcagcatggaagccgaggatgccgccacctactattgtcagcagcggagcatctacccaccttggacatttggcggaggcaccaagctggaaatcaaaggcggaggcggaagtggaggcggaggatctggcggcggaggctctgaagttcagctccagcagagcggccctgagcttgtgaaacctggcgcttccgtgaagatcagctgcaaggccagcggctacagcttcaccggctacaccatgaactgggtcaagcagtcccacggcaagaacctggaatggatcggcctgattaacccctacaacggcggcacctcctacaaccagaagttcaaggccaaggccacactgaccgtggacaagagcagcagcacagcctacatgcagctgaagtccctgaccagcgaggacagcgccgtgtactactgcgccagagattacggctacgtgctggactattggggccagggcacaagcgtgacagtgtctagtacgcgtcagagttttgggttgttggaccctaaattgtgctatctgttggacggaatcctgttcatttacggagtgatcctgaccgcattgttcctgcgggttaagttttccagatccgcagacgcacccgcttaccaacaagggcagaaccaactctacaatgaacttaatttggggcggagggaagagtacgacgttctggacaaaaggaggggacgagatcccgagatgggcggaaagcctcagcgaaggaagaatccgcaagaggggctttataacgaactccagaaagataaaatggcagaagcctatagtgagattgggatgaagggagaaaggaggaggggtaaaggtcacgatgggttgtaccaaggattgagcacagccactaaagatacctatgatgcgctccacatgcaggccctgccgccaaga

SEQ ID NO: 34984 - DNA, 1500 bp, synthetic construct
  source 1..1500: mol_type = other DNA
atggccttaccagtgaccgccttgctcctgccgctggccttgctgctccacgccgccaggccgcagatcgtgctgacacagagccccgccatcatgtctgttagccctggcgagaaagtgaccatgacctgtagcgccagcagcagcgtgaactacatgcactggttccagcagaagcccggcacaagccctaagctgtgggtgtacagcaccagcaatctggcctctggcgtgccagccagattttctggctctggcagcggcaccagctacagcctgacaatcagcagcatggaagccgaggatgccgccacctactattgtcagcagcggagcatctacccaccttggacatttggcggaggcaccaagctggaaatcaaaggcggaggcggaagtggaggcggaggatctggcggcggaggctctgaagttcagctccagcagagcggccctgagcttgtgaaacctggcgcttccgtgaagatcagctgcaaggccagcggctacagcttcaccggctacaccatgaactgggtcaagcagtcccacggcaagaacctggaatggatcggcctgattaacccctacaacggcggcacctcctacaaccagaagttcaaggccaaggccacactgaccgtggacaagagcagcagcacagcctacatgcagctgaagtccctgaccagcgaggacagcgccgtgtactactgcgccagagattacggctacgtgctggactattggggccagggcacaagcgtgacagtgtctagtacgcgtggaatgaggactgaggatcttcccaaagctgtcgtctttctcgaaccccaatggtatcgggtgctcgaaaaagactctgtgacactgaaatgccaaggggcctactctcccgaggacaactccacacagtggtttcataatgagtccctcatcagctctcaggccagctcttatttcattgatgccgctacagtggacgactccggcgagtatcggtgtcagaccaatctgtctacactgtctgaccccgtgcagcttgaggtccacattggatggttgctcttgcaagccccacgctgggttttcaaagaggaagatccaatccatctgcggtgccacagctggaaaaacaccgctctccacaaagtcacatacctgcaaaatggcaaaggacgcaaatacttccatcacaattccgatttttacattccgaaggctaccctgaaagacagcggcagctatttctgccggggactcgtcggctccaagaatgtgtcctccgaaaccgtgaatatcacgattacccaaggactggctgtgcctacaatctctagcttctttccgcctggataccaagtctccttctgtcttgtgatggtcctcctgtttgctgtggacacaggactgtacttttccgtgaaaacgaacatccgcagctccacacgcgattggaaagatcacaagtttaaatggcgcaaagatccccaggacaag

SEQ ID NO: 34985 - DNA, 1425 bp, synthetic construct
  source 1..1425: mol_type = other DNA
atggccttaccagtgaccgccttgctcctgccgctggccttgctgctccacgccgccaggccgcagatcgtgctgacacagagccccgccatcatgtctgttagccctggcgagaaagtgaccatgacctgtagcgccagcagcagcgtgaactacatgcactggttccagcagaagcccggcacaagccctaagctgtgggtgtacagcaccagcaatctggcctctggcgtgccagccagattttctggctctggcagcggcaccagctacagcctgacaatcagcagcatggaagccgaggatgccgccacctactattgtcagcagcggagcatctacccaccttggacatttggcggaggcaccaagctggaaatcaaaggcggaggcggaagtggaggcggaggatctggcggcggaggctctgaagttcagctccagcagagcggccctgagcttgtgaaacctggcgcttccgtgaagatcagctgcaaggccagcggctacagcttcaccggctacaccatgaactgggtcaagcagtcccacggcaagaacctggaatggatcggcctgattaacccctacaacggcggcacctcctacaaccagaagttcaaggccaaggccacactgaccgtggacaagagcagcagcacagcctacatgcagctgaagtccctgaccagcgaggacagcgccgtgtactactgcgccagagattacggctacgtgctggactattggggccagggcacaagcgtgacagtgtctagtacgcgtggaatgaggactgaggatcttcccaaagctgtcgtctttctcgaaccccaatggtatcgggtgctcgaaaaagactctgtgacactgaaatgccaaggggcctactctcccgaggacaactccacacagtggtttcataatgagtccctcatcagctctcaggccagctcttatttcattgatgccgctacagtggacgactccggcgagtatcggtgtcagaccaatctgtctacactgtctgaccccgtgcagcttgaggtccacattggatggttgctcttgcaagccccacgctgggttttcaaagaggaagatccaatccatctgcggtgccacagctggaaaaacaccgctctccacaaagtcacatacctgcaaaatggcaaaggacgcaaatacttccatcacaattccgatttttacattccgaaggctaccctgaaagacagcggcagctatttctgccggggactcgtcggctccaagaatgtgtcctccgaaaccgtgaatatcacgattacccaaggactggctgtgcctacaatctctagcttctttccgcctggataccaagtctccttctgtcttgtgatggtcctcctgtttgctgtggacacaggactgtacttttccgtg

SEQ ID NO: 34986 - DNA, 1428 bp, synthetic construct
  source 1..1428: mol_type = other DNA
atggccttaccagtgaccgccttgctcctgccgctggccttgctgctccacgccgccaggccgcagatcgtgctgacacagagccccgccatcatgtctgttagccctggcgagaaagtgaccatgacctgtagcgccagcagcagcgtgaactacatgcactggttccagcagaagcccggcacaagccctaagctgtgggtgtacagcaccagcaatctggcctctggcgtgccagccagattttctggctctggcagcggcaccagctacagcctgacaatcagcagcatggaagccgaggatgccgccacctactattgtcagcagcggagcatctacccaccttggacatttggcggaggcaccaagctggaaatcaaaggcggaggcggaagtggaggcggaggatctggcggcggaggctctgaagttcagctccagcagagcggccctgagcttgtgaaacctggcgcttccgtgaagatcagctgcaaggccagcggctacagcttcaccggctacaccatgaactgggtcaagcagtcccacggcaagaacctggaatggatcggcctgattaacccctacaacggcggcacctcctacaaccagaagttcaaggccaaggccacactgaccgtggacaagagcagcagcacagcctacatgcagctgaagtccctgaccagcgaggacagcgccgtgtactactgcgccagagattacggctacgtgctggactattggggccagggcacaagcgtgacagtgtctagtacgcgtggaatgaggactgaggatcttcccaaagctgtcgtctttctcgaaccccaatggtatcgggtgctcgaaaaagactctgtgacactgaaatgccaaggggcctactctcccgaggacaactccacacagtggtttcataatgagtccctcatcagctctcaggccagctcttatttcattgatgccgctacagtggacgactccggcgagtatcggtgtcagaccaatctgtctacactgtctgaccccgtgcagcttgaggtccacattggatggttgctcttgcaagccccacgctgggttttcaaagaggaagatccaatccatctgcggtgccacagctggaaaaacaccgctctccacaaagtcacatacctgcaaaatggcaaaggacgcaaatacttccatcacaattccgatttttacattccgaaggctaccctgaaagacagcggcagctatttctgccggggactcgtcggctccaagaatgtgtcctccgaaaccgtgaatatcacgattacccaaggactggctgtgcctacaatctctagcttctttccgcctggataccaagtctccttctgtcttgtgatggtcctcctgtttgctgtggacacaggactgtacttttccgtgaaa

SEQ ID NO: 34987 - DNA, 2160 bp, synthetic construct
  source 1..2160: mol_type = other DNA
atggccttaccagtgaccgccttgctcctgccgctggccttgctgctccacgccgccaggccgcagatcgtgctgacacagagccccgccatcatgtctgttagccctggcgagaaagtgaccatgacctgtagcgccagcagcagcgtgaactacatgcactggttccagcagaagcccggcacaagccctaagctgtgggtgtacagcaccagcaatctggcctctggcgtgccagccagattttctggctctggcagcggcaccagctacagcctgacaatcagcagcatggaagccgaggatgccgccacctactattgtcagcagcggagcatctacccaccttggacatttggcggaggcaccaagctggaaatcaaactcgagggacagcctaaggccaatcctaccgtgacactgttccctccaagcagcgaagaactccaggccaacaaggccacacttgtgtgcctgatctccgacttctaccctggggctgtgacagtggcttggaaggccgatggatctcctgtgaaagccggcgtggaaaccaccaagccatccaagcagagcaacaacaaatacgccgccagctcctacctgagcctgacacctgagcagtggaagtcccacagatcctacagctgccaagtgacccacgaaggcagcaccgtggaaaagacagtggcccctacagagtgcagcggatcccagagcttcggcctgctggaccccaagctgtgctacctgctggatggcatcctgttcatctacggcgtgatcctgaccgccctgttcctgagagtgaagttcagcagaagcgccgacgcccctgcctaccagcagggacagaaccaactgtacaacgagctgaacctgggcagacgggaagagtacgacgtgctggacaagcggagaggcagggaccctgagatgggcggaaagccccagcggagaaagaacccccaggaaggactgtataacgaactccagaaagacaagatggccgaagcctacagcgagatcggcatgaagggcgagcggagaagaggcaagggccacgatggcctgtaccagggcctgagcaccgccaccaaggacacctatgacgccctgcacatgcaggccctgcctccaagaagggccaagcgatctggatctggagcaacaaacttctcactactcaaacaagcaggtgacgtggaggagaatcccgggcctactagtatggactggatttggcgcatccttttccttgtcggcgctgctaccggcgcgcattccttcgaagaagttcagctccagcagagcggccctgagcttgtgaaacctggcgcttccgtgaagatcagctgcaaggccagcggctacagcttcaccggctacaccatgaactgggtcaagcagtcccacggcaagaacctggaatggatcggcctgattaacccctacaacggcggcacctcctacaaccagaagttcaaggccaaggccacactgaccgtggacaagagcagcagcacagcctacatgcagctgaagtccctgaccagcgaggacagcgccgtgtactactgcgccagagattacggctacgtgctggactattggggccagggcacaagcgtgacagtgtctagtacgcgtgcctctacaaagggaccctccgtgtttcctctggctcccagcagcaagtctacaagcggaggaacagccgctctgggctgcctggtcaaggattactttcccgagcctgtgaccgtgtcctggaatagcggagcactgacaagcggcgtgcacacctttccagccgtgctgcaaagcagcggcctgtactctctgagcagcgtggtcacagtgcctagctctagcctgggcacccagacctacatctgcaatgtgaaccacaagcctagcaacaccaaggtggacaagagagtggaacccaagagctgtggtaccatcactcaaggtttggcagtgtcaaccatctcatcattctttccacctggctaccaagtgtccttctgcctggtcatggtgctgctgttcgccgtggataccggcctgtacttcagcgtcaagaccaacatccggtccagcaccagagactggaaggaccacaagttcaagtggcggaaggaccctcaggacaag

SEQ ID NO: 34988 - DNA, 2205 bp, synthetic construct
  source 1..2205: mol_type = other DNA
atggccttaccagtgaccgccttgctcctgccgctggccttgctgctccacgccgccaggccgcagatcgtgctgacacagagccccgccatcatgtctgttagccctggcgagaaagtgaccatgacctgtagcgccagcagcagcgtgaactacatgcactggttccagcagaagcccggcacaagccctaagctgtgggtgtacagcaccagcaatctggcctctggcgtgccagccagattttctggctctggcagcggcaccagctacagcctgacaatcagcagcatggaagccgaggatgccgccacctactattgtcagcagcggagcatctacccaccttggacatttggcggaggcaccaagctggaaatcaaactcgaggacctgaagaacgtgttcccacctgaggtggccgtgttcgagcctagcgaggccgagatcagccacacccagaaagccaccctcgtgtgcctggctaccggcttctaccccgaccatgtggaactgtcttggtgggtcaacggcaaagaggtgcacagcggcgtgtctaccgacccccagccactgaaagaacagcccgccctgaacgacagccggtactgcctgagcagcagactgagagtgtccgccaccttctggcagaacccccggaaccacttcagatgccaggtgcagttctacggcctgagcgagaacgacgagtggacccaggacagagccaagcccgtgacccagatcgtgtctgccgaagcctggggcagagccgattgcggatcccagagcttcggcctgctggaccccaagctgtgctacctgctggatggcatcctgttcatctacggcgtgatcctgaccgccctgttcctgagagtgaagttcagcagaagcgccgacgcccctgcctaccagcagggacagaaccaactgtacaacgagctgaacctgggcagacgggaagagtacgacgtgctggacaagcggagaggcagggaccctgagatgggcggaaagccccagcggagaaagaacccccaggaaggactgtataacgaactccagaaagacaagatggccgaagcctacagcgagatcggcatgaagggcgagcggagaagaggcaagggccacgatggcctgtaccagggcctgagcaccgccaccaaggacacctatgacgccctgcacatgcaggccctgcctccaagaagggccaagcgatctggatctggagcaacaaacttctcactactcaaacaagcaggtgacgtggaggagaatcccgggcctactagtatggactggatttggcgcatccttttccttgtcggcgctgctaccggcgcgcattccttcgaagaagttcagctccagcagagcggccctgagcttgtgaaacctggcgcttccgtgaagatcagctgcaaggccagcggctacagcttcaccggctacaccatgaactgggtcaagcagtcccacggcaagaacctggaatggatcggcctgattaacccctacaacggcggcacctcctacaaccagaagttcaaggccaaggccacactgaccgtggacaagagcagcagcacagcctacatgcagctgaagtccctgaccagcgaggacagcgccgtgtactactgcgccagagattacggctacgtgctggactattggggccagggcacaagcgtgacagtgtctagtacgcgtatccagaaccctgatcctgccgtgtaccagctgcgggatagcaagagcagcgacaagagcgtgtgtctgttcaccgacttcgacagccagaccaacgtgtcccagagcaaggactccgacgtgtacatcaccgataagaccgtgctggacatgcggagcatggacttcaagagcaactccgccgtggcctggtccaacaagtccgatttcgcctgcgccaacgccttcaacaacagcattatccccgaggacacattcttcccaagccccgagagcagctgcggtaccatcactcaaggtttggcagtgtcaaccatctcatcattctttccacctggctaccaagtgtccttctgcctggtcatggtgctgctgttcgccgtggataccggcctgtacttcagcgtcaagaccaacatccggtccagcaccagagactggaaggaccacaagttcaagtggcggaaggaccctcaggacaag

SEQ ID NO: 34989 - DNA, 2130 bp, synthetic construct
  source 1..2130: mol_type = other DNA
atggccttaccagtgaccgccttgctcctgccgctggccttgctgctccacgccgccaggccgcagatcgtgctgacacagagccccgccatcatgtctgttagccctggcgagaaagtgaccatgacctgtagcgccagcagcagcgtgaactacatgcactggttccagcagaagcccggcacaagccctaagctgtgggtgtacagcaccagcaatctggcctctggcgtgccagccagattttctggctctggcagcggcaccagctacagcctgacaatcagcagcatggaagccgaggatgccgccacctactattgtcagcagcggagcatctacccaccttggacatttggcggaggcaccaagctggaaatcaaactcgaggacctgaagaacgtgttcccacctgaggtggccgtgttcgagcctagcgaggccgagatcagccacacccagaaagccaccctcgtgtgcctggctaccggcttctaccccgaccatgtggaactgtcttggtgggtcaacggcaaagaggtgcacagcggcgtgtctaccgacccccagccactgaaagaacagcccgccctgaacgacagccggtactgcctgagcagcagactgagagtgtccgccaccttctggcagaacccccggaaccacttcagatgccaggtgcagttctacggcctgagcgagaacgacgagtggacccaggacagagccaagcccgtgacccagatcgtgtctgccgaagcctggggcagagccgattgcggatcccagagcttcggcctgctggaccccaagctgtgctacctgctggatggcatcctgttcatctacggcgtgatcctgaccgccctgttcctgagagtgaagttcagcagaagcgccgacgcccctgcctaccagcagggacagaaccaactgtacaacgagctgaacctgggcagacgggaagagtacgacgtgctggacaagcggagaggcagggaccctgagatgggcggaaagccccagcggagaaagaacccccaggaaggactgtataacgaactccagaaagacaagatggccgaagcctacagcgagatcggcatgaagggcgagcggagaagaggcaagggccacgatggcctgtaccagggcctgagcaccgccaccaaggacacctatgacgccctgcacatgcaggccctgcctccaagaagggccaagcgatctggatctggagcaacaaacttctcactactcaaacaagcaggtgacgtggaggagaatcccgggcctactagtatggactggatttggcgcatccttttccttgtcggcgctgctaccggcgcgcattccttcgaagaagttcagctccagcagagcggccctgagcttgtgaaacctggcgcttccgtgaagatcagctgcaaggccagcggctacagcttcaccggctacaccatgaactgggtcaagcagtcccacggcaagaacctggaatggatcggcctgattaacccctacaacggcggcacctcctacaaccagaagttcaaggccaaggccacactgaccgtggacaagagcagcagcacagcctacatgcagctgaagtccctgaccagcgaggacagcgccgtgtactactgcgccagagattacggctacgtgctggactattggggccagggcacaagcgtgacagtgtctagtacgcgtatccagaaccctgatcctgccgtgtaccagctgcgggatagcaagagcagcgacaagagcgtgtgtctgttcaccgacttcgacagccagaccaacgtgtcccagagcaaggactccgacgtgtacatcaccgataagaccgtgctggacatgcggagcatggacttcaagagcaactccgccgtggcctggtccaacaagtccgatttcgcctgcgccaacgccttcaacaacagcattatccccgaggacacattcttcccaagccccgagagcagctgcggtaccatcactcaaggtttggcagtgtcaaccatctcatcattctttccacctggctaccaagtgtccttctgcctggtcatggtgctgctgttcgccgtggataccggcctgtacttcagcgtc

SEQ ID NO: 34990 - DNA, 2133 bp, synthetic construct
  source 1..2133: mol_type = other DNA
atggccttaccagtgaccgccttgctcctgccgctggccttgctgctccacgccgccaggccgcagatcgtgctgacacagagccccgccatcatgtctgttagccctggcgagaaagtgaccatgacctgtagcgccagcagcagcgtgaactacatgcactggttccagcagaagcccggcacaagccctaagctgtgggtgtacagcaccagcaatctggcctctggcgtgccagccagattttctggctctggcagcggcaccagctacagcctgacaatcagcagcatggaagccgaggatgccgccacctactattgtcagcagcggagcatctacccaccttggacatttggcggaggcaccaagctggaaatcaaactcgaggacctgaagaacgtgttcccacctgaggtggccgtgttcgagcctagcgaggccgagatcagccacacccagaaagccaccctcgtgtgcctggctaccggcttctaccccgaccatgtggaactgtcttggtgggtcaacggcaaagaggtgcacagcggcgtgtctaccgacccccagccactgaaagaacagcccgccctgaacgacagccggtactgcctgagcagcagactgagagtgtccgccaccttctggcagaacccccggaaccacttcagatgccaggtgcagttctacggcctgagcgagaacgacgagtggacccaggacagagccaagcccgtgacccagatcgtgtctgccgaagcctggggcagagccgattgcggatcccagagcttcggcctgctggaccccaagctgtgctacctgctggatggcatcctgttcatctacggcgtgatcctgaccgccctgttcctgagagtgaagttcagcagaagcgccgacgcccctgcctaccagcagggacagaaccaactgtacaacgagctgaacctgggcagacgggaagagtacgacgtgctggacaagcggagaggcagggaccctgagatgggcggaaagccccagcggagaaagaacccccaggaaggactgtataacgaactccagaaagacaagatggccgaagcctacagcgagatcggcatgaagggcgagcggagaagaggcaagggccacgatggcctgtaccagggcctgagcaccgccaccaaggacacctatgacgccctgcacatgcaggccctgcctccaagaagggccaagcgatctggatctggagcaacaaacttctcactactcaaacaagcaggtgacgtggaggagaatcccgggcctactagtatggactggatttggcgcatccttttccttgtcggcgctgctaccggcgcgcattccttcgaagaagttcagctccagcagagcggccctgagcttgtgaaacctggcgcttccgtgaagatcagctgcaaggccagcggctacagcttcaccggctacaccatgaactgggtcaagcagtcccacggcaagaacctggaatggatcggcctgattaacccctacaacggcggcacctcctacaaccagaagttcaaggccaaggccacactgaccgtggacaagagcagcagcacagcctacatgcagctgaagtccctgaccagcgaggacagcgccgtgtactactgcgccagagattacggctacgtgctggactattggggccagggcacaagcgtgacagtgtctagtacgcgtatccagaaccctgatcctgccgtgtaccagctgcgggatagcaagagcagcgacaagagcgtgtgtctgttcaccgacttcgacagccagaccaacgtgtcccagagcaaggactccgacgtgtacatcaccgataagaccgtgctggacatgcggagcatggacttcaagagcaactccgccgtggcctggtccaacaagtccgatttcgcctgcgccaacgccttcaacaacagcattatccccgaggacacattcttcccaagccccgagagcagctgcggtaccatcactcaaggtttggcagtgtcaaccatctcatcattctttccacctggctaccaagtgtccttctgcctggtcatggtgctgctgttcgccgtggataccggcctgtacttcagcgtcaag

SEQ ID NO: 34991 - DNA, 2136 bp, synthetic construct
  source 1..2136: mol_type = other DNA
atggccttaccagtgaccgccttgctcctgccgctggccttgctgctccacgccgccaggccgcagatcgtgctgacacagagccccgccatcatgtctgttagccctggcgagaaagtgaccatgacctgtagcgccagcagcagcgtgaactacatgcactggttccagcagaagcccggcacaagccctaagctgtgggtgtacagcaccagcaatctggcctctggcgtgccagccagattttctggctctggcagcggcaccagctacagcctgacaatcagcagcatggaagccgaggatgccgccacctactattgtcagcagcggagcatctacccaccttggacatttggcggaggcaccaagctggaaatcaaactcgaggacctgaagaacgtgttcccacctgaggtggccgtgttcgagcctagcgaggccgagatcagccacacccagaaagccaccctcgtgtgcctggctaccggcttctaccccgaccatgtggaactgtcttggtgggtcaacggcaaagaggtgcacagcggcgtgtctaccgacccccagccactgaaagaacagcccgccctgaacgacagccggtactgcctgagcagcagactgagagtgtccgccaccttctggcagaacccccggaaccacttcagatgccaggtgcagttctacggcctgagcgagaacgacgagtggacccaggacagagccaagcccgtgacccagatcgtgtctgccgaagcctggggcagagccgattgcggatcccagagcttcggcctgctggaccccaagctgtgctacctgctggatggcatcctgttcatctacggcgtgatcctgaccgccctgttcctgagagtgaagttcagcagaagcgccgacgcccctgcctaccagcagggacagaaccaactgtacaacgagctgaacctgggcagacgggaagagtacgacgtgctggacaagcggagaggcagggaccctgagatgggcggaaagccccagcggagaaagaacccccaggaaggactgtataacgaactccagaaagacaagatggccgaagcctacagcgagatcggcatgaagggcgagcggagaagaggcaagggccacgatggcctgtaccagggcctgagcaccgccaccaaggacacctatgacgccctgcacatgcaggccctgcctccaagaagggccaagcgatctggatctggagcaacaaacttctcactactcaaacaagcaggtgacgtggaggagaatcccgggcctactagtatggactggatttggcgcatccttttccttgtcggcgctgctaccggcgcgcattccttcgaagaagttcagctccagcagagcggccctgagcttgtgaaacctggcgcttccgtgaagatcagctgcaaggccagcggctacagcttcaccggctacaccatgaactgggtcaagcagtcccacggcaagaacctggaatggatcggcctgattaacccctacaacggcggcacctcctacaaccagaagttcaaggccaaggccacactgaccgtggacaagagcagcagcacagcctacatgcagctgaagtccctgaccagcgaggacagcgccgtgtactactgcgccagagattacggctacgtgctggactattggggccagggcacaagcgtgacagtgtctagtacgcgtatccagaaccctgatcctgccgtgtaccagctgcgggatagcaagagcagcgacaagagcgtgtgtctgttcaccgacttcgacagccagaccaacgtgtcccagagcaaggactccgacgtgtacatcaccgataagaccgtgctggacatgcggagcatggacttcaagagcaactccgccgtggcctggtccaacaagtccgatttcgcctgcgccaacgccttcaacaacagcattatccccgaggacacattcttcccaagccccgagagcagctgcggtaccatcactcaaggtttggcagtgtcaaccatctcatcattctttccacctggctaccaagtgtccttctgcctggtcatggtgctgctgttcgccgtggataccggcctgtacttcagcgtcaagacc

SEQ ID NO: 34992 - DNA, 1947 bp, synthetic construct
  source 1..1947: mol_type = other DNA
atggccttaccagtgaccgccttgctcctgccgctggccttgctgctccacgccgccaggccgcagatcgtgctgacacagagccccgccatcatgtctgttagccctggcgagaaagtgaccatgacctgtagcgccagcagcagcgtgaactacatgcactggttccagcagaagcccggcacaagccctaagctgtgggtgtacagcaccagcaatctggcctctggcgtgccagccagattttctggctctggcagcggcaccagctacagcctgacaatcagcagcatggaagccgaggatgccgccacctactattgtcagcagcggagcatctacccaccttggacatttggcggaggcaccaagctggaaatcaaactcgagggacagcctaaggccaatcctaccgtgacactgttccctccaagcagcgaagaactccaggccaacaaggccacacttgtgtgcctgatctccgacttctaccctggggctgtgacagtggcttggaaggccgatggatctcctgtgaaagccggcgtggaaaccaccaagccatccaagcagagcaacaacaaatacgccgccagctcctacctgagcctgacacctgagcagtggaagtcccacagatcctacagctgccaagtgacccacgaaggcagcaccgtggaaaagacagtggcccctacagagtgcagcggatccctgggagagcctcagctgtgctatatcctggacgccatcctgtttctgtacggcatcgtgctgaccctgctgtactgccggctgaagatccaagtgcggaaggccgccatcaccagctacgagaaatccgacggcgtgtacaccggcctgagcaccagaaatcaagagacatacgagacactgaagcacgaaaagcctccacaaagggccaagcgatctggatctggagcaacaaacttctcactactcaaacaagcaggtgacgtggaggagaatcccgggcctactagtatggactggatttggcgcatccttttccttgtcggcgctgctaccggcgcgcattccttcgaagaagttcagctccagcagagcggccctgagcttgtgaaacctggcgcttccgtgaagatcagctgcaaggccagcggctacagcttcaccggctacaccatgaactgggtcaagcagtcccacggcaagaacctggaatggatcggcctgattaacccctacaacggcggcacctcctacaaccagaagttcaaggccaaggccacactgaccgtggacaagagcagcagcacagcctacatgcagctgaagtccctgaccagcgaggacagcgccgtgtactactgcgccagagattacggctacgtgctggactattggggccagggcacaagcgtgacagtgtctagtacgcgtgcctctacaaagggaccctccgtgtttcctctggctcccagcagcaagtctacaagcggaggaacagccgctctgggctgcctggtcaaggattactttcccgagcctgtgaccgtgtcctggaatagcggagcactgacaagcggcgtgcacacctttccagccgtgctgcaaagcagcggcctgtactctctgagcagcgtggtcacagtgcctagctctagcctgggcacccagacctacatctgcaatgtgaaccacaagcctagcaacaccaaggtggacaagagagtggaacccaagagctgtggtaccctcggagaaccacagctctgttacattctggatgctatcctgttcctctatgggatcgtcctgacactcctgtattgcagactcaaaattcaagttcgcaaagccgccattacctcttacgagaagagtgatggggtgtacacaggactgtctacccggaatcaagaaacctacgaaaccctcaaacatgagaagccacctcagtaa

SEQ ID NO: 34993 - DNA, 1854 bp, synthetic construct
  source 1..1854: mol_type = other DNA
atggccttaccagtgaccgccttgctcctgccgctggccttgctgctccacgccgccaggccgcagatcgtgctgacacagagccccgccatcatgtctgttagccctggcgagaaagtgaccatgacctgtagcgccagcagcagcgtgaactacatgcactggttccagcagaagcccggcacaagccctaagctgtgggtgtacagcaccagcaatctggcctctggcgtgccagccagattttctggctctggcagcggcaccagctacagcctgacaatcagcagcatggaagccgaggatgccgccacctactattgtcagcagcggagcatctacccaccttggacatttggcggaggcaccaagctggaaatcaaactcgaggacctgaagaacgtgttcccacctgaggtggccgtgttcgagcctagcgaggccgagatcagccacacccagaaagccaccctcgtgtgcctggctaccggcttctaccccgaccatgtggaactgtcttggtgggtcaacggcaaagaggtgcacagcggcgtgtgtaccgacccccagccactgaaagaacagcccgccctgaacgacagccggtactgcctgagcagcagactgagagtgtccgccaccttctggcagaacccccggaaccacttcagatgccaggtgcagttctacggcctgagcgagaacgacgagtggacccaggacagagccaagcccgtgacccagatcgtgtctgccgaagcctggggcagagccgattgcggctttaccagcgagagctaccagcagggcgtgctgagcgcctactacatgtacttgttgctgctgctgaagtccgtggtgtacttcgccatcatcacatgctgcctgctgcggagaaccgccttctgctgcaacggcgagaagtctagggccaagcgatctggatctggagcaacaaacttctcactactcaaacaagcaggtgacgtggaggagaatcccgggcctactagtatggactggatttggcgcatccttttccttgtcggcgctgctaccggcgcgcattccttcgaagaagttcagctccagcagagcggccctgagcttgtgaaacctggcgcttccgtgaagatcagctgcaaggccagcggctacagcttcaccggctacaccatgaactgggtcaagcagtcccacggcaagaacctggaatggatcggcctgattaacccctacaacggcggcacctcctacaaccagaagttcaaggccaaggccacactgaccgtggacaagagcagcagcacagcctacatgcagctgaagtccctgaccagcgaggacagcgccgtgtactactgcgccagagattacggctacgtgctggactattggggccagggcacaagcgtgacagtgtctagtacgcgtatccagaaccctgatcctgccgtgtaccagctgcgggatagcaagagcagcgacaagagcgtgtgtctgttcaccgacttcgacagccagaccaacgtgtcccagagcaaggactccgacgtgtacatcaccgataagtgcgtgctggacatgcggagcatggacttcaagagcaactccgccgtggcctggtccaacaagtccgatttcgcctgcgccaacgccttcaacaacagcattatccccgaggacacattcttcccaagccccgagagcagctgcgacgtgaagctggtggaaaagagcttcgagacagacaccaacctgaacttccagaacctgagcgtgatcggcttcagaatcctgctgctgaaagtggccggctttaacctgctgatgaccctgcggctgtggtccagc

SEQ ID NO: 34994 - DNA, 1875 bp, synthetic construct
  source 1..1875: mol_type = other DNA
atggccttaccagtgaccgccttgctcctgccgctggccttgctgctccacgccgccaggccgcagatcgtgctgacacagagccccgccatcatgtctgttagccctggcgagaaagtgaccatgacctgtagcgccagcagcagcgtgaactacatgcactggttccagcagaagcccggcacaagccctaagctgtgggtgtacagcaccagcaatctggcctctggcgtgccagccagattttctggctctggcagcggcaccagctacagcctgacaatcagcagcatggaagccgaggatgccgccacctactattgtcagcagcggagcatctacccaccttggacatttggcggaggcaccaagctggaaatcaaactcgaggacaagcagctggacgccgacgtgtcccccaagcctaccatcttcctgccctctatcgccgagacaaagctccagaaggccggcacctacctgtgcctgctggaaaagttcttcccagatgtgattaagatccactggcaggaaaagaagtccaacaccatcctgggcagccaggaaggcaacaccatgaagaccaacgacacctacatgaagttcagctggctgaccgtgcccgagaagtccctggacaaagaacacagatgcatcgtgcggcacgaaaacaacaagaacggcgtggaccaggaaatcatcttcccacccatcaagaccgatgtgattacaatggaccccaaggacaactgctccaaggacgccaacgataccctgctgctccagctgaccaacaccagcgcctactacatgtacgagatcctgctgggcaaggccaccctgtacgccgtgctggtgtctgccctggtgctgatggctatggtcaagcggaaggacagccggggaagggccaagcgatctggatctggagcaacaaacttctcactactcaaacaagcaggtgacgtggaggagaatcccgggcctactagtatggactggatttggcgcatccttttccttgtcggcgctgctaccggcgcgcattccttcgaagaagttcagctccagcagagcggccctgagcttgtgaaacctggcgcttccgtgaagatcagctgcaaggccagcggctacagcttcaccggctacaccatgaactgggtcaagcagtcccacggcaagaacctggaatggatcggcctgattaacccctacaacggcggcacctcctacaaccagaagttcaaggccaaggccacactgaccgtggacaagagcagcagcacagcctacatgcagctgaagtccctgaccagcgaggacagcgccgtgtactactgcgccagagattacggctacgtgctggactattggggccagggcacaagcgtgacagtgtctagtacgcgtagccagcctcacaccaagcccagcgtgttcgtgatgaagaacggcaccaacgtggcctgcctcgtgaaagagttctaccccaaggacatcaggatcaacctggtgtccagcaagaagatcaccgagttcgaccccgccatcgtgatctcccccagcggcaagtacaacgccgtgaagctggggaagtatgaggacagcaacagcgtgacctgctccgtgcagcacgacaacaagaccgtgcacagcaccgactttgaagtgaaaaccgactccaccgaccacgtgaagcccaaagagacagagaacaccaagcagcccagcaagagctgccacaagcccaaggccatcgtgcacaccgagaaagtgaacatgatgagcctgaccgtgatcggcttcagaatcctgctgctgaaagtggccggctttaacctgctgatgaccctgcggctgtggtccagctaa

SEQ ID NO: 34995 - DNA, 1875 bp, synthetic construct
  source 1..1875: mol_type = other DNA
atggccttaccagtgaccgccttgctcctgccgctggccttgctgctccacgccgccaggccgcagatcgtgctgacacagagccccgccatcatgtctgttagccctggcgagaaagtgaccatgacctgtagcgccagcagcagcgtgaactacatgcactggttccagcagaagcccggcacaagccctaagctgtgggtgtacagcaccagcaatctggcctctggcgtgccagccagattttctggctctggcagcggcaccagctacagcctgacaatcagcagcatggaagccgaggatgccgccacctactattgtcagcagcggagcatctacccaccttggacatttggcggaggcaccaagctggaaatcaaactcgaggacaagcagctggacgccgacgtgtcccccaagcctaccatcttcctgccctctatcgccgagacaaagctccagaaggccggcacctacctgtgcctgctggaaaagttcttcccagatgtgattaagatccactggcaggaaaagaagtccaacaccatcctgggcagccaggaaggcaacaccatgaagaccaacgacacctacatgaagttcagctggctgaccgtgcccgagaagtccctggacaaagaacacagatgcatcgtgcggcacgaaaacaacaagaacggcgtggaccaggaaatcatcttcccacccatcaagaccgatgtgattacaatggaccccaaggacaactgctccaaggacgccaacgataccctgctgctccagctgaccaacaccagcgccaccatcctgtacgagatcctgctgggcaaggccaccctgtacgccgtgctggtgtctgccctggtgctgatggctatggtcaagcggaaggacagccggggaagggccaagcgatctggatctggagcaacaaacttctcactactcaaacaagcaggtgacgtggaggagaatcccgggcctactagtatggactggatttggcgcatccttttccttgtcggcgctgctaccggcgcgcattccttcgaagaagttcagctccagcagagcggccctgagcttgtgaaacctggcgcttccgtgaagatcagctgcaaggccagcggctacagcttcaccggctacaccatgaactgggtcaagcagtcccacggcaagaacctggaatggatcggcctgattaacccctacaacggcggcacctcctacaaccagaagttcaaggccaaggccacactgaccgtggacaagagcagcagcacagcctacatgcagctgaagtccctgaccagcgaggacagcgccgtgtactactgcgccagagattacggctacgtgctggactattggggccagggcacaagcgtgacagtgtctagtacgcgtagccagcctcacaccaagcccagcgtgttcgtgatgaagaacggcaccaacgtggcctgcctcgtgaaagagttctaccccaaggacatcaggatcaacctggtgtccagcaagaagatcaccgagttcgaccccgccatcgtgatctcccccagcggcaagtacaacgccgtgaagctggggaagtatgaggacagcaacagcgtgacctgctccgtgcagcacgacaacaagaccgtgcacagcaccgactttgaagtgaaaaccgactccaccgaccacgtgaagcccaaagagacagagaacaccaagcagcccagcaagagctgccacaagcccaaggccatcgtgcacaccgagaaagtgaacatgatgagcctgaccgtgatcggcttcagaatcctgctgctgaaagtggccggctttaacctgctgatgaccctgcggctgtggtccagctaa

SEQ ID NO: 34996 - DNA, 1875 bp, synthetic construct
  source 1..1875: mol_type = other DNA
atggccttaccagtgaccgccttgctcctgccgctggccttgctgctccacgccgccaggccgcagatcgtgctgacacagagccccgccatcatgtctgttagccctggcgagaaagtgaccatgacctgtagcgccagcagcagcgtgaactacatgcactggttccagcagaagcccggcacaagccctaagctgtgggtgtacagcaccagcaatctggcctctggcgtgccagccagattttctggctctggcagcggcaccagctacagcctgacaatcagcagcatggaagccgaggatgccgccacctactattgtcagcagcggagcatctacccaccttggacatttggcggaggcaccaagctggaaatcaaactcgaggacaagcagctggacgccgacgtgtcccccaagcctaccatcttcctgccctctatcgccgagacaaagctccagaaggccggcacctacctgtgcctgctggaaaagttcttcccagatgtgattaagatccactggcaggaaaagaagtccaacaccatcctgggcagccaggaaggcaacaccatgaagaccaacgacacctacatgaagttcagctggctgaccgtgcccgagaagtccctggacaaagaacacagatgcatcgtgcggcacgaaaacaacaagaacggcgtggaccaggaaatcatcttcccacccatcaagaccgatgtgattacaatggaccccaaggacaactgctccaaggacgccaacgataccctgctgctccagctgaccaacaccagcgcctactacatgtacgagatcctgctgggcaaggccaccctgtacgccgtgctggtgtctgccctggtgctgatggctatggtcaagcggaaggacagccggggaagggccaagcgatctggatctggagcaacaaacttctcactactcaaacaagcaggtgacgtggaggagaatcccgggcctactagtatggactggatttggcgcatccttttccttgtcggcgctgctaccggcgcgcattccttcgaagaagttcagctccagcagagcggccctgagcttgtgaaacctggcgcttccgtgaagatcagctgcaaggccagcggctacagcttcaccggctacaccatgaactgggtcaagcagtcccacggcaagaacctggaatggatcggcctgattaacccctacaacggcggcacctcctacaaccagaagttcaaggccaaggccacactgaccgtggacaagagcagcagcacagcctacatgcagctgaagtccctgaccagcgaggacagcgccgtgtactactgcgccagagattacggctacgtgctggactattggggccagggcacaagcgtgacagtgtctagtacgcgtagccagcctcacaccaagcccagcgtgttcgtgatgaagaacggcaccaacgtggcctgcctcgtgaaagagttctaccccaaggacatcaggatcaacctggtgtccagcaagaagatcaccgagttcgaccccgccatcgtgatctcccccagcggcaagtacaacgccgtgaagctggggaagtacgaggacagcaacagcgtgacctgctccgtgcagcacgacaacaagaccgtgcacagcaccgactttgaagtgaaaaccgactccaccgaccacgtgaagcccaaagagacagagaacaccaagcagcccagcaagagctgccacaagcccaaggccatcgtgcacaccgagaaagtgaacatgatgagcctgaccgtgctgggcttcagaatcctgctgctgaaagtggccggctttaacctgctgatgaccctgcggctgtggtccagctaa

SEQ ID NO: 34997 - DNA, 1875 bp, synthetic construct
  source 1..1875: mol_type = other DNA
atggccttaccagtgaccgccttgctcctgccgctggccttgctgctccacgccgccaggccgcagatcgtgctgacacagagccccgccatcatgtctgttagccctggcgagaaagtgaccatgacctgtagcgccagcagcagcgtgaactacatgcactggttccagcagaagcccggcacaagccctaagctgtgggtgtacagcaccagcaatctggcctctggcgtgccagccagattttctggctctggcagcggcaccagctacagcctgacaatcagcagcatggaagccgaggatgccgccacctactattgtcagcagcggagcatctacccaccttggacatttggcggaggcaccaagctggaaatcaaactcgaggacaagcagctggacgccgacgtgtcccccaagcctaccatcttcctgccctctatcgccgagacaaagctccagaaggccggcacctacctgtgcctgctggaaaagttcttcccagatgtgattaagatccactggcaggaaaagaagtccaacaccatcctgggcagccaggaaggcaacaccatgaagaccaacgacacctacatgaagttcagctggctgaccgtgcccgagaagtccctggacaaagaacacagatgcatcgtgcggcacgaaaacaacaagaacggcgtggaccaggaaatcatcttcccacccatcaagaccgatgtgattacaatggaccccaaggacaactgctccaaggacgccaacgataccctgctgctccagctgaccaacaccagcgccaccatcctgtacgagatcctgctgggcaaggccaccctgtacgccgtgctggtgtctgccctggtgctgatggctatggtcaagcggaaggacagccggggaagggccaagcgatctggatctggagcaacaaacttctcactactcaaacaagcaggtgacgtggaggagaatcccgggcctactagtatggactggatttggcgcatccttttccttgtcggcgctgctaccggcgcgcattccttcgaagaagttcagctccagcagagcggccctgagcttgtgaaacctggcgcttccgtgaagatcagctgcaaggccagcggctacagcttcaccggctacaccatgaactgggtcaagcagtcccacggcaagaacctggaatggatcggcctgattaacccctacaacggcggcacctcctacaaccagaagttcaaggccaaggccacactgaccgtggacaagagcagcagcacagcctacatgcagctgaagtccctgaccagcgaggacagcgccgtgtactactgcgccagagattacggctacgtgctggactattggggccagggcacaagcgtgacagtgtctagtacgcgtagccagcctcacaccaagcccagcgtgttcgtgatgaagaacggcaccaacgtggcctgcctcgtgaaagagttctaccccaaggacatcaggatcaacctggtgtccagcaagaagatcaccgagttcgaccccgccatcgtgatctcccccagcggcaagtacaacgccgtgaagctggggaagtacgaggacagcaacagcgtgacctgctccgtgcagcacgacaacaagaccgtgcacagcaccgactttgaagtgaaaaccgactccaccgaccacgtgaagcccaaagagacagagaacaccaagcagcccagcaagagctgccacaagcccaaggccatcgtgcacaccgagaaagtgaacatgatgagcctgaccgtgctgggcttcagaatcctgctgctgaaagtggccggctttaacctgctgatgaccctgcggctgtggtccagctaa

SEQ ID NO: 34998 - DNA, 1857 bp, synthetic construct
  source 1..1857: mol_type = other DNA
atggccttaccagtgaccgccttgctcctgccgctggccttgctgctccacgccgccaggccgcagatcgtgctgacacagagccccgccatcatgtctgttagccctggcgagaaagtgaccatgacctgtagcgccagcagcagcgtgaactacatgcactggttccagcagaagcccggcacaagccctaagctgtgggtgtacagcaccagcaatctggcctctggcgtgccagccagattttctggctctggcagcggcaccagctacagcctgacaatcagcagcatggaagccgaggatgccgccacctactattgtcagcagcggagcatctacccaccttggacatttggcggaggcaccaagctggaaatcaaactcgaggacctgaagaacgtgttcccacctgaggtggccgtgttcgagcctagcgaggccgagatcagccacacccagaaagccaccctcgtgtgcctggctaccggcttctaccccgaccatgtggaactgtcttggtgggtcaacggcaaagaggtgcacagcggcgtgtgtaccgacccccagccactgaaagaacagcccgccctgaacgacagccggtactgcctgagcagcagactgagagtgtccgccaccttctggcagaacccccggaaccacttcagatgccaggtgcagttctacggcctgagcgagaacgacgagtggacccaggacagagccaagcccgtgacccagatcgtgtctgccgaagcctggggcagagccgattgcggctttaccagcgagagctaccagcagggcgtgctgagcgccaccatcctgtacttgttgctgctgctgaagtccgtggtgtacttcgccatcatcacatgctgcctgctgcggagaaccgccttctgctgcaacggcgagaagtctagggccaagcgatctggatctggagcaacaaacttctcactactcaaacaagcaggtgacgtggaggagaatcccgggcctactagtatggactggatttggcgcatccttttccttgtcggcgctgctaccggcgcgcattccttcgaagaagttcagctccagcagagcggccctgagcttgtgaaacctggcgcttccgtgaagatcagctgcaaggccagcggctacagcttcaccggctacaccatgaactgggtcaagcagtcccacggcaagaacctggaatggatcggcctgattaacccctacaacggcggcacctcctacaaccagaagttcaaggccaaggccacactgaccgtggacaagagcagcagcacagcctacatgcagctgaagtccctgaccagcgaggacagcgccgtgtactactgcgccagagattacggctacgtgctggactattggggccagggcacaagcgtgacagtgtctagtacgcgtatccagaaccctgatcctgccgtgtaccagctgcgggatagcaagagcagcgacaagagcgtgtgtctgttcaccgacttcgacagccagaccaacgtgtcccagagcaaggactccgacgtgtacatcaccgataagtgcgtgctggacatgcggagcatggacttcaagagcaactccgccgtggcctggtccaacaagtccgatttcgcctgcgccaacgccttcaacaacagcattatccccgaggacacattcttcccaagccccgagagcagctgcgacgtgaagctggtggaaaagagcttcgagacagacaccaacctgaacttccagaacctgagcgtgatcggcctgcggatgctgttcgccaaaaccgtggccgtgaacttcctgctgaccgccaagctgttcttcctctaa

SEQ ID NO: 34999 - DNA, 1944 bp, synthetic construct
  source 1..1944: mol_type = other DNA
atggccttaccagtgaccgccttgctcctgccgctggccttgctgctccacgccgccaggccgcagatcgtgctgacacagagccccgccatcatgtctgttagccctggcgagaaagtgaccatgacctgtagcgccagcagcagcgtgaactacatgcactggttccagcagaagcccggcacaagccctaagctgtgggtgtacagcaccagcaatctggcctctggcgtgccagccagattttctggctctggcagcggcaccagctacagcctgacaatcagcagcatggaagccgaggatgccgccacctactattgtcagcagcggagcatctacccaccttggacatttggcggaggcaccaagctggaaatcaaactcgaggacctgaagaacgtgttcccacctgaggtggccgtgttcgagcctagcgaggccgagatcagccacacccagaaagccaccctcgtgtgcctggctaccggcttctaccccgaccatgtggaactgtcttggtgggtcaacggcaaagaggtgcacagcggcgtgtctaccgacccccagccactgaaagaacagcccgccctgaacgacagccggtactgcctgagcagcagactgagagtgtccgccaccttctggcagaacccccggaaccacttcagatgccaggtgcagttctacggcctgagcgagaacgacgagtggacccaggacagagccaagcccgtgacccagatcgtgtctgccgaagcctggggcagagccgattgcggatcctccaaggacgccaacgataccctgctgctccagctgaccaacaccagcgcctactacatgtacttgttgctgctgctgaagtccgtggtgtacttcgccatcatcacatgctgcctgctgcggagaaccgccttctgctgcaacggcgagaagtctagggccaagcgatctggatctggagcaacaaacttctcactactcaaacaagcaggtgacgtggaggagaatcccgggcctactagtatggactggatttggcgcatccttttccttgtcggcgctgctaccggcgcgcattccttcgaagaagttcagctccagcagagcggccctgagcttgtgaaacctggcgcttccgtgaagatcagctgcaaggccagcggctacagcttcaccggctacaccatgaactgggtcaagcagtcccacggcaagaacctggaatggatcggcctgattaacccctacaacggcggcacctcctacaaccagaagttcaaggccaaggccacactgaccgtggacaagagcagcagcacagcctacatgcagctgaagtccctgaccagcgaggacagcgccgtgtactactgcgccagagattacggctacgtgctggactattggggccagggcacaagcgtgacagtgtctagtacgcgtatccagaaccctgatcctgccgtgtaccagctgcgggatagcaagagcagcgacaagagcgtgtgtctgttcaccgacttcgacagccagaccaacgtgtcccagagcaaggactccgacgtgtacatcaccgataagaccgtgctggacatgcggagcatggacttcaagagcaactccgccgtggcctggtccaacaagtccgatttcgcctgcgccaacgccttcaacaacagcattatccccgaggacacattcttcccaagccccgagagcagctgcggtaccgaagtgaaaaccgactccaccgaccacgtgaagcccaaagagacagagaacaccaagcagcccagcaagagctgccacaagcccaaggccatcgtgcacaccgagaaagtgaacatgatgagcctgaccgtgctgggcctgcggatgctgttcgccaaaaccgtggccgtgaacttcctgctgaccgccaagctgttcttcctctaa

SEQ ID NO: 35000 - DNA, 1854 bp, synthetic construct
  source 1..1854: mol_type = other DNA
atggccttaccagtgaccgccttgctcctgccgctggccttgctgctccacgccgccaggccgcagatcgtgctgacacagagccccgccatcatgtctgttagccctggcgagaaagtgaccatgacctgtagcgccagcagcagcgtgaactacatgcactggttccagcagaagcccggcacaagccctaagctgtgggtgtacagcaccagcaatctggcctctggcgtgccagccagattttctggctctggcagcggcaccagctacagcctgacaatcagcagcatggaagccgaggatgccgccacctactattgtcagcagcggagcatctacccaccttggacatttggcggaggcaccaagctggaaatcaaactcgaggacctgaagaacgtgttcccacctgaggtggccgtgttcgagcctagcgaggccgagatcagccacacccagaaagccaccctcgtgtgcctggctaccggcttctaccccgaccatgtggaactgtcttggtgggtcaacggcaaagaggtgcacagcggcgtgtgtaccgacccccagccactgaaagaacagcccgccctgaacgacagccggtactgcctgagcagcagactgagagtgtccgccaccttctggcagaacccccggaaccacttcagatgccaggtgcagttctacggcctgagcgagaacgacgagtggacccaggacagagccaagcccgtgacccagatcgtgtctgccgaagcctggggcagagccgattgcgacgtgaagctggtggaaaagagcttcgagacagacaccaacctgaacttccagaacctgagcgtgatcggcttcagaatcctgctgctgaaagtggccggctttaacctgctgatgaccctgcggctgtggtccagcagggccaagcgatctggatctggagcaacaaacttctcactactcaaacaagcaggtgacgtggaggagaatcccgggcctactagtatggactggatttggcgcatccttttccttgtcggcgctgctaccggcgcgcattccttcgaagaagttcagctccagcagagcggccctgagcttgtgaaacctggcgcttccgtgaagatcagctgcaaggccagcggctacagcttcaccggctacaccatgaactgggtcaagcagtcccacggcaagaacctggaatggatcggcctgattaacccctacaacggcggcacctcctacaaccagaagttcaaggccaaggccacactgaccgtggacaagagcagcagcacagcctacatgcagctgaagtccctgaccagcgaggacagcgccgtgtactactgcgccagagattacggctacgtgctggactattggggccagggcacaagcgtgacagtgtctagtacgcgtatccagaaccctgatcctgccgtgtaccagctgcgggatagcaagagcagcgacaagagcgtgtgtctgttcaccgacttcgacagccagaccaacgtgtcccagagcaaggactccgacgtgtacatcaccgataagtgcgtgctggacatgcggagcatggacttcaagagcaactccgccgtggcctggtccaacaagtccgatttcgcctgcgccaacgccttcaacaacagcattatccccgaggacacattcttcccaagccccgagagcagctgcggctttaccagcgagagctaccagcagggcgtgctgagcgccaccatcctgtacgagatcctgctgggcaaggccaccctgtacgccgtgctggtgtctgccctggtgctgatggctatggtcaagcggaaggacagccggggataa

SEQ ID NO: 35001 - DNA, 1854 bp, synthetic construct
  source 1..1854: mol_type = other DNA
atggccttaccagtgaccgccttgctcctgccgctggccttgctgctccacgccgccaggccgcagatcgtgctgacacagagccccgccatcatgtctgttagccctggcgagaaagtgaccatgacctgtagcgccagcagcagcgtgaactacatgcactggttccagcagaagcccggcacaagccctaagctgtgggtgtacagcaccagcaatctggcctctggcgtgccagccagattttctggctctggcagcggcaccagctacagcctgacaatcagcagcatggaagccgaggatgccgccacctactattgtcagcagcggagcatctacccaccttggacatttggcggaggcaccaagctggaaatcaaactcgaggacctgaagaacgtgttcccacctgaggtggccgtgttcgagcctagcgaggccgagatcagccacacccagaaagccaccctcgtgtgcctggctaccggcttctaccccgaccatgtggaactgtcttggtgggtcaacggcaaagaggtgcacagcggcgtgtgtaccgacccccagccactgaaagaacagcccgccctgaacgacagccggtactgcctgagcagcagactgagagtgtccgccaccttctggcagaacccccggaaccacttcagatgccaggtgcagttctacggcctgagcgagaacgacgagtggacccaggacagagccaagcccgtgacccagatcgtgtctgccgaagcctggggcagagccgattgcggctttaccagcgagagctaccagcagggcgtgctgagcgccaccaacctgagcgtgatcggcttcagaatcctgctgctgaaagtggccggctttaacctgctgatgaccctgcggctgtggtccagcagggccaagcgatctggatctggagcaacaaacttctcactactcaaacaagcaggtgacgtggaggagaatcccgggcctactagtatggactggatttggcgcatccttttccttgtcggcgctgctaccggcgcgcattccttcgaagaagttcagctccagcagagcggccctgagcttgtgaaacctggcgcttccgtgaagatcagctgcaaggccagcggctacagcttcaccggctacaccatgaactgggtcaagcagtcccacggcaagaacctggaatggatcggcctgattaacccctacaacggcggcacctcctacaaccagaagttcaaggccaaggccacactgaccgtggacaagagcagcagcacagcctacatgcagctgaagtccctgaccagcgaggacagcgccgtgtactactgcgccagagattacggctacgtgctggactattggggccagggcacaagcgtgacagtgtctagtacgcgtatccagaaccctgatcctgccgtgtaccagctgcgggatagcaagagcagcgacaagagcgtgtgtctgttcaccgacttcgacagccagaccaacgtgtcccagagcaaggactccgacgtgtacatcaccgataagtgcgtgctggacatgcggagcatggacttcaagagcaactccgccgtggcctggtccaacaagtccgatttcgcctgcgccaacgccttcaacaacagcattatccccgaggacacattcttcccaagccccgagagcagctgcgacgtgaagctggtggaaaagagcttcgagacagacaccaacctgaacttccagatcctgtacgagatcctgctgggcaaggccaccctgtacgccgtgctggtgtctgccctggtgctgatggctatggtcaagcggaaggacagccggggataa

SEQ ID NO: 35002 - DNA, 1854 bp, synthetic construct; identical to SEQ ID NO: 35000
  source 1..1854: mol_type = other DNA

SEQ ID NO: 35003 - DNA, 1854 bp, synthetic construct; identical to SEQ ID NO: 35001
  source 1..1854: mol_type = other DNA

SEQ ID NO: 35004 - DNA, 1851 bp, synthetic construct
  source 1..1851: mol_type = other DNA
atggccttaccagtgaccgccttgctcctgccgctggccttgctgctccacgccgccaggccgcagatcgtgctgacacagagccccgccatcatgtctgttagccctggcgagaaagtgaccatgacctgtagcgccagcagcagcgtgaactacatgcactggttccagcagaagcccggcacaagccctaagctgtgggtgtacagcaccagcaatctggcctctggcgtgccagccagattttctggctctggcagcggcaccagctacagcctgacaatcagcagcatggaagccgaggatgccgccacctactattgtcagcagcggagcatctacccaccttggacatttggcggaggcaccaagctggaaatcaaactcgaggacctgaagaacgtgttcccacctgaggtggccgtgttcgagcctagcgaggccgagatcagccacacccagaaagccaccctcgtgtgcctggctaccggcttctaccccgaccatgtggaactgtcttggtgggtcaacggcaaagaggtgcacagcggcgtgtgtaccgacccccagccactgaaagaacagcccgccctgaacgacagccggtactgcctgagcagcagactgagagtgtccgccaccttctggcagaacccccggaaccacttcagatgccaggtgcagttctacggcctgagcgagaacgacgagtggacccaggacagagccaagcccgtgacccagatcgtgtctgccgaagcctggggcagagccgattgcgacgtgaagctggtggaaaagagcttcgagacagacaccaacctgaacttccagaacctgagcgtgatcggcttcagaatcctgctgctgaaagtggccggctttaacctgctgatgaccctgcggctgtggtccagcagggccaagcgatctggatctggagcaacaaacttctcactactcaaacaagcaggtgacgtggaggagaatcccgggcctactagtatggactggatttggcgcatccttttccttgtcggcgctgctaccggcgcgcattccttcgaagaagttcagctccagcagagcggccctgagcttgtgaaacctggcgcttccgtgaagatcagctgcaaggccagcggctacagcttcaccggctacaccatgaactgggtcaagcagtcccacggcaagaacctggaatggatcggcctgattaacccctacaacggcggcacctcctacaaccagaagttcaaggccaaggccacactgaccgtggacaagagcagcagcacagcctacatgcagctgaagtccctgaccagcgaggacagcgccgtgtactactgcgccagagattacggctacgtgctggactattggggccagggcacaagcgtgacagtgtctagtacgcgtatccagaaccctgatcctgccgtgtaccagctgcgggatagcaagagcagcgacaagagcgtgtgtctgttcaccgacttcgacagccagaccaacgtgtcccagagcaaggactccgacgtgtacatcaccgataagtgcgtgctggacatgcggagcatggacttcaagagcaactccgccgtggcctggtccaacaagtccgatttcgcctgcgccaacgccttcaacaacagcattatccccgaggacacattcttcccaagccccgagagcagctgcggctttaccagcgagagctaccagcagggcgtgctgagcgccaccatcctgtacgagatcctgctgggcaaggccaccctgtacgccgtgctggtgtctgccctggtgctgatggctatggtcaagcggaaggacagccgggga

SEQ ID NO: 35005 - DNA, 1863 bp, synthetic construct
  source 1..1863: mol_type = other DNA
atggccttaccagtgaccgccttgctcctgccgctggccttgctgctccacgccgccaggccgcagatcgtgctgacacagagccccgccatcatgtctgttagccctggcgagaaagtgaccatgacctgtagcgccagcagcagcgtgaactacatgcactggttccagcagaagcccggcacaagccctaagctgtgggtgtacagcaccagcaatctggcctctggcgtgccagccagattttctggctctggcagcggcaccagctacagcctgacaatcagcagcatggaagccgaggatgccgccacctactattgtcagcagcggagcatctacccaccttggacatttggcggaggcaccaagctggaaatcaaactcgaggccgacgtgtcccccaagcctaccatcttcctgccctctatcgccgagacaaagctccagaaggccggcacctacctgtgcctgctggaaaagttcttcccagatgtgattaagatccactggcaggaaaagaagtccaacaccatcctgggcagccaggaaggcaacaccatgaagaccaacgacacctacatgaagttcagctggctgaccgtgcccgagaagtccctggacaaagaacacagatgcatcgtgcggcacgaaaacaacaagaacggcgtggaccaggaaatcatcttcccacccatcaagaccgatgtgattacaatggaccccaaggacaactgctccaaggacgccaacgataccctgctgctccagctgaccaacaccagcgcctactacatgtacttgttgctgctgctgaagtccgtggtgtacttcgccatcatcacatgctgcctgctgcggagaaccgccttctgctgcaacggcgagaagtctagggccaagcgatctggatctggagcaacaaacttctcactactcaaacaagcaggtgacgtggaggagaatcccgggcctactagtatggactggatttggcgcatccttttccttgtcggcgctgctaccggcgcgcattccttcgaagaagttcagctccagcagagcggccctgagcttgtgaaacctggcgcttccgtgaagatcagctgcaaggccagcggctacagcttcaccggctacaccatgaactgggtcaagcagtcccacggcaagaacctggaatggatcggcctgattaacccctacaacggcggcacctcctacaaccagaagttcaaggccaaggccacactgaccgtggacaagagcagcagcacagcctacatgcagctgaagtccctgaccagcgaggacagcgccgtgtactactgcgccagagattacggctacgtgctggactattggggccagggcacaagcgtgacagtgtctagtacgcgtagccagcctcacaccaagcccagcgtgttcgtgatgaagaacggcaccaacgtggcctgcctcgtgaaagagttctaccccaaggacatcaggatcaacctggtgtccagcaagaagatcaccgagttcgaccccgccatcgtgatctcccccagcggcaagtacaacgccgtgaagctggggaagtatgaggacagcaacagcgtgacctgctccgtgcagcacgacaacaagaccgtgcacagcaccgactttgaagtgaaaaccgactccaccgaccacgtgaagcccaaagagacagagaacaccaagcagcccagcaagagctgccacaagcccaaggccatcgtgcacaccgagaaagtgaacatgatgagcctgaccgtgatcggcttcagaatcctgctgctgaaagtggccggctttaacctgctgatgaccctgcggctgtggtccagctaa

SEQ ID NO: 35006 - DNA, 1863 bp, synthetic construct
  source 1..1863: mol_type = other DNA
atggccttaccagtgaccgccttgctcctgccgctggccttgctgctccacgccgccaggccgcagatcgtgctgacacagagccccgccatcatgtctgttagccctggcgagaaagtgaccatgacctgtagcgccagcagcagcgtgaactacatgcactggttccagcagaagcccggcacaagccctaagctgtgggtgtacagcaccagcaatctggcctctggcgtgccagccagattttctggctctggcagcggcaccagctacagcctgacaatcagcagcatggaagccgaggatgccgccacctactattgtcagcagcggagcatctacccaccttggacatttggcggaggcaccaagctggaaatcaaactcgaggccgacgtgtcccccaagcctaccatcttcctgccctctatcgccgagacaaagctccagaaggccggcacctacctgtgcctgctggaaaagttcttcccagatgtgattaagatccactggcaggaaaagaagtccaacaccatcctgggcagccaggaaggcaacaccatgaagaccaacgacacctacatgaagttcagctggctgaccgtgcccgagaagtccctggacaaagaacacagatgcatcgtgcggcacgaaaacaacaagaacggcgtggaccaggaaatcatcttcccacccatcaagaccgatgtgattacaatggaccccaaggacaactgctccaaggacgccaacgataccctgctgctccagctgaccaacaccagcgcctactacatgtacttgttgctgctgctgaagtccgtggtgtacttcgccatcatcacatgctgcctgctgcggagaaccgccttctgctgcaacggcgagaagtctagggccaagcgatctggatctggagcaacaaacttctcactactcaaacaagcaggtgacgtggaggagaatcccgggcctactagtatggactggatttggcgcatccttttccttgtcggcgctgctaccggcgcgcattccttcgaagaagttcagctccagcagagcggccctgagcttgtgaaacctggcgcttccgtgaagatcagctgcaaggccagcggctacagcttcaccggctacaccatgaactgggtcaagcagtcccacggcaagaacctggaatggatcggcctgattaacccctacaacggcggcacctcctacaaccagaagttcaaggccaaggccacactgaccgtggacaagagcagcagcacagcctacatgcagctgaagtccctgaccagcgaggacagcgccgtgtactactgcgccagagattacggctacgtgctggactattggggccagggcacaagcgtgacagtgtctagtacgcgtagccagcctcacaccaagcccagcgtgttcgtgatgaagaacggcaccaacgtggcctgcctcgtgaaagagttctaccccaaggacatcaggatcaacctggtgtccagcaagaagatcaccgagttcgaccccgccatcgtgatctcccccagcggcaagtacaacgccgtgaagctggggaagtacgaggacagcaacagcgtgacctgctccgtgcagcacgacaacaagaccgtgcacagcaccgactttgaagtgaaaaccgactccaccgaccacgtgaagcccaaagagacagagaacaccaagcagcccagcaagagctgccacaagcccaaggccatcgtgcacaccgagaaagtgaacatgatgagcctgaccgtgctgggcttcagaatcctgctgctgaaagtggccggctttaacctgctgatgaccctgcggctgtggtccagctaa

SEQ ID NO: 35007 - DNA, 1851 bp, synthetic construct; identical to SEQ ID NO: 35004
  source 1..1851: mol_type = other DNA

SEQ ID NO: 35008 - DNA, 1863 bp, synthetic construct
  source 1..1863: mol_type = other DNA
atggccttaccagtgaccgccttgctcctgccgctggccttgctgctccacgccgccaggccgcagatcgtgctgacacagagccccgccatcatgtctgttagccctggcgagaaagtgaccatgacctgtagcgccagcagcagcgtgaactacatgcactggttccagcagaagcccggcacaagccctaagctgtgggtgtacagcaccagcaatctggcctctggcgtgccagccagattttctggctctggcagcggcaccagctacagcctgacaatcagcagcatggaagccgaggatgccgccacctactattgtcagcagcggagcatctacccaccttggacatttggcggaggcaccaagctggaaatcaaactcgagatccagaaccctgatcctgccgtgtaccagctgcgggatagcaagagcagcgacaagagcgtgtgtctgttcaccgacttcgacagccagaccaacgtgtcccagagcaaggactccgacgtgtacatcaccgataagtgcgtgctggacatgcggagcatggacttcaagagcaactccgccgtggcctggtccaacaagtccgatttcgcctgcgccaacgccttcaacaacagcattatccccgaggacacattcttcccaagccccgagagcagctgcggctttaccagcgagagctaccagcagggcgtgctgagcgccaccatcctgtacgagatcctgctgggcaaggccaccctgtacgccgtgctggtgtctgccctggtgctgatggctatggtcaagcggaaggacagccggggacgcgccaagagaagcggatctggcgtgaagcagaccctgaatttcgacctgctgaagctggctggcgacgtggaatccaacccaggccctactagtatggactggatttggcgcatccttttccttgtcggcgctgctaccggcgcgcattccttcgaagaagttcagctccagcagagcggccctgagcttgtgaaacctggcgcttccgtgaagatcagctgcaaggccagcggctacagcttcaccggctacaccatgaactgggtcaagcagtcccacggcaagaacctggaatggatcggcctgattaacccctacaacggcggcacctcctacaaccagaagttcaaggccaaggccacactgaccgtggacaagagcagcagcacagcctacatgcagctgaagtccctgaccagcgaggacagcgccgtgtactactgcgccagagattacggctacgtgctggactattggggccagggcacaagcgtgacagtgtctagtacgcgtgaggacctgaagaacgtgttcccacctgaggtggccgtgttcgagcctagcgaggccgagatcagccacacccagaaagccaccctcgtgtgcctggctaccggcttctaccccgaccatgtggaactgtcttggtgggtcaacggcaaagaggtgcacagcggcgtgtgtaccgacccccagccactgaaagaacagcccgccctgaacgacagccggtactgcctgagcagcagactgagagtgtccgccaccttctggcagaacccccggaaccacttcagatgccaggtgcagttctacggcctgagcgagaacgacgagtggacccaggacagagccaagcccgtgacccagatcgtgtctgccgaagcctggggcagagccgattgcgacgtgaagctggtggaaaagagcttcgagacagacaccaacctgaacttccagaacctgagcgtgatcggcttcagaatcctgctgctgaaagtggccggctttaacctgctgatgaccctgcggctgtggtccagc

SEQ ID NO: 35009 - DNA, 2256 bp, synthetic construct
  source 1..2256: mol_type = other DNA
atggccttaccagtgaccgccttgctcctgccgctggccttgctgctccacgccgccaggccggaagtgcagctggttgaatctggcggaggactggttcagcctggcggatctctgagactgtcttgtgccgccagcggcttcagcttcagcgacttttggatgagctgggtccgacaggcccctggcaaaggacttgaatgggtcgccacaatcagccaggccggcagcgagaaggactacgtggactctgtgaagggcagattcaccatcagccgggacaacgccaagaagtccctgtacctccagatgaacagcctgagagccgaggacaccgccgtgtactattgtgcctctggcgtgtacagcttcgactacagaggccagggcaccctggtcacagtctcttctggtaccggcggaggcggatctggcggcggaggtagcggtggcggaggatctgaattccagatcgtgctgacacagagccccgccatcatgtctgttagccctggcgagaaagtgaccatgacctgtagcgccagcagcagcgtgaactacatgcactggttccagcagaagcccggcacaagccctaagctgtgggtgtacagcaccagcaatctggcctctggcgtgccagccagattttctggctctggcagcggcaccagctacagcctgacaatcagcagcatggaagccgaggatgccgccacctactattgtcagcagcggagcatctacccaccttggacatttggcggaggcaccaagctggaaatcaaactcgaggacctgaagaacgtgttcccacctgaggtggccgtgttcgagcctagcgaggccgagatcagccacacccagaaagccaccctcgtgtgcctggctaccggcttctaccccgaccatgtggaactgtcttggtgggtcaacggcaaagaggtgcacagcggcgtgtgtaccgacccccagccactgaaagaacagcccgccctgaacgacagccggtactgcctgagcagcagactgagagtgtccgccaccttctggcagaacccccggaaccacttcagatgccaggtgcagttctacggcctgagcgagaacgacgagtggacccaggacagagccaagcccgtgacccagatcgtgtctgccgaagcctggggcagagccgattgcgacgtgaagctggtggaaaagagcttcgagacagacaccaacctgaacttccagaacctgagcgtgatcggcttcagaatcctgctgctgaaagtggccggctttaacctgctgatgaccctgcggctgtggtccagcagggccaagcgatctggatctggagcaacaaacttctcactactcaaacaagcaggtgacgtggaggagaatcccgggcctactagtatggactggatttggcgcatccttttccttgtcggcgctgctaccggcgcgcattccttcgaagaagttcagctccagcagagcggccctgagcttgtgaaacctggcgcttccgtgaagatcagctgcaaggccagcggctacagcttcaccggctacaccatgaactgggtcaagcagtcccacggcaagaacctggaatggatcggcctgattaacccctacaacggcggcacctcctacaaccagaagttcaaggccaaggccacactgaccgtggacaagagcagcagcacagcctacatgcagctgaagtccctgaccagcgaggacagcgccgtgtactactgcgccagagattacggctacgtgctggactattggggccagggcacaagcgtgacagtgtctagtacgcgtatccagaaccctgatcctgccgtgtaccagctgcgggatagcaagagcagcgacaagagcgtgtgtctgttcaccgacttcgacagccagaccaacgtgtcccagagcaaggactccgacgtgtacatcaccgataagtgcgtgctggacatgcggagcatggacttcaagagcaactccgccgtggcctggtccaacaagtccgatttcgcctgcgccaacgccttcaacaacagcattatccccgaggacacattcttcccaagccccgagagcagctgcggctttaccagcgagagctaccagcagggcgtgctgagcgccaccatcctgtacgagatcctgctgggcaaggccaccctgtacgccgtgctggtgtctgccctggtgctgatggctatggtcaagcggaaggacagccgggga

SEQ ID NO: 35010 - DNA, 2268 bp, synthetic construct
  source 1..2268: mol_type = other DNA
atggccttaccagtgaccgccttgctcctgccgctggccttgctgctccacgccgccaggccggaagtgcagctggttgaatctggcggaggactggttcagcctggcggatctctgagactgtcttgtgccgccagcggcttcagcttcagcgacttttggatgagctgggtccgacaggcccctggcaaaggacttgaatgggtcgccacaatcagccaggccggcagcgagaaggactacgtggactctgtgaagggcagattcaccatcagccgggacaacgccaagaagtccctgtacctccagatgaacagcctgagagccgaggacaccgccgtgtactattgtgcctctggcgtgtacagcttcgactacagaggccagggcaccctggtcacagtctcttctggtaccggcggaggcggatctggcggcggaggtagcggtggcggaggatctgaattccagatcgtgctgacacagagccccgccatcatgtctgttagccctggcgagaaagtgaccatgacctgtagcgccagcagcagcgtgaactacatgcactggttccagcagaagcccggcacaagccctaagctgtgggtgtacagcaccagcaatctggcctctggcgtgccagccagattttctggctctggcagcggcaccagctacagcctgacaatcagcagcatggaagccgaggatgccgccacctactattgtcagcagcggagcatctacccaccttggacatttggcggaggcaccaagctggaaatcaaactcgagatccagaaccctgatcctgccgtgtaccagctgcgggatagcaagagcagcgacaagagcgtgtgtctgttcaccgacttcgacagccagaccaacgtgtcccagagcaaggactccgacgtgtacatcaccgataagtgcgtgctggacatgcggagcatggacttcaagagcaactccgccgtggcctggtccaacaagtccgatttcgcctgcgccaacgccttcaacaacagcattatccccgaggacacattcttcccaagccccgagagcagctgcggctttaccagcgagagctaccagcagggcgtgctgagcgccaccatcctgtacgagatcctgctgggcaaggccaccctgtacgccgtgctggtgtctgccctggtgctgatggctatggtcaagcggaaggacagccggggacgcgccaagagaagcggatctggcgtgaagcagaccctgaatttcgacctgctgaagctggctggcgacgtggaatccaacccaggccctactagtatggactggatttggcgcatccttttccttgtcggcgctgctaccggcgcgcattccttcgaagaagttcagctccagcagagcggccctgagcttgtgaaacctggcgcttccgtgaagatcagctgcaaggccagcggctacagcttcaccggctacaccatgaactgggtcaagcagtcccacggcaagaacctggaatggatcggcctgattaacccctacaacggcggcacctcctacaaccagaagttcaaggccaaggccacactgaccgtggacaagagcagcagcacagcctacatgcagctgaagtccctgaccagcgaggacagcgccgtgtactactgcgccagagattacggctacgtgctggactattggggccagggcacaagcgtgacagtgtctagtacgcgtgaggacctgaagaacgtgttcccacctgaggtggccgtgttcgagcctagcgaggccgagatcagccacacccagaaagccaccctcgtgtgcctggctaccggcttctaccccgaccatgtggaactgtcttggtgggtcaacggcaaagaggtgcacagcggcgtgtgtaccgacccccagccactgaaagaacagcccgccctgaacgacagccggtactgcctgagcagcagactgagagtgtccgccaccttctggcagaacccccggaaccacttcagatgccaggtgcagttctacggcctgagcgagaacgacgagtggacccaggacagagccaagcccgtgacccagatcgtgtctgccgaagcctggggcagagccgattgcgacgtgaagctggtggaaaagagcttcgagacagacaccaacctgaacttccagaacctgagcgtgatcggcttcagaatcctgctgctgaaagtggccggctttaacctgctgatgaccctgcggctgtggtccagc

SEQ ID NO: 35011 - DNA, 2667 bp, synthetic construct
  source 1..2667: mol_type = other DNA
atggccttaccagtgaccgccttgctcctgccgctggccttgctgctccacgccgccaggccggaagtgcagctggttgaatctggcggaggactggttcagcctggcggatctctgagactgtcttgtgccgccagcggcttcagcttcagcgacttttggatgagctgggtccgacaggcccctggcaaaggacttgaatgggtcgccacaatcagccaggccggcagcgagaaggactacgtggactctgtgaagggcagattcaccatcagccgggacaacgccaagaagtccctgtacctccagatgaacagcctgagagccgaggacaccgccgtgtactattgtgcctctggcgtgtacagcttcgactacagaggccagggcaccctggtcacagtctcttctggtaccggcggaggcggatctggcggcggaggtagcggtggcggaggatctgaattccagatcgtgctgacacagagccccgccatcatgtctgttagccctggcgagaaagtgaccatgacctgtagcgccagcagcagcgtgaactacatgcactggttccagcagaagcccggcacaagccctaagctgtgggtgtacagcaccagcaatctggcctctggcgtgccagccagattttctggctctggcagcggcaccagctacagcctgacaatcagcagcatggaagccgaggatgccgccacctactattgtcagcagcggagcatctacccaccttggacatttggcggaggcaccaagctggaaatcaaactcgaggacctgaagaacgtgttcccacctgaggtggccgtgttcgagcctagcgaggccgagatcagccacacccagaaagccaccctcgtgtgcctggctaccggcttctaccccgaccatgtggaactgtcttggtgggtcaacggcaaagaggtgcacagcggcgtgtgtaccgacccccagccactgaaagaacagcccgccctgaacgacagccggtactgcctgagcagcagactgagagtgtccgccaccttctggcagaacccccggaaccacttcagatgccaggtgcagttctacggcctgagcgagaacgacgagtggacccaggacagagccaagcccgtgacccagatcgtgtctgccgaagcctggggcagagccgattgcgacgtgaagctggtggaaaagagcttcgagacagacaccaacctgaacttccagaacctgagcgtgatcggcttcagaatcctgctgctgaaagtggccggctttaacctgctgatgaccctgcggctgtggtccagcagggccaagcgatctggatctggagcaacaaacttctcactactcaaacaagcaggtgacgtggaggagaatcccgggcctactagtatggactggatttggcgcatccttttccttgtcggcgctgctaccggcgcgcattccgggccccagctccagctgcaagagtctggacctggcctggtcaagcctagcgagacactgagcctgacctgtaccgtgtccggcgatagcatcagcagcggcgattactactggggctggatcagacagcctcctggcaaaggactggaatggatcggccacatctactacagcggcgtgacctactacaaccccagcctgaagtccagagtgaccatcagcgtggacaccagccggaaccagttctccctgaagctgtctagcgtgacagccgccgataccgccgtgtactactgcaccagagaggacagcagcaactggcggagtagaggccagggaacactggtcacagttagctctggatccggcggaggcggaagtggaggcggaggatctggcggcggaggctctttcgaagaagttcagctccagcagagcggccctgagcttgtgaaacctggcgcttccgtgaagatcagctgcaaggccagcggctacagcttcaccggctacaccatgaactgggtcaagcagtcccacggcaagaacctggaatggatcggcctgattaacccctacaacggcggcacctcctacaaccagaagttcaaggccaaggccacactgaccgtggacaagagcagcagcacagcctacatgcagctgaagtccctgaccagcgaggacagcgccgtgtactactgcgccagagattacggctacgtgctggactattggggccagggcacaagcgtgacagtgtctagtacgcgtatccagaaccctgatcctgccgtgtaccagctgcgggatagcaagagcagcgacaagagcgtgtgtctgttcaccgacttcgacagccagaccaacgtgtcccagagcaaggactccgacgtgtacatcaccgataagtgcgtgctggacatgcggagcatggacttcaagagcaactccgccgtggcctggtccaacaagtccgatttcgcctgcgccaacgccttcaacaacagcattatccccgaggacacattcttcccaagccccgagagcagctgcggctttaccagcgagagctaccagcagggcgtgctgagcgccaccatcctgtacgagatcctgctgggcaaggccaccctgtacgccgtgctggtgtctgccctggtgctgatggctatggtcaagcggaaggacagccgggga

SEQ ID NO: 35012 - DNA, 2679 bp, synthetic construct
  source 1..2679: mol_type = other DNA
atggccttaccagtgaccgccttgctcctgccgctggccttgctgctccacgccgccaggccggaagtgcagctggttgaatctggcggaggactggttcagcctggcggatctctgagactgtcttgtgccgccagcggcttcagcttcagcgacttttggatgagctgggtccgacaggcccctggcaaaggacttgaatgggtcgccacaatcagccaggccggcagcgagaaggactacgtggactctgtgaagggcagattcaccatcagccgggacaacgccaagaagtccctgtacctccagatgaacagcctgagagccgaggacaccgccgtgtactattgtgcctctggcgtgtacagcttcgactacagaggccagggcaccctggtcacagtctcttctggtaccggcggaggcggatctggcggcggaggtagcggtggcggaggatctgaattccagatcgtgctgacacagagccccgccatcatgtctgttagccctggcgagaaagtgaccatgacctgtagcgccagcagcagcgtgaactacatgcactggttccagcagaagcccggcacaagccctaagctgtgggtgtacagcaccagcaatctggcctctggcgtgccagccagattttctggctctggcagcggcaccagctacagcctgacaatcagcagcatggaagccgaggatgccgccacctactattgtcagcagcggagcatctacccaccttggacatttggcggaggcaccaagctggaaatcaaactcgagatccagaaccctgatcctgccgtgtaccagctgcgggatagcaagagcagcgacaagagcgtgtgtctgttcaccgacttcgacagccagaccaacgtgtcccagagcaaggactccgacgtgtacatcaccgataagtgcgtgctggacatgcggagcatggacttcaagagcaactccgccgtggcctggtccaacaagtccgatttcgcctgcgccaacgccttcaacaacagcattatccccgaggacacattcttcccaagccccgagagcagctgcggctttaccagcgagagctaccagcagggcgtgctgagcgccaccatcctgtacgagatcctgctgggcaaggccaccctgtacgccgtgctggtgtctgccctggtgctgatggctatggtcaagcggaaggacagccggggacgcgccaagagaagcggatctggcgtgaagcagaccctgaatttcgacctgctgaagctggctggcgacgtggaatccaacccaggccctactagtatggactggatttggcgcatccttttccttgtcggcgctgctaccggcgcgcattccgggccccagctccagctgcaagagtctggacctggcctggtcaagcctagcgagacactgagcctgacctgtaccgtgtccggcgatagcatcagcagcggcgattactactggggctggatcagacagcctcctggcaaaggactggaatggatcggccacatctactacagcggcgtgacctactacaaccccagcctgaagtccagagtgaccatcagcgtggacaccagccggaaccagttctccctgaagctgtctagcgtgacagccgccgataccgccgtgtactactgcaccagagaggacagcagcaactggcggagtagaggccagggaacactggtcacagttagctctggatccggcggaggcggaagtggaggcggaggatctggcggcggaggctctttcgaagaagttcagctccagcagagcggccctgagcttgtgaaacctggcgcttccgtgaagatcagctgcaaggccagcggctacagcttcaccggctacaccatgaactgggtcaagcagtcccacggcaagaacctggaatggatcggcctgattaacccctacaacggcggcacctcctacaaccagaagttcaaggccaaggccacactgaccgtggacaagagcagcagcacagcctacatgcagctgaagtccctgaccagcgaggacagcgccgtgtactactgcgccagagattacggctacgtgctggactattggggccagggcacaagcgtgacagtgtctagtacgcgtgaggacctgaagaacgtgttcccacctgaggtggccgtgttcgagcctagcgaggccgagatcagccacacccagaaagccaccctcgtgtgcctggctaccggcttctaccccgaccatgtggaactgtcttggtgggtcaacggcaaagaggtgcacagcggcgtgtgtaccgacccccagccactgaaagaacagcccgccctgaacgacagccggtactgcctgagcagcagactgagagtgtccgccaccttctggcagaacccccggaaccacttcagatgccaggtgcagttctacggcctgagcgagaacgacgagtggacccaggacagagccaagcccgtgacccagatcgtgtctgccgaagcctggggcagagccgattgcgacgtgaagctggtggaaaagagcttcgagacagacaccaacctgaacttccagaacctgagcgtgatcggcttcagaatcctgctgctgaaagtggccggctttaacctgctgatgaccctgcggctgtggtccagc

SEQ ID NO: 35013 - DNA, 2061 bp, synthetic construct
  source 1..2061: mol_type = other DNA
atggccttaccagtgaccgccttgctcctgccgctggccttgctgctccacgccgccaggccgcagatcgtgctgacacagagccccgccatcatgtctgttagccctggcgagaaagtgaccatgacctgtagcgccagcagcagcgtgaactacatgcactggttccagcagaagcccggcacaagccctaagctgtgggtgtacagcaccagcaatctggcctctggcgtgccagccagattttctggctctggcagcggcaccagctacagcctgacaatcagcagcatggaagccgaggatgccgccacctactattgtcagcagcggagcatctacccaccttggacatttggcggaggcaccaagctggaaatcaaactcgaggacctgaagaacgtgttcccacctgaggtggccgtgttcgagcctagcgaggccgagatcagccacacccagaaagccaccctcgtgtgcctggctaccggcttctaccccgaccatgtggaactgtcttggtgggtcaacggcaaagaggtgcacagcggcgtgtgtaccgacccccagccactgaaagaacagcccgccctgaacgacagccggtactgcctgagcagcagactgagagtgtccgccaccttctggcagaacccccggaaccacttcagatgccaggtgcagttctacggcctgagcgagaacgacgagtggacccaggacagagccaagcccgtgacccagatcgtgtctgccgaagcctggggcagagccgattgcgacgtgaagctggtggaaaagagcttcgagacagacaccaacctgaacttccagaacctgagcgtgatcggcttcagaatcctgctgctgaaagtggccggctttaacctgctgatgaccctgcggctgtggtccagcagggccaagcgatctggatctggagcaacaaacttctcactactcaaacaagcaggtgacgtggaggagaatcccgggcctactagtatggactggatttggcgcatccttttccttgtcggcgctgctaccggcgcccattccgggcccatggaccccgacctggaaatcagagccgccttcctgcggcagagaaacacagccctgagaacagaggtggccgagctggaacaagaggtgcagcggctggaaaacgaggtgtcccagtacgagacaagatacggccctctcggaggcggaaaaggatccggcggcggaggatctggcggaggcggatctgggggcggaggctctttcgaagaagttcagctccagcagagcggccctgagcttgtgaaacctggcgcttccgtgaagatcagctgcaaggccagcggctacagcttcaccggctacaccatgaactgggtcaagcagtcccacggcaagaacctggaatggatcggcctgattaacccctacaacggcggcacctcctacaaccagaagttcaaggccaaggccacactgaccgtggacaagagcagcagcacagcctacatgcagctgaagtccctgaccagcgaggacagcgccgtgtactactgcgccagagattacggctacgtgctggactattggggccagggcacaagcgtgacagtgtctagtacgcgtatccagaaccctgatcctgccgtgtaccagctgcgggatagcaagagcagcgacaagagcgtgtgtctgttcaccgacttcgacagccagaccaacgtgtcccagagcaaggactccgacgtgtacatcaccgataagtgcgtgctggacatgcggagcatggacttcaagagcaactccgccgtggcctggtccaacaagtccgatttcgcctgcgccaacgccttcaacaacagcattatccccgaggacacattcttcccaagccccgagagcagctgcggctttaccagcgagagctaccagcagggcgtgctgagcgccaccatcctgtacgagatcctgctgggcaaggccaccctgtacgccgtgctggtgtctgccctggtgctgatggctatggtcaagcggaaggacagccgggga

SEQ ID NO: 35014 - DNA, 2073 bp, synthetic construct
  source 1..2073: mol_type = other DNA
atggccttaccagtgaccgccttgctcctgccgctggccttgctgctccacgccgccaggccgcagatcgtgctgacacagagccccgccatcatgtctgttagccctggcgagaaagtgaccatgacctgtagcgccagcagcagcgtgaactacatgcactggttccagcagaagcccggcacaagccctaagctgtgggtgtacagcaccagcaatctggcctctggcgtgccagccagattttctggctctggcagcggcaccagctacagcctgacaatcagcagcatggaagccgaggatgccgccacctactattgtcagcagcggagcatctacccaccttggacatttggcggaggcaccaagctggaaatcaaactcgagatccagaaccctgatcctgccgtgtaccagctgcgggatagcaagagcagcgacaagagcgtgtgtctgttcaccgacttcgacagccagaccaacgtgtcccagagcaaggactccgacgtgtacatcaccgataagtgcgtgctggacatgcggagcatggacttcaagagcaactccgccgtggcctggtccaacaagtccgatttcgcctgcgccaacgccttcaacaacagcattatccccgaggacacattcttcccaagccccgagagcagctgcggctttaccagcgagagctaccagcagggcgtgctgagcgccaccatcctgtacgagatcctgctgggcaaggccaccctgtacgccgtgctggtgtctgccctggtgctgatggctatggtcaagcggaaggacagccggggacgcgccaagagaagcggatctggcgtgaagcagaccctgaatttcgacctgctgaagctggctggcgacgtggaatccaacccaggccctactagtatggactggatttggcgcatccttttccttgtcggcgctgctaccggcgcccattccgggcccatggaccccgacctggaaatcagagccgccttcctgcggcagagaaacacagccctgagaacagaggtggccgagctggaacaagaggtgcagcggctggaaaacgaggtgtcccagtacgagacaagatacggccctctcggaggcggaaaaggatccggcggcggaggatctggcggaggcggatctgggggcggaggctctttcgaagaagttcagctccagcagagcggccctgagcttgtgaaacctggcgcttccgtgaagatcagctgcaaggccagcggctacagcttcaccggctacaccatgaactgggtcaagcagtcccacggcaagaacctggaatggatcggcctgattaacccctacaacggcggcacctcctacaaccagaagttcaaggccaaggccacactgaccgtggacaagagcagcagcacagcctacatgcagctgaagtccctgaccagcgaggacagcgccgtgtactactgcgccagagattacggctacgtgctggactattggggccagggcacaagcgtgacagtgtctagtacgcgtgaggacctgaagaacgtgttcccacctgaggtggccgtgttcgagcctagcgaggccgagatcagccacacccagaaagccaccctcgtgtgcctggctaccggcttctaccccgaccatgtggaactgtcttggtgggtcaacggcaaagaggtgcacagcggcgtgtgtaccgacccccagccactgaaagaacagcccgccctgaacgacagccggtactgcctgagcagcagactgagagtgtccgccaccttctggcagaacccccggaaccacttcagatgccaggtgcagttctacggcctgagcgagaacgacgagtggacccaggacagagccaagcccgtgacccagatcgtgtctgccgaagcctggggcagagccgattgcgacgtgaagctggtggaaaagagcttcgagacagacaccaacctgaacttccagaacctgagcgtgatcggcttcagaatcctgctgctgaaagtggccggctttaacctgctgatgaccctgcggctgtggtccagc

SEQ ID NO: 35015 - DNA, 1992 bp, synthetic construct
  source 1..1992: mol_type = other DNA
atggccttaccagtgaccgccttgctcctgccgctggccttgctgctccacgccgccaggccgcagatcgtgctgacacagagccccgccatcatgtctgttagccctggcgagaaagtgaccatgacctgtagcgccagcagcagcgtgaactacatgcactggttccagcagaagcccggcacaagccctaagctgtgggtgtacagcaccagcaatctggcctctggcgtgccagccagattttctggctctggcagcggcaccagctacagcctgacaatcagcagcatggaagccgaggatgccgccacctactattgtcagcagcggagcatctacccaccttggacatttggcggaggcaccaagctggaaatcaaactcgaggacctgaagaacgtgttcccacctgaggtggccgtgttcgagcctagcgaggccgagatcagccacacccagaaagccaccctcgtgtgcctggctaccggcttctaccccgaccatgtggaactgtcttggtgggtcaacggcaaagaggtgcacagcggcgtgtgtaccgacccccagccactgaaagaacagcccgccctgaacgacagccggtactgcctgagcagcagactgagagtgtccgccaccttctggcagaacccccggaaccacttcagatgccaggtgcagttctacggcctgagcgagaacgacgagtggacccaggacagagccaagcccgtgacccagatcgtgtctgccgaagcctggggcagagccgattgcgacgtgaagctggtggaaaagagcttcgagacagacaccaacctgaacttccagaacctgagcgtgatcggcttcagaatcctgctgctgaaagtggccggctttaacctgctgatgaccctgcggctgtggtccagcagggccaagcgatctggatctggagcaacaaacttctcactactcaaacaagcaggtgacgtggaggagaatcccgggcctactagtatggactggatttggcgcatccttttccttgtcggcgctgctaccggcgcccattccgggcccgaagttgctgccctcgagaaggaggtagcagctttggaaaaagaagtcgcagcccttgagaaagaagttgcggctctggagaagggatccggcggcggaggatctggcggaggcggatctgggggcggaggctctttcgaagaagttcagctccagcagagcggccctgagcttgtgaaacctggcgcttccgtgaagatcagctgcaaggccagcggctacagcttcaccggctacaccatgaactgggtcaagcagtcccacggcaagaacctggaatggatcggcctgattaacccctacaacggcggcacctcctacaaccagaagttcaaggccaaggccacactgaccgtggacaagagcagcagcacagcctacatgcagctgaagtccctgaccagcgaggacagcgccgtgtactactgcgccagagattacggctacgtgctggactattggggccagggcacaagcgtgacagtgtctagtacgcgtatccagaaccctgatcctgccgtgtaccagctgcgggatagcaagagcagcgacaagagcgtgtgtctgttcaccgacttcgacagccagaccaacgtgtcccagagcaaggactccgacgtgtacatcaccgataagtgcgtgctggacatgcggagcatggacttcaagagcaactccgccgtggcctggtccaacaagtccgatttcgcctgcgccaacgccttcaacaacagcattatccccgaggacacattcttcccaagccccgagagcagctgcggctttaccagcgagagctaccagcagggcgtgctgagcgccaccatcctgtacgagatcctgctgggcaaggccaccctgtacgccgtgctggtgtctgccctggtgctgatggctatggtcaagcggaaggacagccgggga

SEQ ID NO: 35016 - DNA, 2004 bp, synthetic construct
  source 1..2004: mol_type = other DNA
atggccttaccagtgaccgccttgctcctgccgctggccttgctgctccacgccgccaggccgcagatcgtgctgacacagagccccgccatcatgtctgttagccctggcgagaaagtgaccatgacctgtagcgccagcagcagcgtgaactacatgcactggttccagcagaagcccggcacaagccctaagctgtgggtgtacagcaccagcaatctggcctctggcgtgccagccagattttctggctctggcagcggcaccagctacagcctgacaatcagcagcatggaagccgaggatgccgccacctactattgtcagcagcggagcatctacccaccttggacatttggcggaggcaccaagctggaaatcaaactcgagatccagaaccctgatcctgccgtgtaccagctgcgggatagcaagagcagcgacaagagcgtgtgtctgttcaccgacttcgacagccagaccaacgtgtcccagagcaaggactccgacgtgtacatcaccgataagtgcgtgctggacatgcggagcatggacttcaagagcaactccgccgtggcctggtccaacaagtccgatttcgcctgcgccaacgccttcaacaacagcattatccccgaggacacattcttcccaagccccgagagcagctgcggctttaccagcgagagctaccagcagggcgtgctgagcgccaccatcctgtacgagatcctgctgggcaaggccaccctgtacgccgtgctggtgtctgccctggtgctgatggctatggtcaagcggaaggacagccggggacgcgccaagagaagcggatctggcgtgaagcagaccctgaatttcgacctgctgaagctggctggcgacgtggaatccaacccaggccctactagtatggactggatttggcgcatccttttccttgtcggcgctgctaccggcgcccattccgggcccgaagttgctgccctcgagaaggaggtagcagctttggaaaaagaagtcgcagcccttgagaaagaagttgcggctctggagaagggatccggcggcggaggatctggcggaggcggatctgggggcggaggctctttcgaagaagttcagctccagcagagcggccctgagcttgtgaaacctggcgcttccgtgaagatcagctgcaaggccagcggctacagcttcaccggctacaccatgaactgggtcaagcagtcccacggcaagaacctggaatggatcggcctgattaacccctacaacggcggcacctcctacaaccagaagttcaaggccaaggccacactgaccgtggacaagagcagcagcacagcctacatgcagctgaagtccctgaccagcgaggacagcgccgtgtactactgcgccagagattacggctacgtgctggactattggggccagggcacaagcgtgacagtgtctagtacgcgtgaggacctgaagaacgtgttcccacctgaggtggccgtgttcgagcctagcgaggccgagatcagccacacccagaaagccaccctcgtgtgcctggctaccggcttctaccccgaccatgtggaactgtcttggtgggtcaacggcaaagaggtgcacagcggcgtgtgtaccgacccccagccactgaaagaacagcccgccctgaacgacagccggtactgcctgagcagcagactgagagtgtccgccaccttctggcagaacccccggaaccacttcagatgccaggtgcagttctacggcctgagcgagaacgacgagtggacccaggacagagccaagcccgtgacccagatcgtgtctgccgaagcctggggcagagccgattgcgacgtgaagctggtggaaaagagcttcgagacagacaccaacctgaacttccagaacctgagcgtgatcggcttcagaatcctgctgctgaaagtggccggctttaacctgctgatgaccctgcggctgtggtccagc

SEQ ID NO: 35017 - DNA, 2262 bp, synthetic construct
  source 1..2262: mol_type = other DNA
atggccttaccagtgaccgccttgctcctgccgctggccttgctgctccacgccgccaggccgcagatcgtgctgacacagagccccgccatcatgtctgttagccctggcgagaaagtgaccatgacctgtagcgccagcagcagcgtgaactacatgcactggttccagcagaagcccggcacaagccctaagctgtgggtgtacagcaccagcaatctggcctctggcgtgccagccagattttctggctctggcagcggcaccagctacagcctgacaatcagcagcatggaagccgaggatgccgccacctactattgtcagcagcggagcatctacccaccttggacatttggcggaggcaccaagctggaaatcaaactcgaggacctgaagaacgtgttcccacctgaggtggccgtgttcgagcctagcgaggccgagatcagccacacccagaaagccaccctcgtgtgcctggctaccggcttctaccccgaccatgtggaactgtcttggtgggtcaacggcaaagaggtgcacagcggcgtgtgtaccgacccccagccactgaaagaacagcccgccctgaacgacagccggtactgcctgagcagcagactgagagtgtccgccaccttctggcagaacccccggaaccacttcagatgccaggtgcagttctacggcctgagcgagaacgacgagtggacccaggacagagccaagcccgtgacccagatcgtgtctgccgaagcctggggcagagccgattgcgacgtgaagctggtggaaaagagcttcgagacagacaccaacctgaacttccagaacctgagcgtgatcggcttcagaatcctgctgctgaaagtggccggctttaacctgctgatgaccctgcggctgtggtccagcagggccaagcgatctggatctggagcaacaaacttctcactactcaaacaagcaggtgacgtggaggagaatcccgggcctactagtatggactggatttggcgcatccttttccttgtcggcgctgctaccggcgcccattccgggccccaggttcagctgcaagagtctggcggaggacttgctcaagctggcggaagcctgagactgtcttgtgccgcctctggcagaaccttcagcatgggctggtttagacaggcccctggcaaagagagagagttcgtcgccgccatcacatacagcggcggcagcccttactacgcctcttctgtcagaggccggttcaccatcagccgggacaacgccaagaacaccgtgtacctccagatgaacagcctgaagccagaggacaccgccgtgtactactgtgccgccaatccaacctacggcagcgactggaatgccgagaattggggccagggcacccaagtgacagtgtctagtggatccggcggcggaggatctggcggaggcggatctgggggcggaggctctttcgaagaagttcagctccagcagagcggccctgagcttgtgaaacctggcgcttccgtgaagatcagctgcaaggccagcggctacagcttcaccggctacaccatgaactgggtcaagcagtcccacggcaagaacctggaatggatcggcctgattaacccctacaacggcggcacctcctacaaccagaagttcaaggccaaggccacactgaccgtggacaagagcagcagcacagcctacatgcagctgaagtccctgaccagcgaggacagcgccgtgtactactgcgccagagattacggctacgtgctggactattggggccagggcacaagcgtgacagtgtctagtacgcgtatccagaaccctgatcctgccgtgtaccagctgcgggatagcaagagcagcgacaagagcgtgtgtctgttcaccgacttcgacagccagaccaacgtgtcccagagcaaggactccgacgtgtacatcaccgataagtgcgtgctggacatgcggagcatggacttcaagagcaactccgccgtggcctggtccaacaagtccgatttcgcctgcgccaacgccttcaacaacagcattatccccgaggacacattcttcccaagccccgagagcagctgcggctttaccagcgagagctaccagcagggcgtgctgagcgccaccatcctgtacgagatcctgctgggcaaggccaccctgtacgccgtgctggtgtctgccctggtgctgatggctatggtcaagcggaaggacagccgggga

SEQ ID NO: 35018 - DNA, 2274 bp, synthetic construct
  source 1..2274: mol_type = other DNA
atggccttaccagtgaccgccttgctcctgccgctggccttgctgctccacgccgccaggccgcagatcgtgctgacacagagccccgccatcatgtctgttagccctggcgagaaagtgaccatgacctgtagcgccagcagcagcgtgaactacatgcactggttccagcagaagcccggcacaagccctaagctgtgggtgtacagcaccagcaatctggcctctggcgtgccagccagattttctggctctggcagcggcaccagctacagcctgacaatcagcagcatggaagccgaggatgccgccacctactattgtcagcagcggagcatctacccaccttggacatttggcggaggcaccaagctggaaatcaaactcgagatccagaaccctgatcctgccgtgtaccagctgcgggatagcaagagcagcgacaagagcgtgtgtctgttcaccgacttcgacagccagaccaacgtgtcccagagcaaggactccgacgtgtacatcaccgataagtgcgtgctggacatgcggagcatggacttcaagagcaactccgccgtggcctggtccaacaagtccgatttcgcctgcgccaacgccttcaacaacagcattatccccgaggacacattcttcccaagccccgagagcagctgcggctttaccagcgagagctaccagcagggcgtgctgagcgccaccatcctgtacgagatcctgctgggcaaggccaccctgtacgccgtgctggtgtctgccctggtgctgatggctatggtcaagcggaaggacagccggggacgcgccaagagaagcggatctggcgtgaagcagaccctgaatttcgacctgctgaagctggctggcgacgtggaatccaacccaggccctactagtatggactggatttggcgcatccttttccttgtcggcgctgctaccggcgcccattccgggccccaggttcagctgcaagagtctggcggaggacttgctcaagctggcggaagcctgagactgtcttgtgccgcctctggcagaaccttcagcatgggctggtttagacaggcccctggcaaagagagagagttcgtcgccgccatcacatacagcggcggcagcccttactacgcctcttctgtcagaggccggttcaccatcagccgggacaacgccaagaacaccgtgtacctccagatgaacagcctgaagccagaggacaccgccgtgtactactgtgccgccaatccaacctacggcagcgactggaatgccgagaattggggccagggcacccaagtgacagtgtctagtggatccggcggcggaggatctggcggaggcggatctgggggcggaggctctttcgaagaagttcagctccagcagagcggccctgagcttgtgaaacctggcgcttccgtgaagatcagctgcaaggccagcggctacagcttcaccggctacaccatgaactgggtcaagcagtcccacggcaagaacctggaatggatcggcctgattaacccctacaacggcggcacctcctacaaccagaagttcaaggccaaggccacactgaccgtggacaagagcagcagcacagcctacatgcagctgaagtccctgaccagcgaggacagcgccgtgtactactgcgccagagattacggctacgtgctggactattggggccagggcacaagcgtgacagtgtctagtacgcgtgaggacctgaagaacgtgttcccacctgaggtggccgtgttcgagcctagcgaggccgagatcagccacacccagaaagccaccctcgtgtgcctggctaccggcttctaccccgaccatgtggaactgtcttggtgggtcaacggcaaagaggtgcacagcggcgtgtgtaccgacccccagccactgaaagaacagcccgccctgaacgacagccggtactgcctgagcagcagactgagagtgtccgccaccttctggcagaacccccggaaccacttcagatgccaggtgcagttctacggcctgagcgagaacgacgagtggacccaggacagagccaagcccgtgacccagatcgtgtctgccgaagcctggggcagagccgattgcgacgtgaagctggtggaaaagagcttcgagacagacaccaacctgaacttccagaacctgagcgtgatcggcttcagaatcctgctgctgaaagtggccggctttaacctgctgatgaccctgcggctgtggtccagc

SEQ ID NO: 35019 - DNA, 2280 bp, synthetic construct
  source 1..2280: mol_type = other DNA
atggccttaccagtgaccgccttgctcctgccgctggccttgctgctccacgccgccaggccggaagtgcaactggtggaatctggaggctctctggtgcagccagggggaagcctgagactgtcttgtgccgcttccggcttcaccttcgacgactacgccatgagctgggtgcgccaggtgccaggcaaaggcctggaatgggtgtccagcatcaactggagcggcacccacaccgattacgccgactccgtgaaaggcagattcacaatcagcagaaacaacgccaacaataccctgtacctgcagatgaactccctgaagtctgaggatacagcagtgtattattgcgccaagaactggcgggacgccggcaccacttggtttgagaaaagcggctctgccggacagggaacccaagtgacagtgtcctccggtaccggcggaggcggatctggcggcggaggtagcggtggcggaggatctgaattccagatcgtgctgacacagagccccgccatcatgtctgttagccctggcgagaaagtgaccatgacctgtagcgccagcagcagcgtgaactacatgcactggttccagcagaagcccggcacaagccctaagctgtgggtgtacagcaccagcaatctggcctctggcgtgccagccagattttctggctctggcagcggcaccagctacagcctgacaatcagcagcatggaagccgaggatgccgccacctactattgtcagcagcggagcatctacccaccttggacatttggcggaggcaccaagctggaaatcaaactcgaggacctgaagaacgtgttcccacctgaggtggccgtgttcgagcctagcgaggccgagatcagccacacccagaaagccaccctcgtgtgcctggctaccggcttctaccccgaccatgtggaactgtcttggtgggtcaacggcaaagaggtgcacagcggcgtgtgtaccgacccccagccactgaaagaacagcccgccctgaacgacagccggtactgcctgagcagcagactgagagtgtccgccaccttctggcagaacccccggaaccacttcagatgccaggtgcagttctacggcctgagcgagaacgacgagtggacccaggacagagccaagcccgtgacccagatcgtgtctgccgaagcctggggcagagccgattgcgacgtgaagctggtggaaaagagcttcgagacagacaccaacctgaacttccagaacctgagcgtgatcggcttcagaatcctgctgctgaaagtggccggctttaacctgctgatgaccctgcggctgtggtccagcagggccaagcgatctggatctggagcaacaaacttctcactactcaaacaagcaggtgacgtggaggagaatcccgggcctactagtatggactggatttggcgcatccttttccttgtcggcgctgctaccggcgcgcattccttcgaagaagttcagctccagcagagcggccctgagcttgtgaaacctggcgcttccgtgaagatcagctgcaaggccagcggctacagcttcaccggctacaccatgaactgggtcaagcagtcccacggcaagaacctggaatggatcggcctgattaacccctacaacggcggcacctcctacaaccagaagttcaaggccaaggccacactgaccgtggacaagagcagcagcacagcctacatgcagctgaagtccctgaccagcgaggacagcgccgtgtactactgcgccagagattacggctacgtgctggactattggggccagggcacaagcgtgacagtgtctagtacgcgtatccagaaccctgatcctgccgtgtaccagctgcgggatagcaagagcagcgacaagagcgtgtgtctgttcaccgacttcgacagccagaccaacgtgtcccagagcaaggactccgacgtgtacatcaccgataagtgcgtgctggacatgcggagcatggacttcaagagcaactccgccgtggcctggtccaacaagtccgatttcgcctgcgccaacgccttcaacaacagcattatccccgaggacacattcttcccaagccccgagagcagctgcggctttaccagcgagagctaccagcagggcgtgctgagcgccaccatcctgtacgagatcctgctgggcaaggccaccctgtacgccgtgctggtgtctgccctggtgctgatggctatggtcaagcggaaggacagccgggga

SEQ ID NO: 35020 - DNA, 2292 bp, synthetic construct
  source 1..2292: mol_type = other DNA
atggccttaccagtgaccgccttgctcctgccgctggccttgctgctccacgccgccaggccggaagtgcaactggtggaatctggaggctctctggtgcagccagggggaagcctgagactgtcttgtgccgcttccggcttcaccttcgacgactacgccatgagctgggtgcgccaggtgccaggcaaaggcctggaatgggtgtccagcatcaactggagcggcacccacaccgattacgccgactccgtgaaaggcagattcacaatcagcagaaacaacgccaacaataccctgtacctgcagatgaactccctgaagtctgaggatacagcagtgtattattgcgccaagaactggcgggacgccggcaccacttggtttgagaaaagcggctctgccggacagggaacccaagtgacagtgtcctccggtaccggcggaggcggatctggcggcggaggtagcggtggcggaggatctgaattccagatcgtgctgacacagagccccgccatcatgtctgttagccctggcgagaaagtgaccatgacctgtagcgccagcagcagcgtgaactacatgcactggttccagcagaagcccggcacaagccctaagctgtgggtgtacagcaccagcaatctggcctctggcgtgccagccagattttctggctctggcagcggcaccagctacagcctgacaatcagcagcatggaagccgaggatgccgccacctactattgtcagcagcggagcatctacccaccttggacatttggcggaggcaccaagctggaaatcaaactcgagatccagaaccctgatcctgccgtgtaccagctgcgggatagcaagagcagcgacaagagcgtgtgtctgttcaccgacttcgacagccagaccaacgtgtcccagagcaaggactccgacgtgtacatcaccgataagtgcgtgctggacatgcggagcatggacttcaagagcaactccgccgtggcctggtccaacaagtccgatttcgcctgcgccaacgccttcaacaacagcattatccccgaggacacattcttcccaagccccgagagcagctgcggctttaccagcgagagctaccagcagggcgtgctgagcgccaccatcctgtacgagatcctgctgggcaaggccaccctgtacgccgtgctggtgtctgccctggtgctgatggctatggtcaagcggaaggacagccggggacgcgccaagagaagcggatctggcgtgaagcagaccctgaatttcgacctgctgaagctggctggcgacgtggaatccaacccaggccctactagtatggactggatttggcgcatccttttccttgtcggcgctgctaccggcgcgcattccttcgaagaagttcagctccagcagagcggccctgagcttgtgaaacctggcgcttccgtgaagatcagctgcaaggccagcggctacagcttcaccggctacaccatgaactgggtcaagcagtcccacggcaagaacctggaatggatcggcctgattaacccctacaacggcggcacctcctacaaccagaagttcaaggccaaggccacactgaccgtggacaagagcagcagcacagcctacatgcagctgaagtccctgaccagcgaggacagcgccgtgtactactgcgccagagattacggctacgtgctggactattggggccagggcacaagcgtgacagtgtctagtacgcgtgaggacctgaagaacgtgttcccacctgaggtggccgtgttcgagcctagcgaggccgagatcagccacacccagaaagccaccctcgtgtgcctggctaccggcttctaccccgaccatgtggaactgtcttggtgggtcaacggcaaagaggtgcacagcggcgtgtgtaccgacccccagccactgaaagaacagcccgccctgaacgacagccggtactgcctgagcagcagactgagagtgtccgccaccttctggcagaacccccggaaccacttcagatgccaggtgcagttctacggcctgagcgagaacgacgagtggacccaggacagagccaagcccgtgacccagatcgtgtctgccgaagcctggggcagagccgattgcgacgtgaagctggtggaaaagagcttcgagacagacaccaacctgaacttccagaacctgagcgtgatcggcttcagaatcctgctgctgaaagtggccggctttaacctgctgatgaccctgcggctgtggtccagc

SEQ ID NO: 35021 - DNA, 2274 bp, synthetic construct
  source 1..2274: mol_type = other DNA
atggccttaccagtgaccgccttgctcctgccgctggccttgctgctccacgccgccaggccggaagttcagctgcttgagtctggcggaggactggttcaacctggcggaagcctgagactgtcttgtgccgccagcggcttcatcttcagcagctacgccatgagctgggtccgacaggctcctggaaagggccaagaatgggtttccggcgttagcggcacaggcgtgaacacctactacgccgatagcgtgaagggcagattcaccatcagccgggacaacagcaagaacaccctgtacctccagatgaacagcctgagagccgaggacaccgccgtgtactattgtgcctctggcaaaggctgggacagcggctcttggtacgaggactatagaggccagggcaccctggtcacagtttcttcaggtaccggcggaggcggatctggcggcggaggtagcggtggcggaggatctgaattccagatcgtgctgacacagagccccgccatcatgtctgttagccctggcgagaaagtgaccatgacctgtagcgccagcagcagcgtgaactacatgcactggttccagcagaagcccggcacaagccctaagctgtgggtgtacagcaccagcaatctggcctctggcgtgccagccagattttctggctctggcagcggcaccagctacagcctgacaatcagcagcatggaagccgaggatgccgccacctactattgtcagcagcggagcatctacccaccttggacatttggcggaggcaccaagctggaaatcaaactcgaggacctgaagaacgtgttcccacctgaggtggccgtgttcgagcctagcgaggccgagatcagccacacccagaaagccaccctcgtgtgcctggctaccggcttctaccccgaccatgtggaactgtcttggtgggtcaacggcaaagaggtgcacagcggcgtgtgtaccgacccccagccactgaaagaacagcccgccctgaacgacagccggtactgcctgagcagcagactgagagtgtccgccaccttctggcagaacccccggaaccacttcagatgccaggtgcagttctacggcctgagcgagaacgacgagtggacccaggacagagccaagcccgtgacccagatcgtgtctgccgaagcctggggcagagccgattgcgacgtgaagctggtggaaaagagcttcgagacagacaccaacctgaacttccagaacctgagcgtgatcggcttcagaatcctgctgctgaaagtggccggctttaacctgctgatgaccctgcggctgtggtccagcagggccaagcgatctggatctggagcaacaaacttctcactactcaaacaagcaggtgacgtggaggagaatcccgggcctactagtatggactggatttggcgcatccttttccttgtcggcgctgctaccggcgcgcattccttcgaagaagttcagctccagcagagcggccctgagcttgtgaaacctggcgcttccgtgaagatcagctgcaaggccagcggctacagcttcaccggctacaccatgaactgggtcaagcagtcccacggcaagaacctggaatggatcggcctgattaacccctacaacggcggcacctcctacaaccagaagttcaaggccaaggccacactgaccgtggacaagagcagcagcacagcctacatgcagctgaagtccctgaccagcgaggacagcgccgtgtactactgcgccagagattacggctacgtgctggactattggggccagggcacaagcgtgacagtgtctagtacgcgtatccagaaccctgatcctgccgtgtaccagctgcgggatagcaagagcagcgacaagagcgtgtgtctgttcaccgacttcgacagccagaccaacgtgtcccagagcaaggactccgacgtgtacatcaccgataagtgcgtgctggacatgcggagcatggacttcaagagcaactccgccgtggcctggtccaacaagtccgatttcgcctgcgccaacgccttcaacaacagcattatccccgaggacacattcttcccaagccccgagagcagctgcggctttaccagcgagagctaccagcagggcgtgctgagcgccaccatcctgtacgagatcctgctgggcaaggccaccctgtacgccgtgctggtgtctgccctggtgctgatggctatggtcaagcggaaggacagccgggga

SEQ ID NO: 35022 - DNA, 2286 bp, synthetic construct
  source 1..2286: mol_type = other DNA
atggccttaccagtgaccgccttgctcctgccgctggccttgctgctccacgccgccaggccggaagttcagctgcttgagtctggcggaggactggttcaacctggcggaagcctgagactgtcttgtgccgccagcggcttcatcttcagcagctacgccatgagctgggtccgacaggctcctggaaagggccaagaatgggtttccggcgttagcggcacaggcgtgaacacctactacgccgatagcgtgaagggcagattcaccatcagccgggacaacagcaagaacaccctgtacctccagatgaacagcctgagagccgaggacaccgccgtgtactattgtgcctctggcaaaggctgggacagcggctcttggtacgaggactatagaggccagggcaccctggtcacagtttcttcaggtaccggcggaggcggatctggcggcggaggtagcggtggcggaggatctgaattccagatcgtgctgacacagagccccgccatcatgtctgttagccctggcgagaaagtgaccatgacctgtagcgccagcagcagcgtgaactacatgcactggttccagcagaagcccggcacaagccctaagctgtgggtgtacagcaccagcaatctggcctctggcgtgccagccagattttctggctctggcagcggcaccagctacagcctgacaatcagcagcatggaagccgaggatgccgccacctactattgtcagcagcggagcatctacccaccttggacatttggcggaggcaccaagctggaaatcaaactcgagatccagaaccctgatcctgccgtgtaccagctgcgggatagcaagagcagcgacaagagcgtgtgtctgttcaccgacttcgacagccagaccaacgtgtcccagagcaaggactccgacgtgtacatcaccgataagtgcgtgctggacatgcggagcatggacttcaagagcaactccgccgtggcctggtccaacaagtccgatttcgcctgcgccaacgccttcaacaacagcattatccccgaggacacattcttcccaagccccgagagcagctgcggctttaccagcgagagctaccagcagggcgtgctgagcgccaccatcctgtacgagatcctgctgggcaaggccaccctgtacgccgtgctggtgtctgccctggtgctgatggctatggtcaagcggaaggacagccggggacgcgccaagagaagcggatctggcgtgaagcagaccctgaatttcgacctgctgaagctggctggcgacgtggaatccaacccaggccctactagtatggactggatttggcgcatccttttccttgtcggcgctgctaccggcgcgcattccttcgaagaagttcagctccagcagagcggccctgagcttgtgaaacctggcgcttccgtgaagatcagctgcaaggccagcggctacagcttcaccggctacaccatgaactgggtcaagcagtcccacggcaagaacctggaatggatcggcctgattaacccctacaacggcggcacctcctacaaccagaagttcaaggccaaggccacactgaccgtggacaagagcagcagcacagcctacatgcagctgaagtccctgaccagcgaggacagcgccgtgtactactgcgccagagattacggctacgtgctggactattggggccagggcacaagcgtgacagtgtctagtacgcgtgaggacctgaagaacgtgttcccacctgaggtggccgtgttcgagcctagcgaggccgagatcagccacacccagaaagccaccctcgtgtgcctggctaccggcttctaccccgaccatgtggaactgtcttggtgggtcaacggcaaagaggtgcacagcggcgtgtgtaccgacccccagccactgaaagaacagcccgccctgaacgacagccggtactgcctgagcagcagactgagagtgtccgccaccttctggcagaacccccggaaccacttcagatgccaggtgcagttctacggcctgagcgagaacgacgagtggacccaggacagagccaagcccgtgacccagatcgtgtctgccgaagcctggggcagagccgattgcgacgtgaagctggtggaaaagagcttcgagacagacaccaacctgaacttccagaacctgagcgtgatcggcttcagaatcctgctgctgaaagtggccggctttaacctgctgatgaccctgcggctgtggtccagc

SEQ ID NO: 35023 - DNA, 2178 bp, synthetic construct
  source 1..2178: mol_type = other DNA
atggccttaccagtgaccgccttgctcctgccgctggccttgctgctccacgccgccaggccgatgctgcccgctcctaagaatctggtggtgtccagaatcaccgaggacagcgccagactgtcttggacagctcctgatgccgccttcgacagcttccccatccggtacatcgagacactgatctggggcgaagccatctggctggatgtgcctggaagcgagagaagctacgacctgaccggactgaagcctggcacagagtatgccgtggtcatcaccggcgtgaaaggcggcagattctctagccctctggtggcctctttcaccaccggtaccggcggaggcggatctggcggcggaggtagcggtggcggaggatctgaattccagatcgtgctgacacagagccccgccatcatgtctgttagccctggcgagaaagtgaccatgacctgtagcgccagcagcagcgtgaactacatgcactggttccagcagaagcccggcacaagccctaagctgtgggtgtacagcaccagcaatctggcctctggcgtgccagccagattttctggctctggcagcggcaccagctacagcctgacaatcagcagcatggaagccgaggatgccgccacctactattgtcagcagcggagcatctacccaccttggacatttggcggaggcaccaagctggaaatcaaactcgaggacctgaagaacgtgttcccacctgaggtggccgtgttcgagcctagcgaggccgagatcagccacacccagaaagccaccctcgtgtgcctggctaccggcttctaccccgaccatgtggaactgtcttggtgggtcaacggcaaagaggtgcacagcggcgtgtgtaccgacccccagccactgaaagaacagcccgccctgaacgacagccggtactgcctgagcagcagactgagagtgtccgccaccttctggcagaacccccggaaccacttcagatgccaggtgcagttctacggcctgagcgagaacgacgagtggacccaggacagagccaagcccgtgacccagatcgtgtctgccgaagcctggggcagagccgattgcgacgtgaagctggtggaaaagagcttcgagacagacaccaacctgaacttccagaacctgagcgtgatcggcttcagaatcctgctgctgaaagtggccggctttaacctgctgatgaccctgcggctgtggtccagcagggccaagcgatctggatctggagcaacaaacttctcactactcaaacaagcaggtgacgtggaggagaatcccgggcctactagtatggactggatttggcgcatccttttccttgtcggcgctgctaccggcgcgcattccttcgaagaagttcagctccagcagagcggccctgagcttgtgaaacctggcgcttccgtgaagatcagctgcaaggccagcggctacagcttcaccggctacaccatgaactgggtcaagcagtcccacggcaagaacctggaatggatcggcctgattaacccctacaacggcggcacctcctacaaccagaagttcaaggccaaggccacactgaccgtggacaagagcagcagcacagcctacatgcagctgaagtccctgaccagcgaggacagcgccgtgtactactgcgccagagattacggctacgtgctggactattggggccagggcacaagcgtgacagtgtctagtacgcgtatccagaaccctgatcctgccgtgtaccagctgcgggatagcaagagcagcgacaagagcgtgtgtctgttcaccgacttcgacagccagaccaacgtgtcccagagcaaggactccgacgtgtacatcaccgataagtgcgtgctggacatgcggagcatggacttcaagagcaactccgccgtggcctggtccaacaagtccgatttcgcctgcgccaacgccttcaacaacagcattatccccgaggacacattcttcccaagccccgagagcagctgcggctttaccagcgagagctaccagcagggcgtgctgagcgccaccatcctgtacgagatcctgctgggcaaggccaccctgtacgccgtgctggtgtctgccctggtgctgatggctatggtcaagcggaaggacagccgggga

SEQ ID NO: 35024 - DNA, 2190 bp, synthetic construct
  source 1..2190: mol_type = other DNA
atggccttaccagtgaccgccttgctcctgccgctggccttgctgctccacgccgccaggccgatgctgcccgctcctaagaatctggtggtgtccagaatcaccgaggacagcgccagactgtcttggacagctcctgatgccgccttcgacagcttccccatccggtacatcgagacactgatctggggcgaagccatctggctggatgtgcctggaagcgagagaagctacgacctgaccggactgaagcctggcacagagtatgccgtggtcatcaccggcgtgaaaggcggcagattctctagccctctggtggcctctttcaccaccggtaccggcggaggcggatctggcggcggaggtagcggtggcggaggatctgaattccagatcgtgctgacacagagccccgccatcatgtctgttagccctggcgagaaagtgaccatgacctgtagcgccagcagcagcgtgaactacatgcactggttccagcagaagcccggcacaagccctaagctgtgggtgtacagcaccagcaatctggcctctggcgtgccagccagattttctggctctggcagcggcaccagctacagcctgacaatcagcagcatggaagccgaggatgccgccacctactattgtcagcagcggagcatctacccaccttggacatttggcggaggcaccaagctggaaatcaaactcgagatccagaaccctgatcctgccgtgtaccagctgcgggatagcaagagcagcgacaagagcgtgtgtctgttcaccgacttcgacagccagaccaacgtgtcccagagcaaggactccgacgtgtacatcaccgataagtgcgtgctggacatgcggagcatggacttcaagagcaactccgccgtggcctggtccaacaagtccgatttcgcctgcgccaacgccttcaacaacagcattatccccgaggacacattcttcccaagccccgagagcagctgcggctttaccagcgagagctaccagcagggcgtgctgagcgccaccatcctgtacgagatcctgctgggcaaggccaccctgtacgccgtgctggtgtctgccctggtgctgatggctatggtcaagcggaaggacagccggggacgcgccaagagaagcggatctggcgtgaagcagaccctgaatttcgacctgctgaagctggctggcgacgtggaatccaacccaggccctactagtatggactggatttggcgcatccttttccttgtcggcgctgctaccggcgcgcattccttcgaagaagttcagctccagcagagcggccctgagcttgtgaaacctggcgcttccgtgaagatcagctgcaaggccagcggctacagcttcaccggctacaccatgaactgggtcaagcagtcccacggcaagaacctggaatggatcggcctgattaacccctacaacggcggcacctcctacaaccagaagttcaaggccaaggccacactgaccgtggacaagagcagcagcacagcctacatgcagctgaagtccctgaccagcgaggacagcgccgtgtactactgcgccagagattacggctacgtgctggactattggggccagggcacaagcgtgacagtgtctagtacgcgtgaggacctgaagaacgtgttcccacctgaggtggccgtgttcgagcctagcgaggccgagatcagccacacccagaaagccaccctcgtgtgcctggctaccggcttctaccccgaccatgtggaactgtcttggtgggtcaacggcaaagaggtgcacagcggcgtgtgtaccgacccccagccactgaaagaacagcccgccctgaacgacagccggtactgcctgagcagcagactgagagtgtccgccaccttctggcagaacccccggaaccacttcagatgccaggtgcagttctacggcctgagcgagaacgacgagtggacccaggacagagccaagcccgtgacccagatcgtgtctgccgaagcctggggcagagccgattgcgacgtgaagctggtggaaaagagcttcgagacagacaccaacctgaacttccagaacctgagcgtgatcggcttcagaatcctgctgctgaaagtggccggctttaacctgctgatgaccctgcggctgtggtccagc

SEQ ID NO: 35025 - DNA, 2265 bp, synthetic construct
  source 1..2265: mol_type = other DNA
atggccttaccagtgaccgccttgctcctgccgctggccttgctgctccacgccgccaggccggaggtgcagctggttgaatctggcggaggactggttcagcctggcggatctctgagactgtcttgtgccgccagcggcttcaacatcaaggatacctgtatcggctgggttcgcagagcccctggcaaagaggaagaactggtcgccaaaatctgcaagtacagcggccacaccagatacgccgacagcgtgaagggcagattcaccatcagcgccgacaccagcaagaacaccgcctacctccagatgaacagcctgagagccgaggacaccgccgtgtactattgtgccgctgtgtccgtcagagatgggcactacaattactggggccagggcaccaccgtgaccgtttcttcaggtaccggcggaggcggatctggcggcggaggtagcggtggcggaggatctgaattccagatcgtgctgacacagagccccgccatcatgtctgttagccctggcgagaaagtgaccatgacctgtagcgccagcagcagcgtgaactacatgcactggttccagcagaagcccggcacaagccctaagctgtgggtgtacagcaccagcaatctggcctctggcgtgccagccagattttctggctctggcagcggcaccagctacagcctgacaatcagcagcatggaagccgaggatgccgccacctactattgtcagcagcggagcatctacccaccttggacatttggcggaggcaccaagctggaaatcaaactcgaggacctgaagaacgtgttcccacctgaggtggccgtgttcgagcctagcgaggccgagatcagccacacccagaaagccaccctcgtgtgcctggctaccggcttctaccccgaccatgtggaactgtcttggtgggtcaacggcaaagaggtgcacagcggcgtgtgtaccgacccccagccactgaaagaacagcccgccctgaacgacagccggtactgcctgagcagcagactgagagtgtccgccaccttctggcagaacccccggaaccacttcagatgccaggtgcagttctacggcctgagcgagaacgacgagtggacccaggacagagccaagcccgtgacccagatcgtgtctgccgaagcctggggcagagccgattgcgacgtgaagctggtggaaaagagcttcgagacagacaccaacctgaacttccagaacctgagcgtgatcggcttcagaatcctgctgctgaaagtggccggctttaacctgctgatgaccctgcggctgtggtccagcagggccaagcgatctggatctggagcaacaaacttctcactactcaaacaagcaggtgacgtggaggagaatcccgggcctactagtatggactggatttggcgcatccttttccttgtcggcgctgctaccggcgcgcattccttcgaagaagttcagctccagcagagcggccctgagcttgtgaaacctggcgcttccgtgaagatcagctgcaaggccagcggctacagcttcaccggctacaccatgaactgggtcaagcagtcccacggcaagaacctggaatggatcggcctgattaacccctacaacggcggcacctcctacaaccagaagttcaaggccaaggccacactgaccgtggacaagagcagcagcacagcctacatgcagctgaagtccctgaccagcgaggacagcgccgtgtactactgcgccagagattacggctacgtgctggactattggggccagggcacaagcgtgacagtgtctagtacgcgtatccagaaccctgatcctgccgtgtaccagctgcgggatagcaagagcagcgacaagagcgtgtgtctgttcaccgacttcgacagccagaccaacgtgtcccagagcaaggactccgacgtgtacatcaccgataagtgcgtgctggacatgcggagcatggacttcaagagcaactccgccgtggcctggtccaacaagtccgatttcgcctgcgccaacgccttcaacaacagcattatccccgaggacacattcttcccaagccccgagagcagctgcggctttaccagcgagagctaccagcagggcgtgctgagcgccaccatcctgtacgagatcctgctgggcaaggccaccctgtacgccgtgctggtgtctgccctggtgctgatggctatggtcaagcggaaggacagccgggga

SEQ ID NO: 35026 - DNA, 2277 bp, synthetic construct
  source 1..2277: mol_type = other DNA
atggccttaccagtgaccgccttgctcctgccgctggccttgctgctccacgccgccaggccggaggtgcagctggttgaatctggcggaggactggttcagcctggcggatctctgagactgtcttgtgccgccagcggcttcaacatcaaggatacctgtatcggctgggttcgcagagcccctggcaaagaggaagaactggtcgccaaaatctgcaagtacagcggccacaccagatacgccgacagcgtgaagggcagattcaccatcagcgccgacaccagcaagaacaccgcctacctccagatgaacagcctgagagccgaggacaccgccgtgtactattgtgccgctgtgtccgtcagagatgggcactacaattactggggccagggcaccaccgtgaccgtttcttcaggtaccggcggaggcggatctggcggcggaggtagcggtggcggaggatctgaattccagatcgtgctgacacagagccccgccatcatgtctgttagccctggcgagaaagtgaccatgacctgtagcgccagcagcagcgtgaactacatgcactggttccagcagaagcccggcacaagccctaagctgtgggtgtacagcaccagcaatctggcctctggcgtgccagccagattttctggctctggcagcggcaccagctacagcctgacaatcagcagcatggaagccgaggatgccgccacctactattgtcagcagcggagcatctacccaccttggacatttggcggaggcaccaagctggaaatcaaactcgagatccagaaccctgatcctgccgtgtaccagctgcgggatagcaagagcagcgacaagagcgtgtgtctgttcaccgacttcgacagccagaccaacgtgtcccagagcaaggactccgacgtgtacatcaccgataagtgcgtgctggacatgcggagcatggacttcaagagcaactccgccgtggcctggtccaacaagtccgatttcgcctgcgccaacgccttcaacaacagcattatccccgaggacacattcttcccaagccccgagagcagctgcggctttaccagcgagagctaccagcagggcgtgctgagcgccaccatcctgtacgagatcctgctgggcaaggccaccctgtacgccgtgctggtgtctgccctggtgctgatggctatggtcaagcggaaggacagccggggacgcgccaagagaagcggatctggcgtgaagcagaccctgaatttcgacctgctgaagctggctggcgacgtggaatccaacccaggccctactagtatggactggatttggcgcatccttttccttgtcggcgctgctaccggcgcgcattccttcgaagaagttcagctccagcagagcggccctgagcttgtgaaacctggcgcttccgtgaagatcagctgcaaggccagcggctacagcttcaccggctacaccatgaactgggtcaagcagtcccacggcaagaacctggaatggatcggcctgattaacccctacaacggcggcacctcctacaaccagaagttcaaggccaaggccacactgaccgtggacaagagcagcagcacagcctacatgcagctgaagtccctgaccagcgaggacagcgccgtgtactactgcgccagagattacggctacgtgctggactattggggccagggcacaagcgtgacagtgtctagtacgcgtgaggacctgaagaacgtgttcccacctgaggtggccgtgttcgagcctagcgaggccgagatcagccacacccagaaagccaccctcgtgtgcctggctaccggcttctaccccgaccatgtggaactgtcttggtgggtcaacggcaaagaggtgcacagcggcgtgtgtaccgacccccagccactgaaagaacagcccgccctgaacgacagccggtactgcctgagcagcagactgagagtgtccgccaccttctggcagaacccccggaaccacttcagatgccaggtgcagttctacggcctgagcgagaacgacgagtggacccaggacagagccaagcccgtgacccagatcgtgtctgccgaagcctggggcagagccgattgcgacgtgaagctggtggaaaagagcttcgagacagacaccaacctgaacttccagaacctgagcgtgatcggcttcagaatcctgctgctgaaagtggccggctttaacctgctgatgaccctgcggctgtggtccagc

SEQ ID NO: 35027 - DNA, 3381 bp, synthetic construct
  source 1..3381: mol_type = other DNA
atggccttaccagtgaccgccttgctcctgccgctggccttgctgctccacgccgccaggccggaagtgcagctggttgaatctggcggaggactggttcaggctggcggatctctgagactgtcttgtgccgccagcggcagaacctttagcatgggctggtttagacaggcccctggcaaagagagagagttcgtcgccgccatcacatactctggcggcagcccttactacgccgactctgtgaagggcagattcaccatcagccgggacaacgccaagaacaccgtgtacctccagatgaacagcctgaagcctgaggacaccgccgtgtactactgcgccgccaatccaacatacggcagcgactggaacgccgagaattggggccagggaacccaagtgacagtgtctagcggtaccggcggaggcggatctggcggcggaggtagcggtggcggaggatctgaattccagatcgtgctgacacagagccccgccatcatgtctgttagccctggcgagaaagtgaccatgacctgtagcgccagcagcagcgtgaactacatgcactggttccagcagaagcccggcacaagccctaagctgtgggtgtacagcaccagcaatctggcctctggcgtgccagccagattttctggctctggcagcggcaccagctacagcctgacaatcagcagcatggaagccgaggatgccgccacctactattgtcagcagcggagcatctacccaccttggacatttggcggaggcaccaagctggaaatcaaactcgaggacctgaagaacgtgttcccacctgaggtggccgtgttcgagcctagcgaggccgagatcagccacacccagaaagccaccctcgtgtgcctggctaccggcttctaccccgaccatgtggaactgtcttggtgggtcaacggcaaagaggtgcacagcggcgtgtgtaccgacccccagccactgaaagaacagcccgccctgaacgacagccggtactgcctgagcagcagactgagagtgtccgccaccttctggcagaacccccggaaccacttcagatgccaggtgcagttctacggcctgagcgagaacgacgagtggacccaggacagagccaagcccgtgacccagatcgtgtctgccgaagcctggggcagagccgattgcgacgtgaagctggtggaaaagagcttcgagacagacaccaacctgaacttccagaacctgagcgtgatcggcttcagaatcctgctgctgaaagtggccggctttaacctgctgatgaccctgcggctgtggtccagcagggccaagcgatctggatctggagcaacaaacttctcactactcaaacaagcaggtgacgtggaggagaatcccgggcctactagtgccaccatggactggatttggcgcatccttttccttgtcggcgctgctaccggcgcccattccgggcccgaagtgcaactggttgaatccggtggcggcctggtgcaagcaggcggatctctcagacttagctgtgccgcctccggcagaaccttcacaatgggatggtttaggcaggctccagggaaagagagagagttcgtcgccgccatctctctgtctcccacactggcctactacgccgactctgtgaaaggccggttcaccatctccagagataatgccaagaacaccgtggtgctgcaaatgaactctctgaaacccgaggatacagccctgtactattgtgccgctgaccggaagtccgtgatgagcatcagacccgattactggggacagggcacacaagtcacagtgtcctctggatccggcggcggaggatctggcggaggcggatctgggggcggaggctctttcgaagaagttcagctccagcagagcggccctgagcttgtgaaacctggcgcttccgtgaagatcagctgcaaggccagcggctacagcttcaccggctacaccatgaactgggtcaagcagtcccacggcaagaacctggaatggatcggcctgattaacccctacaacggcggcacctcctacaaccagaagttcaaggccaaggccacactgaccgtggacaagagcagcagcacagcctacatgcagctgaagtccctgaccagcgaggacagcgccgtgtactactgcgccagagattacggctacgtgctggactattggggccagggcacaagcgtgacagtgtctagtacgcgtatccagaaccctgatcctgccgtgtaccagctgcgggatagcaagagcagcgacaagagcgtgtgtctgttcaccgacttcgacagccagaccaacgtgtcccagagcaaggactccgacgtgtacatcaccgataagtgcgtgctggacatgcggagcatggacttcaagagcaactccgccgtggcctggtccaacaagtccgatttcgcctgcgccaacgccttcaacaacagcattatccccgaggacacattcttcccaagccccgagagcagctgcggctttaccagcgagagctaccagcagggcgtgctgagcgccaccatcctgtacgagatcctgctgggcaaggccaccctgtacgccgtgctggtgtctgccctggtgctgatggctatggtcaagcggaaggacagccggggacgcgccaagagaagcggatctggcgtgaagcagaccctgaatttcgacctgctgaagctggctggcgacgtggaatccaacccaggcccttctagaggccatatgaccgagtacaagcccacggtgcgcctcgccacccgcgacgacgtccccagggccgtacgcaccctcgccgccgcgttcgccgactaccccgccacgcgccacaccgtcgatccggaccgccacatcgagcgggtcaccgagctgcaagaactcttcctcacgcgcgtcgggctcgacatcggcaaggtgtgggtcgcggacgacggcgccgcggtggcggtctggaccacgccggagagcgtcgaagcgggggcggtgttcgccgagatcggcccgcgcatggccgagttgagcggttcccggctggccgcgcagcaacagatggaaggcctcctggcgccgcaccggcccaaggagcccgcgtggttcctggccaccgtcggcgtctcgcccgaccaccagggcaagggtctgggcagcgccgtcgtgctccccggagtggaggcggccgagcgcgccggggtgcccgccttcctggagacctccgcgccccgcaacctccccttctacgagcggctcggcttcaccgtcaccgccgacgtcgaggtgcccgaaggaccgcgcacctggtgcatgacccgcaagcccggtgcctga

SEQ ID NO: 35028 - DNA, 2295 bp, synthetic construct
  source 1..2295: mol_type = other DNA
atggccttaccagtgaccgccttgctcctgccgctggccttgctgctccacgccgccaggccggaagtgcagctggttgaatctggcggaggactggttcagcctggcggatctctgagactgtcttgtgccgcctctggcttcgccagcgactactatatcatcggctggttcagacaggcccctggcaaagagagagagggcgtcagctgtatcagcagcagatacgccaacaccaactacgccgacagcgtgaagggcagattcaccatcagccgggacaacgccaagaacaccgtgtacctccagatgaacagcctgaagcctgaggacaccgccgtgtactactgtgccgccgacaccagaagatacacctgtcctgacattgccaccatgcaccggaacttcgattcttggggccagggcacactggtcaccgtttcttctggtaccggcggaggcggatctggcggcggaggtagcggtggcggaggatctgaattccagatcgtgctgacacagagccccgccatcatgtctgttagccctggcgagaaagtgaccatgacctgtagcgccagcagcagcgtgaactacatgcactggttccagcagaagcccggcacaagccctaagctgtgggtgtacagcaccagcaatctggcctctggcgtgccagccagattttctggctctggcagcggcaccagctacagcctgacaatcagcagcatggaagccgaggatgccgccacctactattgtcagcagcggagcatctacccaccttggacatttggcggaggcaccaagctggaaatcaaactcgaggacctgaagaacgtgttcccacctgaggtggccgtgttcgagcctagcgaggccgagatcagccacacccagaaagccaccctcgtgtgcctggctaccggcttctaccccgaccatgtggaactgtcttggtgggtcaacggcaaagaggtgcacagcggcgtgtgtaccgacccccagccactgaaagaacagcccgccctgaacgacagccggtactgcctgagcagcagactgagagtgtccgccaccttctggcagaacccccggaaccacttcagatgccaggtgcagttctacggcctgagcgagaacgacgagtggacccaggacagagccaagcccgtgacccagatcgtgtctgccgaagcctggggcagagccgattgcgacgtgaagctggtggaaaagagcttcgagacagacaccaacctgaacttccagaacctgagcgtgatcggcttcagaatcctgctgctgaaagtggccggctttaacctgctgatgaccctgcggctgtggtccagcagggccaagcgatctggatctggagcaacaaacttctcactactcaaacaagcaggtgacgtggaggagaatcccgggcctactagtatggactggatttggcgcatccttttccttgtcggcgctgctaccggcgcgcattccttcgaagaagttcagctccagcagagcggccctgagcttgtgaaacctggcgcttccgtgaagatcagctgcaaggccagcggctacagcttcaccggctacaccatgaactgggtcaagcagtcccacggcaagaacctggaatggatcggcctgattaacccctacaacggcggcacctcctacaaccagaagttcaaggccaaggccacactgaccgtggacaagagcagcagcacagcctacatgcagctgaagtccctgaccagcgaggacagcgccgtgtactactgcgccagagattacggctacgtgctggactattggggccagggcacaagcgtgacagtgtctagtacgcgtatccagaaccctgatcctgccgtgtaccagctgcgggatagcaagagcagcgacaagagcgtgtgtctgttcaccgacttcgacagccagaccaacgtgtcccagagcaaggactccgacgtgtacatcaccgataagtgcgtgctggacatgcggagcatggacttcaagagcaactccgccgtggcctggtccaacaagtccgatttcgcctgcgccaacgccttcaacaacagcattatccccgaggacacattcttcccaagccccgagagcagctgcggctttaccagcgagagctaccagcagggcgtgctgagcgccaccatcctgtacgagatcctgctgggcaaggccaccctgtacgccgtgctggtgtctgccctggtgctgatggctatggtcaagcggaaggacagccggggataa

SEQ ID NO: 35029 - DNA, 2295 bp, synthetic construct
  source 1..2295: mol_type = other DNA
atggccttaccagtgaccgccttgctcctgccgctggccttgctgctccacgccgccaggccggaagtgcagctggttgaatctggcggaggactggttcagcctggcggatctctgagactgagctgtgaagccagcggcttcgccagcgacgattacatcatcggctggttcagacaggcccctggcaaagagagagagggcgtcagctgcatcagctctaagtacgccaacaccgtgtacaccgacagcgtgaagggcagattcagactgagcagaggcaccgccaagaataccgtgtacctccagatgagcgccctgaagcctgaggataccgccgtgtactactgcgctatggacagccgcagagtgacatgccctgagatcagcaccatgcaccggaacttcgattcttggggccagggcacactggtcacagtgtcatctggtaccggcggaggcggatctggcggcggaggtagcggtggcggaggatctgaattccagatcgtgctgacacagagccccgccatcatgtctgttagccctggcgagaaagtgaccatgacctgtagcgccagcagcagcgtgaactacatgcactggttccagcagaagcccggcacaagccctaagctgtgggtgtacagcaccagcaatctggcctctggcgtgccagccagattttctggctctggcagcggcaccagctacagcctgacaatcagcagcatggaagccgaggatgccgccacctactattgtcagcagcggagcatctacccaccttggacatttggcggaggcaccaagctggaaatcaaactcgaggacctgaagaacgtgttcccacctgaggtggccgtgttcgagcctagcgaggccgagatcagccacacccagaaagccaccctcgtgtgcctggctaccggcttctaccccgaccatgtggaactgtcttggtgggtcaacggcaaagaggtgcacagcggcgtgtgtaccgacccccagccactgaaagaacagcccgccctgaacgacagccggtactgcctgagcagcagactgagagtgtccgccaccttctggcagaacccccggaaccacttcagatgccaggtgcagttctacggcctgagcgagaacgacgagtggacccaggacagagccaagcccgtgacccagatcgtgtctgccgaagcctggggcagagccgattgcgacgtgaagctggtggaaaagagcttcgagacagacaccaacctgaacttccagaacctgagcgtgatcggcttcagaatcctgctgctgaaagtggccggctttaacctgctgatgaccctgcggctgtggtccagcagggccaagcgatctggatctggagcaacaaacttctcactactcaaacaagcaggtgacgtggaggagaatcccgggcctactagtatggactggatttggcgcatccttttccttgtcggcgctgctaccggcgcgcattccttcgaagaagttcagctccagcagagcggccctgagcttgtgaaacctggcgcttccgtgaagatcagctgcaaggccagcggctacagcttcaccggctacaccatgaactgggtcaagcagtcccacggcaagaacctggaatggatcggcctgattaacccctacaacggcggcacctcctacaaccagaagttcaaggccaaggccacactgaccgtggacaagagcagcagcacagcctacatgcagctgaagtccctgaccagcgaggacagcgccgtgtactactgcgccagagattacggctacgtgctggactattggggccagggcacaagcgtgacagtgtctagtacgcgtatccagaaccctgatcctgccgtgtaccagctgcgggatagcaagagcagcgacaagagcgtgtgtctgttcaccgacttcgacagccagaccaacgtgtcccagagcaaggactccgacgtgtacatcaccgataagtgcgtgctggacatgcggagcatggacttcaagagcaactccgccgtggcctggtccaacaagtccgatttcgcctgcgccaacgccttcaacaacagcattatccccgaggacacattcttcccaagccccgagagcagctgcggctttaccagcgagagctaccagcagggcgtgctgagcgccaccatcctgtacgagatcctgctgggcaaggccaccctgtacgccgtgctggtgtctgccctggtgctgatggctatggtcaagcggaaggacagccggggataa

SEQ ID NO: 35030 - DNA, 2292 bp, synthetic construct
  source 1..2292: mol_type = other DNA
atggccttaccagtgaccgccttgctcctgccgctggccttgctgctccacgccgccaggccggaagtgcagctggttgaatctggcggaggactggttcagcctggcggatctctgagactgtcttgtgccgcctctggcttcgccagcgactactatatcatcggctggttcagacaggcccctggcaaagagagagagggcgtcagctgtatcagcagcagatacgccaacaccaactacgccgacagcgtgaagggcagattcaccatcagccgggacaacgccaagaacaccgtgtacctccagatgaacagcctgaagcctgaggacaccgccgtgtactactgtgccgccgacaccagaagatacacctgtcctgacattgccaccatgcaccggaacttcgattcttggggccagggcacactggtcaccgtttcttctggtaccggcggaggcggatctggcggcggaggtagcggtggcggaggatctgaattccagatcgtgctgacacagagccccgccatcatgtctgttagccctggcgagaaagtgaccatgacctgtagcgccagcagcagcgtgaactacatgcactggttccagcagaagcccggcacaagccctaagctgtgggtgtacagcaccagcaatctggcctctggcgtgccagccagattttctggctctggcagcggcaccagctacagcctgacaatcagcagcatggaagccgaggatgccgccacctactattgtcagcagcggagcatctacccaccttggacatttggcggaggcaccaagctggaaatcaaactcgagatccagaaccctgatcctgccgtgtaccagctgcgggatagcaagagcagcgacaagagcgtgtgtctgttcaccgacttcgacagccagaccaacgtgtcccagagcaaggactccgacgtgtacatcaccgataagtgcgtgctggacatgcggagcatggacttcaagagcaactccgccgtggcctggtccaacaagtccgatttcgcctgcgccaacgccttcaacaacagcattatccccgaggacacattcttcccaagccccgagagcagctgcggctttaccagcgagagctaccagcagggcgtgctgagcgccaccatcctgtacgagatcctgctgggcaaggccaccctgtacgccgtgctggtgtctgccctggtgctgatggctatggtcaagcggaaggacagccggggaagggccaagcgatctggatctggagcaacaaacttctcactactcaaacaagcaggtgacgtggaggagaatcccgggcctactagtatggactggatttggcgcatccttttccttgtcggcgctgctaccggcgcgcattccttcgaagaagttcagctccagcagagcggccctgagcttgtgaaacctggcgcttccgtgaagatcagctgcaaggccagcggctacagcttcaccggctacaccatgaactgggtcaagcagtcccacggcaagaacctggaatggatcggcctgattaacccctacaacggcggcacctcctacaaccagaagttcaaggccaaggccacactgaccgtggacaagagcagcagcacagcctacatgcagctgaagtccctgaccagcgaggacagcgccgtgtactactgcgccagagattacggctacgtgctggactattggggccagggcacaagcgtgacagtgtctagtacgcgtgacctgaagaacgtgttcccacctgaggtggccgtgttcgagcctagcgaggccgagatcagccacacccagaaagccaccctcgtgtgcctggctaccggcttctaccccgaccatgtggaactgtcttggtgggtcaacggcaaagaggtgcacagcggcgtgtgtaccgacccccagccactgaaagaacagcccgccctgaacgacagccggtactgcctgagcagcagactgagagtgtccgccaccttctggcagaacccccggaaccacttcagatgccaggtgcagttctacggcctgagcgagaacgacgagtggacccaggacagagccaagcccgtgacccagatcgtgtctgccgaagcctggggcagagccgattgcgacgtgaagctggtggaaaagagcttcgagacagacaccaacctgaacttccagaacctgagcgtgatcggcttcagaatcctgctgctgaaagtggccggctttaacctgctgatgaccctgcggctgtggtccagc

SEQ ID NO: 35031 - DNA, 2292 bp, synthetic construct
  source 1..2292: mol_type = other DNA
atggccttaccagtgaccgccttgctcctgccgctggccttgctgctccacgccgccaggccggaagtgcagctggttgaatctggcggaggactggttcagcctggcggatctctgagactgagctgtgaagccagcggcttcgccagcgacgattacatcatcggctggttcagacaggcccctggcaaagagagagagggcgtcagctgcatcagctctaagtacgccaacaccgtgtacaccgacagcgtgaagggcagattcagactgagcagaggcaccgccaagaataccgtgtacctccagatgagcgccctgaagcctgaggataccgccgtgtactactgcgctatggacagccgcagagtgacatgccctgagatcagcaccatgcaccggaacttcgattcttggggccagggcacactggtcacagtgtcatctggtaccggcggaggcggatctggcggcggaggtagcggtggcggaggatctgaattccagatcgtgctgacacagagccccgccatcatgtctgttagccctggcgagaaagtgaccatgacctgtagcgccagcagcagcgtgaactacatgcactggttccagcagaagcccggcacaagccctaagctgtgggtgtacagcaccagcaatctggcctctggcgtgccagccagattttctggctctggcagcggcaccagctacagcctgacaatcagcagcatggaagccgaggatgccgccacctactattgtcagcagcggagcatctacccaccttggacatttggcggaggcaccaagctggaaatcaaactcgagatccagaaccctgatcctgccgtgtaccagctgcgggatagcaagagcagcgacaagagcgtgtgtctgttcaccgacttcgacagccagaccaacgtgtcccagagcaaggactccgacgtgtacatcaccgataagtgcgtgctggacatgcggagcatggacttcaagagcaactccgccgtggcctggtccaacaagtccgatttcgcctgcgccaacgccttcaacaacagcattatccccgaggacacattcttcccaagccccgagagcagctgcggctttaccagcgagagctaccagcagggcgtgctgagcgccaccatcctgtacgagatcctgctgggcaaggccaccctgtacgccgtgctggtgtctgccctggtgctgatggctatggtcaagcggaaggacagccggggaagggccaagcgatctggatctggagcaacaaacttctcactactcaaacaagcaggtgacgtggaggagaatcccgggcctactagtatggactggatttggcgcatccttttccttgtcggcgctgctaccggcgcgcattccttcgaagaagttcagctccagcagagcggccctgagcttgtgaaacctggcgcttccgtgaagatcagctgcaaggccagcggctacagcttcaccggctacaccatgaactgggtcaagcagtcccacggcaagaacctggaatggatcggcctgattaacccctacaacggcggcacctcctacaaccagaagttcaaggccaaggccacactgaccgtggacaagagcagcagcacagcctacatgcagctgaagtccctgaccagcgaggacagcgccgtgtactactgcgccagagattacggctacgtgctggactattggggccagggcacaagcgtgacagtgtctagtacgcgtgacctgaagaacgtgttcccacctgaggtggccgtgttcgagcctagcgaggccgagatcagccacacccagaaagccaccctcgtgtgcctggctaccggcttctaccccgaccatgtggaactgtcttggtgggtcaacggcaaagaggtgcacagcggcgtgtgtaccgacccccagccactgaaagaacagcccgccctgaacgacagccggtactgcctgagcagcagactgagagtgtccgccaccttctggcagaacccccggaaccacttcagatgccaggtgcagttctacggcctgagcgagaacgacgagtggacccaggacagagccaagcccgtgacccagatcgtgtctgccgaagcctggggcagagccgattgcgacgtgaagctggtggaaaagagcttcgagacagacaccaacctgaacttccagaacctgagcgtgatcggcttcagaatcctgctgctgaaagtggccggctttaacctgctgatgaccctgcggctgtggtccagc

SEQ ID NO: 35032 - DNA, 2265 bp, synthetic construct
  source 1..2265: mol_type = other DNA
atggccttaccagtgaccgccttgctcctgccgctggccttgctgctccacgccgccaggccgcaagtcaaactggaagaaagcggtggcggcctggtgcaacctggcgaatctctgagactgagctgtagcgccagcggctccatcttcaaggtgttcagagtgttcgccatgagctggtacaggcaaggccctggcaagcagagagagctggtcgcctctatcagcagcggcgagacaaccacatacgccgaatctgtgaaaggccggttcaccatcagccgggataatgccaagaataccgcctatctccagatggactccctgaagcctgaagatacagctgtgtactactgcaacgccgaccataccttcaccggcgatttttggggccagggaacccaagtgaccgtgtctagtggtaccggcggaggcggatctggcggcggaggtagcggtggcggaggatctgaattccagatcgtgctgacacagagccccgccatcatgtctgttagccctggcgagaaagtgaccatgacctgtagcgccagcagcagcgtgaactacatgcactggttccagcagaagcccggcacaagccctaagctgtgggtgtacagcaccagcaatctggcctctggcgtgccagccagattttctggctctggcagcggcaccagctacagcctgacaatcagcagcatggaagccgaggatgccgccacctactattgtcagcagcggagcatctacccaccttggacatttggcggaggcaccaagctggaaatcaaactcgagatccagaaccctgatcctgccgtgtaccagctgcgggatagcaagagcagcgacaagagcgtgtgtctgttcaccgacttcgacagccagaccaacgtgtcccagagcaaggactccgacgtgtacatcaccgataagtgcgtgctggacatgcggagcatggacttcaagagcaactccgccgtggcctggtccaacaagtccgatttcgcctgcgccaacgccttcaacaacagcattatccccgaggacacattcttcccaagccccgagagcagctgcggctttaccagcgagagctaccagcagggcgtgctgagcgccaccatcctgtacgagatcctgctgggcaaggccaccctgtacgccgtgctggtgtctgccctggtgctgatggctatggtcaagcggaaggacagccggggaagggccaagcgatctggatctggagcaacaaacttctcactactcaaacaagcaggtgacgtggaggagaatcccgggcctactagtatggactggatttggcgcatccttttccttgtcggcgctgctaccggcgcgcattccttcgaagaagttcagctccagcagagcggccctgagcttgtgaaacctggcgcttccgtgaagatcagctgcaaggccagcggctacagcttcaccggctacaccatgaactgggtcaagcagtcccacggcaagaacctggaatggatcggcctgattaacccctacaacggcggcacctcctacaaccagaagttcaaggccaaggccacactgaccgtggacaagagcagcagcacagcctacatgcagctgaagtccctgaccagcgaggacagcgccgtgtactactgcgccagagattacggctacgtgctggactattggggccagggcacaagcgtgacagtgtctagtacgcgtgacctgaagaacgtgttcccacctgaggtggccgtgttcgagcctagcgaggccgagatcagccacacccagaaagccaccctcgtgtgcctggctaccggcttctaccccgaccatgtggaactgtcttggtgggtcaacggcaaagaggtgcacagcggcgtgtgtaccgacccccagccactgaaagaacagcccgccctgaacgacagccggtactgcctgagcagcagactgagagtgtccgccaccttctggcagaacccccggaaccacttcagatgccaggtgcagttctacggcctgagcgagaacgacgagtggacccaggacagagccaagcccgtgacccagatcgtgtctgccgaagcctggggcagagccgattgcgacgtgaagctggtggaaaagagcttcgagacagacaccaacctgaacttccagaacctgagcgtgatcggcttcagaatcctgctgctgaaagtggccggctttaacctgctgatgaccctgcggctgtggtccagc

SEQ ID NO: 35033 - DNA, 2271 bp, synthetic construct
  source 1..2271: mol_type = other DNA
atggccttaccagtgaccgccttgctcctgccgctggccttgctgctccacgccgccaggccgcagatcgtgctgacacagagccccgccatcatgtctgttagccctggcgagaaagtgaccatgacctgtagcgccagcagcagcgtgaactacatgcactggttccagcagaagcccggcacaagccctaagctgtgggtgtacagcaccagcaatctggcctctggcgtgccagccagattttctggctctggcagcggcaccagctacagcctgacaatcagcagcatggaagccgaggatgccgccacctactattgtcagcagcggagcatctacccaccttggacatttggcggaggcaccaagctggaaatcaaactcgaggacctgaagaacgtgttcccacctgaggtggccgtgttcgagcctagcgaggccgagatcagccacacccagaaagccaccctcgtgtgcctggctaccggcttctaccccgaccatgtggaactgtcttggtgggtcaacggcaaagaggtgcacagcggcgtgtgtaccgacccccagccactgaaagaacagcccgccctgaacgacagccggtactgcctgagcagcagactgagagtgtccgccaccttctggcagaacccccggaaccacttcagatgccaggtgcagttctacggcctgagcgagaacgacgagtggacccaggacagagccaagcccgtgacccagatcgtgtctgccgaagcctggggcagagccgattgcgacgtgaagctggtggaaaagagcttcgagacagacaccaacctgaacttccagaacctgagcgtgatcggcttcagaatcctgctgctgaaagtggccggctttaacctgctgatgaccctgcggctgtggtccagcagggccaagcgatctggatctggagcaacaaacttctcactactcaaacaagcaggtgacgtggaggagaatcccgggcctactagtgccaccatggactggatttggcgcatccttttccttgtcggcgctgctaccggcgcccattccgggcccgaagtgcagctggttgaatctggcggaggactggttcaggctggcggatctctgagactgtcttgtgccgccagcggcagaacctttagcatgggctggtttagacaggcccctggcaaagagagagagttcgtcgccgccatcacatactctggcggcagcccttactacgccgactctgtgaagggcagattcaccatcagccgggacaacgccaagaacaccgtgtacctccagatgaacagcctgaagcctgaggacaccgccgtgtactactgcgccgccaatccaacatacggcagcgactggaacgccgagaattggggccagggaacccaagtgacagtgtctagcggatccggcggcggaggatctggcggaggcggatctgggggcggaggctctttcgaagaagttcagctccagcagagcggccctgagcttgtgaaacctggcgcttccgtgaagatcagctgcaaggccagcggctacagcttcaccggctacaccatgaactgggtcaagcagtcccacggcaagaacctggaatggatcggcctgattaacccctacaacggcggcacctcctacaaccagaagttcaaggccaaggccacactgaccgtggacaagagcagcagcacagcctacatgcagctgaagtccctgaccagcgaggacagcgccgtgtactactgcgccagagattacggctacgtgctggactattggggccagggcacaagcgtgacagtgtctagtacgcgtatccagaaccctgatcctgccgtgtaccagctgcgggatagcaagagcagcgacaagagcgtgtgtctgttcaccgacttcgacagccagaccaacgtgtcccagagcaaggactccgacgtgtacatcaccgataagtgcgtgctggacatgcggagcatggacttcaagagcaactccgccgtggcctggtccaacaagtccgatttcgcctgcgccaacgccttcaacaacagcattatccccgaggacacattcttcccaagccccgagagcagctgcggctttaccagcgagagctaccagcagggcgtgctgagcgccaccatcctgtacgagatcctgctgggcaaggccaccctgtacgccgtgctggtgtctgccctggtgctgatggctatggtcaagcggaaggacagccggggataa

SEQ ID NO: 35034 - DNA, 2274 bp, synthetic construct
  source 1..2274: mol_type = other DNA
atggccttaccagtgaccgccttgctcctgccgctggccttgctgctccacgccgccaggccgcagatcgtgctgacacagagccccgccatcatgtctgttagccctggcgagaaagtgaccatgacctgtagcgccagcagcagcgtgaactacatgcactggttccagcagaagcccggcacaagccctaagctgtgggtgtacagcaccagcaatctggcctctggcgtgccagccagattttctggctctggcagcggcaccagctacagcctgacaatcagcagcatggaagccgaggatgccgccacctactattgtcagcagcggagcatctacccaccttggacatttggcggaggcaccaagctggaaatcaaactcgaggacctgaagaacgtgttcccacctgaggtggccgtgttcgagcctagcgaggccgagatcagccacacccagaaagccaccctcgtgtgcctggctaccggcttctaccccgaccatgtggaactgtcttggtgggtcaacggcaaagaggtgcacagcggcgtgtgtaccgacccccagccactgaaagaacagcccgccctgaacgacagccggtactgcctgagcagcagactgagagtgtccgccaccttctggcagaacccccggaaccacttcagatgccaggtgcagttctacggcctgagcgagaacgacgagtggacccaggacagagccaagcccgtgacccagatcgtgtctgccgaagcctggggcagagccgattgcgacgtgaagctggtggaaaagagcttcgagacagacaccaacctgaacttccagaacctgagcgtgatcggcttcagaatcctgctgctgaaagtggccggctttaacctgctgatgaccctgcggctgtggtccagcagggccaagcgatctggatctggagcaacaaacttctcactactcaaacaagcaggtgacgtggaggagaatcccgggcctactagtgccaccatggactggatttggcgcatccttttccttgtcggcgctgctaccggcgcccattccgggcccgaagtgcaactggtggaatctgggggcggactggtgcagccaggcggaagtctgaggctgtcttgtgccgcctccggcagcatcttcggcttcaacgacatggcctggtatcggcaggctcccggaaaacagcgcgagctggtggctctgattagcagagtgggcgtgaccagcagcgccgactctgtgaagggcagattcacaatctccagagtgaacgccaaggatacagtgtacctccagatgaactctctgaaacctgaggatacagcagtgtactattgctacatggaccagcggctggacggcagcacactggcctactggggacagggaactcaagtgacagtgtctagcggatccggcggcggaggatctggcggaggcggatctgggggcggaggctctttcgaagaagttcagctccagcagagcggccctgagcttgtgaaacctggcgcttccgtgaagatcagctgcaaggccagcggctacagcttcaccggctacaccatgaactgggtcaagcagtcccacggcaagaacctggaatggatcggcctgattaacccctacaacggcggcacctcctacaaccagaagttcaaggccaaggccacactgaccgtggacaagagcagcagcacagcctacatgcagctgaagtccctgaccagcgaggacagcgccgtgtactactgcgccagagattacggctacgtgctggactattggggccagggcacaagcgtgacagtgtctagtacgcgtatccagaaccctgatcctgccgtgtaccagctgcgggatagcaagagcagcgacaagagcgtgtgtctgttcaccgacttcgacagccagaccaacgtgtcccagagcaaggactccgacgtgtacatcaccgataagtgcgtgctggacatgcggagcatggacttcaagagcaactccgccgtggcctggtccaacaagtccgatttcgcctgcgccaacgccttcaacaacagcattatccccgaggacacattcttcccaagccccgagagcagctgcggctttaccagcgagagctaccagcagggcgtgctgagcgccaccatcctgtacgagatcctgctgggcaaggccaccctgtacgccgtgctggtgtctgccctggtgctgatggctatggtcaagcggaaggacagccggggataa

SEQ ID NO: 35035 - DNA, 2262 bp, synthetic construct
  source 1..2262: mol_type = other DNA
atggccttaccagtgaccgccttgctcctgccgctggccttgctgctccacgccgccaggccgcagatcgtgctgacacagagccccgccatcatgtctgttagccctggcgagaaagtgaccatgacctgtagcgccagcagcagcgtgaactacatgcactggttccagcagaagcccggcacaagccctaagctgtgggtgtacagcaccagcaatctggcctctggcgtgccagccagattttctggctctggcagcggcaccagctacagcctgacaatcagcagcatggaagccgaggatgccgccacctactattgtcagcagcggagcatctacccaccttggacatttggcggaggcaccaagctggaaatcaaactcgaggacctgaagaacgtgttcccacctgaggtggccgtgttcgagcctagcgaggccgagatcagccacacccagaaagccaccctcgtgtgcctggctaccggcttctaccccgaccatgtggaactgtcttggtgggtcaacggcaaagaggtgcacagcggcgtgtgtaccgacccccagccactgaaagaacagcccgccctgaacgacagccggtactgcctgagcagcagactgagagtgtccgccaccttctggcagaacccccggaaccacttcagatgccaggtgcagttctacggcctgagcgagaacgacgagtggacccaggacagagccaagcccgtgacccagatcgtgtctgccgaagcctggggcagagccgattgcgacgtgaagctggtggaaaagagcttcgagacagacaccaacctgaacttccagaacctgagcgtgatcggcttcagaatcctgctgctgaaagtggccggctttaacctgctgatgaccctgcggctgtggtccagcagggccaagcgatctggatctggagcaacaaacttctcactactcaaacaagcaggtgacgtggaggagaatcccgggcctactagtgccaccatggactggatttggcgcatccttttccttgtcggcgctgctaccggcgcccattccgggcccgaggtgcagctggttgaatctggcggaggactggttcaggctggcggatctctgagactgtcttgtgccgccagcggctctgtgttcagcggcaatgtgatgggctggtacagacaggcccctggcaaagaaagagagtgggttgccgccattgccagcggcggcagcatctactacagagactctgtgaagggcagattcaccatcagccgggacaacgccaagaacaccgtgtacctccagatgaacagcctgaagcctgaggacaccgccgtgtactactgcaactctcaccctcctacactgccctattggggcctgggaacccaagtgacagtgtcctctggatccggcggcggaggatctggcggaggcggatctgggggcggaggctctttcgaagaagttcagctccagcagagcggccctgagcttgtgaaacctggcgcttccgtgaagatcagctgcaaggccagcggctacagcttcaccggctacaccatgaactgggtcaagcagtcccacggcaagaacctggaatggatcggcctgattaacccctacaacggcggcacctcctacaaccagaagttcaaggccaaggccacactgaccgtggacaagagcagcagcacagcctacatgcagctgaagtccctgaccagcgaggacagcgccgtgtactactgcgccagagattacggctacgtgctggactattggggccagggcacaagcgtgacagtgtctagtacgcgtatccagaaccctgatcctgccgtgtaccagctgcgggatagcaagagcagcgacaagagcgtgtgtctgttcaccgacttcgacagccagaccaacgtgtcccagagcaaggactccgacgtgtacatcaccgataagtgcgtgctggacatgcggagcatggacttcaagagcaactccgccgtggcctggtccaacaagtccgatttcgcctgcgccaacgccttcaacaacagcattatccccgaggacacattcttcccaagccccgagagcagctgcggctttaccagcgagagctaccagcagggcgtgctgagcgccaccatcctgtacgagatcctgctgggcaaggccaccctgtacgccgtgctggtgtctgccctggtgctgatggctatggtcaagcggaaggacagccggggataa

SEQ ID NO: 35036 - DNA, 2256 bp, synthetic construct
  source 1..2256: mol_type = other DNA
atggccttaccagtgaccgccttgctcctgccgctggccttgctgctccacgccgccaggccgcagatcgtgctgacacagagccccgccatcatgtctgttagccctggcgagaaagtgaccatgacctgtagcgccagcagcagcgtgaactacatgcactggttccagcagaagcccggcacaagccctaagctgtgggtgtacagcaccagcaatctggcctctggcgtgccagccagattttctggctctggcagcggcaccagctacagcctgacaatcagcagcatggaagccgaggatgccgccacctactattgtcagcagcggagcatctacccaccttggacatttggcggaggcaccaagctggaaatcaaactcgaggacctgaagaacgtgttcccacctgaggtggccgtgttcgagcctagcgaggccgagatcagccacacccagaaagccaccctcgtgtgcctggctaccggcttctaccccgaccatgtggaactgtcttggtgggtcaacggcaaagaggtgcacagcggcgtgtgtaccgacccccagccactgaaagaacagcccgccctgaacgacagccggtactgcctgagcagcagactgagagtgtccgccaccttctggcagaacccccggaaccacttcagatgccaggtgcagttctacggcctgagcgagaacgacgagtggacccaggacagagccaagcccgtgacccagatcgtgtctgccgaagcctggggcagagccgattgcgacgtgaagctggtggaaaagagcttcgagacagacaccaacctgaacttccagaacctgagcgtgatcggcttcagaatcctgctgctgaaagtggccggctttaacctgctgatgaccctgcggctgtggtccagcagggccaagcgatctggatctggagcaacaaacttctcactactcaaacaagcaggtgacgtggaggagaatcccgggcctactagtgccaccatggactggatttggcgcatccttttccttgtcggcgctgctaccggcgcccattccgggcccgaagttcagctgctggaatctggcggaggactcgttcaacctggcggctctctgagactgagctgtgccgcttctggcttcagcttctctagctacgccctgagctgggttcgacaagctcccggaaagggccttgaatgggtgtccagcatcggcgagaatgacggcaccacagactatgccgatgccgtgaaaggccggtttaccatcagcagagacaattccaagaacacgctctatctgcaaatgaactccctgcgcgtggaagatacagccgtgtattattgcgtgaaggacggcatccactggggacagggaaccctggttacagtgtctagcggatccggcggcggaggatctggcggaggcggatctgggggcggaggctctttcgaagaagttcagctccagcagagcggccctgagcttgtgaaacctggcgcttccgtgaagatcagctgcaaggccagcggctacagcttcaccggctacaccatgaactgggtcaagcagtcccacggcaagaacctggaatggatcggcctgattaacccctacaacggcggcacctcctacaaccagaagttcaaggccaaggccacactgaccgtggacaagagcagcagcacagcctacatgcagctgaagtccctgaccagcgaggacagcgccgtgtactactgcgccagagattacggctacgtgctggactattggggccagggcacaagcgtgacagtgtctagtacgcgtatccagaaccctgatcctgccgtgtaccagctgcgggatagcaagagcagcgacaagagcgtgtgtctgttcaccgacttcgacagccagaccaacgtgtcccagagcaaggactccgacgtgtacatcaccgataagtgcgtgctggacatgcggagcatggacttcaagagcaactccgccgtggcctggtccaacaagtccgatttcgcctgcgccaacgccttcaacaacagcattatccccgaggacacattcttcccaagccccgagagcagctgcggctttaccagcgagagctaccagcagggcgtgctgagcgccaccatcctgtacgagatcctgctgggcaaggccaccctgtacgccgtgctggtgtctgccctggtgctgatggctatggtcaagcggaaggacagccggggataa

SEQ ID NO: 35037 - DNA, 3363 bp, synthetic construct
  source 1..3363: mol_type = other DNA
atgggacccagactgctgttttgggctctgctgtgtctgctcggcacaggacctgttgaagctggcgtgacacagagccccacacacctgattaagaccagaggccagcaggccacactgagatgcagccctatcagcggccacaccagcgtgtactggtatcagcaggctctcggactgggcctccagttcctgctttggtacgacgagggcgaagagagaaaccggggcaacttccctcctcggttttccggcagacagttccccaactacagcagcgagctgaacgtgaacgccctggaactggaagatagcgccctgtacctgtgtgcctcttctcttggtggacctcgcggactggctggactgagaggggatgagcagtttttcggccctggcaccagactgaccgtgctggaaggtaccggcggaggcggatctggcggcggagaattccagatcgtgctgacacagagccccgccatcatgtctgttagccctggcgagaaagtgaccatgacctgtagcgccagcagcagcgtgaactacatgcactggttccagcagaagcccggcacaagccctaagctgtgggtgtacagcaccagcaatctggcctctggcgtgccagccagattttctggctctggcagcggcaccagctacagcctgacaatcagcagcatggaagccgaggatgccgccacctactattgtcagcagcggagcatctacccaccttggacatttggcggaggcaccaagctggaaatcaaactcgaggacctgaagaacgtgttcccacctgaggtggccgtgttcgagcctagcgaggccgagatcagccacacccagaaagccaccctcgtgtgcctggctaccggcttctaccccgaccatgtggaactgtcttggtgggtcaacggcaaagaggtgcacagcggcgtgtgtaccgacccccagccactgaaagaacagcccgccctgaacgacagccggtactgcctgagcagcagactgagagtgtccgccaccttctggcagaacccccggaaccacttcagatgccaggtgcagttctacggcctgagcgagaacgacgagtggacccaggacagagccaagcccgtgacccagatcgtgtctgccgaagcctggggcagagccgattgcgacgtgaagctggtggaaaagagcttcgagacagacaccaacctgaacttccagaacctgagcgtgatcggcttcagaatcctgctgctgaaagtggccggctttaacctgctgatgaccctgcggctgtggtccagcagggccaagcgatctggatctggagcaacaaacttctcactactcaaacaagcaggtgacgtggaggagaatcccgggcctactagtgccaccatggactggatttggcgcatccttttccttgtcggcgctgctaccggcgcccattccgggcccgaagtgcagctggttgaatctggcggaggactggttcaggctggcggatctctgagactgtcttgtgccgccagcggcagaacctttagcatgggctggtttagacaggcccctggcaaagagagagagttcgtcgccgccatcacatactctggcggcagcccttactacgccgactctgtgaagggcagattcaccatcagccgggacaacgccaagaacaccgtgtacctccagatgaacagcctgaagcctgaggacaccgccgtgtactactgcgccgccaatccaacatacggcagcgactggaacgccgagaattggggccagggaacccaagtgacagtgtctagcggatccggcggcggaggatctggcggaggcggatctgggggcggaggctctttcgaagaagttcagctccagcagagcggccctgagcttgtgaaacctggcgcttccgtgaagatcagctgcaaggccagcggctacagcttcaccggctacaccatgaactgggtcaagcagtcccacggcaagaacctggaatggatcggcctgattaacccctacaacggcggcacctcctacaaccagaagttcaaggccaaggccacactgaccgtggacaagagcagcagcacagcctacatgcagctgaagtccctgaccagcgaggacagcgccgtgtactactgcgccagagattacggctacgtgctggactattggggccagggcacaagcgtgacagtgtctagtacgcgtatccagaaccctgatcctgccgtgtaccagctgcgggatagcaagagcagcgacaagagcgtgtgtctgttcaccgacttcgacagccagaccaacgtgtcccagagcaaggactccgacgtgtacatcaccgataagtgcgtgctggacatgcggagcatggacttcaagagcaactccgccgtggcctggtccaacaagtccgatttcgcctgcgccaacgccttcaacaacagcattatccccgaggacacattcttcccaagccccgagagcagctgcggctttaccagcgagagctaccagcagggcgtgctgagcgccaccatcctgtacgagatcctgctgggcaaggccaccctgtacgccgtgctggtgtctgccctggtgctgatggctatggtcaagcggaaggacagccggggacgcgccaagagaagcggatctggcgtgaagcagaccctgaatttcgacctgctgaagctggctggcgacgtggaatccaacccaggcccttctagaggccatatgaccgagtacaagcccacggtgcgcctcgccacccgcgacgacgtccccagggccgtacgcaccctcgccgccgcgttcgccgactaccccgccacgcgccacaccgtcgatccggaccgccacatcgagcgggtcaccgagctgcaagaactcttcctcacgcgcgtcgggctcgacatcggcaaggtgtgggtcgcggacgacggcgccgcggtggcggtctggaccacgccggagagcgtcgaagcgggggcggtgttcgccgagatcggcccgcgcatggccgagttgagcggttcccggctggccgcgcagcaacagatggaaggcctcctggcgccgcaccggcccaaggagcccgcgtggttcctggccaccgtcggcgtctcgcccgaccaccagggcaagggtctgggcagcgccgtcgtgctccccggagtggaggcggccgagcgcgccggggtgcccgccttcctggagacctccgcgccccgcaacctccccttctacgagcggctcggcttcaccgtcaccgccgacgtcgaggtgcccgaaggaccgcgcacctggtgcatgacccgcaagcccggtgcctga

SEQ ID NO: 35038 - DNA, 3360 bp, synthetic construct
  source 1..3360: mol_type = other DNA
atgggacccagactgctgttttgggctctgctgtgtctgctcggcacaggacctgttgaagctggcgtgacacagagccccacacacctgattaagaccagaggccagcaggccacactgagatgcagccctatcagcggccacaccagcgtgtactggtatcagcaggctctcggactgggcctccagttcctgctttggtacgacgagggcgaagagagaaaccggggcaacttccctcctcggttttccggcagacagttccccaactacagcagcgagctgaacgtgaacgccctggaactggaagatagcgccctgtacctgtgtgccagctctctcggcggagatgaactgggagccgatggcaacgagcagttctttggccctggcaccagactgaccgtgctggaaggtaccggcggaggcggatctggcggcggaagcgaattccagatcgtgctgacacagagccccgccatcatgtctgttagccctggcgagaaagtgaccatgacctgtagcgccagcagcagcgtgaactacatgcactggttccagcagaagcccggcacaagccctaagctgtgggtgtacagcaccagcaatctggcctctggcgtgccagccagattttctggctctggcagcggcaccagctacagcctgacaatcagcagcatggaagccgaggatgccgccacctactattgtcagcagcggagcatctacccaccttggacatttggcggaggcaccaagctggaaatcaaactcgaggacctgaagaacgtgttcccacctgaggtggccgtgttcgagcctagcgaggccgagatcagccacacccagaaagccaccctcgtgtgcctggctaccggcttctaccccgaccatgtggaactgtcttggtgggtcaacggcaaagaggtgcacagcggcgtgtgtaccgacccccagccactgaaagaacagcccgccctgaacgacagccggtactgcctgagcagcagactgagagtgtccgccaccttctggcagaacccccggaaccacttcagatgccaggtgcagttctacggcctgagcgagaacgacgagtggacccaggacagagccaagcccgtgacccagatcgtgtctgccgaagcctggggcagagccgattgcgacgtgaagctggtggaaaagagcttcgagacagacaccaacctgaacttccagaacctgagcgtgatcggcttcagaatcctgctgctgaaagtggccggctttaacctgctgatgaccctgcggctgtggtccagcagggccaagcgatctggatctggagcaacaaacttctcactactcaaacaagcaggtgacgtggaggagaatcccgggcctactagtgccaccatggactggatttggcgcatccttttccttgtcggcgctgctaccggcgcccattccgggcccgaagtgcagctggttgaatctggcggaggactggttcaggctggcggatctctgagactgtcttgtgccgccagcggcagaacctttagcatgggctggtttagacaggcccctggcaaagagagagagttcgtcgccgccatcacatactctggcggcagcccttactacgccgactctgtgaagggcagattcaccatcagccgggacaacgccaagaacaccgtgtacctccagatgaacagcctgaagcctgaggacaccgccgtgtactactgcgccgccaatccaacatacggcagcgactggaacgccgagaattggggccagggaacccaagtgacagtgtctagcggatccggcggcggaggatctggcggaggcggatctgggggcggaggctctttcgaagaagttcagctccagcagagcggccctgagcttgtgaaacctggcgcttccgtgaagatcagctgcaaggccagcggctacagcttcaccggctacaccatgaactgggtcaagcagtcccacggcaagaacctggaatggatcggcctgattaacccctacaacggcggcacctcctacaaccagaagttcaaggccaaggccacactgaccgtggacaagagcagcagcacagcctacatgcagctgaagtccctgaccagcgaggacagcgccgtgtactactgcgccagagattacggctacgtgctggactattggggccagggcacaagcgtgacagtgtctagtacgcgtatccagaaccctgatcctgccgtgtaccagctgcgggatagcaagagcagcgacaagagcgtgtgtctgttcaccgacttcgacagccagaccaacgtgtcccagagcaaggactccgacgtgtacatcaccgataagtgcgtgctggacatgcggagcatggacttcaagagcaactccgccgtggcctggtccaacaagtccgatttcgcctgcgccaacgccttcaacaacagcattatccccgaggacacattcttcccaagccccgagagcagctgcggctttaccagcgagagctaccagcagggcgtgctgagcgccaccatcctgtacgagatcctgctgggcaaggccaccctgtacgccgtgctggtgtctgccctggtgctgatggctatggtcaagcggaaggacagccggggacgcgccaagagaagcggatctggcgtgaagcagaccctgaatttcgacctgctgaagctggctggcgacgtggaatccaacccaggcccttctagaggccatatgaccgagtacaagcccacggtgcgcctcgccacccgcgacgacgtccccagggccgtacgcaccctcgccgccgcgttcgccgactaccccgccacgcgccacaccgtcgatccggaccgccacatcgagcgggtcaccgagctgcaagaactcttcctcacgcgcgtcgggctcgacatcggcaaggtgtgggtcgcggacgacggcgccgcggtggcggtctggaccacgccggagagcgtcgaagcgggggcggtgttcgccgagatcggcccgcgcatggccgagttgagcggttcccggctggccgcgcagcaacagatggaaggcctcctggcgccgcaccggcccaaggagcccgcgtggttcctggccaccgtcggcgtctcgcccgaccaccagggcaagggtctgggcagcgccgtcgtgctccccggagtggaggcggccgagcgcgccggggtgcccgccttcctggagacctccgcgccccgcaacctccccttctacgagcggctcggcttcaccgtcaccgccgacgtcgaggtgcccgaaggaccgcgcacctggtgcatgacccgcaagcccggtgcctga

SEQ ID NO: 35039 - DNA, 2835 bp, synthetic construct
  source 1..2835: mol_type = other DNA
atggccttaccagtgaccgccttgctcctgccgctggccttgctgctccacgccgccaggccgcagatcgtgctgacacagagccccgccatcatgtctgttagccctggcgagaaagtgaccatgacctgtagcgccagcagcagcgtgaactacatgcactggttccagcagaagcccggcacaagccctaagctgtgggtgtacagcaccagcaatctggcctctggcgtgccagccagattttctggctctggcagcggcaccagctacagcctgacaatcagcagcatggaagccgaggatgccgccacctactattgtcagcagcggagcatctacccaccttggacatttggcggaggcaccaagctggaaatcaaactcgaggacctgaagaacgtgttcccacctgaggtggccgtgttcgagcctagcgaggccgagatcagccacacccagaaagccaccctcgtgtgcctggctaccggcttctaccccgaccatgtggaactgtcttggtgggtcaacggcaaagaggtgcacagcggcgtgtgtaccgacccccagccactgaaagaacagcccgccctgaacgacagccggtactgcctgagcagcagactgagagtgtccgccaccttctggcagaacccccggaaccacttcagatgccaggtgcagttctacggcctgagcgagaacgacgagtggacccaggacagagccaagcccgtgacccagatcgtgtctgccgaagcctggggcagagccgattgcgacgtgaagctggtggaaaagagcttcgagacagacaccaacctgaacttccagaacctgagcgtgatcggcttcagaatcctgctgctgaaagtggccggctttaacctgctgatgaccctgcggctgtggtccagcagggccaagcgatctggatctggagcaacaaacttctcactactcaaacaagcaggtgacgtggaggagaatcccgggcctactagtgccaccatggactggatttggcgcatccttttccttgtcggcgctgctaccggcgcccattccgggcccatgggaagctggcttgagttctaccacagactcaacgccattgacagcaggctgtgggcacttggcggaagcgaagctgaactcgccgcttttgaaaaagaaattgccgctttcgagtccgagcttcaggcttacaaaggcaaagggaatcctgaggtcgagagcctgagagatcacgctgcccacattagagagtggttgcaggcataccggcacaatggatccggcggcggaggatctggcggaggcggatctgggggcggaggctctttcgaagaagttcagctccagcagagcggccctgagcttgtgaaacctggcgcttccgtgaagatcagctgcaaggccagcggctacagcttcaccggctacaccatgaactgggtcaagcagtcccacggcaagaacctggaatggatcggcctgattaacccctacaacggcggcacctcctacaaccagaagttcaaggccaaggccacactgaccgtggacaagagcagcagcacagcctacatgcagctgaagtccctgaccagcgaggacagcgccgtgtactactgcgccagagattacggctacgtgctggactattggggccagggcacaagcgtgacagtgtctagtacgcgtatccagaaccctgatcctgccgtgtaccagctgcgggatagcaagagcagcgacaagagcgtgtgtctgttcaccgacttcgacagccagaccaacgtgtcccagagcaaggactccgacgtgtacatcaccgataagtgcgtgctggacatgcggagcatggacttcaagagcaactccgccgtggcctggtccaacaagtccgatttcgcctgcgccaacgccttcaacaacagcattatccccgaggacacattcttcccaagccccgagagcagctgcggctttaccagcgagagctaccagcagggcgtgctgagcgccaccatcctgtacgagatcctgctgggcaaggccaccctgtacgccgtgctggtgtctgccctggtgctgatggctatggtcaagcggaaggacagccggggacgcgccaagagaagcggatctggcgtgaagcagaccctgaatttcgacctgctgaagctggctggcgacgtggaatccaacccaggcccttctagaggccatatgaccgagtacaagcccacggtgcgcctcgccacccgcgacgacgtccccagggccgtacgcaccctcgccgccgcgttcgccgactaccccgccacgcgccacaccgtcgatccggaccgccacatcgagcgggtcaccgagctgcaagaactcttcctcacgcgcgtcgggctcgacatcggcaaggtgtgggtcgcggacgacggcgccgcggtggcggtctggaccacgccggagagcgtcgaagcgggggcggtgttcgccgagatcggcccgcgcatggccgagttgagcggttcccggctggccgcgcagcaacagatggaaggcctcctggcgccgcaccggcccaaggagcccgcgtggttcctggccaccgtcggcgtctcgcccgaccaccagggcaagggtctgggcagcgccgtcgtgctccccggagtggaggcggccgagcgcgccggggtgcccgccttcctggagacctccgcgccccgcaacctccccttctacgagcggctcggcttcaccgtcaccgccgacgtcgaggtgcccgaaggaccgcgcacctggtgcatgacccgcaagcccggtgcctga

SEQ ID NO: 35040 - DNA, 2835 bp, synthetic construct
  source 1..2835: mol_type = other DNA
atggccttaccagtgaccgccttgctcctgccgctggccttgctgctccacgccgccaggccggcatgcatgggcagttggttcgagttctacgaccggctgaatgccatcgacgccagactgtgggctctcggaggatctgaagctgagctggccgccttcgagaaagagatcgccgcctttgagagcgagctgcaagcctacaaaggcaagggcaaccccgaggtggaaaacctgagagtgcacgccgctgccatcagagaatggctccaggcttacagacacaacggtaccggcggaggcggatctggcggcggaggtagcggtggcggaggatctgaattccagatcgtgctgacacagagccccgccatcatgtctgttagccctggcgagaaagtgaccatgacctgtagcgccagcagcagcgtgaactacatgcactggttccagcagaagcccggcacaagccctaagctgtgggtgtacagcaccagcaatctggcctctggcgtgccagccagattttctggctctggcagcggcaccagctacagcctgacaatcagcagcatggaagccgaggatgccgccacctactattgtcagcagcggagcatctacccaccttggacatttggcggaggcaccaagctggaaatcaaactcgaggacctgaagaacgtgttcccacctgaggtggccgtgttcgagcctagcgaggccgagatcagccacacccagaaagccaccctcgtgtgcctggctaccggcttctaccccgaccatgtggaactgtcttggtgggtcaacggcaaagaggtgcacagcggcgtgtgtaccgacccccagccactgaaagaacagcccgccctgaacgacagccggtactgcctgagcagcagactgagagtgtccgccaccttctggcagaacccccggaaccacttcagatgccaggtgcagttctacggcctgagcgagaacgacgagtggacccaggacagagccaagcccgtgacccagatcgtgtctgccgaagcctggggcagagccgattgcgacgtgaagctggtggaaaagagcttcgagacagacaccaacctgaacttccagaacctgagcgtgatcggcttcagaatcctgctgctgaaagtggccggctttaacctgctgatgaccctgcggctgtggtccagcagggccaagcgatctggatctggagcaacaaacttctcactactcaaacaagcaggtgacgtggaggagaatcccgggcctactagtatggactggatttggcgcatccttttccttgtcggcgctgctaccggcgcgcattccttcgaagaagttcagctccagcagagcggccctgagcttgtgaaacctggcgcttccgtgaagatcagctgcaaggccagcggctacagcttcaccggctacaccatgaactgggtcaagcagtcccacggcaagaacctggaatggatcggcctgattaacccctacaacggcggcacctcctacaaccagaagttcaaggccaaggccacactgaccgtggacaagagcagcagcacagcctacatgcagctgaagtccctgaccagcgaggacagcgccgtgtactactgcgccagagattacggctacgtgctggactattggggccagggcacaagcgtgacagtgtctagtacgcgtatccagaaccctgatcctgccgtgtaccagctgcgggatagcaagagcagcgacaagagcgtgtgtctgttcaccgacttcgacagccagaccaacgtgtcccagagcaaggactccgacgtgtacatcaccgataagtgcgtgctggacatgcggagcatggacttcaagagcaactccgccgtggcctggtccaacaagtccgatttcgcctgcgccaacgccttcaacaacagcattatccccgaggacacattcttcccaagccccgagagcagctgcggctttaccagcgagagctaccagcagggcgtgctgagcgccaccatcctgtacgagatcctgctgggcaaggccaccctgtacgccgtgctggtgtctgccctggtgctgatggctatggtcaagcggaaggacagccggggacgcgccaagagaagcggatctggcgtgaagcagaccctgaatttcgacctgctgaagctggctggcgacgtggaatccaacccaggcccttctagaggccatatgaccgagtacaagcccacggtgcgcctcgccacccgcgacgacgtccccagggccgtacgcaccctcgccgccgcgttcgccgactaccccgccacgcgccacaccgtcgatccggaccgccacatcgagcgggtcaccgagctgcaagaactcttcctcacgcgcgtcgggctcgacatcggcaaggtgtgggtcgcggacgacggcgccgcggtggcggtctggaccacgccggagagcgtcgaagcgggggcggtgttcgccgagatcggcccgcgcatggccgagttgagcggttcccggctggccgcgcagcaacagatggaaggcctcctggcgccgcaccggcccaaggagcccgcgtggttcctggccaccgtcggcgtctcgcccgaccaccagggcaagggtctgggcagcgccgtcgtgctccccggagtggaggcggccgagcgcgccggggtgcccgccttcctggagacctccgcgccccgcaacctccccttctacgagcggctcggcttcaccgtcaccgccgacgtcgaggtgcccgaaggaccgcgcacctggtgcatgacccgcaagcccggtgcctga

SEQ ID NO: 35041 - DNA, 3186 bp, synthetic construct
  source 1..3186: mol_type = other DNA
atggccttaccagtgaccgccttgctcctgccgctggccttgctgctccacgccgccaggccggcatgcatggaccccgacctggaaatcagagccgccttcctgcggcagagaaacacagccctgagaacagaggtggccgagctggaacaagaggtgcagcggctggaaaacgaggtgtcccagtacgagacaagatacggccctctcggaggcggaaaaggtaccggcggaggcggatctggcggcggaggtagcggtggcggaggatctgaattccagatcgtgctgacacagagccccgccatcatgtctgttagccctggcgagaaagtgaccatgacctgtagcgccagcagcagcgtgaactacatgcactggttccagcagaagcccggcacaagccctaagctgtgggtgtacagcaccagcaatctggcctctggcgtgccagccagattttctggctctggcagcggcaccagctacagcctgacaatcagcagcatggaagccgaggatgccgccacctactattgtcagcagcggagcatctacccaccttggacatttggcggaggcaccaagctggaaatcaaactcgaggacctgaagaacgtgttcccacctgaggtggccgtgttcgagcctagcgaggccgagatcagccacacccagaaagccaccctcgtgtgcctggctaccggcttctaccccgaccatgtggaactgtcttggtgggtcaacggcaaagaggtgcacagcggcgtgtgtaccgacccccagccactgaaagaacagcccgccctgaacgacagccggtactgcctgagcagcagactgagagtgtccgccaccttctggcagaacccccggaaccacttcagatgccaggtgcagttctacggcctgagcgagaacgacgagtggacccaggacagagccaagcccgtgacccagatcgtgtctgccgaagcctggggcagagccgattgcgacgtgaagctggtggaaaagagcttcgagacagacaccaacctgaacttccagaacctgagcgtgatcggcttcagaatcctgctgctgaaagtggccggctttaacctgctgatgaccctgcggctgtggtccagcagggccaagcgatctggatctggagcaacaaacttctcactactcaaacaagcaggtgacgtggaggagaatcccgggcctactagtgccaccatggactggatttggcgcatccttttccttgtcggcgctgctaccggcgcccattccgggcccgaagtgcagctggttgaatctggcggaggactggttcaggctggcggatctctgagactgtcttgtgccgccagcggcagaacctttagcatgggctggtttagacaggcccctggcaaagagagagagttcgtcgccgccatcacatactctggcggcagcccttactacgccgactctgtgaagggcagattcaccatcagccgggacaacgccaagaacaccgtgtacctccagatgaacagcctgaagcctgaggacaccgccgtgtactactgcgccgccaatccaacatacggcagcgactggaacgccgagaattggggccagggaacccaagtgacagtgtctagcggatccggcggcggaggatctggcggaggcggatctgggggcggaggctctttcgaagaagttcagctccagcagagcggccctgagcttgtgaaacctggcgcttccgtgaagatcagctgcaaggccagcggctacagcttcaccggctacaccatgaactgggtcaagcagtcccacggcaagaacctggaatggatcggcctgattaacccctacaacggcggcacctcctacaaccagaagttcaaggccaaggccacactgaccgtggacaagagcagcagcacagcctacatgcagctgaagtccctgaccagcgaggacagcgccgtgtactactgcgccagagattacggctacgtgctggactattggggccagggcacaagcgtgacagtgtctagtacgcgtatccagaaccctgatcctgccgtgtaccagctgcgggatagcaagagcagcgacaagagcgtgtgtctgttcaccgacttcgacagccagaccaacgtgtcccagagcaaggactccgacgtgtacatcaccgataagtgcgtgctggacatgcggagcatggacttcaagagcaactccgccgtggcctggtccaacaagtccgatttcgcctgcgccaacgccttcaacaacagcattatccccgaggacacattcttcccaagccccgagagcagctgcggctttaccagcgagagctaccagcagggcgtgctgagcgccaccatcctgtacgagatcctgctgggcaaggccaccctgtacgccgtgctggtgtctgccctggtgctgatggctatggtcaagcggaaggacagccggggacgcgccaagagaagcggatctggcgtgaagcagaccctgaatttcgacctgctgaagctggctggcgacgtggaatccaacccaggcccttctagaggccatatgaccgagtacaagcccacggtgcgcctcgccacccgcgacgacgtccccagggccgtacgcaccctcgccgccgcgttcgccgactaccccgccacgcgccacaccgtcgatccggaccgccacatcgagcgggtcaccgagctgcaagaactcttcctcacgcgcgtcgggctcgacatcggcaaggtgtgggtcgcggacgacggcgccgcggtggcggtctggaccacgccggagagcgtcgaagcgggggcggtgttcgccgagatcggcccgcgcatggccgagttgagcggttcccggctggccgcgcagcaacagatggaaggcctcctggcgccgcaccggcccaaggagcccgcgtggttcctggccaccgtcggcgtctcgcccgaccaccagggcaagggtctgggcagcgccgtcgtgctccccggagtggaggcggccgagcgcgccggggtgcccgccttcctggagacctccgcgccccgcaacctccccttctacgagcggctcggcttcaccgtcaccgccgacgtcgaggtgcccgaaggaccgcgcacctggtgcatgacccgcaagcccggtgcctga

SEQ ID NO: 35042 - DNA, 2835 bp, synthetic construct
  source 1..2835: mol_type = other DNA
atggccttaccagtgaccgccttgctcctgccgctggccttgctgctccacgccgccaggccgcagatcgtgctgacacagagccccgccatcatgtctgttagccctggcgagaaagtgaccatgacctgtagcgccagcagcagcgtgaactacatgcactggttccagcagaagcccggcacaagccctaagctgtgggtgtacagcaccagcaatctggcctctggcgtgccagccagattttctggctctggcagcggcaccagctacagcctgacaatcagcagcatggaagccgaggatgccgccacctactattgtcagcagcggagcatctacccaccttggacatttggcggaggcaccaagctggaaatcaaactcgaggacctgaagaacgtgttcccacctgaggtggccgtgttcgagcctagcgaggccgagatcagccacacccagaaagccaccctcgtgtgcctggctaccggcttctaccccgaccatgtggaactgtcttggtgggtcaacggcaaagaggtgcacagcggcgtgtgtaccgacccccagccactgaaagaacagcccgccctgaacgacagccggtactgcctgagcagcagactgagagtgtccgccaccttctggcagaacccccggaaccacttcagatgccaggtgcagttctacggcctgagcgagaacgacgagtggacccaggacagagccaagcccgtgacccagatcgtgtctgccgaagcctggggcagagccgattgcgacgtgaagctggtggaaaagagcttcgagacagacaccaacctgaacttccagaacctgagcgtgatcggcttcagaatcctgctgctgaaagtggccggctttaacctgctgatgaccctgcggctgtggtccagcagggccaagcgatctggatctggagcaacaaacttctcactactcaaacaagcaggtgacgtggaggagaatcccgggcctactagtgccaccatggactggatttggcgcatccttttccttgtcggcgctgctaccggcgcccattccgggcccatgggatcttggagcgagttttacgatcggctgcacgccattcaccaccggctgtatgctctcggaggaagcgaagctgagctggccgcttttgaaaaagaaattgccgctttcgagtccgagcttcaggcttacaaaggcaaagggaatcctgaggtcgaggccctgagagataccgccgccttcatcagaacccggttgcaggcataccggcacaacggatccggcggcggaggatctggcggaggcggatctgggggcggaggctctttcgaagaagttcagctccagcagagcggccctgagcttgtgaaacctggcgcttccgtgaagatcagctgcaaggccagcggctacagcttcaccggctacaccatgaactgggtcaagcagtcccacggcaagaacctggaatggatcggcctgattaacccctacaacggcggcacctcctacaaccagaagttcaaggccaaggccacactgaccgtggacaagagcagcagcacagcctacatgcagctgaagtccctgaccagcgaggacagcgccgtgtactactgcgccagagattacggctacgtgctggactattggggccagggcacaagcgtgacagtgtctagtacgcgtatccagaaccctgatcctgccgtgtaccagctgcgggatagcaagagcagcgacaagagcgtgtgtctgttcaccgacttcgacagccagaccaacgtgtcccagagcaaggactccgacgtgtacatcaccgataagtgcgtgctggacatgcggagcatggacttcaagagcaactccgccgtggcctggtccaacaagtccgatttcgcctgcgccaacgccttcaacaacagcattatccccgaggacacattcttcccaagccccgagagcagctgcggctttaccagcgagagctaccagcagggcgtgctgagcgccaccatcctgtacgagatcctgctgggcaaggccaccctgtacgccgtgctggtgtctgccctggtgctgatggctatggtcaagcggaaggacagccggggacgcgccaagagaagcggatctggcgtgaagcagaccctgaatttcgacctgctgaagctggctggcgacgtggaatccaacccaggcccttctagaggccatatgaccgagtacaagcccacggtgcgcctcgccacccgcgacgacgtccccagggccgtacgcaccctcgccgccgcgttcgccgactaccccgccacgcgccacaccgtcgatccggaccgccacatcgagcgggtcaccgagctgcaagaactcttcctcacgcgcgtcgggctcgacatcggcaaggtgtgggtcgcggacgacggcgccgcggtggcggtctggaccacgccggagagcgtcgaagcgggggcggtgttcgccgagatcggcccgcgcatggccgagttgagcggttcccggctggccgcgcagcaacagatggaaggcctcctggcgccgcaccggcccaaggagcccgcgtggttcctggccaccgtcggcgtctcgcccgaccaccagggcaagggtctgggcagcgccgtcgtgctccccggagtggaggcggccgagcgcgccggggtgcccgccttcctggagacctccgcgccccgcaacctccccttctacgagcggctcggcttcaccgtcaccgccgacgtcgaggtgcccgaaggaccgcgcacctggtgcatgacccgcaagcccggtgcctga

SEQ ID NO: 35043 - DNA, 3465 bp, synthetic construct
  source 1..3465: mol_type = other DNA
atggccttaccagtgaccgccttgctcctgccgctggccttgctgctccacgccgccaggccgcagatcgtgctgacacagagccccgccatcatgtctgttagccctggcgagaaagtgaccatgacctgtagcgccagcagcagcgtgaactacatgcactggttccagcagaagcccggcacaagccctaagctgtgggtgtacagcaccagcaatctggcctctggcgtgccagccagattttctggctctggcagcggcaccagctacagcctgacaatcagcagcatggaagccgaggatgccgccacctactattgtcagcagcggagcatctacccaccttggacatttggcggaggcaccaagctggaaatcaaactcgaggacctgaagaacgtgttcccacctgaggtggccgtgttcgagcctagcgaggccgagatcagccacacccagaaagccaccctcgtgtgcctggctaccggcttctaccccgaccatgtggaactgtcttggtgggtcaacggcaaagaggtgcacagcggcgtgtgtaccgacccccagccactgaaagaacagcccgccctgaacgacagccggtactgcctgagcagcagactgagagtgtccgccaccttctggcagaacccccggaaccacttcagatgccaggtgcagttctacggcctgagcgagaacgacgagtggacccaggacagagccaagcccgtgacccagatcgtgtctgccgaagcctggggcagagccgattgcgacgtgaagctggtggaaaagagcttcgagacagacaccaacctgaacttccagaacctgagcgtgatcggcttcagaatcctgctgctgaaagtggccggctttaacctgctgatgaccctgcggctgtggtccagcagggccaagcgatctggatctggagcaacaaacttctcactactcaaacaagcaggtgacgtggaggagaatcccgggcctactagtaccatggactggatttggcgcatccttttccttgtcggcgctgctaccggcgcccattccctgttcaatcaagaggtgcagatccctctgaccgagagctactgtggcccctgtcctaagaactggatctgctacaagaacaactgctaccagttcttcgacgagagcaagaattggtacgagagccaggccagctgcatgagccagaatgccagcctgctgaaggtgtacagcaaagaggaccaggacctgctgaaactggtcaagagcgcccactggatgggccttgtgcacatccccaccaatggctcttggcagtgggaggacggcagcattctgagccctaacctgctgaccatcatcgagatgcagaagggcgactgcgccctgtacgccagcagctttaagggctacatcgagaattgcagcaccccgaacacctacatctgtatgcagagaaccgtttctggcggaggcggctctggaggaggcggaagtggcggcggaggcgacctctttaatcaagaagtccagattccactcaccgaatcctactgcggaccttgtccaaaaaattggatttgttataagaacaactgttatcaattctttgatgagtctaaaaattggtatgagtcccaggcttcctgcatgtctcagaacgcttctctgctgaaagtctactctaaagaagatcaggatctcctgaagctcgtcaagtctgcccattggatggggctcgtccacattcctaccaacggaagctggcaatgggaagatggctccatcctgtctccaaatctgctcacgattattgaaatgcagaaaggggattgtgctctctacgccagctccttcaagggatatattgagaactgtagcacgcccaatacttatatctgtatgcaacggaccgtgggatccggcggcggaggatctggcggaggcggatctgggggcggaggctctttcgaagaagttcagctccagcagagcggccctgagcttgtgaaacctggcgcttccgtgaagatcagctgcaaggccagcggctacagcttcaccggctacaccatgaactgggtcaagcagtcccacggcaagaacctggaatggatcggcctgattaacccctacaacggcggcacctcctacaaccagaagttcaaggccaaggccacactgaccgtggacaagagcagcagcacagcctacatgcagctgaagtccctgaccagcgaggacagcgccgtgtactactgcgccagagattacggctacgtgctggactattggggccagggcacaagcgtgacagtgtctagtacgcgtatccagaaccctgatcctgccgtgtaccagctgcgggatagcaagagcagcgacaagagcgtgtgtctgttcaccgacttcgacagccagaccaacgtgtcccagagcaaggactccgacgtgtacatcaccgataagtgcgtgctggacatgcggagcatggacttcaagagcaactccgccgtggcctggtccaacaagtccgatttcgcctgcgccaacgccttcaacaacagcattatccccgaggacacattcttcccaagccccgagagcagctgcggctttaccagcgagagctaccagcagggcgtgctgagcgccaccatcctgtacgagatcctgctgggcaaggccaccctgtacgccgtgctggtgtctgccctggtgctgatggctatggtcaagcggaaggacagccggggacgcgccaagagaagcggatctggcgtgaagcagaccctgaatttcgacctgctgaagctggctggcgacgtggaatccaacccaggcccttctagaggccatatgaccgagtacaagcccacggtgcgcctcgccacccgcgacgacgtccccagggccgtacgcaccctcgccgccgcgttcgccgactaccccgccacgcgccacaccgtcgatccggaccgccacatcgagcgggtcaccgagctgcaagaactcttcctcacgcgcgtcgggctcgacatcggcaaggtgtgggtcgcggacgacggcgccgcggtggcggtctggaccacgccggagagcgtcgaagcgggggcggtgttcgccgagatcggcccgcgcatggccgagttgagcggttcccggctggccgcgcagcaacagatggaaggcctcctggcgccgcaccggcccaaggagcccgcgtggttcctggccaccgtcggcgtctcgcccgaccaccagggcaagggtctgggcagcgccgtcgtgctccccggagtggaggcggccgagcgcgccggggtgcccgccttcctggagacctccgcgccccgcaacctccccttctacgagcggctcggcttcaccgtcaccgccgacgtcgaggtgcccgaaggaccgcgcacctggtgcatgacccgcaagcccggtgcctga

SEQ ID NO: 35044 - DNA, 1851 bp, synthetic construct
  source 1..1851: mol_type = other DNA
atggccttaccagtgaccgccttgctcctgccgctggccttgctgctccacgccgccaggccgcagatcgtgctgacacagagccccgccatcatgtctgttagccctggcgagaaagtgaccatgacctgtagcgccagcagcagcgtgaactacatgcactggttccagcagaagcccggcacaagccctaagctgtgggtgtacagcaccagcaatctggcctctggcgtgccagccagattttctggctctggcagcggcaccagctacagcctgacaatcagcagcatggaagccgaggatgccgccacctactattgtcagcagcggagcatctacccaccttggacatttggcggaggcaccaagctggaaatcaaactcgaggacctgaagaacgtgttcccacctgaggtggccgtgttcgagcctagcgaggccgagatcagccacacccagaaagccaccctcgtgtgcctggctaccggcttctaccccgaccatgtggaactgtcttggtgggtcaacggcaaagaggtgcacagcggcgtgtgtaccgacccccagccactgaaagaacagcccgccctgaacgacagccggtactgcctgagcagcagactgagagtgtccgccaccttctggcagaacccccggaaccacttcagatgccaggtgcagttctacggcctgagcgagaacgacgagtggacccaggacagagccaagcccgtgacccagatcgtgtctgccgaagcctggggcagagccgattgcggctttaccagcgagagctaccagcagggcgtgctgagcgccaccaacctgagcgtgatcggcttcagaatcctgctgctgaaagtggccggctttaacctgctgatgaccctgcggctgtggtccagcagggccaagcgatctggatctggagcaacaaacttctcactactcaaacaagcaggtgacgtggaggagaatcccgggcctactagtatggactggatttggcgcatccttttccttgtcggcgctgctaccggcgcgcattccttcgaagaagttcagctccagcagagcggccctgagcttgtgaaacctggcgcttccgtgaagatcagctgcaaggccagcggctacagcttcaccggctacaccatgaactgggtcaagcagtcccacggcaagaacctggaatggatcggcctgattaacccctacaacggcggcacctcctacaaccagaagttcaaggccaaggccacactgaccgtggacaagagcagcagcacagcctacatgcagctgaagtccctgaccagcgaggacagcgccgtgtactactgcgccagagattacggctacgtgctggactattggggccagggcacaagcgtgacagtgtctagtacgcgtatccagaaccctgatcctgccgtgtaccagctgcgggatagcaagagcagcgacaagagcgtgtgtctgttcaccgacttcgacagccagaccaacgtgtcccagagcaaggactccgacgtgtacatcaccgataagtgcgtgctggacatgcggagcatggacttcaagagcaactccgccgtggcctggtccaacaagtccgatttcgcctgcgccaacgccttcaacaacagcattatccccgaggacacattcttcccaagccccgagagcagctgcgacgtgaagctggtggaaaagagcttcgagacagacaccaacctgaacttccagatcctgtacgagatcctgctgggcaaggccaccctgtacgccgtgctggtgtctgccctggtgctgatggctatggtcaagcggaaggacagccgggga

SEQ ID NO: 35045 - DNA, 1863 bp, synthetic construct
  source 1..1863: mol_type = other DNA
atggccttaccagtgaccgccttgctcctgccgctggccttgctgctccacgccgccaggccgcagatcgtgctgacacagagccccgccatcatgtctgttagccctggcgagaaagtgaccatgacctgtagcgccagcagcagcgtgaactacatgcactggttccagcagaagcccggcacaagccctaagctgtgggtgtacagcaccagcaatctggcctctggcgtgccagccagattttctggctctggcagcggcaccagctacagcctgacaatcagcagcatggaagccgaggatgccgccacctactattgtcagcagcggagcatctacccaccttggacatttggcggaggcaccaagctggaaatcaaactcgagatccagaaccctgatcctgccgtgtaccagctgcgggatagcaagagcagcgacaagagcgtgtgtctgttcaccgacttcgacagccagaccaacgtgtcccagagcaaggactccgacgtgtacatcaccgataagtgcgtgctggacatgcggagcatggacttcaagagcaactccgccgtggcctggtccaacaagtccgatttcgcctgcgccaacgccttcaacaacagcattatccccgaggacacattcttcccaagccccgagagcagctgcgacgtgaagctggtggaaaagagcttcgagacagacaccaacctgaacttccagatcctgtacgagatcctgctgggcaaggccaccctgtacgccgtgctggtgtctgccctggtgctgatggctatggtcaagcggaaggacagccggggacgcgccaagagaagcggatctggcgtgaagcagaccctgaatttcgacctgctgaagctggctggcgacgtggaatccaacccaggccctactagtatggactggatttggcgcatccttttccttgtcggcgctgctaccggcgcgcattccttcgaagaagttcagctccagcagagcggccctgagcttgtgaaacctggcgcttccgtgaagatcagctgcaaggccagcggctacagcttcaccggctacaccatgaactgggtcaagcagtcccacggcaagaacctggaatggatcggcctgattaacccctacaacggcggcacctcctacaaccagaagttcaaggccaaggccacactgaccgtggacaagagcagcagcacagcctacatgcagctgaagtccctgaccagcgaggacagcgccgtgtactactgcgccagagattacggctacgtgctggactattggggccagggcacaagcgtgacagtgtctagtacgcgtgaggacctgaagaacgtgttcccacctgaggtggccgtgttcgagcctagcgaggccgagatcagccacacccagaaagccaccctcgtgtgcctggctaccggcttctaccccgaccatgtggaactgtcttggtgggtcaacggcaaagaggtgcacagcggcgtgtgtaccgacccccagccactgaaagaacagcccgccctgaacgacagccggtactgcctgagcagcagactgagagtgtccgccaccttctggcagaacccccggaaccacttcagatgccaggtgcagttctacggcctgagcgagaacgacgagtggacccaggacagagccaagcccgtgacccagatcgtgtctgccgaagcctggggcagagccgattgcggctttaccagcgagagctaccagcagggcgtgctgagcgccaccaacctgagcgtgatcggcttcagaatcctgctgctgaaagtggccggctttaacctgctgatgaccctgcggctgtggtccagc

SEQ ID NO: 35046 - DNA, 2256 bp, synthetic construct
  source 1..2256: mol_type = other DNA
atggccttaccagtgaccgccttgctcctgccgctggccttgctgctccacgccgccaggccggaagtgcagctggttgaatctggcggaggactggttcagcctggcggatctctgagactgtcttgtgccgccagcggcttcagcttcagcgacttttggatgagctgggtccgacaggcccctggcaaaggacttgaatgggtcgccacaatcagccaggccggcagcgagaaggactacgtggactctgtgaagggcagattcaccatcagccgggacaacgccaagaagtccctgtacctccagatgaacagcctgagagccgaggacaccgccgtgtactattgtgcctctggcgtgtacagcttcgactacagaggccagggcaccctggtcacagtctcttctggtaccggcggaggcggatctggcggcggaggtagcggtggcggaggatctgaattccagatcgtgctgacacagagccccgccatcatgtctgttagccctggcgagaaagtgaccatgacctgtagcgccagcagcagcgtgaactacatgcactggttccagcagaagcccggcacaagccctaagctgtgggtgtacagcaccagcaatctggcctctggcgtgccagccagattttctggctctggcagcggcaccagctacagcctgacaatcagcagcatggaagccgaggatgccgccacctactattgtcagcagcggagcatctacccaccttggacatttggcggaggcaccaagctggaaatcaaactcgaggacctgaagaacgtgttcccacctgaggtggccgtgttcgagcctagcgaggccgagatcagccacacccagaaagccaccctcgtgtgcctggctaccggcttctaccccgaccatgtggaactgtcttggtgggtcaacggcaaagaggtgcacagcggcgtgtgtaccgacccccagccactgaaagaacagcccgccctgaacgacagccggtactgcctgagcagcagactgagagtgtccgccaccttctggcagaacccccggaaccacttcagatgccaggtgcagttctacggcctgagcgagaacgacgagtggacccaggacagagccaagcccgtgacccagatcgtgtctgccgaagcctggggcagagccgattgcggctttaccagcgagagctaccagcagggcgtgctgagcgccaccaacctgagcgtgatcggcttcagaatcctgctgctgaaagtggccggctttaacctgctgatgaccctgcggctgtggtccagcagggccaagcgatctggatctggagcaacaaacttctcactactcaaacaagcaggtgacgtggaggagaatcccgggcctactagtatggactggatttggcgcatccttttccttgtcggcgctgctaccggcgcgcattccttcgaagaagttcagctccagcagagcggccctgagcttgtgaaacctggcgcttccgtgaagatcagctgcaaggccagcggctacagcttcaccggctacaccatgaactgggtcaagcagtcccacggcaagaacctggaatggatcggcctgattaacccctacaacggcggcacctcctacaaccagaagttcaaggccaaggccacactgaccgtggacaagagcagcagcacagcctacatgcagctgaagtccctgaccagcgaggacagcgccgtgtactactgcgccagagattacggctacgtgctggactattggggccagggcacaagcgtgacagtgtctagtacgcgtatccagaaccctgatcctgccgtgtaccagctgcgggatagcaagagcagcgacaagagcgtgtgtctgttcaccgacttcgacagccagaccaacgtgtcccagagcaaggactccgacgtgtacatcaccgataagtgcgtgctggacatgcggagcatggacttcaagagcaactccgccgtggcctggtccaacaagtccgatttcgcctgcgccaacgccttcaacaacagcattatccccgaggacacattcttcccaagccccgagagcagctgcgacgtgaagctggtggaaaagagcttcgagacagacaccaacctgaacttccagatcctgtacgagatcctgctgggcaaggccaccctgtacgccgtgctggtgtctgccctggtgctgatggctatggtcaagcggaaggacagccgggga

SEQ ID NO: 35047 - DNA, 2268 bp, synthetic construct
  source 1..2268: mol_type = other DNA
atggccttaccagtgaccgccttgctcctgccgctggccttgctgctccacgccgccaggccggaagtgcagctggttgaatctggcggaggactggttcagcctggcggatctctgagactgtcttgtgccgccagcggcttcagcttcagcgacttttggatgagctgggtccgacaggcccctggcaaaggacttgaatgggtcgccacaatcagccaggccggcagcgagaaggactacgtggactctgtgaagggcagattcaccatcagccgggacaacgccaagaagtccctgtacctccagatgaacagcctgagagccgaggacaccgccgtgtactattgtgcctctggcgtgtacagcttcgactacagaggccagggcaccctggtcacagtctcttctggtaccggcggaggcggatctggcggcggaggtagcggtggcggaggatctgaattccagatcgtgctgacacagagccccgccatcatgtctgttagccctggcgagaaagtgaccatgacctgtagcgccagcagcagcgtgaactacatgcactggttccagcagaagcccggcacaagccctaagctgtgggtgtacagcaccagcaatctggcctctggcgtgccagccagattttctggctctggcagcggcaccagctacagcctgacaatcagcagcatggaagccgaggatgccgccacctactattgtcagcagcggagcatctacccaccttggacatttggcggaggcaccaagctggaaatcaaactcgagatccagaaccctgatcctgccgtgtaccagctgcgggatagcaagagcagcgacaagagcgtgtgtctgttcaccgacttcgacagccagaccaacgtgtcccagagcaaggactccgacgtgtacatcaccgataagtgcgtgctggacatgcggagcatggacttcaagagcaactccgccgtggcctggtccaacaagtccgatttcgcctgcgccaacgccttcaacaacagcattatccccgaggacacattcttcccaagccccgagagcagctgcgacgtgaagctggtggaaaagagcttcgagacagacaccaacctgaacttccagatcctgtacgagatcctgctgggcaaggccaccctgtacgccgtgctggtgtctgccctggtgctgatggctatggtcaagcggaaggacagccggggacgcgccaagagaagcggatctggcgtgaagcagaccctgaatttcgacctgctgaagctggctggcgacgtggaatccaacccaggccctactagtatggactggatttggcgcatccttttccttgtcggcgctgctaccggcgcgcattccttcgaagaagttcagctccagcagagcggccctgagcttgtgaaacctggcgcttccgtgaagatcagctgcaaggccagcggctacagcttcaccggctacaccatgaactgggtcaagcagtcccacggcaagaacctggaatggatcggcctgattaacccctacaacggcggcacctcctacaaccagaagttcaaggccaaggccacactgaccgtggacaagagcagcagcacagcctacatgcagctgaagtccctgaccagcgaggacagcgccgtgtactactgcgccagagattacggctacgtgctggactattggggccagggcacaagcgtgacagtgtctagtacgcgtgaggacctgaagaacgtgttcccacctgaggtggccgtgttcgagcctagcgaggccgagatcagccacacccagaaagccaccctcgtgtgcctggctaccggcttctaccccgaccatgtggaactgtcttggtgggtcaacggcaaagaggtgcacagcggcgtgtgtaccgacccccagccactgaaagaacagcccgccctgaacgacagccggtactgcctgagcagcagactgagagtgtccgccaccttctggcagaacccccggaaccacttcagatgccaggtgcagttctacggcctgagcgagaacgacgagtggacccaggacagagccaagcccgtgacccagatcgtgtctgccgaagcctggggcagagccgattgcggctttaccagcgagagctaccagcagggcgtgctgagcgccaccaacctgagcgtgatcggcttcagaatcctgctgctgaaagtggccggctttaacctgctgatgaccctgcggctgtggtccagc

SEQ ID NO: 35048 - DNA, 2667 bp, synthetic construct
  source 1..2667: mol_type = other DNA
atggccttaccagtgaccgccttgctcctgccgctggccttgctgctccacgccgccaggccggaagtgcagctggttgaatctggcggaggactggttcagcctggcggatctctgagactgtcttgtgccgccagcggcttcagcttcagcgacttttggatgagctgggtccgacaggcccctggcaaaggacttgaatgggtcgccacaatcagccaggccggcagcgagaaggactacgtggactctgtgaagggcagattcaccatcagccgggacaacgccaagaagtccctgtacctccagatgaacagcctgagagccgaggacaccgccgtgtactattgtgcctctggcgtgtacagcttcgactacagaggccagggcaccctggtcacagtctcttctggtaccggcggaggcggatctggcggcggaggtagcggtggcggaggatctgaattccagatcgtgctgacacagagccccgccatcatgtctgttagccctggcgagaaagtgaccatgacctgtagcgccagcagcagcgtgaactacatgcactggttccagcagaagcccggcacaagccctaagctgtgggtgtacagcaccagcaatctggcctctggcgtgccagccagattttctggctctggcagcggcaccagctacagcctgacaatcagcagcatggaagccgaggatgccgccacctactattgtcagcagcggagcatctacccaccttggacatttggcggaggcaccaagctggaaatcaaactcgaggacctgaagaacgtgttcccacctgaggtggccgtgttcgagcctagcgaggccgagatcagccacacccagaaagccaccctcgtgtgcctggctaccggcttctaccccgaccatgtggaactgtcttggtgggtcaacggcaaagaggtgcacagcggcgtgtgtaccgacccccagccactgaaagaacagcccgccctgaacgacagccggtactgcctgagcagcagactgagagtgtccgccaccttctggcagaacccccggaaccacttcagatgccaggtgcagttctacggcctgagcgagaacgacgagtggacccaggacagagccaagcccgtgacccagatcgtgtctgccgaagcctggggcagagccgattgcggctttaccagcgagagctaccagcagggcgtgctgagcgccaccaacctgagcgtgatcggcttcagaatcctgctgctgaaagtggccggctttaacctgctgatgaccctgcggctgtggtccagcagggccaagcgatctggatctggagcaacaaacttctcactactcaaacaagcaggtgacgtggaggagaatcccgggcctactagtatggactggatttggcgcatccttttccttgtcggcgctgctaccggcgcgcattccgggccccagctccagctgcaagagtctggacctggcctggtcaagcctagcgagacactgagcctgacctgtaccgtgtccggcgatagcatcagcagcggcgattactactggggctggatcagacagcctcctggcaaaggactggaatggatcggccacatctactacagcggcgtgacctactacaaccccagcctgaagtccagagtgaccatcagcgtggacaccagccggaaccagttctccctgaagctgtctagcgtgacagccgccgataccgccgtgtactactgcaccagagaggacagcagcaactggcggagtagaggccagggaacactggtcacagttagctctggatccggcggaggcggaagtggaggcggaggatctggcggcggaggctctttcgaagaagttcagctccagcagagcggccctgagcttgtgaaacctggcgcttccgtgaagatcagctgcaaggccagcggctacagcttcaccggctacaccatgaactgggtcaagcagtcccacggcaagaacctggaatggatcggcctgattaacccctacaacggcggcacctcctacaaccagaagttcaaggccaaggccacactgaccgtggacaagagcagcagcacagcctacatgcagctgaagtccctgaccagcgaggacagcgccgtgtactactgcgccagagattacggctacgtgctggactattggggccagggcacaagcgtgacagtgtctagtacgcgtatccagaaccctgatcctgccgtgtaccagctgcgggatagcaagagcagcgacaagagcgtgtgtctgttcaccgacttcgacagccagaccaacgtgtcccagagcaaggactccgacgtgtacatcaccgataagtgcgtgctggacatgcggagcatggacttcaagagcaactccgccgtggcctggtccaacaagtccgatttcgcctgcgccaacgccttcaacaacagcattatccccgaggacacattcttcccaagccccgagagcagctgcgacgtgaagctggtggaaaagagcttcgagacagacaccaacctgaacttccagatcctgtacgagatcctgctgggcaaggccaccctgtacgccgtgctggtgtctgccctggtgctgatggctatggtcaagcggaaggacagccgggga

SEQ ID NO: 35049 - DNA, 2679 bp, synthetic construct
  source 1..2679: mol_type = other DNA
atggccttaccagtgaccgccttgctcctgccgctggccttgctgctccacgccgccaggccggaagtgcagctggttgaatctggcggaggactggttcagcctggcggatctctgagactgtcttgtgccgccagcggcttcagcttcagcgacttttggatgagctgggtccgacaggcccctggcaaaggacttgaatgggtcgccacaatcagccaggccggcagcgagaaggactacgtggactctgtgaagggcagattcaccatcagccgggacaacgccaagaagtccctgtacctccagatgaacagcctgagagccgaggacaccgccgtgtactattgtgcctctggcgtgtacagcttcgactacagaggccagggcaccctggtcacagtctcttctggtaccggcggaggcggatctggcggcggaggtagcggtggcggaggatctgaattccagatcgtgctgacacagagccccgccatcatgtctgttagccctggcgagaaagtgaccatgacctgtagcgccagcagcagcgtgaactacatgcactggttccagcagaagcccggcacaagccctaagctgtgggtgtacagcaccagcaatctggcctctggcgtgccagccagattttctggctctggcagcggcaccagctacagcctgacaatcagcagcatggaagccgaggatgccgccacctactattgtcagcagcggagcatctacccaccttggacatttggcggaggcaccaagctggaaatcaaactcgagatccagaaccctgatcctgccgtgtaccagctgcgggatagcaagagcagcgacaagagcgtgtgtctgttcaccgacttcgacagccagaccaacgtgtcccagagcaaggactccgacgtgtacatcaccgataagtgcgtgctggacatgcggagcatggacttcaagagcaactccgccgtggcctggtccaacaagtccgatttcgcctgcgccaacgccttcaacaacagcattatccccgaggacacattcttcccaagccccgagagcagctgcgacgtgaagctggtggaaaagagcttcgagacagacaccaacctgaacttccagatcctgtacgagatcctgctgggcaaggccaccctgtacgccgtgctggtgtctgccctggtgctgatggctatggtcaagcggaaggacagccggggacgcgccaagagaagcggatctggcgtgaagcagaccctgaatttcgacctgctgaagctggctggcgacgtggaatccaacccaggccctactagtatggactggatttggcgcatccttttccttgtcggcgctgctaccggcgcgcattccgggccccagctccagctgcaagagtctggacctggcctggtcaagcctagcgagacactgagcctgacctgtaccgtgtccggcgatagcatcagcagcggcgattactactggggctggatcagacagcctcctggcaaaggactggaatggatcggccacatctactacagcggcgtgacctactacaaccccagcctgaagtccagagtgaccatcagcgtggacaccagccggaaccagttctccctgaagctgtctagcgtgacagccgccgataccgccgtgtactactgcaccagagaggacagcagcaactggcggagtagaggccagggaacactggtcacagttagctctggatccggcggaggcggaagtggaggcggaggatctggcggcggaggctctttcgaagaagttcagctccagcagagcggccctgagcttgtgaaacctggcgcttccgtgaagatcagctgcaaggccagcggctacagcttcaccggctacaccatgaactgggtcaagcagtcccacggcaagaacctggaatggatcggcctgattaacccctacaacggcggcacctcctacaaccagaagttcaaggccaaggccacactgaccgtggacaagagcagcagcacagcctacatgcagctgaagtccctgaccagcgaggacagcgccgtgtactactgcgccagagattacggctacgtgctggactattggggccagggcacaagcgtgacagtgtctagtacgcgtgaggacctgaagaacgtgttcccacctgaggtggccgtgttcgagcctagcgaggccgagatcagccacacccagaaagccaccctcgtgtgcctggctaccggcttctaccccgaccatgtggaactgtcttggtgggtcaacggcaaagaggtgcacagcggcgtgtgtaccgacccccagccactgaaagaacagcccgccctgaacgacagccggtactgcctgagcagcagactgagagtgtccgccaccttctggcagaacccccggaaccacttcagatgccaggtgcagttctacggcctgagcgagaacgacgagtggacccaggacagagccaagcccgtgacccagatcgtgtctgccgaagcctggggcagagccgattgcggctttaccagcgagagctaccagcagggcgtgctgagcgccaccaacctgagcgtgatcggcttcagaatcctgctgctgaaagtggccggctttaacctgctgatgaccctgcggctgtggtccagc

SEQ ID NO: 35050 - DNA, 2163 bp, synthetic construct
  source 1..2163: mol_type = other DNA
atggccttaccagtgaccgccttgctcctgccgctggccttgctgctccacgccgccaggccgcagatcgtgctgacacagagccccgccatcatgtctgttagccctggcgagaaagtgaccatgacctgtagcgccagcagcagcgtgaactacatgcactggttccagcagaagcccggcacaagccctaagctgtgggtgtacagcaccagcaatctggcctctggcgtgccagccagattttctggctctggcagcggcaccagctacagcctgacaatcagcagcatggaagccgaggatgccgccacctactattgtcagcagcggagcatctacccaccttggacatttggcggaggcaccaagctggaaatcaaactcgaggacctgaagaacgtgttcccacctgaggtggccgtgttcgagcctagcgaggccgagatcagccacacccagaaagccaccctcgtgtgcctggctaccggcttctaccccgaccatgtggaactgtcttggtgggtcaacggcaaagaggtgcacagcggcgtgtgtaccgacccccagccactgaaagaacagcccgccctgaacgacagccggtactgcctgagcagcagactgagagtgtccgccaccttctggcagaacccccggaaccacttcagatgccaggtgcagttctacggcctgagcgagaacgacgagtggacccaggacagagccaagcccgtgacccagatcgtgtctgccgaagcctggggcagagccgatgatgtgattaagatccactggcaggaaaagaagtccaacaccatcctgggcagccaggaaggcaacaccatgaagaccaacgacacctacatgaagttcagctggctgaccgtgcccgagaagtccctggacaaagaacacagatgcatcgtgcggcacgaaaacaacaagaacggcgtggaccaggaaatcatcttcccacccatcaagaccgatgtgattacaatggaccccaaggacaactgctccaaggacgccaacgataccctgctgctccagctgaccaacaccagcgcctactacatgtacttgttgctgctgctgaagtccgtggtgtacttcgccatcatcacatgctgcctgctgatggctatggtcaagcggaaggacagccggggaagggccaagcgatctggatctggagcaacaaacttctcactactcaaacaagcaggtgacgtggaggagaatcccgggcctactagtatggactggatttggcgcatccttttccttgtcggcgctgctaccggcgcgcattccttcgaagaagttcagctccagcagagcggccctgagcttgtgaaacctggcgcttccgtgaagatcagctgcaaggccagcggctacagcttcaccggctacaccatgaactgggtcaagcagtcccacggcaagaacctggaatggatcggcctgattaacccctacaacggcggcacctcctacaaccagaagttcaaggccaaggccacactgaccgtggacaagagcagcagcacagcctacatgcagctgaagtccctgaccagcgaggacagcgccgtgtactactgcgccagagattacggctacgtgctggactattggggccagggcacaagcgtgacagtgtctagtacgcgtatccagaaccctgatcctgccgtgtaccagctgcgggatagcaagagcagcgacaagagcgtgtgtctgttcaccgacttcgacagccagaccaacgtgtcccagagcaaggactccgacgtgtacatcaccgataagtgcgtgctggacatgcggagcatggacttcaagagcaactccgccgtggcctggtccaacaagtccgatttcgcctgcgccaacgccttcaacaacagcattatccccgaggacacattcttcccaagccccgagagcagcgactccaccgaccacgtgaagcccaaagagacagagaacaccaagcagcccagcaagagctgccacaagcccaaggccatcgtgcacaccgagaaagtgaacatgatgagcctgaccgtgctgggcctgcggatgctgttcgccaaaaccgtggccgtgaacttcctgctgaccgccaagctgttcttcctcctcaccgcc

SEQ ID NO: 35051 - DNA, 2175 bp, synthetic construct
  source 1..2175: mol_type = other DNA
atggccttaccagtgaccgccttgctcctgccgctggccttgctgctccacgccgccaggccgcagatcgtgctgacacagagccccgccatcatgtctgttagccctggcgagaaagtgaccatgacctgtagcgccagcagcagcgtgaactacatgcactggttccagcagaagcccggcacaagccctaagctgtgggtgtacagcaccagcaatctggcctctggcgtgccagccagattttctggctctggcagcggcaccagctacagcctgacaatcagcagcatggaagccgaggatgccgccacctactattgtcagcagcggagcatctacccaccttggacatttggcggaggcaccaagctggaaatcaaactcgagatccagaaccctgatcctgccgtgtaccagctgcgggatagcaagagcagcgacaagagcgtgtgtctgttcaccgacttcgacagccagaccaacgtgtcccagagcaaggactccgacgtgtacatcaccgataagtgcgtgctggacatgcggagcatggacttcaagagcaactccgccgtggcctggtccaacaagtccgatttcgcctgcgccaacgccttcaacaacagcattatccccgaggacacattcttcccaagccccgagagcagcgactccaccgaccacgtgaagcccaaagagacagagaacaccaagcagcccagcaagagctgccacaagcccaaggccatcgtgcacaccgagaaagtgaacatgatgagcctgaccgtgctgggcctgcggatgctgttcgccaaaaccgtggccgtgaacttcctgctgaccgccaagctgttcttcctcctcaccgcccgcgccaagagaagcggatctggcgtgaagcagaccctgaatttcgacctgctgaagctggctggcgacgtggaatccaacccaggccctactagtatggactggatttggcgcatccttttccttgtcggcgctgctaccggcgcgcattccttcgaagaagttcagctccagcagagcggccctgagcttgtgaaacctggcgcttccgtgaagatcagctgcaaggccagcggctacagcttcaccggctacaccatgaactgggtcaagcagtcccacggcaagaacctggaatggatcggcctgattaacccctacaacggcggcacctcctacaaccagaagttcaaggccaaggccacactgaccgtggacaagagcagcagcacagcctacatgcagctgaagtccctgaccagcgaggacagcgccgtgtactactgcgccagagattacggctacgtgctggactattggggccagggcacaagcgtgacagtgtctagtacgcgtgaggacctgaagaacgtgttcccacctgaggtggccgtgttcgagcctagcgaggccgagatcagccacacccagaaagccaccctcgtgtgcctggctaccggcttctaccccgaccatgtggaactgtcttggtgggtcaacggcaaagaggtgcacagcggcgtgtgtaccgacccccagccactgaaagaacagcccgccctgaacgacagccggtactgcctgagcagcagactgagagtgtccgccaccttctggcagaacccccggaaccacttcagatgccaggtgcagttctacggcctgagcgagaacgacgagtggacccaggacagagccaagcccgtgacccagatcgtgtctgccgaagcctggggcagagccgatgatgtgattaagatccactggcaggaaaagaagtccaacaccatcctgggcagccaggaaggcaacaccatgaagaccaacgacacctacatgaagttcagctggctgaccgtgcccgagaagtccctggacaaagaacacagatgcatcgtgcggcacgaaaacaacaagaacggcgtggaccaggaaatcatcttcccacccatcaagaccgatgtgattacaatggaccccaaggacaactgctccaaggacgccaacgataccctgctgctccagctgaccaacaccagcgcctactacatgtacttgttgctgctgctgaagtccgtggtgtacttcgccatcatcacatgctgcctgctgatggctatggtcaagcggaaggacagccgggga

SEQ ID NO: 35052 - DNA, 2568 bp, synthetic construct
  source 1..2568: mol_type = other DNA
atggccttaccagtgaccgccttgctcctgccgctggccttgctgctccacgccgccaggccggaagtgcagctggttgaatctggcggaggactggttcagcctggcggatctctgagactgtcttgtgccgccagcggcttcagcttcagcgacttttggatgagctgggtccgacaggcccctggcaaaggacttgaatgggtcgccacaatcagccaggccggcagcgagaaggactacgtggactctgtgaagggcagattcaccatcagccgggacaacgccaagaagtccctgtacctccagatgaacagcctgagagccgaggacaccgccgtgtactattgtgcctctggcgtgtacagcttcgactacagaggccagggcaccctggtcacagtctcttctggtaccggcggaggcggatctggcggcggaggtagcggtggcggaggatctgaattccagatcgtgctgacacagagccccgccatcatgtctgttagccctggcgagaaagtgaccatgacctgtagcgccagcagcagcgtgaactacatgcactggttccagcagaagcccggcacaagccctaagctgtgggtgtacagcaccagcaatctggcctctggcgtgccagccagattttctggctctggcagcggcaccagctacagcctgacaatcagcagcatggaagccgaggatgccgccacctactattgtcagcagcggagcatctacccaccttggacatttggcggaggcaccaagctggaaatcaaactcgaggacctgaagaacgtgttcccacctgaggtggccgtgttcgagcctagcgaggccgagatcagccacacccagaaagccaccctcgtgtgcctggctaccggcttctaccccgaccatgtggaactgtcttggtgggtcaacggcaaagaggtgcacagcggcgtgtgtaccgacccccagccactgaaagaacagcccgccctgaacgacagccggtactgcctgagcagcagactgagagtgtccgccaccttctggcagaacccccggaaccacttcagatgccaggtgcagttctacggcctgagcgagaacgacgagtggacccaggacagagccaagcccgtgacccagatcgtgtctgccgaagcctggggcagagccgatgatgtgattaagatccactggcaggaaaagaagtccaacaccatcctgggcagccaggaaggcaacaccatgaagaccaacgacacctacatgaagttcagctggctgaccgtgcccgagaagtccctggacaaagaacacagatgcatcgtgcggcacgaaaacaacaagaacggcgtggaccaggaaatcatcttcccacccatcaagaccgatgtgattacaatggaccccaaggacaactgctccaaggacgccaacgataccctgctgctccagctgaccaacaccagcgcctactacatgtacttgttgctgctgctgaagtccgtggtgtacttcgccatcatcacatgctgcctgctgatggctatggtcaagcggaaggacagccggggaagggccaagcgatctggatctggagcaacaaacttctcactactcaaacaagcaggtgacgtggaggagaatcccgggcctactagtatggactggatttggcgcatccttttccttgtcggcgctgctaccggcgcgcattccttcgaagaagttcagctccagcagagcggccctgagcttgtgaaacctggcgcttccgtgaagatcagctgcaaggccagcggctacagcttcaccggctacaccatgaactgggtcaagcagtcccacggcaagaacctggaatggatcggcctgattaacccctacaacggcggcacctcctacaaccagaagttcaaggccaaggccacactgaccgtggacaagagcagcagcacagcctacatgcagctgaagtccctgaccagcgaggacagcgccgtgtactactgcgccagagattacggctacgtgctggactattggggccagggcacaagcgtgacagtgtctagtacgcgtatccagaaccctgatcctgccgtgtaccagctgcgggatagcaagagcagcgacaagagcgtgtgtctgttcaccgacttcgacagccagaccaacgtgtcccagagcaaggactccgacgtgtacatcaccgataagtgcgtgctggacatgcggagcatggacttcaagagcaactccgccgtggcctggtccaacaagtccgatttcgcctgcgccaacgccttcaacaacagcattatccccgaggacacattcttcccaagccccgagagcagcgactccaccgaccacgtgaagcccaaagagacagagaacaccaagcagcccagcaagagctgccacaagcccaaggccatcgtgcacaccgagaaagtgaacatgatgagcctgaccgtgctgggcctgcggatgctgttcgccaaaaccgtggccgtgaacttcctgctgaccgccaagctgttcttcctcctcaccgcc

SEQ ID NO: 35053 - DNA, 2580 bp, synthetic construct
  source 1..2580: mol_type = other DNA
atggccttaccagtgaccgccttgctcctgccgctggccttgctgctccacgccgccaggccggaagtgcagctggttgaatctggcggaggactggttcagcctggcggatctctgagactgtcttgtgccgccagcggcttcagcttcagcgacttttggatgagctgggtccgacaggcccctggcaaaggacttgaatgggtcgccacaatcagccaggccggcagcgagaaggactacgtggactctgtgaagggcagattcaccatcagccgggacaacgccaagaagtccctgtacctccagatgaacagcctgagagccgaggacaccgccgtgtactattgtgcctctggcgtgtacagcttcgactacagaggccagggcaccctggtcacagtctcttctggtaccggcggaggcggatctggcggcggaggtagcggtggcggaggatctgaattccagatcgtgctgacacagagccccgccatcatgtctgttagccctggcgagaaagtgaccatgacctgtagcgccagcagcagcgtgaactacatgcactggttccagcagaagcccggcacaagccctaagctgtgggtgtacagcaccagcaatctggcctctggcgtgccagccagattttctggctctggcagcggcaccagctacagcctgacaatcagcagcatggaagccgaggatgccgccacctactattgtcagcagcggagcatctacccaccttggacatttggcggaggcaccaagctggaaatcaaactcgagatccagaaccctgatcctgccgtgtaccagctgcgggatagcaagagcagcgacaagagcgtgtgtctgttcaccgacttcgacagccagaccaacgtgtcccagagcaaggactccgacgtgtacatcaccgataagtgcgtgctggacatgcggagcatggacttcaagagcaactccgccgtggcctggtccaacaagtccgatttcgcctgcgccaacgccttcaacaacagcattatccccgaggacacattcttcccaagccccgagagcagcgactccaccgaccacgtgaagcccaaagagacagagaacaccaagcagcccagcaagagctgccacaagcccaaggccatcgtgcacaccgagaaagtgaacatgatgagcctgaccgtgctgggcctgcggatgctgttcgccaaaaccgtggccgtgaacttcctgctgaccgccaagctgttcttcctcctcaccgcccgcgccaagagaagcggatctggcgtgaagcagaccctgaatttcgacctgctgaagctggctggcgacgtggaatccaacccaggccctactagtatggactggatttggcgcatccttttccttgtcggcgctgctaccggcgcgcattccttcgaagaagttcagctccagcagagcggccctgagcttgtgaaacctggcgcttccgtgaagatcagctgcaaggccagcggctacagcttcaccggctacaccatgaactgggtcaagcagtcccacggcaagaacctggaatggatcggcctgattaacccctacaacggcggcacctcctacaaccagaagttcaaggccaaggccacactgaccgtggacaagagcagcagcacagcctacatgcagctgaagtccctgaccagcgaggacagcgccgtgtactactgcgccagagattacggctacgtgctggactattggggccagggcacaagcgtgacagtgtctagtacgcgtgaggacctgaagaacgtgttcccacctgaggtggccgtgttcgagcctagcgaggccgagatcagccacacccagaaagccaccctcgtgtgcctggctaccggcttctaccccgaccatgtggaactgtcttggtgggtcaacggcaaagaggtgcacagcggcgtgtgtaccgacccccagccactgaaagaacagcccgccctgaacgacagccggtactgcctgagcagcagactgagagtgtccgccaccttctggcagaacccccggaaccacttcagatgccaggtgcagttctacggcctgagcgagaacgacgagtggacccaggacagagccaagcccgtgacccagatcgtgtctgccgaagcctggggcagagccgatgatgtgattaagatccactggcaggaaaagaagtccaacaccatcctgggcagccaggaaggcaacaccatgaagaccaacgacacctacatgaagttcagctggctgaccgtgcccgagaagtccctggacaaagaacacagatgcatcgtgcggcacgaaaacaacaagaacggcgtggaccaggaaatcatcttcccacccatcaagaccgatgtgattacaatggaccccaaggacaactgctccaaggacgccaacgataccctgctgctccagctgaccaacaccagcgcctactacatgtacttgttgctgctgctgaagtccgtggtgtacttcgccatcatcacatgctgcctgctgatggctatggtcaagcggaaggacagccgggga

SEQ ID NO: 35054 - DNA, 2979 bp, synthetic construct
  source 1..2979: mol_type = other DNA
atggccttaccagtgaccgccttgctcctgccgctggccttgctgctccacgccgccaggccggaagtgcagctggttgaatctggcggaggactggttcagcctggcggatctctgagactgtcttgtgccgccagcggcttcagcttcagcgacttttggatgagctgggtccgacaggcccctggcaaaggacttgaatgggtcgccacaatcagccaggccggcagcgagaaggactacgtggactctgtgaagggcagattcaccatcagccgggacaacgccaagaagtccctgtacctccagatgaacagcctgagagccgaggacaccgccgtgtactattgtgcctctggcgtgtacagcttcgactacagaggccagggcaccctggtcacagtctcttctggtaccggcggaggcggatctggcggcggaggtagcggtggcggaggatctgaattccagatcgtgctgacacagagccccgccatcatgtctgttagccctggcgagaaagtgaccatgacctgtagcgccagcagcagcgtgaactacatgcactggttccagcagaagcccggcacaagccctaagctgtgggtgtacagcaccagcaatctggcctctggcgtgccagccagattttctggctctggcagcggcaccagctacagcctgacaatcagcagcatggaagccgaggatgccgccacctactattgtcagcagcggagcatctacccaccttggacatttggcggaggcaccaagctggaaatcaaactcgaggacctgaagaacgtgttcccacctgaggtggccgtgttcgagcctagcgaggccgagatcagccacacccagaaagccaccctcgtgtgcctggctaccggcttctaccccgaccatgtggaactgtcttggtgggtcaacggcaaagaggtgcacagcggcgtgtgtaccgacccccagccactgaaagaacagcccgccctgaacgacagccggtactgcctgagcagcagactgagagtgtccgccaccttctggcagaacccccggaaccacttcagatgccaggtgcagttctacggcctgagcgagaacgacgagtggacccaggacagagccaagcccgtgacccagatcgtgtctgccgaagcctggggcagagccgatgatgtgattaagatccactggcaggaaaagaagtccaacaccatcctgggcagccaggaaggcaacaccatgaagaccaacgacacctacatgaagttcagctggctgaccgtgcccgagaagtccctggacaaagaacacagatgcatcgtgcggcacgaaaacaacaagaacggcgtggaccaggaaatcatcttcccacccatcaagaccgatgtgattacaatggaccccaaggacaactgctccaaggacgccaacgataccctgctgctccagctgaccaacaccagcgcctactacatgtacttgttgctgctgctgaagtccgtggtgtacttcgccatcatcacatgctgcctgctgatggctatggtcaagcggaaggacagccggggaagggccaagcgatctggatctggagcaacaaacttctcactactcaaacaagcaggtgacgtggaggagaatcccgggcctactagtatggactggatttggcgcatccttttccttgtcggcgctgctaccggcgcgcattccgggccccagctccagctgcaagagtctggacctggcctggtcaagcctagcgagacactgagcctgacctgtaccgtgtccggcgatagcatcagcagcggcgattactactggggctggatcagacagcctcctggcaaaggactggaatggatcggccacatctactacagcggcgtgacctactacaaccccagcctgaagtccagagtgaccatcagcgtggacaccagccggaaccagttctccctgaagctgtctagcgtgacagccgccgataccgccgtgtactactgcaccagagaggacagcagcaactggcggagtagaggccagggaacactggtcacagttagctctggatccggcggaggcggaagtggaggcggaggatctggcggcggaggctctttcgaagaagttcagctccagcagagcggccctgagcttgtgaaacctggcgcttccgtgaagatcagctgcaaggccagcggctacagcttcaccggctacaccatgaactgggtcaagcagtcccacggcaagaacctggaatggatcggcctgattaacccctacaacggcggcacctcctacaaccagaagttcaaggccaaggccacactgaccgtggacaagagcagcagcacagcctacatgcagctgaagtccctgaccagcgaggacagcgccgtgtactactgcgccagagattacggctacgtgctggactattggggccagggcacaagcgtgacagtgtctagtacgcgtatccagaaccctgatcctgccgtgtaccagctgcgggatagcaagagcagcgacaagagcgtgtgtctgttcaccgacttcgacagccagaccaacgtgtcccagagcaaggactccgacgtgtacatcaccgataagtgcgtgctggacatgcggagcatggacttcaagagcaactccgccgtggcctggtccaacaagtccgatttcgcctgcgccaacgccttcaacaacagcattatccccgaggacacattcttcccaagccccgagagcagcgactccaccgaccacgtgaagcccaaagagacagagaacaccaagcagcccagcaagagctgccacaagcccaaggccatcgtgcacaccgagaaagtgaacatgatgagcctgaccgtgctgggcctgcggatgctgttcgccaaaaccgtggccgtgaacttcctgctgaccgccaagctgttcttcctcctcaccgcc

SEQ ID NO: 35055 - DNA, 2991 bp, synthetic construct
  source 1..2991: mol_type = other DNA
atggccttaccagtgaccgccttgctcctgccgctggccttgctgctccacgccgccaggccggaagtgcagctggttgaatctggcggaggactggttcagcctggcggatctctgagactgtcttgtgccgccagcggcttcagcttcagcgacttttggatgagctgggtccgacaggcccctggcaaaggacttgaatgggtcgccacaatcagccaggccggcagcgagaaggactacgtggactctgtgaagggcagattcaccatcagccgggacaacgccaagaagtccctgtacctccagatgaacagcctgagagccgaggacaccgccgtgtactattgtgcctctggcgtgtacagcttcgactacagaggccagggcaccctggtcacagtctcttctggtaccggcggaggcggatctggcggcggaggtagcggtggcggaggatctgaattccagatcgtgctgacacagagccccgccatcatgtctgttagccctggcgagaaagtgaccatgacctgtagcgccagcagcagcgtgaactacatgcactggttccagcagaagcccggcacaagccctaagctgtgggtgtacagcaccagcaatctggcctctggcgtgccagccagattttctggctctggcagcggcaccagctacagcctgacaatcagcagcatggaagccgaggatgccgccacctactattgtcagcagcggagcatctacccaccttggacatttggcggaggcaccaagctggaaatcaaactcgagatccagaaccctgatcctgccgtgtaccagctgcgggatagcaagagcagcgacaagagcgtgtgtctgttcaccgacttcgacagccagaccaacgtgtcccagagcaaggactccgacgtgtacatcaccgataagtgcgtgctggacatgcggagcatggacttcaagagcaactccgccgtggcctggtccaacaagtccgatttcgcctgcgccaacgccttcaacaacagcattatccccgaggacacattcttcccaagccccgagagcagcgactccaccgaccacgtgaagcccaaagagacagagaacaccaagcagcccagcaagagctgccacaagcccaaggccatcgtgcacaccgagaaagtgaacatgatgagcctgaccgtgctgggcctgcggatgctgttcgccaaaaccgtggccgtgaacttcctgctgaccgccaagctgttcttcctcctcaccgcccgcgccaagagaagcggatctggcgtgaagcagaccctgaatttcgacctgctgaagctggctggcgacgtggaatccaacccaggccctactagtatggactggatttggcgcatccttttccttgtcggcgctgctaccggcgcgcattccgggccccagctccagctgcaagagtctggacctggcctggtcaagcctagcgagacactgagcctgacctgtaccgtgtccggcgatagcatcagcagcggcgattactactggggctggatcagacagcctcctggcaaaggactggaatggatcggccacatctactacagcggcgtgacctactacaaccccagcctgaagtccagagtgaccatcagcgtggacaccagccggaaccagttctccctgaagctgtctagcgtgacagccgccgataccgccgtgtactactgcaccagagaggacagcagcaactggcggagtagaggccagggaacactggtcacagttagctctggatccggcggaggcggaagtggaggcggaggatctggcggcggaggctctttcgaagaagttcagctccagcagagcggccctgagcttgtgaaacctggcgcttccgtgaagatcagctgcaaggccagcggctacagcttcaccggctacaccatgaactgggtcaagcagtcccacggcaagaacctggaatggatcggcctgattaacccctacaacggcggcacctcctacaaccagaagttcaaggccaaggccacactgaccgtggacaagagcagcagcacagcctacatgcagctgaagtccctgaccagcgaggacagcgccgtgtactactgcgccagagattacggctacgtgctggactattggggccagggcacaagcgtgacagtgtctagtacgcgtgaggacctgaagaacgtgttcccacctgaggtggccgtgttcgagcctagcgaggccgagatcagccacacccagaaagccaccctcgtgtgcctggctaccggcttctaccccgaccatgtggaactgtcttggtgggtcaacggcaaagaggtgcacagcggcgtgtgtaccgacccccagccactgaaagaacagcccgccctgaacgacagccggtactgcctgagcagcagactgagagtgtccgccaccttctggcagaacccccggaaccacttcagatgccaggtgcagttctacggcctgagcgagaacgacgagtggacccaggacagagccaagcccgtgacccagatcgtgtctgccgaagcctggggcagagccgatgatgtgattaagatccactggcaggaaaagaagtccaacaccatcctgggcagccaggaaggcaacaccatgaagaccaacgacacctacatgaagttcagctggctgaccgtgcccgagaagtccctggacaaagaacacagatgcatcgtgcggcacgaaaacaacaagaacggcgtggaccaggaaatcatcttcccacccatcaagaccgatgtgattacaatggaccccaaggacaactgctccaaggacgccaacgataccctgctgctccagctgaccaacaccagcgcctactacatgtacttgttgctgctgctgaagtccgtggtgtacttcgccatcatcacatgctgcctgctgatggctatggtcaagcggaaggacagccgggga

SEQ ID NO: 35056 - DNA, 2157 bp, synthetic construct
  source 1..2157: mol_type = other DNA
atggccttaccagtgaccgccttgctcctgccgctggccttgctgctccacgccgccaggccgcagatcgtgctgacacagagccccgccatcatgtctgttagccctggcgagaaagtgaccatgacctgtagcgccagcagcagcgtgaactacatgcactggttccagcagaagcccggcacaagccctaagctgtgggtgtacagcaccagcaatctggcctctggcgtgccagccagattttctggctctggcagcggcaccagctacagcctgacaatcagcagcatggaagccgaggatgccgccacctactattgtcagcagcggagcatctacccaccttggacatttggcggaggcaccaagctggaaatcaaactcgaggacctgaagaacgtgttcccacctgaggtggccgtgttcgagcctagcgaggccgagatcagccacacccagaaagccaccctcgtgtgcctggctaccggcttctaccccgaccatgtggaactgtcttggtgggtcaacggcaaagaggtgcacagcggcgtgtgtaccgacccccagccactgaaagaacagcccgccctgaacgacagccggtactgcctgagcagcagactgagagtgtccgccaccttctggcagaacccccggaaccacttcagatgccaggtgcagttctacggcctgagcgagaacgacgagtggacccaggacagagccaagcccgtgacccagatcgtgtctgccgaagcctggggcagagccgatgatgtgattaagatccactggcaggaaaagaagtccaacaccatcctgggcagccaggaaggcaacaccatgaagaccaacgacacctacatgaagttcagctggctgaccgtgcccgagaagtccctggacaaagaacacagatgcatcgtgcggcacgaaaacaacaagaacggcgtggaccaggaaatcatcttcccacccatcaagaccgatgtgattacaatggaccccaaggacaactgctccaaggacgccaacgataccctgctgctccagctgaccaacaccagcgcctactacatgtacttgttgctgctgctgaagtccgtggtgtacttcgccatcatcacatgctgcctgctgcggagaaccgccttctgctgcaacggcgagaagtctagggccaagcgatctggatctggagcaacaaacttctcactactcaaacaagcaggtgacgtggaggagaatcccgggcctactagtatggactggatttggcgcatccttttccttgtcggcgctgctaccggcgcgcattccttcgaagaagttcagctccagcagagcggccctgagcttgtgaaacctggcgcttccgtgaagatcagctgcaaggccagcggctacagcttcaccggctacaccatgaactgggtcaagcagtcccacggcaagaacctggaatggatcggcctgattaacccctacaacggcggcacctcctacaaccagaagttcaaggccaaggccacactgaccgtggacaagagcagcagcacagcctacatgcagctgaagtccctgaccagcgaggacagcgccgtgtactactgcgccagagattacggctacgtgctggactattggggccagggcacaagcgtgacagtgtctagtacgcgtatccagaaccctgatcctgccgtgtaccagctgcgggatagcaagagcagcgacaagagcgtgtgtctgttcaccgacttcgacagccagaccaacgtgtcccagagcaaggactccgacgtgtacatcaccgataagtgcgtgctggacatgcggagcatggacttcaagagcaactccgccgtggcctggtccaacaagtccgatttcgcctgcgccaacgccttcaacaacagcattatccccgaggacacattcttcccaagccccgagagcagcgactccaccgaccacgtgaagcccaaagagacagagaacaccaagcagcccagcaagagctgccacaagcccaaggccatcgtgcacaccgagaaagtgaacatgatgagcctgaccgtgctgggcctgcggatgctgttcgccaaaaccgtggccgtgaacttcctgctgaccgccaagctgttcttcctc

SEQ ID NO: 35057 - DNA, 2169 bp, synthetic construct
  source 1..2169: mol_type = other DNA
atggccttaccagtgaccgccttgctcctgccgctggccttgctgctccacgccgccaggccgcagatcgtgctgacacagagccccgccatcatgtctgttagccctggcgagaaagtgaccatgacctgtagcgccagcagcagcgtgaactacatgcactggttccagcagaagcccggcacaagccctaagctgtgggtgtacagcaccagcaatctggcctctggcgtgccagccagattttctggctctggcagcggcaccagctacagcctgacaatcagcagcatggaagccgaggatgccgccacctactattgtcagcagcggagcatctacccaccttggacatttggcggaggcaccaagctggaaatcaaactcgagatccagaaccctgatcctgccgtgtaccagctgcgggatagcaagagcagcgacaagagcgtgtgtctgttcaccgacttcgacagccagaccaacgtgtcccagagcaaggactccgacgtgtacatcaccgataagtgcgtgctggacatgcggagcatggacttcaagagcaactccgccgtggcctggtccaacaagtccgatttcgcctgcgccaacgccttcaacaacagcattatccccgaggacacattcttcccaagccccgagagcagcgactccaccgaccacgtgaagcccaaagagacagagaacaccaagcagcccagcaagagctgccacaagcccaaggccatcgtgcacaccgagaaagtgaacatgatgagcctgaccgtgctgggcctgcggatgctgttcgccaaaaccgtggccgtgaacttcctgctgaccgccaagctgttcttcctccgcgccaagagaagcggatctggcgtgaagcagaccctgaatttcgacctgctgaagctggctggcgacgtggaatccaacccaggccctactagtatggactggatttggcgcatccttttccttgtcggcgctgctaccggcgcgcattccttcgaagaagttcagctccagcagagcggccctgagcttgtgaaacctggcgcttccgtgaagatcagctgcaaggccagcggctacagcttcaccggctacaccatgaactgggtcaagcagtcccacggcaagaacctggaatggatcggcctgattaacccctacaacggcggcacctcctacaaccagaagttcaaggccaaggccacactgaccgtggacaagagcagcagcacagcctacatgcagctgaagtccctgaccagcgaggacagcgccgtgtactactgcgccagagattacggctacgtgctggactattggggccagggcacaagcgtgacagtgtctagtacgcgtgaggacctgaagaacgtgttcccacctgaggtggccgtgttcgagcctagcgaggccgagatcagccacacccagaaagccaccctcgtgtgcctggctaccggcttctaccccgaccatgtggaactgtcttggtgggtcaacggcaaagaggtgcacagcggcgtgtgtaccgacccccagccactgaaagaacagcccgccctgaacgacagccggtactgcctgagcagcagactgagagtgtccgccaccttctggcagaacccccggaaccacttcagatgccaggtgcagttctacggcctgagcgagaacgacgagtggacccaggacagagccaagcccgtgacccagatcgtgtctgccgaagcctggggcagagccgatgatgtgattaagatccactggcaggaaaagaagtccaacaccatcctgggcagccaggaaggcaacaccatgaagaccaacgacacctacatgaagttcagctggctgaccgtgcccgagaagtccctggacaaagaacacagatgcatcgtgcggcacgaaaacaacaagaacggcgtggaccaggaaatcatcttcccacccatcaagaccgatgtgattacaatggaccccaaggacaactgctccaaggacgccaacgataccctgctgctccagctgaccaacaccagcgcctactacatgtacttgttgctgctgctgaagtccgtggtgtacttcgccatcatcacatgctgcctgctgcggagaaccgccttctgctgcaacggcgagaagtct

SEQ ID NO: 35058 - DNA, 2562 bp, synthetic construct
  source 1..2562: mol_type = other DNA
atggccttaccagtgaccgccttgctcctgccgctggccttgctgctccacgccgccaggccggaagtgcagctggttgaatctggcggaggactggttcagcctggcggatctctgagactgtcttgtgccgccagcggcttcagcttcagcgacttttggatgagctgggtccgacaggcccctggcaaaggacttgaatgggtcgccacaatcagccaggccggcagcgagaaggactacgtggactctgtgaagggcagattcaccatcagccgggacaacgccaagaagtccctgtacctccagatgaacagcctgagagccgaggacaccgccgtgtactattgtgcctctggcgtgtacagcttcgactacagaggccagggcaccctggtcacagtctcttctggtaccggcggaggcggatctggcggcggaggtagcggtggcggaggatctgaattccagatcgtgctgacacagagccccgccatcatgtctgttagccctggcgagaaagtgaccatgacctgtagcgccagcagcagcgtgaactacatgcactggttccagcagaagcccggcacaagccctaagctgtgggtgtacagcaccagcaatctggcctctggcgtgccagccagattttctggctctggcagcggcaccagctacagcctgacaatcagcagcatggaagccgaggatgccgccacctactattgtcagcagcggagcatctacccaccttggacatttggcggaggcaccaagctggaaatcaaactcgaggacctgaagaacgtgttcccacctgaggtggccgtgttcgagcctagcgaggccgagatcagccacacccagaaagccaccctcgtgtgcctggctaccggcttctaccccgaccatgtggaactgtcttggtgggtcaacggcaaagaggtgcacagcggcgtgtgtaccgacccccagccactgaaagaacagcccgccctgaacgacagccggtactgcctgagcagcagactgagagtgtccgccaccttctggcagaacccccggaaccacttcagatgccaggtgcagttctacggcctgagcgagaacgacgagtggacccaggacagagccaagcccgtgacccagatcgtgtctgccgaagcctggggcagagccgatgatgtgattaagatccactggcaggaaaagaagtccaacaccatcctgggcagccaggaaggcaacaccatgaagaccaacgacacctacatgaagttcagctggctgaccgtgcccgagaagtccctggacaaagaacacagatgcatcgtgcggcacgaaaacaacaagaacggcgtggaccaggaaatcatcttcccacccatcaagaccgatgtgattacaatggaccccaaggacaactgctccaaggacgccaacgataccctgctgctccagctgaccaacaccagcgcctactacatgtacttgttgctgctgctgaagtccgtggtgtacttcgccatcatcacatgctgcctgctgcggagaaccgccttctgctgcaacggcgagaagtctagggccaagcgatctggatctggagcaacaaacttctcactactcaaacaagcaggtgacgtggaggagaatcccgggcctactagtatggactggatttggcgcatccttttccttgtcggcgctgctaccggcgcgcattccttcgaagaagttcagctccagcagagcggccctgagcttgtgaaacctggcgcttccgtgaagatcagctgcaaggccagcggctacagcttcaccggctacaccatgaactgggtcaagcagtcccacggcaagaacctggaatggatcggcctgattaacccctacaacggcggcacctcctacaaccagaagttcaaggccaaggccacactgaccgtggacaagagcagcagcacagcctacatgcagctgaagtccctgaccagcgaggacagcgccgtgtactactgcgccagagattacggctacgtgctggactattggggccagggcacaagcgtgacagtgtctagtacgcgtatccagaaccctgatcctgccgtgtaccagctgcgggatagcaagagcagcgacaagagcgtgtgtctgttcaccgacttcgacagccagaccaacgtgtcccagagcaaggactccgacgtgtacatcaccgataagtgcgtgctggacatgcggagcatggacttcaagagcaactccgccgtggcctggtccaacaagtccgatttcgcctgcgccaacgccttcaacaacagcattatccccgaggacacattcttcccaagccccgagagcagcgactccaccgaccacgtgaagcccaaagagacagagaacaccaagcagcccagcaagagctgccacaagcccaaggccatcgtgcacaccgagaaagtgaacatgatgagcctgaccgtgctgggcctgcggatgctgttcgccaaaaccgtggccgtgaacttcctgctgaccgccaagctgttcttcctc

SEQ ID NO: 35059 - DNA, 2973 bp, synthetic construct
  source 1..2973: mol_type = other DNA
atggccttaccagtgaccgccttgctcctgccgctggccttgctgctccacgccgccaggccggaagtgcagctggttgaatctggcggaggactggttcagcctggcggatctctgagactgtcttgtgccgccagcggcttcagcttcagcgacttttggatgagctgggtccgacaggcccctggcaaaggacttgaatgggtcgccacaatcagccaggccggcagcgagaaggactacgtggactctgtgaagggcagattcaccatcagccgggacaacgccaagaagtccctgtacctccagatgaacagcctgagagccgaggacaccgccgtgtactattgtgcctctggcgtgtacagcttcgactacagaggccagggcaccctggtcacagtctcttctggtaccggcggaggcggatctggcggcggaggtagcggtggcggaggatctgaattccagatcgtgctgacacagagccccgccatcatgtctgttagccctggcgagaaagtgaccatgacctgtagcgccagcagcagcgtgaactacatgcactggttccagcagaagcccggcacaagccctaagctgtgggtgtacagcaccagcaatctggcctctggcgtgccagccagattttctggctctggcagcggcaccagctacagcctgacaatcagcagcatggaagccgaggatgccgccacctactattgtcagcagcggagcatctacccaccttggacatttggcggaggcaccaagctggaaatcaaactcgaggacctgaagaacgtgttcccacctgaggtggccgtgttcgagcctagcgaggccgagatcagccacacccagaaagccaccctcgtgtgcctggctaccggcttctaccccgaccatgtggaactgtcttggtgggtcaacggcaaagaggtgcacagcggcgtgtgtaccgacccccagccactgaaagaacagcccgccctgaacgacagccggtactgcctgagcagcagactgagagtgtccgccaccttctggcagaacccccggaaccacttcagatgccaggtgcagttctacggcctgagcgagaacgacgagtggacccaggacagagccaagcccgtgacccagatcgtgtctgccgaagcctggggcagagccgatgatgtgattaagatccactggcaggaaaagaagtccaacaccatcctgggcagccaggaaggcaacaccatgaagaccaacgacacctacatgaagttcagctggctgaccgtgcccgagaagtccctggacaaagaacacagatgcatcgtgcggcacgaaaacaacaagaacggcgtggaccaggaaatcatcttcccacccatcaagaccgatgtgattacaatggaccccaaggacaactgctccaaggacgccaacgataccctgctgctccagctgaccaacaccagcgcctactacatgtacttgttgctgctgctgaagtccgtggtgtacttcgccatcatcacatgctgcctgctgcggagaaccgccttctgctgcaacggcgagaagtctagggccaagcgatctggatctggagcaacaaacttctcactactcaaacaagcaggtgacgtggaggagaatcccgggcctactagtatggactggatttggcgcatccttttccttgtcggcgctgctaccggcgcgcattccgggccccagctccagctgcaagagtctggacctggcctggtcaagcctagcgagacactgagcctgacctgtaccgtgtccggcgatagcatcagcagcggcgattactactggggctggatcagacagcctcctggcaaaggactggaatggatcggccacatctactacagcggcgtgacctactacaaccccagcctgaagtccagagtgaccatcagcgtggacaccagccggaaccagttctccctgaagctgtctagcgtgacagccgccgataccgccgtgtactactgcaccagagaggacagcagcaactggcggagtagaggccagggaacactggtcacagttagctctggatccggcggaggcggaagtggaggcggaggatctggcggcggaggctctttcgaagaagttcagctccagcagagcggccctgagcttgtgaaacctggcgcttccgtgaagatcagctgcaaggccagcggctacagcttcaccggctacaccatgaactgggtcaagcagtcccacggcaagaacctggaatggatcggcctgattaacccctacaacggcggcacctcctacaaccagaagttcaaggccaaggccacactgaccgtggacaagagcagcagcacagcctacatgcagctgaagtccctgaccagcgaggacagcgccgtgtactactgcgccagagattacggctacgtgctggactattggggccagggcacaagcgtgacagtgtctagtacgcgtatccagaaccctgatcctgccgtgtaccagctgcgggatagcaagagcagcgacaagagcgtgtgtctgttcaccgacttcgacagccagaccaacgtgtcccagagcaaggactccgacgtgtacatcaccgataagtgcgtgctggacatgcggagcatggacttcaagagcaactccgccgtggcctggtccaacaagtccgatttcgcctgcgccaacgccttcaacaacagcattatccccgaggacacattcttcccaagccccgagagcagcgactccaccgaccacgtgaagcccaaagagacagagaacaccaagcagcccagcaagagctgccacaagcccaaggccatcgtgcacaccgagaaagtgaacatgatgagcctgaccgtgctgggcctgcggatgctgttcgccaaaaccgtggccgtgaacttcctgctgaccgccaagctgttcttcctc

SEQ ID NO: 35060 - DNA, 1851 bp, synthetic construct
  source 1..1851: mol_type = other DNA
atggccttaccagtgaccgccttgctcctgccgctggccttgctgctccacgccgccaggccgcagatcgtgctgacacagagccccgccatcatgtctgttagccctggcgagaaagtgaccatgacctgtagcgccagcagcagcgtgaactacatgcactggttccagcagaagcccggcacaagccctaagctgtgggtgtacagcaccagcaatctggcctctggcgtgccagccagattttctggctctggcagcggcaccagctacagcctgacaatcagcagcatggaagccgaggatgccgccacctactattgtcagcagcggagcatctacccaccttggacatttggcggaggcaccaagctggaaatcaaactcgaggacctgaagaacgtgttcccacctgaggtggccgtgttcgagcctagcgaggccgagatcagccacacccagaaagccaccctcgtgtgcctggctaccggcttctaccccgaccatgtggaactgtcttggtgggtcaacggcaaagaggtgcacagcggcgtgtctaccgacccccagccactgaaagaacagcccgccctgaacgacagccggtactgcctgagcagcagactgagagtgtccgccaccttctggcagaacccccggaaccacttcagatgccaggtgcagttctacggcctgagcgagaacgacgagtggacccaggacagagccaagcccgtgacccagatcgtgtctgccgaagcctggggcagagccgattgcgacgtgaagctggtggaaaagagcttcgagacagacaccaacctgaacttccagaacctgagcgtgatcggcttcagaatcctgctgctgaaagtggccggctttaacctgctgatgaccctgcggctgtggtccagcagggccaagcgatctggatctggagcaacaaacttctcactactcaaacaagcaggtgacgtggaggagaatcccgggcctactagtatggactggatttggcgcatccttttccttgtcggcgctgctaccggcgcgcattccttcgaagaagttcagctccagcagagcggccctgagcttgtgaaacctggcgcttccgtgaagatcagctgcaaggccagcggctacagcttcaccggctacaccatgaactgggtcaagcagtcccacggcaagaacctggaatggatcggcctgattaacccctacaacggcggcacctcctacaaccagaagttcaaggccaaggccacactgaccgtggacaagagcagcagcacagcctacatgcagctgaagtccctgaccagcgaggacagcgccgtgtactactgcgccagagattacggctacgtgctggactattggggccagggcacaagcgtgacagtgtctagtacgcgtatccagaaccctgatcctgccgtgtaccagctgcgggatagcaagagcagcgacaagagcgtgtgtctgttcaccgacttcgacagccagaccaacgtgtcccagagcaaggactccgacgtgtacatcaccgataagaccgtgctggacatgcggagcatggacttcaagagcaactccgccgtggcctggtccaacaagtccgatttcgcctgcgccaacgccttcaacaacagcattatccccgaggacacattcttcccaagccccgagagcagctgcggctttaccagcgagagctaccagcagggcgtgctgagcgccaccatcctgtacgagatcctgctgggcaaggccaccctgtacgccgtgctggtgtctgccctggtgctgatggctatggtcaagcggaaggacagccgggga

SEQ ID NO: 35061 - DNA, 1851 bp, synthetic construct
  source 1..1851: mol_type = other DNA
atggccttaccagtgaccgccttgctcctgccgctggccttgctgctccacgccgccaggccgcagatcgtgctgacacagagccccgccatcatgtctgttagccctggcgagaaagtgaccatgacctgtagcgccagcagcagcgtgaactacatgcactggttccagcagaagcccggcacaagccctaagctgtgggtgtacagcaccagcaatctggcctctggcgtgccagccagattttctggctctggcagcggcaccagctacagcctgacaatcagcagcatggaagccgaggatgccgccacctactattgtcagcagcggagcatctacccaccttggacatttggcggaggcaccaagctggaaatcaaactcgaggacctgaagaacgtgttcccacctgaggtggccgtgttcgagcctagcgaggccgagatcagccacacccagaaagccaccctcgtgtgcctggctaccggcttctaccccgaccatgtggaactgtcttggtgggtcaacggcaaagaggtgcacagcggcgtgtctaccgacccccagccactgaaagaacagcccgccctgaacgacagccggtactgcctgagcagcagactgagagtgtccgccaccttctggcagaacccccggaaccacttcagatgccaggtgcagttctacggcctgagcgagaacgacgagtggacccaggacagagccaagcccgtgacccagatcgtgtctgccgaagcctggggcagagccgattgcggctttaccagcgagagctaccagcagggcgtgctgagcgccaccaacctgagcgtgatcggcttcagaatcctgctgctgaaagtggccggctttaacctgctgatgaccctgcggctgtggtccagcagggccaagcgatctggatctggagcaacaaacttctcactactcaaacaagcaggtgacgtggaggagaatcccgggcctactagtatggactggatttggcgcatccttttccttgtcggcgctgctaccggcgcgcattccttcgaagaagttcagctccagcagagcggccctgagcttgtgaaacctggcgcttccgtgaagatcagctgcaaggccagcggctacagcttcaccggctacaccatgaactgggtcaagcagtcccacggcaagaacctggaatggatcggcctgattaacccctacaacggcggcacctcctacaaccagaagttcaaggccaaggccacactgaccgtggacaagagcagcagcacagcctacatgcagctgaagtccctgaccagcgaggacagcgccgtgtactactgcgccagagattacggctacgtgctggactattggggccagggcacaagcgtgacagtgtctagtacgcgtatccagaaccctgatcctgccgtgtaccagctgcgggatagcaagagcagcgacaagagcgtgtgtctgttcaccgacttcgacagccagaccaacgtgtcccagagcaaggactccgacgtgtacatcaccgataagaccgtgctggacatgcggagcatggacttcaagagcaactccgccgtggcctggtccaacaagtccgatttcgcctgcgccaacgccttcaacaacagcattatccccgaggacacattcttcccaagccccgagagcagctgcgacgtgaagctggtggaaaagagcttcgagacagacaccaacctgaacttccagatcctgtacgagatcctgctgggcaaggccaccctgtacgccgtgctggtgtctgccctggtgctgatggctatggtcaagcggaaggacagccgggga

SEQ ID NO: 35062 - DNA, 2163 bp, synthetic construct
  source 1..2163: mol_type = other DNA
atggccttaccagtgaccgccttgctcctgccgctggccttgctgctccacgccgccaggccgcagatcgtgctgacacagagccccgccatcatgtctgttagccctggcgagaaagtgaccatgacctgtagcgccagcagcagcgtgaactacatgcactggttccagcagaagcccggcacaagccctaagctgtgggtgtacagcaccagcaatctggcctctggcgtgccagccagattttctggctctggcagcggcaccagctacagcctgacaatcagcagcatggaagccgaggatgccgccacctactattgtcagcagcggagcatctacccaccttggacatttggcggaggcaccaagctggaaatcaaactcgaggacctgaagaacgtgttcccacctgaggtggccgtgttcgagcctagcgaggccgagatcagccacacccagaaagccaccctcgtgtgcctggctaccggcttctaccccgaccatgtggaactgtcttggtgggtcaacggcaaagaggtgcacagcggcgtgtctaccgacccccagccactgaaagaacagcccgccctgaacgacagccggtactgcctgagcagcagactgagagtgtccgccaccttctggcagaacccccggaaccacttcagatgccaggtgcagttctacggcctgagcgagaacgacgagtggacccaggacagagccaagcccgtgacccagatcgtgtctgccgaagcctggggcagagccgatgatgtgattaagatccactggcaggaaaagaagtccaacaccatcctgggcagccaggaaggcaacaccatgaagaccaacgacacctacatgaagttcagctggctgaccgtgcccgagaagtccctggacaaagaacacagatgcatcgtgcggcacgaaaacaacaagaacggcgtggaccaggaaatcatcttcccacccatcaagaccgatgtgattacaatggaccccaaggacaactgctccaaggacgccaacgataccctgctgctccagctgaccaacaccagcgcctactacatgtacttgttgctgctgctgaagtccgtggtgtacttcgccatcatcacatgctgcctgctgatggctatggtcaagcggaaggacagccggggaagggccaagcgatctggatctggagcaacaaacttctcactactcaaacaagcaggtgacgtggaggagaatcccgggcctactagtatggactggatttggcgcatccttttccttgtcggcgctgctaccggcgcgcattccttcgaagaagttcagctccagcagagcggccctgagcttgtgaaacctggcgcttccgtgaagatcagctgcaaggccagcggctacagcttcaccggctacaccatgaactgggtcaagcagtcccacggcaagaacctggaatggatcggcctgattaacccctacaacggcggcacctcctacaaccagaagttcaaggccaaggccacactgaccgtggacaagagcagcagcacagcctacatgcagctgaagtccctgaccagcgaggacagcgccgtgtactactgcgccagagattacggctacgtgctggactattggggccagggcacaagcgtgacagtgtctagtacgcgtatccagaaccctgatcctgccgtgtaccagctgcgggatagcaagagcagcgacaagagcgtgtgtctgttcaccgacttcgacagccagaccaacgtgtcccagagcaaggactccgacgtgtacatcaccgataagaccgtgctggacatgcggagcatggacttcaagagcaactccgccgtggcctggtccaacaagtccgatttcgcctgcgccaacgccttcaacaacagcattatccccgaggacacattcttcccaagccccgagagcagcgactccaccgaccacgtgaagcccaaagagacagagaacaccaagcagcccagcaagagctgccacaagcccaaggccatcgtgcacaccgagaaagtgaacatgatgagcctgaccgtgctgggcctgcggatgctgttcgccaaaaccgtggccgtgaacttcctgctgaccgccaagctgttcttcctcctcaccgcc

SEQ ID NO: 35063 - DNA, 2157 bp, synthetic construct
  source 1..2157: mol_type = other DNA
atggccttaccagtgaccgccttgctcctgccgctggccttgctgctccacgccgccaggccgcagatcgtgctgacacagagccccgccatcatgtctgttagccctggcgagaaagtgaccatgacctgtagcgccagcagcagcgtgaactacatgcactggttccagcagaagcccggcacaagccctaagctgtgggtgtacagcaccagcaatctggcctctggcgtgccagccagattttctggctctggcagcggcaccagctacagcctgacaatcagcagcatggaagccgaggatgccgccacctactattgtcagcagcggagcatctacccaccttggacatttggcggaggcaccaagctggaaatcaaactcgaggacctgaagaacgtgttcccacctgaggtggccgtgttcgagcctagcgaggccgagatcagccacacccagaaagccaccctcgtgtgcctggctaccggcttctaccccgaccatgtggaactgtcttggtgggtcaacggcaaagaggtgcacagcggcgtgtctaccgacccccagccactgaaagaacagcccgccctgaacgacagccggtactgcctgagcagcagactgagagtgtccgccaccttctggcagaacccccggaaccacttcagatgccaggtgcagttctacggcctgagcgagaacgacgagtggacccaggacagagccaagcccgtgacccagatcgtgtctgccgaagcctggggcagagccgatgatgtgattaagatccactggcaggaaaagaagtccaacaccatcctgggcagccaggaaggcaacaccatgaagaccaacgacacctacatgaagttcagctggctgaccgtgcccgagaagtccctggacaaagaacacagatgcatcgtgcggcacgaaaacaacaagaacggcgtggaccaggaaatcatcttcccacccatcaagaccgatgtgattacaatggaccccaaggacaactgctccaaggacgccaacgataccctgctgctccagctgaccaacaccagcgcctactacatgtacttgttgctgctgctgaagtccgtggtgtacttcgccatcatcacatgctgcctgctgcggagaaccgccttctgctgcaacggcgagaagtctagggccaagcgatctggatctggagcaacaaacttctcactactcaaacaagcaggtgacgtggaggagaatcccgggcctactagtatggactggatttggcgcatccttttccttgtcggcgctgctaccggcgcgcattccttcgaagaagttcagctccagcagagcggccctgagcttgtgaaacctggcgcttccgtgaagatcagctgcaaggccagcggctacagcttcaccggctacaccatgaactgggtcaagcagtcccacggcaagaacctggaatggatcggcctgattaacccctacaacggcggcacctcctacaaccagaagttcaaggccaaggccacactgaccgtggacaagagcagcagcacagcctacatgcagctgaagtccctgaccagcgaggacagcgccgtgtactactgcgccagagattacggctacgtgctggactattggggccagggcacaagcgtgacagtgtctagtacgcgtatccagaaccctgatcctgccgtgtaccagctgcgggatagcaagagcagcgacaagagcgtgtgtctgttcaccgacttcgacagccagaccaacgtgtcccagagcaaggactccgacgtgtacatcaccgataagaccgtgctggacatgcggagcatggacttcaagagcaactccgccgtggcctggtccaacaagtccgatttcgcctgcgccaacgccttcaacaacagcattatccccgaggacacattcttcccaagccccgagagcagcgactccaccgaccacgtgaagcccaaagagacagagaacaccaagcagcccagcaagagctgccacaagcccaaggccatcgtgcacaccgagaaagtgaacatgatgagcctgaccgtgctgggcctgcggatgctgttcgccaaaaccgtggccgtgaacttcctgctgaccgccaagctgttcttcctc

SEQ ID NO: 35064 - DNA, 2589 bp, synthetic construct
  source 1..2589: mol_type = other DNA
atggccttaccagtgaccgccttgctcctgccgctggccttgctgctccacgccgccaggccgctcgaggaggacctgaagaacgtgttcccacctgaggtggccgtgttcgagcctagcgaggccgagatcagccacacccagaaagccaccctcgtgtgcctggctaccggcttctaccccgaccatgtggaactgtcttggtgggtcaacggcaaagaggtgcacagcggcgtgtgtaccgacccccagccactgaaagaacagcccgccctgaacgacagccggtactgcctgagcagcagactgagagtgtccgccaccttctggcagaacccccggaaccacttcagatgccaggtgcagttctacggcctgagcgagaacgacgagtggacccaggacagagccaagcccgtgacccagatcgtgtctgccgaagcctggggcagagccgattgcggctttaccagcgagagctaccagcagggcgtgctgagcgccaccaacctgagcgtgatcggcttcagaatcctgctgctgaaagtggccggctttaacctgctgatgaccctgcggctgtggtccagcagggccaagcgatctggatctggagcaacaaacttctcactactcaaacaagcaggtgacgtggaggagaatcccgggcctactagcatggccttaccagtgaccgccttgctcctgccgctggccttgctgctccacgccgccaggccgcagatcgtgctgacacagagccccgccatcatgtctgttagccctggcgagaaagtgaccatgacctgtagcgccagcagcagcgtgaactacatgcactggttccagcagaagcccggcacaagccctaagctgtgggtgtacagcaccagcaatctggcctctggcgtgccagccagattttctggctctggcagcggcaccagctacagcctgacaatcagcagcatggaagccgaggatgccgccacctactattgtcagcagcggagcatctacccaccttggacatttggcggaggcaccaagctggaaatcaaaggcggaggcggaagtggaggcggaggatctggcggcggaggctctgaagttcagctccagcagagcggccctgagcttgtgaaacctggcgcttccgtgaagatcagctgcaaggccagcggctacagcttcaccggctacaccatgaactgggtcaagcagtcccacggcaagaacctggaatggatcggcctgattaacccctacaacggcggcacctcctacaaccagaagttcaaggccaaggccacactgaccgtggacaagagcagcagcacagcctacatgcagctgaagtccctgaccagcgaggacagcgccgtgtactactgcgccagagattacggctacgtgctggactattggggccagggcacaagcgtgacagtgtctagtacgcgtatccagaaccctgatcctgccgtgtaccagctgcgggatagcaagagcagcgacaagagcgtgtgtctgttcaccgacttcgacagccagaccaacgtgtcccagagcaaggactccgacgtgtacatcaccgataagtgcgtgctggacatgcggagcatggacttcaagagcaactccgccgtggcctggtccaacaagtccgatttcgcctgcgccaacgccttcaacaacagcattatccccgaggacacattcttcccaagccccgagagcagctgcgacgtgaagctggtggaaaagagcttcgagacagacaccaacctgaacttccagatcctgtacgaggtgatcggcttcagaatcctgctgctgaaagtggccggctttaacctgctgatgaccctgcggctgtggtccagccgcgccaagagaagcggatctggcgtgaagcagaccctgaatttcgacctgctgaagctggctggcgacgtggaatccaacccaggcccttctagaggccatatgaccgagtacaagcccacggtgcgcctcgccacccgcgacgacgtccccagggccgtacgcaccctcgccgccgcgttcgccgactaccccgccacgcgccacaccgtcgatccggaccgccacatcgagcgggtcaccgagctgcaagaactcttcctcacgcgcgtcgggctcgacatcggcaaggtgtgggtcgcggacgacggcgccgcggtggcggtctggaccacgccggagagcgtcgaagcgggggcggtgttcgccgagatcggcccgcgcatggccgagttgagcggttcccggctggccgcgcagcaacagatggaaggcctcctggcgccgcaccggcccaaggagcccgcgtggttcctggccaccgtcggcgtctcgcccgaccaccagggcaagggtctgggcagcgccgtcgtgctccccggagtggaggcggccgagcgcgccggggtgcccgccttcctggagacctccgcgccccgcaacctccccttctacgagcggctcggcttcaccgtcaccgccgacgtcgaggtgcccgaaggaccgcgcacctggtgcatgacccgcaagcccggtgcctga

SEQ ID NO: 35065 - DNA, 2589 bp, synthetic construct
  source 1..2589: mol_type = other DNA
atggccttaccagtgaccgccttgctcctgccgctggccttgctgctccacgccgccaggccgctcgagatccagaaccctgatcctgccgtgtaccagctgcgggatagcaagagcagcgacaagagcgtgtgtctgttcaccgacttcgacagccagaccaacgtgtcccagagcaaggactccgacgtgtacatcaccgataagtgcgtgctggacatgcggagcatggacttcaagagcaactccgccgtggcctggtccaacaagtccgatttcgcctgcgccaacgccttcaacaacagcattatccccgaggacacattcttcccaagccccgagagcagctgcgacgtgaagctggtggaaaagagcttcgagacagacaccaacctgaacttccagatcctgtacgaggtgatcggcttcagaatcctgctgctgaaagtggccggctttaacctgctgatgaccctgcggctgtggtccagcagggccaagcgatctggatctggagcaacaaacttctcactactcaaacaagcaggtgacgtggaggagaatcccgggcctactagcatggccttaccagtgaccgccttgctcctgccgctggccttgctgctccacgccgccaggccgcagatcgtgctgacacagagccccgccatcatgtctgttagccctggcgagaaagtgaccatgacctgtagcgccagcagcagcgtgaactacatgcactggttccagcagaagcccggcacaagccctaagctgtgggtgtacagcaccagcaatctggcctctggcgtgccagccagattttctggctctggcagcggcaccagctacagcctgacaatcagcagcatggaagccgaggatgccgccacctactattgtcagcagcggagcatctacccaccttggacatttggcggaggcaccaagctggaaatcaaaggcggaggcggaagtggaggcggaggatctggcggcggaggctctgaagttcagctccagcagagcggccctgagcttgtgaaacctggcgcttccgtgaagatcagctgcaaggccagcggctacagcttcaccggctacaccatgaactgggtcaagcagtcccacggcaagaacctggaatggatcggcctgattaacccctacaacggcggcacctcctacaaccagaagttcaaggccaaggccacactgaccgtggacaagagcagcagcacagcctacatgcagctgaagtccctgaccagcgaggacagcgccgtgtactactgcgccagagattacggctacgtgctggactattggggccagggcacaagcgtgacagtgtctagtacgcgtgaggacctgaagaacgtgttcccacctgaggtggccgtgttcgagcctagcgaggccgagatcagccacacccagaaagccaccctcgtgtgcctggctaccggcttctaccccgaccatgtggaactgtcttggtgggtcaacggcaaagaggtgcacagcggcgtgtgtaccgacccccagccactgaaagaacagcccgccctgaacgacagccggtactgcctgagcagcagactgagagtgtccgccaccttctggcagaacccccggaaccacttcagatgccaggtgcagttctacggcctgagcgagaacgacgagtggacccaggacagagccaagcccgtgacccagatcgtgtctgccgaagcctggggcagagccgattgcggctttaccagcgagagctaccagcagggcgtgctgagcgccaccaacctgagcgtgatcggcttcagaatcctgctgctgaaagtggccggctttaacctgctgatgaccctgcggctgtggtccagccgcgccaagagaagcggatctggcgtgaagcagaccctgaatttcgacctgctgaagctggctggcgacgtggaatccaacccaggcccttctagaggccatatgaccgagtacaagcccacggtgcgcctcgccacccgcgacgacgtccccagggccgtacgcaccctcgccgccgcgttcgccgactaccccgccacgcgccacaccgtcgatccggaccgccacatcgagcgggtcaccgagctgcaagaactcttcctcacgcgcgtcgggctcgacatcggcaaggtgtgggtcgcggacgacggcgccgcggtggcggtctggaccacgccggagagcgtcgaagcgggggcggtgttcgccgagatcggcccgcgcatggccgagttgagcggttcccggctggccgcgcagcaacagatggaaggcctcctggcgccgcaccggcccaaggagcccgcgtggttcctggccaccgtcggcgtctcgcccgaccaccagggcaagggtctgggcagcgccgtcgtgctccccggagtggaggcggccgagcgcgccggggtgcccgccttcctggagacctccgcgccccgcaacctccccttctacgagcggctcggcttcaccgtcaccgccgacgtcgaggtgcccgaaggaccgcgcacctggtgcatgacccgcaagcccggtgcctga

SEQ ID NO: 35066 - DNA, 2589 bp, synthetic construct; identical to SEQ ID NO: 35064
  source 1..2589: mol_type = other DNA

SEQ ID NO: 35067 - DNA, 2913 bp, synthetic construct
  source 1..2913: mol_type = other DNA
atggccttaccagtgaccgccttgctcctgccgctggccttgctgctccacgccgccaggccgctcgaggaggacctgaagaacgtgttcccacctgaggtggccgtgttcgagcctagcgaggccgagatcagccacacccagaaagccaccctcgtgtgcctggctaccggcttctaccccgaccatgtggaactgtcttggtgggtcaacggcaaagaggtgcacagcggcgtgtctaccgacccccagccactgaaagaacagcccgccctgaacgacagccggtactgcctgagcagcagactgagagtgtccgccaccttctggcagaacccccggaaccacttcagatgccaggtgcagttctacggcctgagcgagaacgacgagtggacccaggacagagccaagcccgtgacccagatcgtgtctgccgaagcctggggcagagccgatgatgtgattaagatccactggcaggaaaagaagtccaacaccatcctgggcagccaggaaggcaacaccatgaagaccaacgacacctacatgaagttcagctggctgaccgtgcccgagaagtccctggacaaagaacacagatgcatcgtgcggcacgaaaacaacaagaacggcgtggaccaggaaatcatcttcccacccatcaagaccgatgtgattacaatggaccccaaggacaactgctccaaggacgccaacgataccctgctgctccagctgaccaacaccagcgcctactacatgtacttgttgctgctgctgaagtccgtggtgtacttcgccatcatcacatgctgcctgctgatggctatggtcaagcggaaggacagccggggaagggccaagcgatctggatctggagcaacaaacttctcactactcaaacaagcaggtgacgtggaggagaatcccgggcctactagcatggccttaccagtgaccgccttgctcctgccgctggccttgctgctccacgccgccaggccgcagatcgtgctgacacagagccccgccatcatgtctgttagccctggcgagaaagtgaccatgacctgtagcgccagcagcagcgtgaactacatgcactggttccagcagaagcccggcacaagccctaagctgtgggtgtacagcaccagcaatctggcctctggcgtgccagccagattttctggctctggcagcggcaccagctacagcctgacaatcagcagcatggaagccgaggatgccgccacctactattgtcagcagcggagcatctacccaccttggacatttggcggaggcaccaagctggaaatcaaaggcggaggcggaagtggaggcggaggatctggcggcggaggctctgaagttcagctccagcagagcggccctgagcttgtgaaacctggcgcttccgtgaagatcagctgcaaggccagcggctacagcttcaccggctacaccatgaactgggtcaagcagtcccacggcaagaacctggaatggatcggcctgattaacccctacaacggcggcacctcctacaaccagaagttcaaggccaaggccacactgaccgtggacaagagcagcagcacagcctacatgcagctgaagtccctgaccagcgaggacagcgccgtgtactactgcgccagagattacggctacgtgctggactattggggccagggcacaagcgtgacagtgtctagtacgcgtatccagaaccctgatcctgccgtgtaccagctgcgggatagcaagagcagcgacaagagcgtgtgtctgttcaccgacttcgacagccagaccaacgtgtcccagagcaaggactccgacgtgtacatcaccgataagaccgtgctggacatgcggagcatggacttcaagagcaactccgccgtggcctggtccaacaagtccgatttcgcctgcgccaacgccttcaacaacagcattatccccgaggacacattcttcccaagccccgagagcagcgactccaccgaccacgtgaagcccaaagagacagagaacaccaagcagcccagcaagagctgccacaagcccaaggccatcgtgcacaccgagaaagtgaacatgatgagcctgaccgtgctgggcctgcggatgctgttcgccaaaaccgtggccgtgaacttcctgctgaccgccaagctgttcttcctcctcaccgcccgcgccaagagaagcggatctggcgtgaagcagaccctgaatttcgacctgctgaagctggctggcgacgtggaatccaacccaggcccttctagaggccatatgaccgagtacaagcccacggtgcgcctcgccacccgcgacgacgtccccagggccgtacgcaccctcgccgccgcgttcgccgactaccccgccacgcgccacaccgtcgatccggaccgccacatcgagcgggtcaccgagctgcaagaactcttcctcacgcgcgtcgggctcgacatcggcaaggtgtgggtcgcggacgacggcgccgcggtggcggtctggaccacgccggagagcgtcgaagcgggggcggtgttcgccgagatcggcccgcgcatggccgagttgagcggttcccggctggccgcgcagcaacagatggaaggcctcctggcgccgcaccggcccaaggagcccgcgtggttcctggccaccgtcggcgtctcgcccgaccaccagggcaagggtctgggcagcgccgtcgtgctccccggagtggaggcggccgagcgcgccggggtgcccgccttcctggagacctccgcgccccgcaacctccccttctacgagcggctcggcttcaccgtcaccgccgacgtcgaggtgcccgaaggaccgcgcacctggtgcatgacccgcaagcccggtgcctga

SEQ ID NO: 35068 - DNA, 2913 bp, synthetic construct
  source 1..2913: mol_type = other DNA
atggccttaccagtgaccgccttgctcctgccgctggccttgctgctccacgccgccaggccgctcgagatccagaaccctgatcctgccgtgtaccagctgcgggatagcaagagcagcgacaagagcgtgtgtctgttcaccgacttcgacagccagaccaacgtgtcccagagcaaggactccgacgtgtacatcaccgataagaccgtgctggacatgcggagcatggacttcaagagcaactccgccgtggcctggtccaacaagtccgatttcgcctgcgccaacgccttcaacaacagcattatccccgaggacacattcttcccaagccccgagagcagcgactccaccgaccacgtgaagcccaaagagacagagaacaccaagcagcccagcaagagctgccacaagcccaaggccatcgtgcacaccgagaaagtgaacatgatgagcctgaccgtgctgggcctgcggatgctgttcgccaaaaccgtggccgtgaacttcctgctgaccgccaagctgttcttcctcctcaccgccagggccaagcgatctggatctggagcaacaaacttctcactactcaaacaagcaggtgacgtggaggagaatcccgggcctactagcatggccttaccagtgaccgccttgctcctgccgctggccttgctgctccacgccgccaggccgcagatcgtgctgacacagagccccgccatcatgtctgttagccctggcgagaaagtgaccatgacctgtagcgccagcagcagcgtgaactacatgcactggttccagcagaagcccggcacaagccctaagctgtgggtgtacagcaccagcaatctggcctctggcgtgccagccagattttctggctctggcagcggcaccagctacagcctgacaatcagcagcatggaagccgaggatgccgccacctactattgtcagcagcggagcatctacccaccttggacatttggcggaggcaccaagctggaaatcaaaggcggaggcggaagtggaggcggaggatctggcggcggaggctctgaagttcagctccagcagagcggccctgagcttgtgaaacctggcgcttccgtgaagatcagctgcaaggccagcggctacagcttcaccggctacaccatgaactgggtcaagcagtcccacggcaagaacctggaatggatcggcctgattaacccctacaacggcggcacctcctacaaccagaagttcaaggccaaggccacactgaccgtggacaagagcagcagcacagcctacatgcagctgaagtccctgaccagcgaggacagcgccgtgtactactgcgccagagattacggctacgtgctggactattggggccagggcacaagcgtgacagtgtctagtacgcgtgaggacctgaagaacgtgttcccacctgaggtggccgtgttcgagcctagcgaggccgagatcagccacacccagaaagccaccctcgtgtgcctggctaccggcttctaccccgaccatgtggaactgtcttggtgggtcaacggcaaagaggtgcacagcggcgtgtctaccgacccccagccactgaaagaacagcccgccctgaacgacagccggtactgcctgagcagcagactgagagtgtccgccaccttctggcagaacccccggaaccacttcagatgccaggtgcagttctacggcctgagcgagaacgacgagtggacccaggacagagccaagcccgtgacccagatcgtgtctgccgaagcctggggcagagccgatgatgtgattaagatccactggcaggaaaagaagtccaacaccatcctgggcagccaggaaggcaacaccatgaagaccaacgacacctacatgaagttcagctggctgaccgtgcccgagaagtccctggacaaagaacacagatgcatcgtgcggcacgaaaacaacaagaacggcgtggaccaggaaatcatcttcccacccatcaagaccgatgtgattacaatggaccccaaggacaactgctccaaggacgccaacgataccctgctgctccagctgaccaacaccagcgcctactacatgtacttgttgctgctgctgaagtccgtggtgtacttcgccatcatcacatgctgcctgctgatggctatggtcaagcggaaggacagccggggacgcgccaagagaagcggatctggcgtgaagcagaccctgaatttcgacctgctgaagctggctggcgacgtggaatccaacccaggcccttctagaggccatatgaccgagtacaagcccacggtgcgcctcgccacccgcgacgacgtccccagggccgtacgcaccctcgccgccgcgttcgccgactaccccgccacgcgccacaccgtcgatccggaccgccacatcgagcgggtcaccgagctgcaagaactcttcctcacgcgcgtcgggctcgacatcggcaaggtgtgggtcgcggacgacggcgccgcggtggcggtctggaccacgccggagagcgtcgaagcgggggcggtgttcgccgagatcggcccgcgcatggccgagttgagcggttcccggctggccgcgcagcaacagatggaaggcctcctggcgccgcaccggcccaaggagcccgcgtggttcctggccaccgtcggcgtctcgcccgaccaccagggcaagggtctgggcagcgccgtcgtgctccccggagtggaggcggccgagcgcgccggggtgcccgccttcctggagacctccgcgccccgcaacctccccttctacgagcggctcggcttcaccgtcaccgccgacgtcgaggtgcccgaaggaccgcgcacctggtgcatgacccgcaagcccggtgcctga

SEQ ID NO: 35069 - DNA, 2907 bp, synthetic construct
  source 1..2907: mol_type = other DNA
atggccttaccagtgaccgccttgctcctgccgctggccttgctgctccacgccgccaggccgctcgaggaggacctgaagaacgtgttcccacctgaggtggccgtgttcgagcctagcgaggccgagatcagccacacccagaaagccaccctcgtgtgcctggctaccggcttctaccccgaccatgtggaactgtcttggtgggtcaacggcaaagaggtgcacagcggcgtgtgtaccgacccccagccactgaaagaacagcccgccctgaacgacagccggtactgcctgagcagcagactgagagtgtccgccaccttctggcagaacccccggaaccacttcagatgccaggtgcagttctacggcctgagcgagaacgacgagtggacccaggacagagccaagcccgtgacccagatcgtgtctgccgaagcctggggcagagccgatgatgtgattaagatccactggcaggaaaagaagtccaacaccatcctgggcagccaggaaggcaacaccatgaagaccaacgacacctacatgaagttcagctggctgaccgtgcccgagaagtccctggacaaagaacacagatgcatcgtgcggcacgaaaacaacaagaacggcgtggaccaggaaatcatcttcccacccatcaagaccgatgtgattacaatggaccccaaggacaactgctccaaggacgccaacgataccctgctgctccagctgaccaacaccagcgcctactacatgtacttgttgctgctgctgaagtccgtggtgtacttcgccatcatcacatgctgcctgctgcggagaaccgccttctgctgcaacggcgagaagtctagggccaagcgatctggatctggagcaacaaacttctcactactcaaacaagcaggtgacgtggaggagaatcccgggcctactagcatggccttaccagtgaccgccttgctcctgccgctggccttgctgctccacgccgccaggccgcagatcgtgctgacacagagccccgccatcatgtctgttagccctggcgagaaagtgaccatgacctgtagcgccagcagcagcgtgaactacatgcactggttccagcagaagcccggcacaagccctaagctgtgggtgtacagcaccagcaatctggcctctggcgtgccagccagattttctggctctggcagcggcaccagctacagcctgacaatcagcagcatggaagccgaggatgccgccacctactattgtcagcagcggagcatctacccaccttggacatttggcggaggcaccaagctggaaatcaaaggcggaggcggaagtggaggcggaggatctggcggcggaggctctgaagttcagctccagcagagcggccctgagcttgtgaaacctggcgcttccgtgaagatcagctgcaaggccagcggctacagcttcaccggctacaccatgaactgggtcaagcagtcccacggcaagaacctggaatggatcggcctgattaacccctacaacggcggcacctcctacaaccagaagttcaaggccaaggccacactgaccgtggacaagagcagcagcacagcctacatgcagctgaagtccctgaccagcgaggacagcgccgtgtactactgcgccagagattacggctacgtgctggactattggggccagggcacaagcgtgacagtgtctagtacgcgtatccagaaccctgatcctgccgtgtaccagctgcgggatagcaagagcagcgacaagagcgtgtgtctgttcaccgacttcgacagccagaccaacgtgtcccagagcaaggactccgacgtgtacatcaccgataagtgcgtgctggacatgcggagcatggacttcaagagcaactccgccgtggcctggtccaacaagtccgatttcgcctgcgccaacgccttcaacaacagcattatccccgaggacacattcttcccaagccccgagagcagcgactccaccgaccacgtgaagcccaaagagacagagaacaccaagcagcccagcaagagctgccacaagcccaaggccatcgtgcacaccgagaaagtgaacatgatgagcctgaccgtgctgggcctgcggatgctgttcgccaaaaccgtggccgtgaacttcctgctgaccgccaagctgttcttcctccgcgccaagagaagcggatctggcgtgaagcagaccctgaatttcgacctgctgaagctggctggcgacgtggaatccaacccaggcccttctagaggccatatgaccgagtacaagcccacggtgcgcctcgccacccgcgacgacgtccccagggccgtacgcaccctcgccgccgcgttcgccgactaccccgccacgcgccacaccgtcgatccggaccgccacatcgagcgggtcaccgagctgcaagaactcttcctcacgcgcgtcgggctcgacatcggcaaggtgtgggtcgcggacgacggcgccgcggtggcggtctggaccacgccggagagcgtcgaagcgggggcggtgttcgccgagatcggcccgcgcatggccgagttgagcggttcccggctggccgcgcagcaacagatggaaggcctcctggcgccgcaccggcccaaggagcccgcgtggttcctggccaccgtcggcgtctcgcccgaccaccagggcaagggtctgggcagcgccgtcgtgctccccggagtggaggcggccgagcgcgccggggtgcccgccttcctggagacctccgcgccccgcaacctccccttctacgagcggctcggcttcaccgtcaccgccgacgtcgaggtgcccgaaggaccgcgcacctggtgcatgacccgcaagcccggtgcctga

SEQ ID NO: 35070 - DNA, 2907 bp, synthetic construct
  source 1..2907: mol_type = other DNA
atggccttaccagtgaccgccttgctcctgccgctggccttgctgctccacgccgccaggccgctcgagatccagaaccctgatcctgccgtgtaccagctgcgggatagcaagagcagcgacaagagcgtgtgtctgttcaccgacttcgacagccagaccaacgtgtcccagagcaaggactccgacgtgtacatcaccgataagtgcgtgctggacatgcggagcatggacttcaagagcaactccgccgtggcctggtccaacaagtccgatttcgcctgcgccaacgccttcaacaacagcattatccccgaggacacattcttcccaagccccgagagcagcgactccaccgaccacgtgaagcccaaagagacagagaacaccaagcagcccagcaagagctgccacaagcccaaggccatcgtgcacaccgagaaagtgaacatgatgagcctgaccgtgctgggcctgcggatgctgttcgccaaaaccgtggccgtgaacttcctgctgaccgccaagctgttcttcctcagggccaagcgatctggatctggagcaacaaacttctcactactcaaacaagcaggtgacgtggaggagaatcccgggcctactagcatggccttaccagtgaccgccttgctcctgccgctggccttgctgctccacgccgccaggccgcagatcgtgctgacacagagccccgccatcatgtctgttagccctggcgagaaagtgaccatgacctgtagcgccagcagcagcgtgaactacatgcactggttccagcagaagcccggcacaagccctaagctgtgggtgtacagcaccagcaatctggcctctggcgtgccagccagattttctggctctggcagcggcaccagctacagcctgacaatcagcagcatggaagccgaggatgccgccacctactattgtcagcagcggagcatctacccaccttggacatttggcggaggcaccaagctggaaatcaaaggcggaggcggaagtggaggcggaggatctggcggcggaggctctgaagttcagctccagcagagcggccctgagcttgtgaaacctggcgcttccgtgaagatcagctgcaaggccagcggctacagcttcaccggctacaccatgaactgggtcaagcagtcccacggcaagaacctggaatggatcggcctgattaacccctacaacggcggcacctcctacaaccagaagttcaaggccaaggccacactgaccgtggacaagagcagcagcacagcctacatgcagctgaagtccctgaccagcgaggacagcgccgtgtactactgcgccagagattacggctacgtgctggactattggggccagggcacaagcgtgacagtgtctagtacgcgtgaggacctgaagaacgtgttcccacctgaggtggccgtgttcgagcctagcgaggccgagatcagccacacccagaaagccaccctcgtgtgcctggctaccggcttctaccccgaccatgtggaactgtcttggtgggtcaacggcaaagaggtgcacagcggcgtgtgtaccgacccccagccactgaaagaacagcccgccctgaacgacagccggtactgcctgagcagcagactgagagtgtccgccaccttctggcagaacccccggaaccacttcagatgccaggtgcagttctacggcctgagcgagaacgacgagtggacccaggacagagccaagcccgtgacccagatcgtgtctgccgaagcctggggcagagccgatgatgtgattaagatccactggcaggaaaagaagtccaacaccatcctgggcagccaggaaggcaacaccatgaagaccaacgacacctacatgaagttcagctggctgaccgtgcccgagaagtccctggacaaagaacacagatgcatcgtgcggcacgaaaacaacaagaacggcgtggaccaggaaatcatcttcccacccatcaagaccgatgtgattacaatggaccccaaggacaactgctccaaggacgccaacgataccctgctgctccagctgaccaacaccagcgcctactacatgtacttgttgctgctgctgaagtccgtggtgtacttcgccatcatcacatgctgcctgctgcggagaaccgccttctgctgcaacggcgagaagtctcgcgccaagagaagcggatctggcgtgaagcagaccctgaatttcgacctgctgaagctggctggcgacgtggaatccaacccaggcccttctagaggccatatgaccgagtacaagcccacggtgcgcctcgccacccgcgacgacgtccccagggccgtacgcaccctcgccgccgcgttcgccgactaccccgccacgcgccacaccgtcgatccggaccgccacatcgagcgggtcaccgagctgcaagaactcttcctcacgcgcgtcgggctcgacatcggcaaggtgtgggtcgcggacgacggcgccgcggtggcggtctggaccacgccggagagcgtcgaagcgggggcggtgttcgccgagatcggcccgcgcatggccgagttgagcggttcccggctggccgcgcagcaacagatggaaggcctcctggcgccgcaccggcccaaggagcccgcgtggttcctggccaccgtcggcgtctcgcccgaccaccagggcaagggtctgggcagcgccgtcgtgctccccggagtggaggcggccgagcgcgccggggtgcccgccttcctggagacctccgcgccccgcaacctccccttctacgagcggctcggcttcaccgtcaccgccgacgtcgaggtgcccgaaggaccgcgcacctggtgcatgacccgcaagcccggtgcctga

SEQ ID NO: 35071 - DNA, 2907 bp, synthetic construct
  source 1..2907: mol_type = other DNA
atggccttaccagtgaccgccttgctcctgccgctggccttgctgctccacgccgccaggccgctcgaggaggacctgaagaacgtgttcccacctgaggtggccgtgttcgagcctagcgaggccgagatcagccacacccagaaagccaccctcgtgtgcctggctaccggcttctaccccgaccatgtggaactgtcttggtgggtcaacggcaaagaggtgcacagcggcgtgtctaccgacccccagccactgaaagaacagcccgccctgaacgacagccggtactgcctgagcagcagactgagagtgtccgccaccttctggcagaacccccggaaccacttcagatgccaggtgcagttctacggcctgagcgagaacgacgagtggacccaggacagagccaagcccgtgacccagatcgtgtctgccgaagcctggggcagagccgatgatgtgattaagatccactggcaggaaaagaagtccaacaccatcctgggcagccaggaaggcaacaccatgaagaccaacgacacctacatgaagttcagctggctgaccgtgcccgagaagtccctggacaaagaacacagatgcatcgtgcggcacgaaaacaacaagaacggcgtggaccaggaaatcatcttcccacccatcaagaccgatgtgattacaatggaccccaaggacaactgctccaaggacgccaacgataccctgctgctccagctgaccaacaccagcgcctactacatgtacttgttgctgctgctgaagtccgtggtgtacttcgccatcatcacatgctgcctgctgcggagaaccgccttctgctgcaacggcgagaagtctagggccaagcgatctggatctggagcaacaaacttctcactactcaaacaagcaggtgacgtggaggagaatcccgggcctactagcatggccttaccagtgaccgccttgctcctgccgctggccttgctgctccacgccgccaggccgcagatcgtgctgacacagagccccgccatcatgtctgttagccctggcgagaaagtgaccatgacctgtagcgccagcagcagcgtgaactacatgcactggttccagcagaagcccggcacaagccctaagctgtgggtgtacagcaccagcaatctggcctctggcgtgccagccagattttctggctctggcagcggcaccagctacagcctgacaatcagcagcatggaagccgaggatgccgccacctactattgtcagcagcggagcatctacccaccttggacatttggcggaggcaccaagctggaaatcaaaggcggaggcggaagtggaggcggaggatctggcggcggaggctctgaagttcagctccagcagagcggccctgagcttgtgaaacctggcgcttccgtgaagatcagctgcaaggccagcggctacagcttcaccggctacaccatgaactgggtcaagcagtcccacggcaagaacctggaatggatcggcctgattaacccctacaacggcggcacctcctacaaccagaagttcaaggccaaggccacactgaccgtggacaagagcagcagcacagcctacatgcagctgaagtccctgaccagcgaggacagcgccgtgtactactgcgccagagattacggctacgtgctggactattggggccagggcacaagcgtgacagtgtctagtacgcgtatccagaaccctgatcctgccgtgtaccagctgcgggatagcaagagcagcgacaagagcgtgtgtctgttcaccgacttcgacagccagaccaacgtgtcccagagcaaggactccgacgtgtacatcaccgataagaccgtgctggacatgcggagcatggacttcaagagcaactccgccgtggcctggtccaacaagtccgatttcgcctgcgccaacgccttcaacaacagcattatccccgaggacacattcttcccaagccccgagagcagcgactccaccgaccacgtgaagcccaaagagacagagaacaccaagcagcccagcaagagctgccacaagcccaaggccatcgtgcacaccgagaaagtgaacatgatgagcctgaccgtgctgggcctgcggatgctgttcgccaaaaccgtggccgtgaacttcctgctgaccgccaagctgttcttcctccgcgccaagagaagcggatctggcgtgaagcagaccctgaatttcgacctgctgaagctggctggcgacgtggaatccaacccaggcccttctagaggccatatgaccgagtacaagcccacggtgcgcctcgccacccgcgacgacgtccccagggccgtacgcaccctcgccgccgcgttcgccgactaccccgccacgcgccacaccgtcgatccggaccgccacatcgagcgggtcaccgagctgcaagaactcttcctcacgcgcgtcgggctcgacatcggcaaggtgtgggtcgcggacgacggcgccgcggtggcggtctggaccacgccggagagcgtcgaagcgggggcggtgttcgccgagatcggcccgcgcatggccgagttgagcggttcccggctggccgcgcagcaacagatggaaggcctcctggcgccgcaccggcccaaggagcccgcgtggttcctggccaccgtcggcgtctcgcccgaccaccagggcaagggtctgggcagcgccgtcgtgctccccggagtggaggcggccgagcgcgccggggtgcccgccttcctggagacctccgcgccccgcaacctccccttctacgagcggctcggcttcaccgtcaccgccgacgtcgaggtgcccgaaggaccgcgcacctggtgcatgacccgcaagcccggtgcctga

SEQ ID NO: 35072 - DNA, 2907 bp, synthetic construct
  source 1..2907: mol_type = other DNA
atggccttaccagtgaccgccttgctcctgccgctggccttgctgctccacgccgccaggccgctcgagatccagaaccctgatcctgccgtgtaccagctgcgggatagcaagagcagcgacaagagcgtgtgtctgttcaccgacttcgacagccagaccaacgtgtcccagagcaaggactccgacgtgtacatcaccgataagaccgtgctggacatgcggagcatggacttcaagagcaactccgccgtggcctggtccaacaagtccgatttcgcctgcgccaacgccttcaacaacagcattatccccgaggacacattcttcccaagccccgagagcagcgactccaccgaccacgtgaagcccaaagagacagagaacaccaagcagcccagcaagagctgccacaagcccaaggccatcgtgcacaccgagaaagtgaacatgatgagcctgaccgtgctgggcctgcggatgctgttcgccaaaaccgtggccgtgaacttcctgctgaccgccaagctgttcttcctcagggccaagcgatctggatctggagcaacaaacttctcactactcaaacaagcaggtgacgtggaggagaatcccgggcctactagcatggccttaccagtgaccgccttgctcctgccgctggccttgctgctccacgccgccaggccgcagatcgtgctgacacagagccccgccatcatgtctgttagccctggcgagaaagtgaccatgacctgtagcgccagcagcagcgtgaactacatgcactggttccagcagaagcccggcacaagccctaagctgtgggtgtacagcaccagcaatctggcctctggcgtgccagccagattttctggctctggcagcggcaccagctacagcctgacaatcagcagcatggaagccgaggatgccgccacctactattgtcagcagcggagcatctacccaccttggacatttggcggaggcaccaagctggaaatcaaaggcggaggcggaagtggaggcggaggatctggcggcggaggctctgaagttcagctccagcagagcggccctgagcttgtgaaacctggcgcttccgtgaagatcagctgcaaggccagcggctacagcttcaccggctacaccatgaactgggtcaagcagtcccacggcaagaacctggaatggatcggcctgattaacccctacaacggcggcacctcctacaaccagaagttcaaggccaaggccacactgaccgtggacaagagcagcagcacagcctacatgcagctgaagtccctgaccagcgaggacagcgccgtgtactactgcgccagagattacggctacgtgctggactattggggccagggcacaagcgtgacagtgtctagtacgcgtgaggacctgaagaacgtgttcccacctgaggtggccgtgttcgagcctagcgaggccgagatcagccacacccagaaagccaccctcgtgtgcctggctaccggcttctaccccgaccatgtggaactgtcttggtgggtcaacggcaaagaggtgcacagcggcgtgtctaccgacccccagccactgaaagaacagcccgccctgaacgacagccggtactgcctgagcagcagactgagagtgtccgccaccttctggcagaacccccggaaccacttcagatgccaggtgcagttctacggcctgagcgagaacgacgagtggacccaggacagagccaagcccgtgacccagatcgtgtctgccgaagcctggggcagagccgatgatgtgattaagatccactggcaggaaaagaagtccaacaccatcctgggcagccaggaaggcaacaccatgaagaccaacgacacctacatgaagttcagctggctgaccgtgcccgagaagtccctggacaaagaacacagatgcatcgtgcggcacgaaaacaacaagaacggcgtggaccaggaaatcatcttcccacccatcaagaccgatgtgattacaatggaccccaaggacaactgctccaaggacgccaacgataccctgctgctccagctgaccaacaccagcgcctactacatgtacttgttgctgctgctgaagtccgtggtgtacttcgccatcatcacatgctgcctgctgcggagaaccgccttctgctgcaacggcgagaagtctcgcgccaagagaagcggatctggcgtgaagcagaccctgaatttcgacctgctgaagctggctggcgacgtggaatccaacccaggcccttctagaggccatatgaccgagtacaagcccacggtgcgcctcgccacccgcgacgacgtccccagggccgtacgcaccctcgccgccgcgttcgccgactaccccgccacgcgccacaccgtcgatccggaccgccacatcgagcgggtcaccgagctgcaagaactcttcctcacgcgcgtcgggctcgacatcggcaaggtgtgggtcgcggacgacggcgccgcggtggcggtctggaccacgccggagagcgtcgaagcgggggcggtgttcgccgagatcggcccgcgcatggccgagttgagcggttcccggctggccgcgcagcaacagatggaaggcctcctggcgccgcaccggcccaaggagcccgcgtggttcctggccaccgtcggcgtctcgcccgaccaccagggcaagggtctgggcagcgccgtcgtgctccccggagtggaggcggccgagcgcgccggggtgcccgccttcctggagacctccgcgccccgcaacctccccttctacgagcggctcggcttcaccgtcaccgccgacgtcgaggtgcccgaaggaccgcgcacctggtgcatgacccgcaagcccggtgcctga

SEQ ID NO: 35073 - DNA, 2601 bp, synthetic construct
  source 1..2601: mol_type = other DNA
atggccttaccagtgaccgccttgctcctgccgctggccttgctgctccacgccgccaggccgctcgaggaggacctgaagaacgtgttcccacctgaggtggccgtgttcgagcctagcaaggccgagatcgcccacacccagaaagccaccctcgtgtgcctggctaccggcttctaccccgaccatgtggaactgtcttggtgggtcaacggcaaagaggtgcacagcggcgtgtgtaccgacccccagccactgaaagaacagcccgccctgaacgacagccggtactgcctgagcagcagactgagagtgtccgccaccttctggcagaacccccggaaccacttcagatgccaggtgcagttctacggcctgagcgagaacgacgagtggacccaggacagagccaagcccgtgacccagatcgtgtctgccgaagcctggggcagagccgattgcggcatcaccagcgccagctaccaccagggcgtgctgagcgccaccatcctgtacgagatcctgctgggcaaggccaccctgtacgccgtgctggtgtctgccctggtgctgatggctatggtcaagcggaaggacagccggggaagggccaagcgatctggatctggagcaacaaacttctcactactcaaacaagcaggtgacgtggaggagaatcccgggcctactagcatggccttaccagtgaccgccttgctcctgccgctggccttgctgctccacgccgccaggccgcagatcgtgctgacacagagccccgccatcatgtctgttagccctggcgagaaagtgaccatgacctgtagcgccagcagcagcgtgaactacatgcactggttccagcagaagcccggcacaagccctaagctgtgggtgtacagcaccagcaatctggcctctggcgtgccagccagattttctggctctggcagcggcaccagctacagcctgacaatcagcagcatggaagccgaggatgccgccacctactattgtcagcagcggagcatctacccaccttggacatttggcggaggcaccaagctggaaatcaaaggcggaggcggaagtggaggcggaggatctggcggcggaggctctgaagttcagctccagcagagcggccctgagcttgtgaaacctggcgcttccgtgaagatcagctgcaaggccagcggctacagcttcaccggctacaccatgaactgggtcaagcagtcccacggcaagaacctggaatggatcggcctgattaacccctacaacggcggcacctcctacaaccagaagttcaaggccaaggccacactgaccgtggacaagagcagcagcacagcctacatgcagctgaagtccctgaccagcgaggacagcgccgtgtactactgcgccagagattacggctacgtgctggactattggggccagggcacaagcgtgacagtgtctagtacgcgtatccagaaccctgatcctgccgtgtaccagctgcgggatagcaagagcagcgacaagagcgtgtgtctgttcaccgacttcgacagccagaccaacgtgtcccagagcaaggactccgacgtgtacatcaccgataagtgcgtgctggacatgcggagcatggacttcaagagcaactccgccgtggcctggtccaacaagtccgatttcgcctgcgccaacgccttcaacaacagcattatccccgaggacacattcttcccaagcagcgacgtgccctgcgacgtgaagctggtggaaaagagcttcgagacagacaccaacctgaacttccagaacctgagcgtgatcggcttcagaatcctgctgctgaaagtggccggctttaacctgctgatgaccctgcggctgtggtccagccgcgccaagagaagcggatctggcgtgaagcagaccctgaatttcgacctgctgaagctggctggcgacgtggaatccaacccaggcccttctagaggccatatgaccgagtacaagcccacggtgcgcctcgccacccgcgacgacgtccccagggccgtacgcaccctcgccgccgcgttcgccgactaccccgccacgcgccacaccgtcgatccggaccgccacatcgagcgggtcaccgagctgcaagaactcttcctcacgcgcgtcgggctcgacatcggcaaggtgtgggtcgcggacgacggcgccgcggtggcggtctggaccacgccggagagcgtcgaagcgggggcggtgttcgccgagatcggcccgcgcatggccgagttgagcggttcccggctggccgcgcagcaacagatggaaggcctcctggcgccgcaccggcccaaggagcccgcgtggttcctggccaccgtcggcgtctcgcccgaccaccagggcaagggtctgggcagcgccgtcgtgctccccggagtggaggcggccgagcgcgccggggtgcccgccttcctggagacctccgcgccccgcaacctccccttctacgagcggctcggcttcaccgtcaccgccgacgtcgaggtgcccgaaggaccgcgcacctggtgcatgacccgcaagcccggtgcctga

SEQ ID NO: 35074 - DNA, 2601 bp, synthetic construct
  source 1..2601: mol_type = other DNA
atggccttaccagtgaccgccttgctcctgccgctggccttgctgctccacgccgccaggccgctcgagatccagaaccctgatcctgccgtgtaccagctgcgggatagcaagagcagcgacaagagcgtgtgtctgttcaccgacttcgacagccagaccaacgtgtcccagagcaaggactccgacgtgtacatcaccgataagtgcgtgctggacatgcggagcatggacttcaagagcaactccgccgtggcctggtccaacaagtccgatttcgcctgcgccaacgccttcaacaacagcattatccccgaggacacattcttcccaagcagcgacgtgccctgcgacgtgaagctggtggaaaagagcttcgagacagacaccaacctgaacttccagaacctgagcgtgatcggcttcagaatcctgctgctgaaagtggccggctttaacctgctgatgaccctgcggctgtggtccagcagggccaagcgatctggatctggagcaacaaacttctcactactcaaacaagcaggtgacgtggaggagaatcccgggcctactagcatggccttaccagtgaccgccttgctcctgccgctggccttgctgctccacgccgccaggccgcagatcgtgctgacacagagccccgccatcatgtctgttagccctggcgagaaagtgaccatgacctgtagcgccagcagcagcgtgaactacatgcactggttccagcagaagcccggcacaagccctaagctgtgggtgtacagcaccagcaatctggcctctggcgtgccagccagattttctggctctggcagcggcaccagctacagcctgacaatcagcagcatggaagccgaggatgccgccacctactattgtcagcagcggagcatctacccaccttggacatttggcggaggcaccaagctggaaatcaaaggcggaggcggaagtggaggcggaggatctggcggcggaggctctgaagttcagctccagcagagcggccctgagcttgtgaaacctggcgcttccgtgaagatcagctgcaaggccagcggctacagcttcaccggctacaccatgaactgggtcaagcagtcccacggcaagaacctggaatggatcggcctgattaacccctacaacggcggcacctcctacaaccagaagttcaaggccaaggccacactgaccgtggacaagagcagcagcacagcctacatgcagctgaagtccctgaccagcgaggacagcgccgtgtactactgcgccagagattacggctacgtgctggactattggggccagggcacaagcgtgacagtgtctagtacgcgtgaggacctgaagaacgtgttcccacctgaggtggccgtgttcgagcctagcaaggccgagatcgcccacacccagaaagccaccctcgtgtgcctggctaccggcttctaccccgaccatgtggaactgtcttggtgggtcaacggcaaagaggtgcacagcggcgtgtgtaccgacccccagccactgaaagaacagcccgccctgaacgacagccggtactgcctgagcagcagactgagagtgtccgccaccttctggcagaacccccggaaccacttcagatgccaggtgcagttctacggcctgagcgagaacgacgagtggacccaggacagagccaagcccgtgacccagatcgtgtctgccgaagcctggggcagagccgattgcggcatcaccagcgccagctaccaccagggcgtgctgagcgccaccatcctgtacgagatcctgctgggcaaggccaccctgtacgccgtgctggtgtctgccctggtgctgatggctatggtcaagcggaaggacagccggggacgcgccaagagaagcggatctggcgtgaagcagaccctgaatttcgacctgctgaagctggctggcgacgtggaatccaacccaggcccttctagaggccatatgaccgagtacaagcccacggtgcgcctcgccacccgcgacgacgtccccagggccgtacgcaccctcgccgccgcgttcgccgactaccccgccacgcgccacaccgtcgatccggaccgccacatcgagcgggtcaccgagctgcaagaactcttcctcacgcgcgtcgggctcgacatcggcaaggtgtgggtcgcggacgacggcgccgcggtggcggtctggaccacgccggagagcgtcgaagcgggggcggtgttcgccgagatcggcccgcgcatggccgagttgagcggttcccggctggccgcgcagcaacagatggaaggcctcctggcgccgcaccggcccaaggagcccgcgtggttcctggccaccgtcggcgtctcgcccgaccaccagggcaagggtctgggcagcgccgtcgtgctccccggagtggaggcggccgagcgcgccggggtgcccgccttcctggagacctccgcgccccgcaacctccccttctacgagcggctcggcttcaccgtcaccgccgacgtcgaggtgcccgaaggaccgcgcacctggtgcatgacccgcaagcccggtgcctga

SEQ ID NO: 35075 - DNA, 2280 bp, synthetic construct
  source 1..2280: mol_type = other DNA
atggccttaccagtgaccgccttgctcctgccgctggccttgctgctccacgccgccaggccgctcgagcagagttttgggttgttggaccctaaattgtgctatctgttggacggaatcctgttcatttacggagtgatcctgaccgcattgttcctgcgggttaagttttccagatccgcagacgcacccgcttaccaacaagggcagaaccaactctacaatgaacttaatttggggcggagggaagagtacgacgttctggacaaaaggaggggacgagatcccgagatgggcggaaagcctcagcgaaggaagaatccgcaagaggggctttataacgaactccagaaagataaaatggcagaagcctatagtgagattgggatgaagggagaaaggaggaggggtaaaggtcacgatgggttgtaccaaggattgagcacagccactaaagatacctatgatgcgctccacatgcaggccctgccgccaagaagggccaagcgatctggatctggagcaacaaacttctcactactcaaacaagcaggtgacgtggaggagaatcccgggcctactagcatggccttaccagtgaccgccttgctcctgccgctggccttgctgctccacgccgccaggccgcagatcgtgctgacacagagccccgccatcatgtctgttagccctggcgagaaagtgaccatgacctgtagcgccagcagcagcgtgaactacatgcactggttccagcagaagcccggcacaagccctaagctgtgggtgtacagcaccagcaatctggcctctggcgtgccagccagattttctggctctggcagcggcaccagctacagcctgacaatcagcagcatggaagccgaggatgccgccacctactattgtcagcagcggagcatctacccaccttggacatttggcggaggcaccaagctggaaatcaaaggcggaggcggaagtggaggcggaggatctggcggcggaggctctgaagttcagctccagcagagcggccctgagcttgtgaaacctggcgcttccgtgaagatcagctgcaaggccagcggctacagcttcaccggctacaccatgaactgggtcaagcagtcccacggcaagaacctggaatggatcggcctgattaacccctacaacggcggcacctcctacaaccagaagttcaaggccaaggccacactgaccgtggacaagagcagcagcacagcctacatgcagctgaagtccctgaccagcgaggacagcgccgtgtactactgcgccagagattacggctacgtgctggactattggggccagggcacaagcgtgacagtgtctagtacgcgtgagctgggagagcctcagctgtgctatatcctggacgccatcctgtttctgtacggcatcgtgctgaccctgctgtactgccggctgaagatccaagtgcggaaggccgccatcaccagctacgagaaatccgacggcgtgtacaccggcctgagcaccagaaatcaagagacatacgagacactgaagcacgaaaagcctccacaacgcgccaagagaagcggatctggcgtgaagcagaccctgaatttcgacctgctgaagctggctggcgacgtggaatccaacccaggcccttctagaggccatatgaccgagtacaagcccacggtgcgcctcgccacccgcgacgacgtccccagggccgtacgcaccctcgccgccgcgttcgccgactaccccgccacgcgccacaccgtcgatccggaccgccacatcgagcgggtcaccgagctgcaagaactcttcctcacgcgcgtcgggctcgacatcggcaaggtgtgggtcgcggacgacggcgccgcggtggcggtctggaccacgccggagagcgtcgaagcgggggcggtgttcgccgagatcggcccgcgcatggccgagttgagcggttcccggctggccgcgcagcaacagatggaaggcctcctggcgccgcaccggcccaaggagcccgcgtggttcctggccaccgtcggcgtctcgcccgaccaccagggcaagggtctgggcagcgccgtcgtgctccccggagtggaggcggccgagcgcgccggggtgcccgccttcctggagacctccgcgccccgcaacctccccttctacgagcggctcggcttcaccgtcaccgccgacgtcgaggtgcccgaaggaccgcgcacctggtgcatgacccgcaagcccggtgcctga

SEQ ID NO: 35076 - DNA, 2913 bp, synthetic construct; identical to SEQ ID NO: 35067
  source 1..2913: mol_type = other DNA

SEQ ID NO: 35077 - DNA, 2913 bp, synthetic construct; identical to SEQ ID NO: 35068
  source 1..2913: mol_type = other DNA

SEQ ID NO: 35078 - DNA, 2910 bp, synthetic construct
  source 1..2910: mol_type = other DNA
atggccttaccagtgaccgccttgctcctgccgctggccttgctgctccacgccgccaggccgctcgaggaggaggacctgaagaacgtgttcccacctgaggtggccgtgttcgagcctagcgaggccgagatcagccacacccagaaagccaccctcgtgtgcctggctaccggcttctaccccgaccatgtggaactgtcttggtgggtcaacggcaaagaggtgcacagcggcgtgtgtaccgacccccagccactgaaagaacagcccgccctgaacgacagccggtactgcctgagcagcagactgagagtgtccgccaccttctggcagaacccccggaaccacttcagatgccaggtgcagttctacggcctgagcgagaacgacgagtggacccaggacagagccaagcccgtgacccagatcgtgtctgccgaagcctggggcagagccgatgatgtgattaagatccactggcaggaaaagaagtccaacaccatcctgggcagccaggaaggcaacaccatgaagaccaacgacacctacatgaagttcagctggctgaccgtgcccgagaagtccctggacaaagaacacagatgcatcgtgcggcacgaaaacaacaagaacggcgtggaccaggaaatcatcttcccacccatcaagaccgatgtgattacaatggaccccaaggacaactgctccaaggacgccaacgataccctgctgctccagctgaccaacaccagcgcctactacatgtacttgttgctgctgctgaagtccgtggtgtacttcgccatcatcacatgctgcctgctgcggagaaccgccttctgctgcaacggcgagaagtctagggccaagcgatctggatctggagcaacaaacttctcactactcaaacaagcaggtgacgtggaggagaatcccgggcctactagcatggccttaccagtgaccgccttgctcctgccgctggccttgctgctccacgccgccaggccgcagatcgtgctgacacagagccccgccatcatgtctgttagccctggcgagaaagtgaccatgacctgtagcgccagcagcagcgtgaactacatgcactggttccagcagaagcccggcacaagccctaagctgtgggtgtacagcaccagcaatctggcctctggcgtgccagccagattttctggctctggcagcggcaccagctacagcctgacaatcagcagcatggaagccgaggatgccgccacctactattgtcagcagcggagcatctacccaccttggacatttggcggaggcaccaagctggaaatcaaaggcggaggcggaagtggaggcggaggatctggcggcggaggctctgaagttcagctccagcagagcggccctgagcttgtgaaacctggcgcttccgtgaagatcagctgcaaggccagcggctacagcttcaccggctacaccatgaactgggtcaagcagtcccacggcaagaacctggaatggatcggcctgattaacccctacaacggcggcacctcctacaaccagaagttcaaggccaaggccacactgaccgtggacaagagcagcagcacagcctacatgcagctgaagtccctgaccagcgaggacagcgccgtgtactactgcgccagagattacggctacgtgctggactattggggccagggcacaagcgtgacagtgtctagtacgcgtatccagaaccctgatcctgccgtgtaccagctgcgggatagcaagagcagcgacaagagcgtgtgtctgttcaccgacttcgacagccagaccaacgtgtcccagagcaaggactccgacgtgtacatcaccgataagtgcgtgctggacatgcggagcatggacttcaagagcaactccgccgtggcctggtccaacaagtccgatttcgcctgcgccaacgccttcaacaacagcattatccccgaggacacattcttcccaagccccgagagcagcgactccaccgaccacgtgaagcccaaagagacagagaacaccaagcagcccagcaagagctgccacaagcccaaggccatcgtgcacaccgagaaagtgaacatgatgagcctgaccgtgctgggcctgcggatgctgttcgccaaaaccgtggccgtgaacttcctgctgaccgccaagctgttcttcctccgcgccaagagaagcggatctggcgtgaagcagaccctgaatttcgacctgctgaagctggctggcgacgtggaatccaacccaggcccttctagaggccatatgaccgagtacaagcccacggtgcgcctcgccacccgcgacgacgtccccagggccgtacgcaccctcgccgccgcgttcgccgactaccccgccacgcgccacaccgtcgatccggaccgccacatcgagcgggtcaccgagctgcaagaactcttcctcacgcgcgtcgggctcgacatcggcaaggtgtgggtcgcggacgacggcgccgcggtggcggtctggaccacgccggagagcgtcgaagcgggggcggtgttcgccgagatcggcccgcgcatggccgagttgagcggttcccggctggccgcgcagcaacagatggaaggcctcctggcgccgcaccggcccaaggagcccgcgtggttcctggccaccgtcggcgtctcgcccgaccaccagggcaagggtctgggcagcgccgtcgtgctccccggagtggaggcggccgagcgcgccggggtgcccgccttcctggagacctccgcgccccgcaacctccccttctacgagcggctcggcttcaccgtcaccgccgacgtcgaggtgcccgaaggaccgcgcacctggtgcatgacccgcaagcccggtgcctga

SEQ ID NO: 35079 - DNA, 2910 bp, synthetic construct
  source 1..2910: mol_type = other DNA
atggccttaccagtgaccgccttgctcctgccgctggccttgctgctccacgccgccaggccgctcgagatccagaaccctgatcctgccgtgtaccagctgcgggatagcaagagcagcgacaagagcgtgtgtctgttcaccgacttcgacagccagaccaacgtgtcccagagcaaggactccgacgtgtacatcaccgataagtgcgtgctggacatgcggagcatggacttcaagagcaactccgccgtggcctggtccaacaagtccgatttcgcctgcgccaacgccttcaacaacagcattatccccgaggacacattcttcccaagccccgagagcagcgactccaccgaccacgtgaagcccaaagagacagagaacaccaagcagcccagcaagagctgccacaagcccaaggccatcgtgcacaccgagaaagtgaacatgatgagcctgaccgtgctgggcctgcggatgctgttcgccaaaaccgtggccgtgaacttcctgctgaccgccaagctgttcttcctcagggccaagcgatctggatctggagcaacaaacttctcactactcaaacaagcaggtgacgtggaggagaatcccgggcctactagcatggccttaccagtgaccgccttgctcctgccgctggccttgctgctccacgccgccaggccgcagatcgtgctgacacagagccccgccatcatgtctgttagccctggcgagaaagtgaccatgacctgtagcgccagcagcagcgtgaactacatgcactggttccagcagaagcccggcacaagccctaagctgtgggtgtacagcaccagcaatctggcctctggcgtgccagccagattttctggctctggcagcggcaccagctacagcctgacaatcagcagcatggaagccgaggatgccgccacctactattgtcagcagcggagcatctacccaccttggacatttggcggaggcaccaagctggaaatcaaaggcggaggcggaagtggaggcggaggatctggcggcggaggctctgaagttcagctccagcagagcggccctgagcttgtgaaacctggcgcttccgtgaagatcagctgcaaggccagcggctacagcttcaccggctacaccatgaactgggtcaagcagtcccacggcaagaacctggaatggatcggcctgattaacccctacaacggcggcacctcctacaaccagaagttcaaggccaaggccacactgaccgtggacaagagcagcagcacagcctacatgcagctgaagtccctgaccagcgaggacagcgccgtgtactactgcgccagagattacggctacgtgctggactattggggccagggcacaagcgtgacagtgtctagtacgcgtgaggaggacctgaagaacgtgttcccacctgaggtggccgtgttcgagcctagcgaggccgagatcagccacacccagaaagccaccctcgtgtgcctggctaccggcttctaccccgaccatgtggaactgtcttggtgggtcaacggcaaagaggtgcacagcggcgtgtgtaccgacccccagccactgaaagaacagcccgccctgaacgacagccggtactgcctgagcagcagactgagagtgtccgccaccttctggcagaacccccggaaccacttcagatgccaggtgcagttctacggcctgagcgagaacgacgagtggacccaggacagagccaagcccgtgacccagatcgtgtctgccgaagcctggggcagagccgatgatgtgattaagatccactggcaggaaaagaagtccaacaccatcctgggcagccaggaaggcaacaccatgaagaccaacgacacctacatgaagttcagctggctgaccgtgcccgagaagtccctggacaaagaacacagatgcatcgtgcggcacgaaaacaacaagaacggcgtggaccaggaaatcatcttcccacccatcaagaccgatgtgattacaatggaccccaaggacaactgctccaaggacgccaacgataccctgctgctccagctgaccaacaccagcgcctactacatgtacttgttgctgctgctgaagtccgtggtgtacttcgccatcatcacatgctgcctgctgcggagaaccgccttctgctgcaacggcgagaagtctcgcgccaagagaagcggatctggcgtgaagcagaccctgaatttcgacctgctgaagctggctggcgacgtggaatccaacccaggcccttctagaggccatatgaccgagtacaagcccacggtgcgcctcgccacccgcgacgacgtccccagggccgtacgcaccctcgccgccgcgttcgccgactaccccgccacgcgccacaccgtcgatccggaccgccacatcgagcgggtcaccgagctgcaagaactcttcctcacgcgcgtcgggctcgacatcggcaaggtgtgggtcgcggacgacggcgccgcggtggcggtctggaccacgccggagagcgtcgaagcgggggcggtgttcgccgagatcggcccgcgcatggccgagttgagcggttcccggctggccgcgcagcaacagatggaaggcctcctggcgccgcaccggcccaaggagcccgcgtggttcctggccaccgtcggcgtctcgcccgaccaccagggcaagggtctgggcagcgccgtcgtgctccccggagtggaggcggccgagcgcgccggggtgcccgccttcctggagacctccgcgccccgcaacctccccttctacgagcggctcggcttcaccgtcaccgccgacgtcgaggtgcccgaaggaccgcgcacctggtgcatgacccgcaagcccggtgcctga

SEQ ID NO: 35080 - DNA, 2601 bp, synthetic construct
  source 1..2601: mol_type = other DNA
atggccttaccagtgaccgccttgctcctgccgctggccttgctgctccacgccgccaggccgctcgaggaggacctgaagaacgtgttcccacctgaggtggccgtgttcgagcctagcgaggccgagatcagccacacccagaaagccaccctcgtgtgcctggctaccggcttctaccccgaccatgtggaactgtcttggtgggtcaacggcaaagaggtgcacagcggcgtgtctaccgacccccagccactgaaagaacagcccgccctgaacgacagccggtactgcctgagcagcagactgagagtgtccgccaccttctggcagaacccccggaaccacttcagatgccaggtgcagttctacggcctgagcgagaacgacgagtggacccaggacagagccaagcccgtgacccagatcgtgtctgccgaagcctggggcagagccgattgcggctttaccagcgagagctaccagcagggcgtgctgagcgccaccaacctgagcgtgatcggcttcagaatcctgctgctgaaagtggccggctttaacctgctgatgaccctgcggctgtggtccagcagggccaagcgatctggatctggagcaacaaacttctcactactcaaacaagcaggtgacgtggaggagaatcccgggcctactagcatggccttaccagtgaccgccttgctcctgccgctggccttgctgctccacgccgccaggccgcagatcgtgctgacacagagccccgccatcatgtctgttagccctggcgagaaagtgaccatgacctgtagcgccagcagcagcgtgaactacatgcactggttccagcagaagcccggcacaagccctaagctgtgggtgtacagcaccagcaatctggcctctggcgtgccagccagattttctggctctggcagcggcaccagctacagcctgacaatcagcagcatggaagccgaggatgccgccacctactattgtcagcagcggagcatctacccaccttggacatttggcggaggcaccaagctggaaatcaaaggcggaggcggaagtggaggcggaggatctggcggcggaggctctgaagttcagctccagcagagcggccctgagcttgtgaaacctggcgcttccgtgaagatcagctgcaaggccagcggctacagcttcaccggctacaccatgaactgggtcaagcagtcccacggcaagaacctggaatggatcggcctgattaacccctacaacggcggcacctcctacaaccagaagttcaaggccaaggccacactgaccgtggacaagagcagcagcacagcctacatgcagctgaagtccctgaccagcgaggacagcgccgtgtactactgcgccagagattacggctacgtgctggactattggggccagggcacaagcgtgacagtgtctagtacgcgtatccagaaccctgatcctgccgtgtaccagctgcgggatagcaagagcagcgacaagagcgtgtgtctgttcaccgacttcgacagccagaccaacgtgtcccagagcaaggactccgacgtgtacatcaccgataagaccgtgctggacatgcggagcatggacttcaagagcaactccgccgtggcctggtccaacaagtccgatttcgcctgcgccaacgccttcaacaacagcattatccccgaggacacattcttcccaagccccgagagcagctgcgacgtgaagctggtggaaaagagcttcgagacagacaccaacctgaacttccagatcctgtacgagatcctgctgggcaaggccaccctgtacgccgtgctggtgtctgccctggtgctgatggctatggtcaagcggaaggacagccggggacgcgccaagagaagcggatctggcgtgaagcagaccctgaatttcgacctgctgaagctggctggcgacgtggaatccaacccaggcccttctagaggccatatgaccgagtacaagcccacggtgcgcctcgccacccgcgacgacgtccccagggccgtacgcaccctcgccgccgcgttcgccgactaccccgccacgcgccacaccgtcgatccggaccgccacatcgagcgggtcaccgagctgcaagaactcttcctcacgcgcgtcgggctcgacatcggcaaggtgtgggtcgcggacgacggcgccgcggtggcggtctggaccacgccggagagcgtcgaagcgggggcggtgttcgccgagatcggcccgcgcatggccgagttgagcggttcccggctggccgcgcagcaacagatggaaggcctcctggcgccgcaccggcccaaggagcccgcgtggttcctggccaccgtcggcgtctcgcccgaccaccagggcaagggtctgggcagcgccgtcgtgctccccggagtggaggcggccgagcgcgccggggtgcccgccttcctggagacctccgcgccccgcaacctccccttctacgagcggctcggcttcaccgtcaccgccgacgtcgaggtgcccgaaggaccgcgcacctggtgcatgacccgcaagcccggtgcctga

SEQ ID NO: 35081 - DNA, 2601 bp, synthetic construct
  source 1..2601: mol_type = other DNA
atggccttaccagtgaccgccttgctcctgccgctggccttgctgctccacgccgccaggccgctcgagatccagaaccctgatcctgccgtgtaccagctgcgggatagcaagagcagcgacaagagcgtgtgtctgttcaccgacttcgacagccagaccaacgtgtcccagagcaaggactccgacgtgtacatcaccgataagaccgtgctggacatgcggagcatggacttcaagagcaactccgccgtggcctggtccaacaagtccgatttcgcctgcgccaacgccttcaacaacagcattatccccgaggacacattcttcccaagccccgagagcagctgcgacgtgaagctggtggaaaagagcttcgagacagacaccaacctgaacttccagatcctgtacgagatcctgctgggcaaggccaccctgtacgccgtgctggtgtctgccctggtgctgatggctatggtcaagcggaaggacagccggggaagggccaagcgatctggatctggagcaacaaacttctcactactcaaacaagcaggtgacgtggaggagaatcccgggcctactagcatggccttaccagtgaccgccttgctcctgccgctggccttgctgctccacgccgccaggccgcagatcgtgctgacacagagccccgccatcatgtctgttagccctggcgagaaagtgaccatgacctgtagcgccagcagcagcgtgaactacatgcactggttccagcagaagcccggcacaagccctaagctgtgggtgtacagcaccagcaatctggcctctggcgtgccagccagattttctggctctggcagcggcaccagctacagcctgacaatcagcagcatggaagccgaggatgccgccacctactattgtcagcagcggagcatctacccaccttggacatttggcggaggcaccaagctggaaatcaaaggcggaggcggaagtggaggcggaggatctggcggcggaggctctgaagttcagctccagcagagcggccctgagcttgtgaaacctggcgcttccgtgaagatcagctgcaaggccagcggctacagcttcaccggctacaccatgaactgggtcaagcagtcccacggcaagaacctggaatggatcggcctgattaacccctacaacggcggcacctcctacaaccagaagttcaaggccaaggccacactgaccgtggacaagagcagcagcacagcctacatgcagctgaagtccctgaccagcgaggacagcgccgtgtactactgcgccagagattacggctacgtgctggactattggggccagggcacaagcgtgacagtgtctagtacgcgtgaggacctgaagaacgtgttcccacctgaggtggccgtgttcgagcctagcgaggccgagatcagccacacccagaaagccaccctcgtgtgcctggctaccggcttctaccccgaccatgtggaactgtcttggtgggtcaacggcaaagaggtgcacagcggcgtgtctaccgacccccagccactgaaagaacagcccgccctgaacgacagccggtactgcctgagcagcagactgagagtgtccgccaccttctggcagaacccccggaaccacttcagatgccaggtgcagttctacggcctgagcgagaacgacgagtggacccaggacagagccaagcccgtgacccagatcgtgtctgccgaagcctggggcagagccgattgcggctttaccagcgagagctaccagcagggcgtgctgagcgccaccaacctgagcgtgatcggcttcagaatcctgctgctgaaagtggccggctttaacctgctgatgaccctgcggctgtggtccagccgcgccaagagaagcggatctggcgtgaagcagaccctgaatttcgacctgctgaagctggctggcgacgtggaatccaacccaggcccttctagaggccatatgaccgagtacaagcccacggtgcgcctcgccacccgcgacgacgtccccagggccgtacgcaccctcgccgccgcgttcgccgactaccccgccacgcgccacaccgtcgatccggaccgccacatcgagcgggtcaccgagctgcaagaactcttcctcacgcgcgtcgggctcgacatcggcaaggtgtgggtcgcggacgacggcgccgcggtggcggtctggaccacgccggagagcgtcgaagcgggggcggtgttcgccgagatcggcccgcgcatggccgagttgagcggttcccggctggccgcgcagcaacagatggaaggcctcctggcgccgcaccggcccaaggagcccgcgtggttcctggccaccgtcggcgtctcgcccgaccaccagggcaagggtctgggcagcgccgtcgtgctccccggagtggaggcggccgagcgcgccggggtgcccgccttcctggagacctccgcgccccgcaacctccccttctacgagcggctcggcttcaccgtcaccgccgacgtcgaggtgcccgaaggaccgcgcacctggtgcatgacccgcaagcccggtgcctga

SEQ ID NO: 35082 - DNA, 2601 bp, synthetic construct
  source 1..2601: mol_type = other DNA
atggccttaccagtgaccgccttgctcctgccgctggccttgctgctccacgccgccaggccgctcgaggaggacctgaagaacgtgttcccacctgaggtggccgtgttcgagcctagcgaggccgagatcagccacacccagaaagccaccctcgtgtgcctggctaccggcttctaccccgaccatgtggaactgtcttggtgggtcaacggcaaagaggtgcacagcggcgtgtgtaccgacccccagccactgaaagaacagcccgccctgaacgacagccggtactgcctgagcagcagactgagagtgtccgccaccttctggcagaacccccggaaccacttcagatgccaggtgcagttctacggcctgagcgagaacgacgagtggacccaggacagagccaagcccgtgacccagatcgtgtctgccgaagcctggggcagagccgattgcgacgtgaagctggtggaaaagagcttcgagacagacaccaacctgaacttccagaacctgagcgtgatcggcttcagaatcctgctgctgaaagtggccggctttaacctgctgatgaccctgcggctgtggtccagcagggccaagcgatctggatctggagcaacaaacttctcactactcaaacaagcaggtgacgtggaggagaatcccgggcctactagcatggccttaccagtgaccgccttgctcctgccgctggccttgctgctccacgccgccaggccgcagatcgtgctgacacagagccccgccatcatgtctgttagccctggcgagaaagtgaccatgacctgtagcgccagcagcagcgtgaactacatgcactggttccagcagaagcccggcacaagccctaagctgtgggtgtacagcaccagcaatctggcctctggcgtgccagccagattttctggctctggcagcggcaccagctacagcctgacaatcagcagcatggaagccgaggatgccgccacctactattgtcagcagcggagcatctacccaccttggacatttggcggaggcaccaagctggaaatcaaaggcggaggcggaagtggaggcggaggatctggcggcggaggctctgaagttcagctccagcagagcggccctgagcttgtgaaacctggcgcttccgtgaagatcagctgcaaggccagcggctacagcttcaccggctacaccatgaactgggtcaagcagtcccacggcaagaacctggaatggatcggcctgattaacccctacaacggcggcacctcctacaaccagaagttcaaggccaaggccacactgaccgtggacaagagcagcagcacagcctacatgcagctgaagtccctgaccagcgaggacagcgccgtgtactactgcgccagagattacggctacgtgctggactattggggccagggcacaagcgtgacagtgtctagtacgcgtatccagaaccctgatcctgccgtgtaccagctgcgggatagcaagagcagcgacaagagcgtgtgtctgttcaccgacttcgacagccagaccaacgtgtcccagagcaaggactccgacgtgtacatcaccgataagtgcgtgctggacatgcggagcatggacttcaagagcaactccgccgtggcctggtccaacaagtccgatttcgcctgcgccaacgccttcaacaacagcattatccccgaggacacattcttcccaagccccgagagcagctgcggctttaccagcgagagctaccagcagggcgtgctgagcgccaccatcctgtacgagatcctgctgggcaaggccaccctgtacgccgtgctggtgtctgccctggtgctgatggctatggtcaagcggaaggacagccggggacgcgccaagagaagcggatctggcgtgaagcagaccctgaatttcgacctgctgaagctggctggcgacgtggaatccaacccaggcccttctagaggccatatgaccgagtacaagcccacggtgcgcctcgccacccgcgacgacgtccccagggccgtacgcaccctcgccgccgcgttcgccgactaccccgccacgcgccacaccgtcgatccggaccgccacatcgagcgggtcaccgagctgcaagaactcttcctcacgcgcgtcgggctcgacatcggcaaggtgtgggtcgcggacgacggcgccgcggtggcggtctggaccacgccggagagcgtcgaagcgggggcggtgttcgccgagatcggcccgcgcatggccgagttgagcggttcccggctggccgcgcagcaacagatggaaggcctcctggcgccgcaccggcccaaggagcccgcgtggttcctggccaccgtcggcgtctcgcccgaccaccagggcaagggtctgggcagcgccgtcgtgctccccggagtggaggcggccgagcgcgccggggtgcccgccttcctggagacctccgcgccccgcaacctccccttctacgagcggctcggcttcaccgtcaccgccgacgtcgaggtgcccgaaggaccgcgcacctggtgcatgacccgcaagcccggtgcctga

SEQ ID NO: 35083 - DNA, 2601 bp, synthetic construct
  source 1..2601: mol_type = other DNA
atggccttaccagtgaccgccttgctcctgccgctggccttgctgctccacgccgccaggccgctcgaggaggacctgaagaacgtgttcccacctgaggtggccgtgttcgagcctagcgaggccgagatcagccacacccagaaagccaccctcgtgtgcctggctaccggcttctaccccgaccatgtggaactgtcttggtgggtcaacggcaaagaggtgcacagcggcgtgtctaccgacccccagccactgaaagaacagcccgccctgaacgacagccggtactgcctgagcagcagactgagagtgtccgccaccttctggcagaacccccggaaccacttcagatgccaggtgcagttctacggcctgagcgagaacgacgagtggacccaggacagagccaagcccgtgacccagatcgtgtctgccgaagcctggggcagagccgattgcgacgtgaagctggtggaaaagagcttcgagacagacaccaacctgaacttccagaacctgagcgtgatcggcttcagaatcctgctgctgaaagtggccggctttaacctgctgatgaccctgcggctgtggtccagcagggccaagcgatctggatctggagcaacaaacttctcactactcaaacaagcaggtgacgtggaggagaatcccgggcctactagcatggccttaccagtgaccgccttgctcctgccgctggccttgctgctccacgccgccaggccgcagatcgtgctgacacagagccccgccatcatgtctgttagccctggcgagaaagtgaccatgacctgtagcgccagcagcagcgtgaactacatgcactggttccagcagaagcccggcacaagccctaagctgtgggtgtacagcaccagcaatctggcctctggcgtgccagccagattttctggctctggcagcggcaccagctacagcctgacaatcagcagcatggaagccgaggatgccgccacctactattgtcagcagcggagcatctacccaccttggacatttggcggaggcaccaagctggaaatcaaaggcggaggcggaagtggaggcggaggatctggcggcggaggctctgaagttcagctccagcagagcggccctgagcttgtgaaacctggcgcttccgtgaagatcagctgcaaggccagcggctacagcttcaccggctacaccatgaactgggtcaagcagtcccacggcaagaacctggaatggatcggcctgattaacccctacaacggcggcacctcctacaaccagaagttcaaggccaaggccacactgaccgtggacaagagcagcagcacagcctacatgcagctgaagtccctgaccagcgaggacagcgccgtgtactactgcgccagagattacggctacgtgctggactattggggccagggcacaagcgtgacagtgtctagtacgcgtatccagaaccctgatcctgccgtgtaccagctgcgggatagcaagagcagcgacaagagcgtgtgtctgttcaccgacttcgacagccagaccaacgtgtcccagagcaaggactccgacgtgtacatcaccgataagaccgtgctggacatgcggagcatggacttcaagagcaactccgccgtggcctggtccaacaagtccgatttcgcctgcgccaacgccttcaacaacagcattatccccgaggacacattcttcccaagccccgagagcagctgcggctttaccagcgagagctaccagcagggcgtgctgagcgccaccatcctgtacgagatcctgctgggcaaggccaccctgtacgccgtgctggtgtctgccctggtgctgatggctatggtcaagcggaaggacagccggggacgcgccaagagaagcggatctggcgtgaagcagaccctgaatttcgacctgctgaagctggctggcgacgtggaatccaacccaggcccttctagaggccatatgaccgagtacaagcccacggtgcgcctcgccacccgcgacgacgtccccagggccgtacgcaccctcgccgccgcgttcgccgactaccccgccacgcgccacaccgtcgatccggaccgccacatcgagcgggtcaccgagctgcaagaactcttcctcacgcgcgtcgggctcgacatcggcaaggtgtgggtcgcggacgacggcgccgcggtggcggtctggaccacgccggagagcgtcgaagcgggggcggtgttcgccgagatcggcccgcgcatggccgagttgagcggttcccggctggccgcgcagcaacagatggaaggcctcctggcgccgcaccggcccaaggagcccgcgtggttcctggccaccgtcggcgtctcgcccgaccaccagggcaagggtctgggcagcgccgtcgtgctccccggagtggaggcggccgagcgcgccggggtgcccgccttcctggagacctccgcgccccgcaacctccccttctacgagcggctcggcttcaccgtcaccgccgacgtcgaggtgcccgaaggaccgcgcacctggtgcatgacccgcaagcccggtgcctga

SEQ ID NO: 35084 - DNA, 2910 bp, synthetic construct
  source 1..2910: mol_type = other DNA
atggccttaccagtgaccgccttgctcctgccgctggccttgctgctccacgccgccaggccgctcgaggaggaggacctgaagaacgtgttcccacctgaggtggccgtgttcgagcctagcgaggccgagatcagccacacccagaaagccaccctcgtgtgcctggctaccggcttctaccccgaccatgtggaactgtcttggtgggtcaacggcaaagaggtgcacagcggcgtgtctaccgacccccagccactgaaagaacagcccgccctgaacgacagccggtactgcctgagcagcagactgagagtgtccgccaccttctggcagaacccccggaaccacttcagatgccaggtgcagttctacggcctgagcgagaacgacgagtggacccaggacagagccaagcccgtgacccagatcgtgtctgccgaagcctggggcagagccgatgatgtgattaagatccactggcaggaaaagaagtccaacaccatcctgggcagccaggaaggcaacaccatgaagaccaacgacacctacatgaagttcagctggctgaccgtgcccgagaagtccctggacaaagaacacagatgcatcgtgcggcacgaaaacaacaagaacggcgtggaccaggaaatcatcttcccacccatcaagaccgatgtgattacaatggaccccaaggacaactgctccaaggacgccaacgataccctgctgctccagctgaccaacaccagcgcctactacatgtacttgttgctgctgctgaagtccgtggtgtacttcgccatcatcacatgctgcctgctgcggagaaccgccttctgctgcaacggcgagaagtctagggccaagcgatctggatctggagcaacaaacttctcactactcaaacaagcaggtgacgtggaggagaatcccgggcctactagcatggccttaccagtgaccgccttgctcctgccgctggccttgctgctccacgccgccaggccgcagatcgtgctgacacagagccccgccatcatgtctgttagccctggcgagaaagtgaccatgacctgtagcgccagcagcagcgtgaactacatgcactggttccagcagaagcccggcacaagccctaagctgtgggtgtacagcaccagcaatctggcctctggcgtgccagccagattttctggctctggcagcggcaccagctacagcctgacaatcagcagcatggaagccgaggatgccgccacctactattgtcagcagcggagcatctacccaccttggacatttggcggaggcaccaagctggaaatcaaaggcggaggcggaagtggaggcggaggatctggcggcggaggctctgaagttcagctccagcagagcggccctgagcttgtgaaacctggcgcttccgtgaagatcagctgcaaggccagcggctacagcttcaccggctacaccatgaactgggtcaagcagtcccacggcaagaacctggaatggatcggcctgattaacccctacaacggcggcacctcctacaaccagaagttcaaggccaaggccacactgaccgtggacaagagcagcagcacagcctacatgcagctgaagtccctgaccagcgaggacagcgccgtgtactactgcgccagagattacggctacgtgctggactattggggccagggcacaagcgtgacagtgtctagtacgcgtatccagaaccctgatcctgccgtgtaccagctgcgggatagcaagagcagcgacaagagcgtgtgtctgttcaccgacttcgacagccagaccaacgtgtcccagagcaaggactccgacgtgtacatcaccgataagaccgtgctggacatgcggagcatggacttcaagagcaactccgccgtggcctggtccaacaagtccgatttcgcctgcgccaacgccttcaacaacagcattatccccgaggacacattcttcccaagccccgagagcagcgactccaccgaccacgtgaagcccaaagagacagagaacaccaagcagcccagcaagagctgccacaagcccaaggccatcgtgcacaccgagaaagtgaacatgatgagcctgaccgtgctgggcctgcggatgctgttcgccaaaaccgtggccgtgaacttcctgctgaccgccaagctgttcttcctccgcgccaagagaagcggatctggcgtgaagcagaccctgaatttcgacctgctgaagctggctggcgacgtggaatccaacccaggcccttctagaggccatatgaccgagtacaagcccacggtgcgcctcgccacccgcgacgacgtccccagggccgtacgcaccctcgccgccgcgttcgccgactaccccgccacgcgccacaccgtcgatccggaccgccacatcgagcgggtcaccgagctgcaagaactcttcctcacgcgcgtcgggctcgacatcggcaaggtgtgggtcgcggacgacggcgccgcggtggcggtctggaccacgccggagagcgtcgaagcgggggcggtgttcgccgagatcggcccgcgcatggccgagttgagcggttcccggctggccgcgcagcaacagatggaaggcctcctggcgccgcaccggcccaaggagcccgcgtggttcctggccaccgtcggcgtctcgcccgaccaccagggcaagggtctgggcagcgccgtcgtgctccccggagtggaggcggccgagcgcgccggggtgcccgccttcctggagacctccgcgccccgcaacctccccttctacgagcggctcggcttcaccgtcaccgccgacgtcgaggtgcccgaaggaccgcgcacctggtgcatgacccgcaagcccggtgcctga

SEQ ID NO: 35085 - DNA, 2601 bp, synthetic construct
  source 1..2601: mol_type = other DNA
atggccttaccagtgaccgccttgctcctgccgctggccttgctgctccacgccgccaggccgctcgaggaggacctgaagaacgtgttcccacctgaggtggccgtgttcgagcctagcgaggccgagatcagccacacccagaaagccaccctcgtgtgcctggctaccggcttctaccccgaccatgtggaactgtcttggtgggtcaacggcaaagaggtgcacagcggcgtgtgtaccgacccccagccactgaaagaacagcccgccctgaacgacagccggtactgcctgagcagcagactgagagtgtccgccaccttctggcagaacccccggaaccacttcagatgccaggtgcagttctacggcctgagcgagaacgacgagtggacccaggacagagccaagcccgtgacccagatcgtgtctgccgaagcctggggcagagccgattgcggctttaccagcgagagctaccagcagggcgtgctgagcgccaccaacctgagcgtgatcggcttcagaatcctgctgctgaaagtggccggctttaacctgctgatgaccctgcggctgtggtccagcagggccaagcgatctggatctggagcaacaaacttctcactactcaaacaagcaggtgacgtggaggagaatcccgggcctactagcatggccttaccagtgaccgccttgctcctgccgctggccttgctgctccacgccgccaggccgcagatcgtgctgacacagagccccgccatcatgtctgttagccctggcgagaaagtgaccatgacctgtagcgccagcagcagcgtgaactacatgcactggttccagcagaagcccggcacaagccctaagctgtgggtgtacagcaccagcaatctggcctctggcgtgccagccagattttctggctctggcagcggcaccagctacagcctgacaatcagcagcatggaagccgaggatgccgccacctactattgtcagcagcggagcatctacccaccttggacatttggcggaggcaccaagctggaaatcaaaggcggaggcggaagtggaggcggaggatctggcggcggaggctctgaagttcagctccagcagagcggccctgagcttgtgaaacctggcgcttccgtgaagatcagctgcaaggccagcggctacagcttcaccggctacaccatgaactgggtcaagcagtcccacggcaagaacctggaatggatcggcctgattaacccctacaacggcggcacctcctacaaccagaagttcaaggccaaggccacactgaccgtggacaagagcagcagcacagcctacatgcagctgaagtccctgaccagcgaggacagcgccgtgtactactgcgccagagattacggctacgtgctggactattggggccagggcacaagcgtgacagtgtctagtacgcgtatccagaaccctgatcctgccgtgtaccagctgcgggatagcaagagcagcgacaagagcgtgtgtctgttcaccgacttcgacagccagaccaacgtgtcccagagcaaggactccgacgtgtacatcaccgataagtgcgtgctggacatgcggagcatggacttcaagagcaactccgccgtggcctggtccaacaagtccgatttcgcctgcgccaacgccttcaacaacagcattatccccgaggacacattcttcccaagccccgagagcagctgcgacgtgaagctggtggaaaagagcttcgagacagacaccaacctgaacttccagatcctgtacgagatcctgctgggcaaggccaccctgtacgccgtgctggtgtctgccctggtgctgatggctatggtcaagcggaaggacagccggggacgcgccaagagaagcggatctggcgtgaagcagaccctgaatttcgacctgctgaagctggctggcgacgtggaatccaacccaggcccttctagaggccatatgaccgagtacaagcccacggtgcgcctcgccacccgcgacgacgtccccagggccgtacgcaccctcgccgccgcgttcgccgactaccccgccacgcgccacaccgtcgatccggaccgccacatcgagcgggtcaccgagctgcaagaactcttcctcacgcgcgtcgggctcgacatcggcaaggtgtgggtcgcggacgacggcgccgcggtggcggtctggaccacgccggagagcgtcgaagcgggggcggtgttcgccgagatcggcccgcgcatggccgagttgagcggttcccggctggccgcgcagcaacagatggaaggcctcctggcgccgcaccggcccaaggagcccgcgtggttcctggccaccgtcggcgtctcgcccgaccaccagggcaagggtctgggcagcgccgtcgtgctccccggagtggaggcggccgagcgcgccggggtgcccgccttcctggagacctccgcgccccgcaacctccccttctacgagcggctcggcttcaccgtcaccgccgacgtcgaggtgcccgaaggaccgcgcacctggtgcatgacccgcaagcccggtgcctga

SEQ ID NO: 35086 - DNA, 2688 bp, synthetic construct
  source 1..2688: mol_type = other DNA
atggccttaccagtgaccgccttgctcctgccgctggccttgctgctccacgccgccaggccgctcgaggaggaggacctgaagaacgtgttcccacctgaggtggccgtgttcgagcctagcgaggccgagatcagccacacccagaaagccaccctcgtgtgcctggctaccggcttctaccccgaccatgtggaactgtcttggtgggtcaacggcaaagaggtgcacagcggcgtgtgtaccgacccccagccactgaaagaacagcccgccctgaacgacagccggtactgcctgagcagcagactgagagtgtccgccaccttctggcagaacccccggaaccacttcagatgccaggtgcagttctacggcctgagcgagaacgacgagtggacccaggacagagccaagcccgtgacccagatcgtgtctgccgaagcctggggcagagccgattgcggctttaccagcgagagctaccagcagggcgtgctgagcgccaccaacctgagcgtgatcggcttcagaatcctgctgctgaaagtggccggctttaacctgctgatgaccctgcggctgtggtccagcagggccaagcgatctggatctggagcaacaaacttctcactactcaaacaagcaggtgacgtggaggagaatcccgggcctactagcatggccttaccagtgaccgccttgctcctgccgctggccttgctgctccacgccgccaggccgcagatcgtgctgacacagagccccgccatcatgtctgttagccctggcgagaaagtgaccatgacctgtagcgccagcagcagcgtgaactacatgcactggttccagcagaagcccggcacaagccctaagctgtgggtgtacagcaccagcaatctggcctctggcgtgccagccagattttctggctctggcagcggcaccagctacagcctgacaatcagcagcatggaagccgaggatgccgccacctactattgtcagcagcggagcatctacccaccttggacatttggcggaggcaccaagctggaaatcaaaggcggaggcggaagtggaggcggaggatctggcggcggaggctctgaagttcagctccagcagagcggccctgagcttgtgaaacctggcgcttccgtgaagatcagctgcaaggccagcggctacagcttcaccggctacaccatgaactgggtcaagcagtcccacggcaagaacctggaatggatcggcctgattaacccctacaacggcggcacctcctacaaccagaagttcaaggccaaggccacactgaccgtggacaagagcagcagcacagcctacatgcagctgaagtccctgaccagcgaggacagcgccgtgtactactgcgccagagattacggctacgtgctggactattggggccagggcacaagcgtgacagtgtctagtacgcgtggacagcctaaggccaatcctaccgtgacactgttccctccaagcagcgaagaactccaggccaacaaggccacacttgtgtgcctgatctccgacttctaccctggggctgtgacagtggcttggaaggccgatggatctcctgtgaaagccggcgtggaaaccaccaagccatccaagcagagcaacaacaaatacgccgccagctcctacctgagcctgacacctgagcagtggaagtcccacagatcctacagctgccaagtgacccacgaaggcagcaccgtggaaaagacagtggcccctacagagtgcagccccatcaagaccgatgtgattacaatggaccccaaggacaactgctccaaggacgccaacgataccctgctgctccagctgaccaacaccagcgcctactacatgtacttgttgctgctgctgaagtccgtggtgtacttcgccatcatcacatgctgcctgctgcggagaaccgccttctgctgcaacggcgagaagtctcgcgccaagagaagcggatctggcgtgaagcagaccctgaatttcgacctgctgaagctggctggcgacgtggaatccaacccaggcccttctagaggccatatgaccgagtacaagcccacggtgcgcctcgccacccgcgacgacgtccccagggccgtacgcaccctcgccgccgcgttcgccgactaccccgccacgcgccacaccgtcgatccggaccgccacatcgagcgggtcaccgagctgcaagaactcttcctcacgcgcgtcgggctcgacatcggcaaggtgtgggtcgcggacgacggcgccgcggtggcggtctggaccacgccggagagcgtcgaagcgggggcggtgttcgccgagatcggcccgcgcatggccgagttgagcggttcccggctggccgcgcagcaacagatggaaggcctcctggcgccgcaccggcccaaggagcccgcgtggttcctggccaccgtcggcgtctcgcccgaccaccagggcaagggtctgggcagcgccgtcgtgctccccggagtggaggcggccgagcgcgccggggtgcccgccttcctggagacctccgcgccccgcaacctccccttctacgagcggctcggcttcaccgtcaccgccgacgtcgaggtgcccgaaggaccgcgcacctggtgcatgacccgcaagcccggtgcctga

SEQ ID NO: 35087 - DNA, 2688 bp, synthetic construct
  source 1..2688: mol_type = other DNA
atggccttaccagtgaccgccttgctcctgccgctggccttgctgctccacgccgccaggccgctcgagggacagcctaaggccaatcctaccgtgacactgttccctccaagcagcgaagaactccaggccaacaaggccacacttgtgtgcctgatctccgacttctaccctggggctgtgacagtggcttggaaggccgatggatctcctgtgaaagccggcgtggaaaccaccaagccatccaagcagagcaacaacaaatacgccgccagctcctacctgagcctgacacctgagcagtggaagtcccacagatcctacagctgccaagtgacccacgaaggcagcaccgtggaaaagacagtggcccctacagagtgcagccccatcaagaccgatgtgattacaatggaccccaaggacaactgctccaaggacgccaacgataccctgctgctccagctgaccaacaccagcgcctactacatgtacttgttgctgctgctgaagtccgtggtgtacttcgccatcatcacatgctgcctgctgcggagaaccgccttctgctgcaacggcgagaagtctagggccaagcgatctggatctggagcaacaaacttctcactactcaaacaagcaggtgacgtggaggagaatcccgggcctactagcatggccttaccagtgaccgccttgctcctgccgctggccttgctgctccacgccgccaggccgcagatcgtgctgacacagagccccgccatcatgtctgttagccctggcgagaaagtgaccatgacctgtagcgccagcagcagcgtgaactacatgcactggttccagcagaagcccggcacaagccctaagctgtgggtgtacagcaccagcaatctggcctctggcgtgccagccagattttctggctctggcagcggcaccagctacagcctgacaatcagcagcatggaagccgaggatgccgccacctactattgtcagcagcggagcatctacccaccttggacatttggcggaggcaccaagctggaaatcaaaggcggaggcggaagtggaggcggaggatctggcggcggaggctctgaagttcagctccagcagagcggccctgagcttgtgaaacctggcgcttccgtgaagatcagctgcaaggccagcggctacagcttcaccggctacaccatgaactgggtcaagcagtcccacggcaagaacctggaatggatcggcctgattaacccctacaacggcggcacctcctacaaccagaagttcaaggccaaggccacactgaccgtggacaagagcagcagcacagcctacatgcagctgaagtccctgaccagcgaggacagcgccgtgtactactgcgccagagattacggctacgtgctggactattggggccagggcacaagcgtgacagtgtctagtacgcgtgaggaggacctgaagaacgtgttcccacctgaggtggccgtgttcgagcctagcgaggccgagatcagccacacccagaaagccaccctcgtgtgcctggctaccggcttctaccccgaccatgtggaactgtcttggtgggtcaacggcaaagaggtgcacagcggcgtgtgtaccgacccccagccactgaaagaacagcccgccctgaacgacagccggtactgcctgagcagcagactgagagtgtccgccaccttctggcagaacccccggaaccacttcagatgccaggtgcagttctacggcctgagcgagaacgacgagtggacccaggacagagccaagcccgtgacccagatcgtgtctgccgaagcctggggcagagccgattgcggctttaccagcgagagctaccagcagggcgtgctgagcgccaccaacctgagcgtgatcggcttcagaatcctgctgctgaaagtggccggctttaacctgctgatgaccctgcggctgtggtccagccgcgccaagagaagcggatctggcgtgaagcagaccctgaatttcgacctgctgaagctggctggcgacgtggaatccaacccaggcccttctagaggccatatgaccgagtacaagcccacggtgcgcctcgccacccgcgacgacgtccccagggccgtacgcaccctcgccgccgcgttcgccgactaccccgccacgcgccacaccgtcgatccggaccgccacatcgagcgggtcaccgagctgcaagaactcttcctcacgcgcgtcgggctcgacatcggcaaggtgtgggtcgcggacgacggcgccgcggtggcggtctggaccacgccggagagcgtcgaagcgggggcggtgttcgccgagatcggcccgcgcatggccgagttgagcggttcccggctggccgcgcagcaacagatggaaggcctcctggcgccgcaccggcccaaggagcccgcgtggttcctggccaccgtcggcgtctcgcccgaccaccagggcaagggtctgggcagcgccgtcgtgctccccggagtggaggcggccgagcgcgccggggtgcccgccttcctggagacctccgcgccccgcaacctccccttctacgagcggctcggcttcaccgtcaccgccgacgtcgaggtgcccgaaggaccgcgcacctggtgcatgacccgcaagcccggtgcctga

SEQ ID NO: 35088 - DNA, 2679 bp, synthetic construct
  source 1..2679: mol_type = other DNA
atggccttaccagtgaccgccttgctcctgccgctggccttgctgctccacgccgccaggccgctcgaggaggcctctacaaagggaccctccgtgtttcctctggctcccagcagcaagtctacaagcggaggaacagccgctctgggctgcctggtcaaggattactttcccgagcctgtgaccgtgtcctggaatagcggagcactgacaagcggcgtgcacacctttccagccgtgctgcaaagcagcggcctgtactctctgagcagcgtggtcacagtgcctagctctagcctgggcacccagacctacatctgcaatgtgaaccacaagcctagcaacaccaaggtggacaagagagtggaacccaagagctgtcccatcaagaccgatgtgattacaatggaccccaaggacaactgctccaaggacgccaacgataccctgctgctccagctgaccaacaccagcgcctactacatgtacttgttgctgctgctgaagtccgtggtgtacttcgccatcatcacatgctgcctgctgcggagaaccgccttctgctgcaacggcgagaagtctagggccaagcgatctggatctggagcaacaaacttctcactactcaaacaagcaggtgacgtggaggagaatcccgggcctactagcatggccttaccagtgaccgccttgctcctgccgctggccttgctgctccacgccgccaggccgcagatcgtgctgacacagagccccgccatcatgtctgttagccctggcgagaaagtgaccatgacctgtagcgccagcagcagcgtgaactacatgcactggttccagcagaagcccggcacaagccctaagctgtgggtgtacagcaccagcaatctggcctctggcgtgccagccagattttctggctctggcagcggcaccagctacagcctgacaatcagcagcatggaagccgaggatgccgccacctactattgtcagcagcggagcatctacccaccttggacatttggcggaggcaccaagctggaaatcaaaggcggaggcggaagtggaggcggaggatctggcggcggaggctctgaagttcagctccagcagagcggccctgagcttgtgaaacctggcgcttccgtgaagatcagctgcaaggccagcggctacagcttcaccggctacaccatgaactgggtcaagcagtcccacggcaagaacctggaatggatcggcctgattaacccctacaacggcggcacctcctacaaccagaagttcaaggccaaggccacactgaccgtggacaagagcagcagcacagcctacatgcagctgaagtccctgaccagcgaggacagcgccgtgtactactgcgccagagattacggctacgtgctggactattggggccagggcacaagcgtgacagtgtctagtacgcgtggacagcctaaggccaatcctaccgtgacactgttccctccaagcagcgaagaactccaggccaacaaggccacacttgtgtgcctgatctccgacttctaccctggggctgtgacagtggcttggaaggccgatggatctcctgtgaaagccggcgtggaaaccaccaagccatccaagcagagcaacaacaaatacgccgccagctcctacctgagcctgacacctgagcagtggaagtcccacagatcctacagctgccaagtgacccacgaaggcagcaccgtggaaaagacagtggcccctacagagtgcagcgaagtgaaaaccgactccaccgaccacgtgaagcccaaagagacagagaacaccaagcagcccagcaagagctgccacaagcccaaggccatcgtgcacaccgagaaagtgaacatgatgagcctgaccgtgctgggcctgcggatgctgttcgccaaaaccgtggccgtgaacttcctgctgaccgccaagctgttcttcctccgcgccaagagaagcggatctggcgtgaagcagaccctgaatttcgacctgctgaagctggctggcgacgtggaatccaacccaggcccttctagaggccatatgaccgagtacaagcccacggtgcgcctcgccacccgcgacgacgtccccagggccgtacgcaccctcgccgccgcgttcgccgactaccccgccacgcgccacaccgtcgatccggaccgccacatcgagcgggtcaccgagctgcaagaactcttcctcacgcgcgtcgggctcgacatcggcaaggtgtgggtcgcggacgacggcgccgcggtggcggtctggaccacgccggagagcgtcgaagcgggggcggtgttcgccgagatcggcccgcgcatggccgagttgagcggttcccggctggccgcgcagcaacagatggaaggcctcctggcgccgcaccggcccaaggagcccgcgtggttcctggccaccgtcggcgtctcgcccgaccaccagggcaagggtctgggcagcgccgtcgtgctccccggagtggaggcggccgagcgcgccggggtgcccgccttcctggagacctccgcgccccgcaacctccccttctacgagcggctcggcttcaccgtcaccgccgacgtcgaggtgcccgaaggaccgcgcacctggtgcatgacccgcaagcccggtgcctga

SEQ ID NO: 35089 - DNA, 2613 bp, synthetic construct
  source 1..2613: mol_type = other DNA
atggccttaccagtgaccgccttgctcctgccgctggccttgctgctccacgccgccaggccgctcgaggaggcctctacaaagggaccctccgtgtttcctctggctcccagcagcaagtctacaagcggaggaacagccgctctgggctgcctggtcaaggattactttcccgagcctgtgaccgtgtcctggaatagcggagcactgacaagcggcgtgcacacctttccagccgtgctgcaaagcagcggcctgtactctctgagcagcgtggtcacagtgcctagctctagcctgggcacccagacctacatctgcaatgtgaaccacaagcctagcaacaccaaggtggacaagagagtggaacccaagagctgtggcagagccgattgcggctttaccagcgagagctaccagcagggcgtgctgagcgccaccatcctgtacgagatcctgctgggcaaggccaccctgtacgccgtgctggtgtctgccctggtgctgatggctatggtcaagcggaaggacagccggggaagggccaagcgatctggatctggagcaacaaacttctcactactcaaacaagcaggtgacgtggaggagaatcccgggcctactagcatggccttaccagtgaccgccttgctcctgccgctggccttgctgctccacgccgccaggccgcagatcgtgctgacacagagccccgccatcatgtctgttagccctggcgagaaagtgaccatgacctgtagcgccagcagcagcgtgaactacatgcactggttccagcagaagcccggcacaagccctaagctgtgggtgtacagcaccagcaatctggcctctggcgtgccagccagattttctggctctggcagcggcaccagctacagcctgacaatcagcagcatggaagccgaggatgccgccacctactattgtcagcagcggagcatctacccaccttggacatttggcggaggcaccaagctggaaatcaaaggcggaggcggaagtggaggcggaggatctggcggcggaggctctgaagttcagctccagcagagcggccctgagcttgtgaaacctggcgcttccgtgaagatcagctgcaaggccagcggctacagcttcaccggctacaccatgaactgggtcaagcagtcccacggcaagaacctggaatggatcggcctgattaacccctacaacggcggcacctcctacaaccagaagttcaaggccaaggccacactgaccgtggacaagagcagcagcacagcctacatgcagctgaagtccctgaccagcgaggacagcgccgtgtactactgcgccagagattacggctacgtgctggactattggggccagggcacaagcgtgacagtgtctagtacgcgtggacagcctaaggccaatcctaccgtgacactgttccctccaagcagcgaagaactccaggccaacaaggccacacttgtgtgcctgatctccgacttctaccctggggctgtgacagtggcttggaaggccgatggatctcctgtgaaagccggcgtggaaaccaccaagccatccaagcagagcaacaacaaatacgccgccagctcctacctgagcctgacacctgagcagtggaagtcccacagatcctacagctgccaagtgacccacgaaggcagcaccgtggaaaagacagtggcccctacagagtgcagcatccccgaggacacattcttcccaagccccgagagcagctgcgacgtgaagctggtggaaaagagcttcgagacagacaccaacctgaacttccagaacctgagcgtgatcggcttcagaatcctgctgctgaaagtggccggctttaacctgctgatgaccctgcggctgtggtccagccgcgccaagagaagcggatctggcgtgaagcagaccctgaatttcgacctgctgaagctggctggcgacgtggaatccaacccaggcccttctagaggccatatgaccgagtacaagcccacggtgcgcctcgccacccgcgacgacgtccccagggccgtacgcaccctcgccgccgcgttcgccgactaccccgccacgcgccacaccgtcgatccggaccgccacatcgagcgggtcaccgagctgcaagaactcttcctcacgcgcgtcgggctcgacatcggcaaggtgtgggtcgcggacgacggcgccgcggtggcggtctggaccacgccggagagcgtcgaagcgggggcggtgttcgccgagatcggcccgcgcatggccgagttgagcggttcccggctggccgcgcagcaacagatggaaggcctcctggcgccgcaccggcccaaggagcccgcgtggttcctggccaccgtcggcgtctcgcccgaccaccagggcaagggtctgggcagcgccgtcgtgctccccggagtggaggcggccgagcgcgccggggtgcccgccttcctggagacctccgcgccccgcaacctccccttctacgagcggctcggcttcaccgtcaccgccgacgtcgaggtgcccgaaggaccgcgcacctggtgcatgacccgcaagcccggtgcctga

SEQ ID NO: 35090 - DNA, 2613 bp, synthetic construct
  source 1..2613: mol_type = other DNA
atggccttaccagtgaccgccttgctcctgccgctggccttgctgctccacgccgccaggccgctcgaggaggcctctacaaagggaccctccgtgtttcctctggctcccagcagcaagtctacaagcggaggaacagccgctctgggctgcctggtcaaggattactttcccgagcctgtgaccgtgtcctggaatagcggagcactgacaagcggcgtgcacacctttccagccgtgctgcaaagcagcggcctgtactctctgagcagcgtggtcacagtgcctagctctagcctgggcacccagacctacatctgcaatgtgaaccacaagcctagcaacaccaaggtggacaagagagtggaacccaagagctgtatccccgaggacacattcttcccaagccccgagagcagctgcgacgtgaagctggtggaaaagagcttcgagacagacaccaacctgaacttccagaacctgagcgtgatcggcttcagaatcctgctgctgaaagtggccggctttaacctgctgatgaccctgcggctgtggtccagcagggccaagcgatctggatctggagcaacaaacttctcactactcaaacaagcaggtgacgtggaggagaatcccgggcctactagcatggccttaccagtgaccgccttgctcctgccgctggccttgctgctccacgccgccaggccgcagatcgtgctgacacagagccccgccatcatgtctgttagccctggcgagaaagtgaccatgacctgtagcgccagcagcagcgtgaactacatgcactggttccagcagaagcccggcacaagccctaagctgtgggtgtacagcaccagcaatctggcctctggcgtgccagccagattttctggctctggcagcggcaccagctacagcctgacaatcagcagcatggaagccgaggatgccgccacctactattgtcagcagcggagcatctacccaccttggacatttggcggaggcaccaagctggaaatcaaaggcggaggcggaagtggaggcggaggatctggcggcggaggctctgaagttcagctccagcagagcggccctgagcttgtgaaacctggcgcttccgtgaagatcagctgcaaggccagcggctacagcttcaccggctacaccatgaactgggtcaagcagtcccacggcaagaacctggaatggatcggcctgattaacccctacaacggcggcacctcctacaaccagaagttcaaggccaaggccacactgaccgtggacaagagcagcagcacagcctacatgcagctgaagtccctgaccagcgaggacagcgccgtgtactactgcgccagagattacggctacgtgctggactattggggccagggcacaagcgtgacagtgtctagtacgcgtggacagcctaaggccaatcctaccgtgacactgttccctccaagcagcgaagaactccaggccaacaaggccacacttgtgtgcctgatctccgacttctaccctggggctgtgacagtggcttggaaggccgatggatctcctgtgaaagccggcgtggaaaccaccaagccatccaagcagagcaacaacaaatacgccgccagctcctacctgagcctgacacctgagcagtggaagtcccacagatcctacagctgccaagtgacccacgaaggcagcaccgtggaaaagacagtggcccctacagagtgcagcggcagagccgattgcggctttaccagcgagagctaccagcagggcgtgctgagcgccaccatcctgtacgagatcctgctgggcaaggccaccctgtacgccgtgctggtgtctgccctggtgctgatggctatggtcaagcggaaggacagccggggacgcgccaagagaagcggatctggcgtgaagcagaccctgaatttcgacctgctgaagctggctggcgacgtggaatccaacccaggcccttctagaggccatatgaccgagtacaagcccacggtgcgcctcgccacccgcgacgacgtccccagggccgtacgcaccctcgccgccgcgttcgccgactaccccgccacgcgccacaccgtcgatccggaccgccacatcgagcgggtcaccgagctgcaagaactcttcctcacgcgcgtcgggctcgacatcggcaaggtgtgggtcgcggacgacggcgccgcggtggcggtctggaccacgccggagagcgtcgaagcgggggcggtgttcgccgagatcggcccgcgcatggccgagttgagcggttcccggctggccgcgcagcaacagatggaaggcctcctggcgccgcaccggcccaaggagcccgcgtggttcctggccaccgtcggcgtctcgcccgaccaccagggcaagggtctgggcagcgccgtcgtgctccccggagtggaggcggccgagcgcgccggggtgcccgccttcctggagacctccgcgccccgcaacctccccttctacgagcggctcggcttcaccgtcaccgccgacgtcgaggtgcccgaaggaccgcgcacctggtgcatgacccgcaagcccggtgcctga

SEQ ID NO: 35091 - DNA, 1851 bp, synthetic construct
  source 1..1851: mol_type = other DNA
atggccttaccagtgaccgccttgctcctgccgctggccttgctgctccacgccgccaggccgcagatcgtgctgacacagagccccgccatcatgtctgttagccctggcgagaaagtgaccatgacctgtagcgccagcagcagcgtgaactacatgcactggttccagcagaagcccggcacaagccctaagctgtgggtgtacagcaccagcaatctggcctctggcgtgccagccagattttctggctctggcagcggcaccagctacagcctgacaatcagcagcatggaagccgaggatgccgccacctactattgtcagcagcggagcatctacccaccttggacatttggcggaggcaccaagctggaaatcaaactcgaggacctgaagaacgtgttcccacctgaggtggccgtgttcgagcctagcgaggccgagatcagccacacccagaaagccaccctcgtgtgcctggctaccggcttctaccccgaccatgtggaactgtcttggtgggtcaacggcaaagaggtgcacagcggcgtgtgtaccgacccccagccactgaaagaacagcccgccctgaacgacagccggtactgcctgagcagcagactgagagtgtccgccaccttctggcagaacccccggaaccacttcagatgccaggtgcagttctacggcctgagcgagaacgacgagtggacccaggacagagccaagcccgtgacccagatcgtgtctgccgaagcctggggcagagccgatagcggctttaccagcgagagctaccagcagggcgtgctgagcgccaccatcctgtacgagatcctgctgggcaaggccaccctgtacgccgtgctggtgtctgccctggtgctgatggctatggtcaagcggaaggacagccggggaagggccaagcgatctggatctggagcaacaaacttctcactactcaaacaagcaggtgacgtggaggagaatcccgggcctactagtatggactggatttggcgcatccttttccttgtcggcgctgctaccggcgcgcattccttcgaagaagttcagctccagcagagcggccctgagcttgtgaaacctggcgcttccgtgaagatcagctgcaaggccagcggctacagcttcaccggctacaccatgaactgggtcaagcagtcccacggcaagaacctggaatggatcggcctgattaacccctacaacggcggcacctcctacaaccagaagttcaaggccaaggccacactgaccgtggacaagagcagcagcacagcctacatgcagctgaagtccctgaccagcgaggacagcgccgtgtactactgcgccagagattacggctacgtgctggactattggggccagggcacaagcgtgacagtgtctagtacgcgtatccagaaccctgatcctgccgtgtaccagctgcgggatagcaagagcagcgacaagagcgtgtgtctgttcaccgacttcgacagccagaccaacgtgtcccagagcaaggactccgacgtgtacatcaccgataagtgcgtgctggacatgcggagcatggacttcaagagcaactccgccgtggcctggtccaacaagtccgatttcgcctgcgccaacgccttcaacaacagcattatccccgaggacacattcttcccaagccccgagagcagcagcgacgtgaagctggtggaaaagagcttcgagacagacaccaacctgaacttccagaacctgagcgtgatcggcttcagaatcctgctgctgaaagtggccggctttaacctgctgatgaccctgcggctgtggtccagc

SEQ ID NO: 35092 - DNA, 2691 bp, synthetic construct
  source 1..2691: mol_type = other DNA
atggccttaccagtgaccgccttgctcctgccgctggccttgctgctccacgccgccaggccggaggttcagctgcttgagtctggcggaggactggttcaacctggcggaagcctgagactgtcttgtgccgcctctggcagaaccttcagcatgggctggtatagacaggcccctggcaagggcctcgaatttgtgtctgccatcacatacagcggcggcagcccttactacgccgattctgtgaagggcagattcaccatcagccgggacaacagcaagaacaccgtgtacctccagatgaacagcctgagagccgaggacaccgccgtgtactactgtgccgccaatccaacctacggcagcgactggaatgccgagaattggggccagggcacactggtcacagtgtctagtggtaccggcggaggcggatctggcggcggaggtagcggtggcggaggatctgaattccagatcgtgctgacacagagccccgccatcatgtctgttagccctggcgagaaagtgaccatgacctgtagcgccagcagcagcgtgaactacatgcactggttccagcagaagcccggcacaagccctaagctgtgggtgtacagcaccagcaatctggcctctggcgtgccagccagattttctggctctggcagcggcaccagctacagcctgacaatcagcagcatggaagccgaggatgccgccacctactattgtcagcagcggagcatctacccaccttggacatttggcggaggcaccaagctggaaatcaaactcgagatccagaaccctgatcctgccgtgtaccagctgcgggatagcaagagcagcgacaagagcgtgtgtctgttcaccgacttcgacagccagaccaacgtgtcccagagcaaggactccgacgtgtacatcaccgataagtgcgtgctggacatgcggagcatggacttcaagagcaactccgccgtggcctggtccaacaagtccgatttcgcctgcgccaacgccttcaacaacagcattatccccgaggacacattcttcccaagcagcgacgtgccctgcgacgtgaagctggtggaaaagagcttcgagacagacaccaacctgaacttccagaacctgagcgtgatcggcttcagaatcctgctgctgaaagtggccggctttaacctgctgatgaccctgcggctgtggtccagccgcgccaagagaagcggatctggcgtgaagcagaccctgaatttcgacctgctgaagctggctggcgacgtggaatccaacccaggccctactagtaccatggactggatttggcgcatccttttccttgtcggcgctgctaccggcacccattccgggcccgaagtgcaactggttgaatccggtggcggcctggtgcaacccggcggatctctcagacttagctgtgccgcctccggcagaaccttcacaatgggatggtacaggcaggctccagggaaagagagagagttcgtcgccgccatctctctgtctcccacactggcctactacgccgactctgtgaaaggccggttcaccatctccagagataatagcaagaacaccgtggtgctgcaaatgaactctctgagagccgaggatacagccctgtactattgtgccgctgaccggaagtccgtgatgagcatcagacccgattactggggacagggcacactggtcacagtgtctagtggatccggcggcggaggatctggcggaggcggatctgggggcggaggctctttcgaagaagttcagctccagcagagcggccctgagcttgtgaaacctggcgcttccgtgaagatcagctgcaaggccagcggctacagcttcaccggctacaccatgaactgggtcaagcagtcccacggcaagaacctggaatggatcggcctgattaacccctacaacggcggcacctcctacaaccagaagttcaaggccaaggccacactgaccgtggacaagagcagcagcacagcctacatgcagctgaagtccctgaccagcgaggacagcgccgtgtactactgcgccagagattacggctacgtgctggactattggggccagggcacaagcgtgacagtgtctagtacgcgtgaggacctgaagaacgtgttcccacctgaggtggccgtgttcgagcctagcaaggccgagatcgcccacacccagaaagccaccctcgtgtgcctggctaccggcttctaccccgaccatgtggaactgtcttggtgggtcaacggcaaagaggtgcacagcggcgtgtgtaccgacccccagccactgaaagaacagcccgccctgaacgacagccggtactgcctgagcagcagactgagagtgtccgccaccttctggcagaacccccggaaccacttcagatgccaggtgcagttctacggcctgagcgagaacgacgagtggacccaggacagagccaagcccgtgacccagatcgtgtctgccgaagcctggggcagagccgattgcggcatcaccagcgccagctaccaccagggcgtgctgagcgccaccatcctgtacgagatcctgctgggcaaggccaccctgtacgccgtgctggtgtctgccctggtgctgatggctatggtcaagcggaaggacagccggggataa

SEQ ID NO: 35093 - DNA, 2691 bp, synthetic construct
  source 1..2691: mol_type = other DNA
atggccttaccagtgaccgccttgctcctgccgctggccttgctgctccacgccgccaggccggaagtgcagctggttgaatctggcggaggactggttcaggctggcggatctctgagactgtcttgtgccgccagcggcagaacctttagcatgggctggtttagacaggcccctggcaaagagagagagttcgtcgccgccatcacatactctggcggcagcccttactacgccgactctgtgaagggcagattcaccatcagccgggacaacgccaagaacaccgtgtacctccagatgaacagcctgaagcctgaggacaccgccgtgtactactgcgccgccaatccaacatacggcagcgactggaacgccgagaattggggccagggaacccaagtgacagtgtctagcggtaccggcggaggcggatctggcggcggaggtagcggtggcggaggatctgaattccagatcgtgctgacacagagccccgccatcatgtctgttagccctggcgagaaagtgaccatgacctgtagcgccagcagcagcgtgaactacatgcactggttccagcagaagcccggcacaagccctaagctgtgggtgtacagcaccagcaatctggcctctggcgtgccagccagattttctggctctggcagcggcaccagctacagcctgacaatcagcagcatggaagccgaggatgccgccacctactattgtcagcagcggagcatctacccaccttggacatttggcggaggcaccaagctggaaatcaaactcgagatccagaaccctgatcctgccgtgtaccagctgcgggatagcaagagcagcgacaagagcgtgtgtctgttcaccgacttcgacagccagaccaacgtgtcccagagcaaggactccgacgtgtacatcaccgataagtgcgtgctggacatgcggagcatggacttcaagagcaactccgccgtggcctggtccaacaagtccgatttcgcctgcgccaacgccttcaacaacagcattatccccgaggacacattcttcccaagcagcgacgtgccctgcgacgtgaagctggtggaaaagagcttcgagacagacaccaacctgaacttccagaacctgagcgtgatcggcttcagaatcctgctgctgaaagtggccggctttaacctgctgatgaccctgcggctgtggtccagccgcgccaagagaagcggatctggcgtgaagcagaccctgaatttcgacctgctgaagctggctggcgacgtggaatccaacccaggccctactagtaccatggactggatttggcgcatccttttccttgtcggcgctgctaccggcgcccattccgggcccgaagtgcaactggttgaatccggtggcggcctggtgcaacccggcggatctctcagacttagctgtgccgcctccggcagaaccttcacaatgggatggtacaggcaggctccagggaaagagagagagttcgtcgccgccatctctctgtctcccacactggcctactacgccgactctgtgaaaggccggttcaccatctccagagataatagcaagaacaccgtggtgctgcaaatgaactctctgagagccgaggatacagccctgtactattgtgccgctgaccggaagtccgtgatgagcatcagacccgattactggggacagggcacactggtcacagtgtctagtggatccggcggcggaggatctggcggaggcggatctgggggcggaggctctttcgaagaagttcagctccagcagagcggccctgagcttgtgaaacctggcgcttccgtgaagatcagctgcaaggccagcggctacagcttcaccggctacaccatgaactgggtcaagcagtcccacggcaagaacctggaatggatcggcctgattaacccctacaacggcggcacctcctacaaccagaagttcaaggccaaggccacactgaccgtggacaagagcagcagcacagcctacatgcagctgaagtccctgaccagcgaggacagcgccgtgtactactgcgccagagattacggctacgtgctggactattggggccagggcacaagcgtgacagtgtctagtacgcgtgaggacctgaagaacgtgttcccacctgaggtggccgtgttcgagcctagcaaggccgagatcgcccacacccagaaagccaccctcgtgtgcctggctaccggcttctaccccgaccatgtggaactgtcttggtgggtcaacggcaaagaggtgcacagcggcgtgtgtaccgacccccagccactgaaagaacagcccgccctgaacgacagccggtactgcctgagcagcagactgagagtgtccgccaccttctggcagaacccccggaaccacttcagatgccaggtgcagttctacggcctgagcgagaacgacgagtggacccaggacagagccaagcccgtgacccagatcgtgtctgccgaagcctggggcagagccgattgcggcatcaccagcgccagctaccaccagggcgtgctgagcgccaccatcctgtacgagatcctgctgggcaaggccaccctgtacgccgtgctggtgtctgccctggtgctgatggctatggtcaagcggaaggacagccggggataa

SEQ ID NO: 35094 - DNA, 2682 bp, synthetic construct
  source 1..2682: mol_type = other DNA
atggccttaccagtgaccgccttgctcctgccgctggccttgctgctccacgccgccaggccggaagtgcagctggttgaatctggcggaggactggttcaggctggcggatctctgagactgtcttgtgccgccagcggcagaacctttagcatgggctggtttagacaggcccctggcaaagagagagagttcgtcgccgccatcacatactctggcggcagcccttactacgccgactctgtgaagggcagattcaccatcagccgggacaacgccaagaacaccgtgtacctccagatgaacagcctgaagcctgaggacaccgccgtgtactactgcgccgccaatccaacatacggcagcgactggaacgccgagaattggggccagggaacccaagtgacagtgtctagcggtaccggcggaggcggatctggcggcggaggtagcggtggcggaggatctgaattccagatcgtgctgacacagagccccgccatcatgtctgttagccctggcgagaaagtgaccatgacctgtagcgccagcagcagcgtgaactacatgcactggttccagcagaagcccggcacaagccctaagctgtgggtgtacagcaccagcaatctggcctctggcgtgccagccagattttctggctctggcagcggcaccagctacagcctgacaatcagcagcatggaagccgaggatgccgccacctactattgtcagcagcggagcatctacccaccttggacatttggcggaggcaccaagctggaaatcaaactcgaggacctgaagaacgtgttcccacctgaggtggccgtgttcgagcctagcgaggccgagatcagccacacccagaaagccaccctcgtgtgcctggctaccggcttctaccccgaccatgtggaactgtcttggtgggtcaacggcaaagaggtgcacagcggcgtgtgtaccgacccccagccactgaaagaacagcccgccctgaacgacagccggtactgcctgagcagcagactgagagtgtccgccaccttctggcagaacccccggaaccacttcagatgccaggtgcagttctacggcctgagcgagaacgacgagtggacccaggacagagccaagcccgtgacccagatcgtgtctgccgaagcctggggcagagccgattgcggctttaccagcgagagctaccagcagggcgtgctgagcgccaccatcctgtacgagatcctgctgggcaaggccaccctgtacgccgtgctggtgtctgccctggtgctgatggctatggtcaagcggaaggacagccggggaagggccaagcgatctggatctggagcaacaaacttctcactactcaaacaagcaggtgacgtggaggagaatcccgggcctactagtgccaccatggactggatttggcgcatccttttccttgtcggcgctgctaccggcgcccattccgggcccgaagtgcaactggttgaatccggtggcggcctggtgcaagcaggcggatctctcagacttagctgtgccgcctccggcagaaccttcacaatgggatggtttaggcaggctccagggaaagagagagagttcgtcgccgccatctctctgtctcccacactggcctactacgccgactctgtgaaaggccggttcaccatctccagagataatgccaagaacaccgtggtgctgcaaatgaactctctgaaacccgaggatacagccctgtactattgtgccgctgaccggaagtccgtgatgagcatcagacccgattactggggacagggcacacaagtcacagtgtcctctggatccggcggcggaggatctggcggaggcggatctgggggcggaggctctttcgaagaagttcagctccagcagagcggccctgagcttgtgaaacctggcgcttccgtgaagatcagctgcaaggccagcggctacagcttcaccggctacaccatgaactgggtcaagcagtcccacggcaagaacctggaatggatcggcctgattaacccctacaacggcggcacctcctacaaccagaagttcaaggccaaggccacactgaccgtggacaagagcagcagcacagcctacatgcagctgaagtccctgaccagcgaggacagcgccgtgtactactgcgccagagattacggctacgtgctggactattggggccagggcacaagcgtgacagtgtctagtacgcgtatccagaaccctgatcctgccgtgtaccagctgcgggatagcaagagcagcgacaagagcgtgtgtctgttcaccgacttcgacagccagaccaacgtgtcccagagcaaggactccgacgtgtacatcaccgataagtgcgtgctggacatgcggagcatggacttcaagagcaactccgccgtggcctggtccaacaagtccgatttcgcctgcgccaacgccttcaacaacagcattatccccgaggacacattcttcccaagccccgagagcagctgcgacgtgaagctggtggaaaagagcttcgagacagacaccaacctgaacttccagaacctgagcgtgatcggcttcagaatcctgctgctgaaagtggccggctttaacctgctgatgaccctgcggctgtggtccagctaa

SEQ ID NO: 35095 - DNA, 2295 bp, synthetic construct
  source 1..2295: mol_type = other DNA
atggccttaccagtgaccgccttgctcctgccgctggccttgctgctccacgccgccaggccggaagtgcagctggttgaatctggcggaggactggttcagcctggcggatctctgagactgagctgtgaagccagcggcttcgccagcgacgattacatcatcggctggttcagacaggcccctggcaaagagagagagggcgtcagctgcatcagctctaagtacgccaacaccgtgtacaccgacagcgtgaagggcagattcagactgagcagaggcaccgccaagaataccgtgtacctccagatgagcgccctgaagcctgaggataccgccgtgtactactgcgctatggacagccgcagagtgacatgccctgagatcagcaccatgcaccggaacttcgattcttggggccagggcacactggtcacagtgtcatctggtaccggcggaggcggatctggcggcggaggtagcggtggcggaggatctgaattccagatcgtgctgacacagagccccgccatcatgtctgttagccctggcgagaaagtgaccatgacctgtagcgccagcagcagcgtgaactacatgcactggttccagcagaagcccggcacaagccctaagctgtgggtgtacagcaccagcaatctggcctctggcgtgccagccagattttctggctctggcagcggcaccagctacagcctgacaatcagcagcatggaagccgaggatgccgccacctactattgtcagcagcggagcatctacccaccttggacatttggcggaggcaccaagctggaaatcaaactcgaggacctgaagaacgtgttcccacctgaggtggccgtgttcgagcctagcaaggccgagatcgcccacacccagaaagccaccctcgtgtgcctggctaccggcttctaccccgaccatgtggaactgtcttggtgggtcaacggcaaagaggtgcacagcggcgtgtgtaccgacccccagccactgaaagaacagcccgccctgaacgacagccggtactgcctgagcagcagactgagagtgtccgccaccttctggcagaacccccggaaccacttcagatgccaggtgcagttctacggcctgagcgagaacgacgagtggacccaggacagagccaagcccgtgacccagatcgtgtctgccgaagcctggggcagagccgattgcggcatcaccagcgccagctaccaccagggcgtgctgagcgccaccatcctgtacgagatcctgctgggcaaggccaccctgtacgccgtgctggtgtctgccctggtgctgatggctatggtcaagcggaaggacagccggggaagggccaagcgatctggatctggagcaacaaacttctcactactcaaacaagcaggtgacgtggaggagaatcccgggcctactagtatggactggatttggcgcatccttttccttgtcggcgctgctaccggcgcgcattccttcgaagaagttcagctccagcagagcggccctgagcttgtgaaacctggcgcttccgtgaagatcagctgcaaggccagcggctacagcttcaccggctacaccatgaactgggtcaagcagtcccacggcaagaacctggaatggatcggcctgattaacccctacaacggcggcacctcctacaaccagaagttcaaggccaaggccacactgaccgtggacaagagcagcagcacagcctacatgcagctgaagtccctgaccagcgaggacagcgccgtgtactactgcgccagagattacggctacgtgctggactattggggccagggcacaagcgtgacagtgtctagtacgcgtatccagaaccctgatcctgccgtgtaccagctgcgggatagcaagagcagcgacaagagcgtgtgtctgttcaccgacttcgacagccagaccaacgtgtcccagagcaaggactccgacgtgtacatcaccgataagtgcgtgctggacatgcggagcatggacttcaagagcaactccgccgtggcctggtccaacaagtccgatttcgcctgcgccaacgccttcaacaacagcattatccccgaggacacattcttcccaagcagcgacgtgccctgcgacgtgaagctggtggaaaagagcttcgagacagacaccaacctgaacttccagaacctgagcgtgatcggcttcagaatcctgctgctgaaagtggccggctttaacctgctgatgaccctgcggctgtggtccagctaa

SEQ ID NO: 35096 - DNA, 2268 bp, synthetic construct
  source 1..2268: mol_type = other DNA
atggccttaccagtgaccgccttgctcctgccgctggccttgctgctccacgccgccaggccgcagatcgtgctgacacagagccccgccatcatgtctgttagccctggcgagaaagtgaccatgacctgtagcgccagcagcagcgtgaactacatgcactggttccagcagaagcccggcacaagccctaagctgtgggtgtacagcaccagcaatctggcctctggcgtgccagccagattttctggctctggcagcggcaccagctacagcctgacaatcagcagcatggaagccgaggatgccgccacctactattgtcagcagcggagcatctacccaccttggacatttggcggaggcaccaagctggaaatcaaactcgaggacctgaagaacgtgttcccacctgaggtggccgtgttcgagcctagcgaggccgagatcagccacacccagaaagccaccctcgtgtgcctggctaccggcttctaccccgaccatgtggaactgtcttggtgggtcaacggcaaagaggtgcacagcggcgtgtgtaccgacccccagccactgaaagaacagcccgccctgaacgacagccggtactgcctgagcagcagactgagagtgtccgccaccttctggcagaacccccggaaccacttcagatgccaggtgcagttctacggcctgagcgagaacgacgagtggacccaggacagagccaagcccgtgacccagatcgtgtctgccgaagcctggggcagagccgattgcggctttaccagcgagagctaccagcagggcgtgctgagcgccaccatcctgtacgagatcctgctgggcaaggccaccctgtacgccgtgctggtgtctgccctggtgctgatggctatggtcaagcggaaggacagccggggaagggccaagcgatctggatctggagcaacaaacttctcactactcaaacaagcaggtgacgtggaggagaatcccgggcctactagtaccatggactggatttggcgcatccttttccttgtcggcgctgctaccggcgcccattccgggcccgaagtgcaactggttgaatccggtggcggcctggtgcaacccggcggatctctcagacttagctgtgccgcctccggcagaaccttcacaatgggatggtacaggcaggctccagggaaagagagagagttcgtcgccgccatctctctgtctcccacactggcctactacgccgactctgtgaaaggccggttcaccatctccagagataatagcaagaacaccgtggtgctgcaaatgaactctctgagagccgaggatacagccctgtactattgtgccgctgaccggaagtccgtgatgagcatcagacccgattactggggacagggcacactggtcacagtgtctagtggatccggcggcggaggatctggcggaggcggatctgggggcggaggctctttcgaagaagttcagctccagcagagcggccctgagcttgtgaaacctggcgcttccgtgaagatcagctgcaaggccagcggctacagcttcaccggctacaccatgaactgggtcaagcagtcccacggcaagaacctggaatggatcggcctgattaacccctacaacggcggcacctcctacaaccagaagttcaaggccaaggccacactgaccgtggacaagagcagcagcacagcctacatgcagctgaagtccctgaccagcgaggacagcgccgtgtactactgcgccagagattacggctacgtgctggactattggggccagggcacaagcgtgacagtgtctagtacgcgtatccagaaccctgatcctgccgtgtaccagctgcgggatagcaagagcagcgacaagagcgtgtgtctgttcaccgacttcgacagccagaccaacgtgtcccagagcaaggactccgacgtgtacatcaccgataagtgcgtgctggacatgcggagcatggacttcaagagcaactccgccgtggcctggtccaacaagtccgatttcgcctgcgccaacgccttcaacaacagcattatccccgaggacacattcttcccaagccccgagagcagctgcgacgtgaagctggtggaaaagagcttcgagacagacaccaacctgaacttccagaacctgagcgtgatcggcttcagaatcctgctgctgaaagtggccggctttaacctgctgatgaccctgcggctgtggtccagctaa

SEQ ID NO: 35097 - DNA, 2286 bp, synthetic construct
  source 1..2286: mol_type = other DNA
atggccttaccagtgaccgccttgctcctgccgctggccttgctgctccacgccgccaggccgcagatcgtgctgacacagagccccgccatcatgtctgttagccctggcgagaaagtgaccatgacctgtagcgccagcagcagcgtgaactacatgcactggttccagcagaagcccggcacaagccctaagctgtgggtgtacagcaccagcaatctggcctctggcgtgccagccagattttctggctctggcagcggcaccagctacagcctgacaatcagcagcatggaagccgaggatgccgccacctactattgtcagcagcggagcatctacccaccttggacatttggcggaggcaccaagctggaaatcaaactcgaggacctgaagaacgtgttcccacctgaggtggccgtgttcgagcctagcgaggccgagatcagccacacccagaaagccaccctcgtgtgcctggctaccggcttctaccccgaccatgtggaactgtcttggtgggtcaacggcaaagaggtgcacagcggcgtgtgtaccgacccccagccactgaaagaacagcccgccctgaacgacagccggtactgcctgagcagcagactgagagtgtccgccaccttctggcagaacccccggaaccacttcagatgccaggtgcagttctacggcctgagcgagaacgacgagtggacccaggacagagccaagcccgtgacccagatcgtgtctgccgaagcctggggcagagccgattgcggctttaccagcgagagctaccagcagggcgtgctgagcgccaccatcctgtacgagatcctgctgggcaaggccaccctgtacgccgtgctggtgtctgccctggtgctgatggctatggtcaagcggaaggacagccggggaagggccaagcgatctggatctggagcaacaaacttctcactactcaaacaagcaggtgacgtggaggagaatcccgggcctactagtaccatggactggatttggcgcatccttttccttgtcggcgctgctaccggcgcccattccgggccccaggtgcagctggttgaatctggcggaggactggttcagcctggcggatctctgagactgtcttgtgccgccagcggcaacatcaacagcagaaactgcatgggctggttcagacaggcccctggcaagggaagagaaggcgtggcagctatcggccaagtgaccggcagaacctactacgtggacagcgtgaagggcagattcaccatcagcctggacaacagcaagaacaccctgtacctccagatgaacagcctgagagccgaggacaccgccgtgtactattgtgctgctgcccctggctgtctgctgtctgcacttagaagcgccgactacagaaactggggccagggcacactggtcaccgtttcttctggatccggcggcggaggatctggcggaggcggatctgggggcggaggctctttcgaagaagttcagctccagcagagcggccctgagcttgtgaaacctggcgcttccgtgaagatcagctgcaaggccagcggctacagcttcaccggctacaccatgaactgggtcaagcagtcccacggcaagaacctggaatggatcggcctgattaacccctacaacggcggcacctcctacaaccagaagttcaaggccaaggccacactgaccgtggacaagagcagcagcacagcctacatgcagctgaagtccctgaccagcgaggacagcgccgtgtactactgcgccagagattacggctacgtgctggactattggggccagggcacaagcgtgacagtgtctagtacgcgtatccagaaccctgatcctgccgtgtaccagctgcgggatagcaagagcagcgacaagagcgtgtgtctgttcaccgacttcgacagccagaccaacgtgtcccagagcaaggactccgacgtgtacatcaccgataagtgcgtgctggacatgcggagcatggacttcaagagcaactccgccgtggcctggtccaacaagtccgatttcgcctgcgccaacgccttcaacaacagcattatccccgaggacacattcttcccaagccccgagagcagctgcgacgtgaagctggtggaaaagagcttcgagacagacaccaacctgaacttccagaacctgagcgtgatcggcttcagaatcctgctgctgaaagtggccggctttaacctgctgatgaccctgcggctgtggtccagc

SEQ ID NO: 35098 - DNA, 2289 bp, synthetic construct
  source 1..2289: mol_type = other DNA
atggccttaccagtgaccgccttgctcctgccgctggccttgctgctccacgccgccaggccgcagatcgtgctgacacagagccccgccatcatgtctgttagccctggcgagaaagtgaccatgacctgtagcgccagcagcagcgtgaactacatgcactggttccagcagaagcccggcacaagccctaagctgtgggtgtacagcaccagcaatctggcctctggcgtgccagccagattttctggctctggcagcggcaccagctacagcctgacaatcagcagcatggaagccgaggatgccgccacctactattgtcagcagcggagcatctacccaccttggacatttggcggaggcaccaagctggaaatcaaactcgaggacctgaagaacgtgttcccacctgaggtggccgtgttcgagcctagcgaggccgagatcagccacacccagaaagccaccctcgtgtgcctggctaccggcttctaccccgaccatgtggaactgtcttggtgggtcaacggcaaagaggtgcacagcggcgtgtgtaccgacccccagccactgaaagaacagcccgccctgaacgacagccggtactgcctgagcagcagactgagagtgtccgccaccttctggcagaacccccggaaccacttcagatgccaggtgcagttctacggcctgagcgagaacgacgagtggacccaggacagagccaagcccgtgacccagatcgtgtctgccgaagcctggggcagagccgattgcggctttaccagcgagagctaccagcagggcgtgctgagcgccaccatcctgtacgagatcctgctgggcaaggccaccctgtacgccgtgctggtgtctgccctggtgctgatggctatggtcaagcggaaggacagccggggaagggccaagcgatctggatctggagcaacaaacttctcactactcaaacaagcaggtgacgtggaggagaatcccgggcctactagtaccatggactggatttggcgcatccttttccttgtcggcgctgctaccggcgcccattccgggccccaggtgcagctggttgaatctggcggaggatctgttcaggctggcggctctctgagactgtcttgtggcgcttccggcaacatcagcagcagaaactgcatgggctggttcagacaggcccctggcaaagagagagaaggcgttgccgccatcggacaagtgaccggcagatcctactacgtggacagcgtgaagggcagattcaccatcagcctggacaacgccaagaacaccctgtacctccagatgaacacactgaagcccgaggacaccgccatgtactactgtgctgctgcccctggctgtctgctgtctgcacttagaagcgccgactacagaaactggggccagggaacccaagtgacagtgtctagtggatccggcggcggaggatctggcggaggcggatctgggggcggaggctctttcgaagaagttcagctccagcagagcggccctgagcttgtgaaacctggcgcttccgtgaagatcagctgcaaggccagcggctacagcttcaccggctacaccatgaactgggtcaagcagtcccacggcaagaacctggaatggatcggcctgattaacccctacaacggcggcacctcctacaaccagaagttcaaggccaaggccacactgaccgtggacaagagcagcagcacagcctacatgcagctgaagtccctgaccagcgaggacagcgccgtgtactactgcgccagagattacggctacgtgctggactattggggccagggcacaagcgtgacagtgtctagtacgcgtatccagaaccctgatcctgccgtgtaccagctgcgggatagcaagagcagcgacaagagcgtgtgtctgttcaccgacttcgacagccagaccaacgtgtcccagagcaaggactccgacgtgtacatcaccgataagtgcgtgctggacatgcggagcatggacttcaagagcaactccgccgtggcctggtccaacaagtccgatttcgcctgcgccaacgccttcaacaacagcattatccccgaggacacattcttcccaagccccgagagcagctgcgacgtgaagctggtggaaaagagcttcgagacagacaccaacctgaacttccagaacctgagcgtgatcggcttcagaatcctgctgctgaaagtggccggctttaacctgctgatgaccctgcggctgtggtccagctaa

SEQ ID NO: 35099 - DNA, 2712 bp, synthetic construct
  source 1..2712: mol_type = other DNA
atggccttaccagtgaccgccttgctcctgccgctggccttgctgctccacgccgccaggccggaagtgcagctggttgaatctggcggaggactggttcaggctggcggatctctgagactgtcttgtgccgccagcggcagaacctttagcatgggctggtttagacaggcccctggcaaagagagagagttcgtcgccgccatcacatactctggcggcagcccttactacgccgactctgtgaagggcagattcaccatcagccgggacaacgccaagaacaccgtgtacctccagatgaacagcctgaagcctgaggacaccgccgtgtactactgcgccgccaatccaacatacggcagcgactggaacgccgagaattggggccagggaacccaagtgacagtgtctagcggtaccggcggaggcggatctggcggcggaggtagcggtggcggaggatctgaattccagatcgtgctgacacagagccccgccatcatgtctgttagccctggcgagaaagtgaccatgacctgtagcgccagcagcagcgtgaactacatgcactggttccagcagaagcccggcacaagccctaagctgtgggtgtacagcaccagcaatctggcctctggcgtgccagccagattttctggctctggcagcggcaccagctacagcctgacaatcagcagcatggaagccgaggatgccgccacctactattgtcagcagcggagcatctacccaccttggacatttggcggaggcaccaagctggaaatcaaactcgagatccagaaccctgatcctgccgtgtaccagctgcgggatagcaagagcagcgacaagagcgtgtgtctgttcaccgacttcgacagccagaccaacgtgtcccagagcaaggactccgacgtgtacatcaccgataagtgcgtgctggacatgcggagcatggacttcaagagcaactccgccgtggcctggtccaacaagtccgatttcgcctgcgccaacgccttcaacaacagcattatccccgaggacacattcttcccaagcagcgacgtgccctgcgacgtgaagctggtggaaaagagcttcgagacagacaccaacctgaacttccagaacctgagcgtgatcggcttcagaatcctgctgctgaaagtggccggctttaacctgctgatgaccctgcggctgtggtccagccgcgccaagagaagcggatctggcgtgaagcagaccctgaatttcgacctgctgaagctggctggcgacgtggaatccaacccaggccctactagtaccatggactggatttggcgcatccttttccttgtcggcgctgctaccggcgcccattccgggccccaggtgcagctggttgaatctggcggaggatctgttcaggctggcggctctctgagactgtcttgtggcgcttccggcaacatcagcagcagaaactgcatgggctggttcagacaggcccctggcaaagagagagaaggcgttgccgccatcggacaagtgaccggcagatcctactacgtggacagcgtgaagggcagattcaccatcagcctggacaacgccaagaacaccctgtacctccagatgaacacactgaagcccgaggacaccgccatgtactactgtgctgctgcccctggctgtctgctgtctgcacttagaagcgccgactacagaaactggggccagggaacccaagtgacagtgtctagtggatccggcggcggaggatctggcggaggcggatctgggggcggaggctctttcgaagaagttcagctccagcagagcggccctgagcttgtgaaacctggcgcttccgtgaagatcagctgcaaggccagcggctacagcttcaccggctacaccatgaactgggtcaagcagtcccacggcaagaacctggaatggatcggcctgattaacccctacaacggcggcacctcctacaaccagaagttcaaggccaaggccacactgaccgtggacaagagcagcagcacagcctacatgcagctgaagtccctgaccagcgaggacagcgccgtgtactactgcgccagagattacggctacgtgctggactattggggccagggcacaagcgtgacagtgtctagtacgcgtgaggacctgaagaacgtgttcccacctgaggtggccgtgttcgagcctagcaaggccgagatcgcccacacccagaaagccaccctcgtgtgcctggctaccggcttctaccccgaccatgtggaactgtcttggtgggtcaacggcaaagaggtgcacagcggcgtgtgtaccgacccccagccactgaaagaacagcccgccctgaacgacagccggtactgcctgagcagcagactgagagtgtccgccaccttctggcagaacccccggaaccacttcagatgccaggtgcagttctacggcctgagcgagaacgacgagtggacccaggacagagccaagcccgtgacccagatcgtgtctgccgaagcctggggcagagccgattgcggcatcaccagcgccagctaccaccagggcgtgctgagcgccaccatcctgtacgagatcctgctgggcaaggccaccctgtacgccgtgctggtgtctgccctggtgctgatggctatggtcaagcggaaggacagccggggataa

SEQ ID NO: 35100 - DNA, 2703 bp, synthetic construct
  source 1..2703: mol_type = other DNA
atggccttaccagtgaccgccttgctcctgccgctggccttgctgctccacgccgccaggccgcaggtgcagctggttgaatctggcggaggatctgttcaggctggcggctctctgagactgtcttgtggcgcttccggcaacatcagcagcagaaactgcatgggctggttcagacaggcccctggcaaagagagagaaggcgttgccgccatcggacaagtgaccggcagatcctactacgtggacagcgtgaagggcagattcaccatcagcctggacaacgccaagaacaccctgtacctccagatgaacacactgaagcccgaggacaccgccatgtactactgtgctgctgcccctggctgtctgctgtctgcacttagaagcgccgactacagaaactggggccagggaacccaagtgacagtgtctagtggtaccggcggaggcggatctggcggcggaggtagcggtggcggaggatctgaattccagatcgtgctgacacagagccccgccatcatgtctgttagccctggcgagaaagtgaccatgacctgtagcgccagcagcagcgtgaactacatgcactggttccagcagaagcccggcacaagccctaagctgtgggtgtacagcaccagcaatctggcctctggcgtgccagccagattttctggctctggcagcggcaccagctacagcctgacaatcagcagcatggaagccgaggatgccgccacctactattgtcagcagcggagcatctacccaccttggacatttggcggaggcaccaagctggaaatcaaactcgaggacctgaagaacgtgttcccacctgaggtggccgtgttcgagcctagcgaggccgagatcagccacacccagaaagccaccctcgtgtgcctggctaccggcttctaccccgaccatgtggaactgtcttggtgggtcaacggcaaagaggtgcacagcggcgtgtgtaccgacccccagccactgaaagaacagcccgccctgaacgacagccggtactgcctgagcagcagactgagagtgtccgccaccttctggcagaacccccggaaccacttcagatgccaggtgcagttctacggcctgagcgagaacgacgagtggacccaggacagagccaagcccgtgacccagatcgtgtctgccgaagcctggggcagagccgattgcggctttaccagcgagagctaccagcagggcgtgctgagcgccaccatcctgtacgagatcctgctgggcaaggccaccctgtacgccgtgctggtgtctgccctggtgctgatggctatggtcaagcggaaggacagccggggaagggccaagcgatctggatctggagcaacaaacttctcactactcaaacaagcaggtgacgtggaggagaatcccgggcctactagtgccaccatggactggatttggcgcatccttttccttgtcggcgctgctaccggcgcccattccgggcccgaagtgcaactggttgaatccggtggcggcctggtgcaagcaggcggatctctcagacttagctgtgccgcctccggcagaaccttcacaatgggatggtttaggcaggctccagggaaagagagagagttcgtcgccgccatctctctgtctcccacactggcctactacgccgactctgtgaaaggccggttcaccatctccagagataatgccaagaacaccgtggtgctgcaaatgaactctctgaaacccgaggatacagccctgtactattgtgccgctgaccggaagtccgtgatgagcatcagacccgattactggggacagggcacacaagtcacagtgtcctctggatccggcggcggaggatctggcggaggcggatctgggggcggaggctctttcgaagaagttcagctccagcagagcggccctgagcttgtgaaacctggcgcttccgtgaagatcagctgcaaggccagcggctacagcttcaccggctacaccatgaactgggtcaagcagtcccacggcaagaacctggaatggatcggcctgattaacccctacaacggcggcacctcctacaaccagaagttcaaggccaaggccacactgaccgtggacaagagcagcagcacagcctacatgcagctgaagtccctgaccagcgaggacagcgccgtgtactactgcgccagagattacggctacgtgctggactattggggccagggcacaagcgtgacagtgtctagtacgcgtatccagaaccctgatcctgccgtgtaccagctgcgggatagcaagagcagcgacaagagcgtgtgtctgttcaccgacttcgacagccagaccaacgtgtcccagagcaaggactccgacgtgtacatcaccgataagtgcgtgctggacatgcggagcatggacttcaagagcaactccgccgtggcctggtccaacaagtccgatttcgcctgcgccaacgccttcaacaacagcattatccccgaggacacattcttcccaagccccgagagcagctgcgacgtgaagctggtggaaaagagcttcgagacagacaccaacctgaacttccagaacctgagcgtgatcggcttcagaatcctgctgctgaaagtggccggctttaacctgctgatgaccctgcggctgtggtccagctaa

SEQ ID NO: 35101 - DNA, 2292 bp, synthetic construct
  source 1..2292: mol_type = other DNA
atggccttaccagtgaccgccttgctcctgccgctggccttgctgctccacgccgccaggccgcaggtgcagctggttgaatctggcggaggatctgttcaggctggcggctctctgagactgtcttgtggcgcttccggcaacatcagcagcagaaactgcatgggctggttcagacaggcccctggcaaagagagagaaggcgttgccgccatcggacaagtgaccggcagatcctactacgtggacagcgtgaagggcagattcaccatcagcctggacaacgccaagaacaccctgtacctccagatgaacacactgaagcccgaggacaccgccatgtactactgtgctgctgcccctggctgtctgctgtctgcacttagaagcgccgactacagaaactggggccagggaacccaagtgacagtgtctagtggtaccggcggaggcggatctggcggcggaggtagcggtggcggaggatctgaattccagatcgtgctgacacagagccccgccatcatgtctgttagccctggcgagaaagtgaccatgacctgtagcgccagcagcagcgtgaactacatgcactggttccagcagaagcccggcacaagccctaagctgtgggtgtacagcaccagcaatctggcctctggcgtgccagccagattttctggctctggcagcggcaccagctacagcctgacaatcagcagcatggaagccgaggatgccgccacctactattgtcagcagcggagcatctacccaccttggacatttggcggaggcaccaagctggaaatcaaactcgaggacctgaagaacgtgttcccacctgaggtggccgtgttcgagcctagcgaggccgagatcagccacacccagaaagccaccctcgtgtgcctggctaccggcttctaccccgaccatgtggaactgtcttggtgggtcaacggcaaagaggtgcacagcggcgtgtgtaccgacccccagccactgaaagaacagcccgccctgaacgacagccggtactgcctgagcagcagactgagagtgtccgccaccttctggcagaacccccggaaccacttcagatgccaggtgcagttctacggcctgagcgagaacgacgagtggacccaggacagagccaagcccgtgacccagatcgtgtctgccgaagcctggggcagagccgattgcggctttaccagcgagagctaccagcagggcgtgctgagcgccaccatcctgtacgagatcctgctgggcaaggccaccctgtacgccgtgctggtgtctgccctggtgctgatggctatggtcaagcggaaggacagccggggaagggccaagcgatctggatctggagcaacaaacttctcactactcaaacaagcaggtgacgtggaggagaatcccgggcctactagtgccaccatggactggatttggcgcatccttttccttgtcggcgctgctaccggcgcccattccttcgaagaagttcagctccagcagagcggccctgagcttgtgaaacctggcgcttccgtgaagatcagctgcaaggccagcggctacagcttcaccggctacaccatgaactgggtcaagcagtcccacggcaagaacctggaatggatcggcctgattaacccctacaacggcggcacctcctacaaccagaagttcaaggccaaggccacactgaccgtggacaagagcagcagcacagcctacatgcagctgaagtccctgaccagcgaggacagcgccgtgtactactgcgccagagattacggctacgtgctggactattggggccagggcacaagcgtgacagtgtctagtacgcgtatccagaaccctgatcctgccgtgtaccagctgcgggatagcaagagcagcgacaagagcgtgtgtctgttcaccgacttcgacagccagaccaacgtgtcccagagcaaggactccgacgtgtacatcaccgataagtgcgtgctggacatgcggagcatggacttcaagagcaactccgccgtggcctggtccaacaagtccgatttcgcctgcgccaacgccttcaacaacagcattatccccgaggacacattcttcccaagccccgagagcagctgcgacgtgaagctggtggaaaagagcttcgagacagacaccaacctgaacttccagaacctgagcgtgatcggcttcagaatcctgctgctgaaagtggccggctttaacctgctgatgaccctgcggctgtggtccagctaa

SEQ ID NO: 35102 - DNA, 2292 bp, synthetic construct
  source 1..2292: mol_type = other DNA
atggccttaccagtgaccgccttgctcctgccgctggccttgctgctccacgccgccaggccgcaagttcagctggtggaaagcggtggtggcgttgtgcaacctggtggaagtctgaggctgagctgtgccgcttctggcctgagctttagcacctacactgtggcctggttcaggcaggctcccggaaagggtcttgaaggcgtggccgccattccttacaccagccagcacatggtgtacacagacagcgtcagaggccggttcaccatcagcagagacaactccaagaatacgctctatctccagatgaactctctgcgcgccgaagatacagccgtgtattactgcgccaccgacagacggcctggcacctctatgctggctatcaacggctacaacagatggggacagggaaccaccgtgaccgtgtcatctggtaccggcggaggcggatctggcggcggaggtagcggtggcggaggatctgaattccagatcgtgctgacacagagccccgccatcatgtctgttagccctggcgagaaagtgaccatgacctgtagcgccagcagcagcgtgaactacatgcactggttccagcagaagcccggcacaagccctaagctgtgggtgtacagcaccagcaatctggcctctggcgtgccagccagattttctggctctggcagcggcaccagctacagcctgacaatcagcagcatggaagccgaggatgccgccacctactattgtcagcagcggagcatctacccaccttggacatttggcggaggcaccaagctggaaatcaaactcgaggacctgaagaacgtgttcccacctgaggtggccgtgttcgagcctagcgaggccgagatcagccacacccagaaagccaccctcgtgtgcctggctaccggcttctaccccgaccatgtggaactgtcttggtgggtcaacggcaaagaggtgcacagcggcgtgtgtaccgacccccagccactgaaagaacagcccgccctgaacgacagccggtactgcctgagcagcagactgagagtgtccgccaccttctggcagaacccccggaaccacttcagatgccaggtgcagttctacggcctgagcgagaacgacgagtggacccaggacagagccaagcccgtgacccagatcgtgtctgccgaagcctggggcagagccgattgcggctttaccagcgagagctaccagcagggcgtgctgagcgccaccatcctgtacgagatcctgctgggcaaggccaccctgtacgccgtgctggtgtctgccctggtgctgatggctatggtcaagcggaaggacagccggggaagggccaagcgatctggatctggagcaacaaacttctcactactcaaacaagcaggtgacgtggaggagaatcccgggcctactagtgccaccatggactggatttggcgcatccttttccttgtcggcgctgctaccggcgcccattccttcgaagaagttcagctccagcagagcggccctgagcttgtgaaacctggcgcttccgtgaagatcagctgcaaggccagcggctacagcttcaccggctacaccatgaactgggtcaagcagtcccacggcaagaacctggaatggatcggcctgattaacccctacaacggcggcacctcctacaaccagaagttcaaggccaaggccacactgaccgtggacaagagcagcagcacagcctacatgcagctgaagtccctgaccagcgaggacagcgccgtgtactactgcgccagagattacggctacgtgctggactattggggccagggcacaagcgtgacagtgtctagtacgcgtatccagaaccctgatcctgccgtgtaccagctgcgggatagcaagagcagcgacaagagcgtgtgtctgttcaccgacttcgacagccagaccaacgtgtcccagagcaaggactccgacgtgtacatcaccgataagtgcgtgctggacatgcggagcatggacttcaagagcaactccgccgtggcctggtccaacaagtccgatttcgcctgcgccaacgccttcaacaacagcattatccccgaggacacattcttcccaagccccgagagcagctgcgacgtgaagctggtggaaaagagcttcgagacagacaccaacctgaacttccagaacctgagcgtgatcggcttcagaatcctgctgctgaaagtggccggctttaacctgctgatgaccctgcggctgtggtccagctaa

SEQ ID NO: 35103 - DNA, 2289 bp, synthetic construct
  source 1..2289: mol_type = other DNA
atggccttaccagtgaccgccttgctcctgccgctggccttgctgctccacgccgccaggccgcagatcgtgctgacacagagccccgccatcatgtctgttagccctggcgagaaagtgaccatgacctgtagcgccagcagcagcgtgaactacatgcactggttccagcagaagcccggcacaagccctaagctgtgggtgtacagcaccagcaatctggcctctggcgtgccagccagattttctggctctggcagcggcaccagctacagcctgacaatcagcagcatggaagccgaggatgccgccacctactattgtcagcagcggagcatctacccaccttggacatttggcggaggcaccaagctggaaatcaaactcgaggacctgaagaacgtgttcccacctgaggtggccgtgttcgagcctagcgaggccgagatcagccacacccagaaagccaccctcgtgtgcctggctaccggcttctaccccgaccatgtggaactgtcttggtgggtcaacggcaaagaggtgcacagcggcgtgtgtaccgacccccagccactgaaagaacagcccgccctgaacgacagccggtactgcctgagcagcagactgagagtgtccgccaccttctggcagaacccccggaaccacttcagatgccaggtgcagttctacggcctgagcgagaacgacgagtggacccaggacagagccaagcccgtgacccagatcgtgtctgccgaagcctggggcagagccgattgcggctttaccagcgagagctaccagcagggcgtgctgagcgccaccatcctgtacgagatcctgctgggcaaggccaccctgtacgccgtgctggtgtctgccctggtgctgatggctatggtcaagcggaaggacagccggggaagggccaagcgatctggatctggagcaacaaacttctcactactcaaacaagcaggtgacgtggaggagaatcccgggcctactagtaccatggactggatttggcgcatccttttccttgtcggcgctgctaccggcgcccattccgggccccaagttcagctggtggaaagcggtggtggcgttgtgcaacctggtggaagtctgaggctgagctgtgccgcttctggcctgagctttagcacctacactgtggcctggttcaggcaggctcccggaaagggtcttgaaggcgtggccgccattccttacaccagccagcacatggtgtacacagacagcgtcagaggccggttcaccatcagcagagacaactccaagaatacgctctatctccagatgaactctctgcgcgccgaagatacagccgtgtattactgcgccaccgacagacggcctggcacctctatgctggctatcaacggctacaacagatggggacagggaaccaccgtgaccgtgtcatctggatccggcggcggaggatctggcggaggcggatctgggggcggaggctctttcgaagaagttcagctccagcagagcggccctgagcttgtgaaacctggcgcttccgtgaagatcagctgcaaggccagcggctacagcttcaccggctacaccatgaactgggtcaagcagtcccacggcaagaacctggaatggatcggcctgattaacccctacaacggcggcacctcctacaaccagaagttcaaggccaaggccacactgaccgtggacaagagcagcagcacagcctacatgcagctgaagtccctgaccagcgaggacagcgccgtgtactactgcgccagagattacggctacgtgctggactattggggccagggcacaagcgtgacagtgtctagtacgcgtatccagaaccctgatcctgccgtgtaccagctgcgggatagcaagagcagcgacaagagcgtgtgtctgttcaccgacttcgacagccagaccaacgtgtcccagagcaaggactccgacgtgtacatcaccgataagtgcgtgctggacatgcggagcatggacttcaagagcaactccgccgtggcctggtccaacaagtccgatttcgcctgcgccaacgccttcaacaacagcattatccccgaggacacattcttcccaagccccgagagcagctgcgacgtgaagctggtggaaaagagcttcgagacagacaccaacctgaacttccagaacctgagcgtgatcggcttcagaatcctgctgctgaaagtggccggctttaacctgctgatgaccctgcggctgtggtccagctaa

SEQ ID NO: 35104 - DNA, 2295 bp, synthetic construct
  source 1..2295: mol_type = other DNA
atggccttaccagtgaccgccttgctcctgccgctggccttgctgctccacgccgccaggccgcagatcgtgctgacacagagccccgccatcatgtctgttagccctggcgagaaagtgaccatgacctgtagcgccagcagcagcgtgaactacatgcactggttccagcagaagcccggcacaagccctaagctgtgggtgtacagcaccagcaatctggcctctggcgtgccagccagattttctggctctggcagcggcaccagctacagcctgacaatcagcagcatggaagccgaggatgccgccacctactattgtcagcagcggagcatctacccaccttggacatttggcggaggcaccaagctggaaatcaaactcgaggacctgaagaacgtgttcccacctgaggtggccgtgttcgagcctagcgaggccgagatcagccacacccagaaagccaccctcgtgtgcctggctaccggcttctaccccgaccatgtggaactgtcttggtgggtcaacggcaaagaggtgcacagcggcgtgtgtaccgacccccagccactgaaagaacagcccgccctgaacgacagccggtactgcctgagcagcagactgagagtgtccgccaccttctggcagaacccccggaaccacttcagatgccaggtgcagttctacggcctgagcgagaacgacgagtggacccaggacagagccaagcccgtgacccagatcgtgtctgccgaagcctggggcagagccgattgcggctttaccagcgagagctaccagcagggcgtgctgagcgccaccatcctgtacgagatcctgctgggcaaggccaccctgtacgccgtgctggtgtctgccctggtgctgatggctatggtcaagcggaaggacagccggggaagggccaagcgatctggatctggagcaacaaacttctcactactcaaacaagcaggtgacgtggaggagaatcccgggcctactagtaccatggactggatttggcgcatccttttccttgtcggcgctgctaccggcgcccattccgggcccgaggtgcagctggttgaatctggcggaggatctgttcaggctggcggctctctgagactgtcttgtgccgccagcggctacacctacagcatcaactgcatgggctggttcagacaggcccctggcaaagagagagaaggcgttgccgccatctctaccggcggaggcagaaccgattaccgggattctgtgaagggcagattcaccatcagccaggacaacgccaagaacaccgtgtacctccagatgaacagcctgaagcctgaggacaccgccatgtactactgtgccggcaagaccacctatcctggctacggatgtggcctgggcagaagcgcctacaattattggggccagggcacccaagtgaccgtgtcatctggatccggcggcggaggatctggcggaggcggatctgggggcggaggctctttcgaagaagttcagctccagcagagcggccctgagcttgtgaaacctggcgcttccgtgaagatcagctgcaaggccagcggctacagcttcaccggctacaccatgaactgggtcaagcagtcccacggcaagaacctggaatggatcggcctgattaacccctacaacggcggcacctcctacaaccagaagttcaaggccaaggccacactgaccgtggacaagagcagcagcacagcctacatgcagctgaagtccctgaccagcgaggacagcgccgtgtactactgcgccagagattacggctacgtgctggactattggggccagggcacaagcgtgacagtgtctagtacgcgtatccagaaccctgatcctgccgtgtaccagctgcgggatagcaagagcagcgacaagagcgtgtgtctgttcaccgacttcgacagccagaccaacgtgtcccagagcaaggactccgacgtgtacatcaccgataagtgcgtgctggacatgcggagcatggacttcaagagcaactccgccgtggcctggtccaacaagtccgatttcgcctgcgccaacgccttcaacaacagcattatccccgaggacacattcttcccaagccccgagagcagctgcgacgtgaagctggtggaaaagagcttcgagacagacaccaacctgaacttccagaacctgagcgtgatcggcttcagaatcctgctgctgaaagtggccggctttaacctgctgatgaccctgcggctgtggtccagctaa

SEQ ID NO: 35105 - DNA, 1851 bp, synthetic construct
  source 1..1851: mol_type = other DNA
atggccttaccagtgaccgccttgctcctgccgctggccttgctgctccacgccgccaggccgcagatcgtgctgacacagagccccgccatcatgtctgttagccctggcgagaaagtgaccatgacctgtagcgccagcagcagcgtgaactacatgcactggttccagcagaagcccggcacaagccctaagctgtgggtgtacagcaccagcaatctggcctctggcgtgccagccagattttctggctctggcagcggcaccagctacagcctgacaatcagcagcatggaagccgaggatgccgccacctactattgtcagcagcggagcatctacccaccttggacatttggcggaggcaccaagctggaaatcaaactcgaggacctgaagcacgtgttcccacctgaggtggccgtgttcgagcctagcgacgccgagatctggcacacccagaaagccaccctcgtgtgcctggctaccggcttctaccccgaccatgtggaactgtcttggtgggtcaacggcaaagaggtgcacagcggcgtgtctaccgacccccagccactgaaagaacagcccgccctgaacgacagccggtactgcctgagcagcagactgagagtgtccgccaccttctggcagaacccccggaaccacttcagatgccaggtgcagttctacggcctgagcgagaacgacgagtggacccaggacagagccaagcccgtgacccagatcgtgtctgccgaagcctggggcagagccgattgcggctttaccagcgagagctaccagcagggcgtgctgagcgccaccatcctgtacgagatcctgctgggcaaggccaccctgtacgccgtgctggtgtctgccctggtgctgatggctatggtcaagcggaaggacagccggggaagggccaagcgatctggatctggagcaacaaacttctcactactcaaacaagcaggtgacgtggaggagaatcccgggcctactagtatggactggatttggcgcatccttttccttgtcggcgctgctaccggcgcgcattccttcgaagaagttcagctccagcagagcggccctgagcttgtgaaacctggcgcttccgtgaagatcagctgcaaggccagcggctacagcttcaccggctacaccatgaactgggtcaagcagtcccacggcaagaacctggaatggatcggcctgattaacccctacaacggcggcacctcctacaaccagaagttcaaggccaaggccacactgaccgtggacaagagcagcagcacagcctacatgcagctgaagtccctgaccagcgaggacagcgccgtgtactactgcgccagagattacggctacgtgctggactattggggccagggcacaagcgtgacagtgtctagtacgcgtatccagaaccctgatcctgccgtgtaccagctgcgggatagcaagagcagcgacaagagcgtgtgtctgttcaccgacttcgacagccagaccaacgtgtcccagagcaaggactccgacgtgtacatcaccgataagaccgtgctggacatgcggagcatggacttcaagagcaactccgccgtggcctggtccagcaagtccgatttcgcctgcgccaacgccttcaacaacagcattatccccgaggacacattcttcccaagccccgagatggcctgcgacgtgaagctggtggaaaagagcttcgagacagacaccaacctgaacttccagaacctgctcgtgatctggctgagaatcctgctgctgaaagtggccggctttaacctgctgatgaccctgcggctgtggtccagc

SEQ ID NO: 35106 - DNA, 1851 bp, synthetic construct
  source 1..1851: mol_type = other DNA
atggccttaccagtgaccgccttgctcctgccgctggccttgctgctccacgccgccaggccgcagatcgtgctgacacagagccccgccatcatgtctgttagccctggcgagaaagtgaccatgacctgtagcgccagcagcagcgtgaactacatgcactggttccagcagaagcccggcacaagccctaagctgtgggtgtacagcaccagcaatctggcctctggcgtgccagccagattttctggctctggcagcggcaccagctacagcctgacaatcagcagcatggaagccgaggatgccgccacctactattgtcagcagcggagcatctacccaccttggacatttggcggaggcaccaagctggaaatcaaactcgaggacctgaagcacgtgttcccacctgaggtggccgtgttcgagcctagcgacgccgagatctggcacacccagaaagccaccctcgtgtgcctggctaccggcttctaccccgaccatgtggaactgtcttggtgggtcaacggcaaagaggtgcacagcggcgtgtctaccgacccccagccactgaaagaacagcccgccctgaacgacagccggtactgcctgagcagcagactgagagtgtccgccaccttctggcagaacccccggaaccacttcagatgccaggtgcagttctacggcctgagcgagaacgacgagtggacccaggacagagccaagcccgtgacccagatcgtgtctgccgaagcctggggcagagccgattgcggctttaccagcgagagctaccagcagggcgtgctgagcgccaccatcctgtacgagatcctgctgggcaaggccaccctgtacgccgtgctggtgtctgccctggtgctgatggctatggtcaagcggaaggacagccggggaagggccaagcgatctggatctggagcaacaaacttctcactactcaaacaagcaggtgacgtggaggagaatcccgggcctactagtatggactggatttggcgcatccttttccttgtcggcgctgctaccggcgcgcattccttcgaagaagttcagctccagcagagcggccctgagcttgtgaaacctggcgcttccgtgaagatcagctgcaaggccagcggctacagcttcaccggctacaccatgaactgggtcaagcagtcccacggcaagaacctggaatggatcggcctgattaacccctacaacggcggcacctcctacaaccagaagttcaaggccaaggccacactgaccgtggacaagagcagcagcacagcctacatgcagctgaagtccctgaccagcgaggacagcgccgtgtactactgcgccagagattacggctacgtgctggactattggggccagggcacaagcgtgacagtgtctagtacgcgtatccagaaccctgatcctgccgtgtaccagctgcgggatagcaagagcagcgacaagagcgtgtgtctgttcaccgacttcgacagccagaccaacgtgtcccagagcaaggactccgacgtgtacatcaccgataagaccgtgctggacatgcggagcatggacttcaagagcaactccgccgtggcctggtccaccaagtccgatttcgcctgcgccaacgccttcaacaacagcattatccccgaggacacattcttcccaagccccgaggtggtgtgcgacgtgaagctggtggaaaagagcttcgagacagacaccaacctgaacttccagaacctggtggtgatcggcgccagaatcctgctgctgaaagtggccggctttaacctgctgatgaccctgcggctgtggtccagc

SEQ ID NO: 35107 - DNA, 1851 bp, synthetic construct
  source 1..1851: mol_type = other DNA
atggccttaccagtgaccgccttgctcctgccgctggccttgctgctccacgccgccaggccgcagatcgtgctgacacagagccccgccatcatgtctgttagccctggcgagaaagtgaccatgacctgtagcgccagcagcagcgtgaactacatgcactggttccagcagaagcccggcacaagccctaagctgtgggtgtacagcaccagcaatctggcctctggcgtgccagccagattttctggctctggcagcggcaccagctacagcctgacaatcagcagcatggaagccgaggatgccgccacctactattgtcagcagcggagcatctacccaccttggacatttggcggaggcaccaagctggaaatcaaactcgaggacctgaagaacgtgttcccacctgaggtggccgtgttcgagcctagcaaggccgagatcagcagaacccagaaagccaccctcgtgtgcctggctaccggcttctaccctcctcatgtggaactgtcttggtgggtcaacggcaaagaggtgcacgacggcgtgtgtaccgacccccagccactgaaagaacagcccgccctgaacgacagccggtactgcctgagcagcagactgagagtgtccgccaccttctggcagaacccccggaaccacttcagatgccaggtgcagttctacggcctgagcgagaacgacgagtggacccaggacagagccaagcccgtgacccagatcgtgtctgccgaagcctggggcagagccgattgcggctttaccagcgagagctaccagcagggcgtgctgagcgccaccatcctgtacgagatcctgctgggcaaggccaccctgtacgccgtgctggtgtctgccctggtgctgatggctatggtcaagcggaaggacagccggggaagggccaagcgatctggatctggagcaacaaacttctcactactcaaacaagcaggtgacgtggaggagaatcccgggcctactagtatggactggatttggcgcatccttttccttgtcggcgctgctaccggcgcgcattccttcgaagaagttcagctccagcagagcggccctgagcttgtgaaacctggcgcttccgtgaagatcagctgcaaggccagcggctacagcttcaccggctacaccatgaactgggtcaagcagtcccacggcaagaacctggaatggatcggcctgattaacccctacaacggcggcacctcctacaaccagaagttcaaggccaaggccacactgaccgtggacaagagcagcagcacagcctacatgcagctgaagtccctgaccagcgaggacagcgccgtgtactactgcgccagagattacggctacgtgctggactattggggccagggcacaagcgtgacagtgtctagtacgcgtatccagaaccctgatcctgccgtgtaccagctgcgggatagcaagagcagcgacaagttcgtgtgtctgttcaccgacttcgacagccagatcaacgtgtcccagagcaaggactccgacgtgtacatcaccgataagtgcgtgctggacatgcggagcatggacttcaagagcaactccgccgtggcctggtccaacaagtccgatttcacctgcgccaacgccttcaacaacagcattatccccgaggacacattcttcccaagccccgagagcagctgcgacgtgaagctggtggaaaagagcttcgagacagacaccaacctgaacttccagaacctgagcgtgatcggcttcagaatcctgctgctgaaagtggccggctttaacctgctgatgaccctgcggctgtggtccagc

SEQ ID NO: 35108 - DNA, 2277 bp, synthetic construct
  source 1..2277: mol_type = other DNA
atggccttaccagtgaccgccttgctcctgccgctggccttgctgctccacgccgccaggccgcagatcgtgctgacacagagccccgccatcatgtctgttagccctggcgagaaagtgaccatgacctgtagcgccagcagcagcgtgaactacatgcactggttccagcagaagcccggcacaagccctaagctgtgggtgtacagcaccagcaatctggcctctggcgtgccagccagattttctggctctggcagcggcaccagctacagcctgacaatcagcagcatggaagccgaggatgccgccacctactattgtcagcagcggagcatctacccaccttggacatttggcggaggcaccaagctggaaatcaaactcgaggacctgaagaacgtgttcccacctgaggtggccgtgttcgagcctagcgaggccgagatcagccacacccagaaagccaccctcgtgtgcctggctaccggcttctaccccgaccatgtggaactgtcttggtgggtcaacggcaaagaggtgcacagcggcgtgtgtaccgacccccagccactgaaagaacagcccgccctgaacgacagccggtactgcctgagcagcagactgagagtgtccgccaccttctggcagaacccccggaaccacttcagatgccaggtgcagttctacggcctgagcgagaacgacgagtggacccaggacagagccaagcccgtgacccagatcgtgtctgccgaagcctggggcagagccgattgcggctttaccagcgagagctaccagcagggcgtgctgagcgccaccatcctgtacgagatcctgctgggcaaggccaccctgtacgccgtgctggtgtctgccctggtgctgatggctatggtcaagcggaaggacagccggggaagggccaagcgatctggatctggagcaacaaacttctcactactcaaacaagcaggtgacgtggaggagaatcccgggcctactagtaccatggactggatttggcgcatccttttccttgtcggcgctgctaccggcgcccattccgggccccaggtgcagctccaagaaagcggacccggactggttaagccctctcagaccctgtctctgacctgcacagttagcggagccagcattaccacaggcgagtattattggaattggtttcggcagccaccaggcaaggggcttgagtggatgggtgctattgctgcctctggcagcaccacctactctcccagctttgagagcagaacctccatcagccgggacacctccaaaaaccagttctctctgaagctgtcctccgtgaccgctgctgacaccgccgtctattattgtggccggtctttcggcgtggcagctgtgaccacaggacagaacagaggccagggaacacttgtgaccgtgtcctctggatccggcggcggaggatctggcggaggcggatctgggggcggaggctctttcgaagaagttcagctccagcagagcggccctgagcttgtgaaacctggcgcttccgtgaagatcagctgcaaggccagcggctacagcttcaccggctacaccatgaactgggtcaagcagtcccacggcaagaacctggaatggatcggcctgattaacccctacaacggcggcacctcctacaaccagaagttcaaggccaaggccacactgaccgtggacaagagcagcagcacagcctacatgcagctgaagtccctgaccagcgaggacagcgccgtgtactactgcgccagagattacggctacgtgctggactattggggccagggcacaagcgtgacagtgtctagtacgcgtatccagaaccctgatcctgccgtgtaccagctgcgggatagcaagagcagcgacaagagcgtgtgtctgttcaccgacttcgacagccagaccaacgtgtcccagagcaaggactccgacgtgtacatcaccgataagtgcgtgctggacatgcggagcatggacttcaagagcaactccgccgtggcctggtccaacaagtccgatttcgcctgcgccaacgccttcaacaacagcattatccccgaggacacattcttcccaagccccgagagcagctgcgacgtgaagctggtggaaaagagcttcgagacagacaccaacctgaacttccagaacctgagcgtgatcggcttcagaatcctgctgctgaaagtggccggctttaacctgctgatgaccctgcggctgtggtccagc

SEQ ID NO: 35109 - DNA, 2700 bp, synthetic construct
  source 1..2700: mol_type = other DNA
atggccttaccagtgaccgccttgctcctgccgctggccttgctgctccacgccgccaggccgcaggttcagctgcaagagtctggccctggcctggtcaagcctagccaaacactgagcctgacctgtaccgtgtctggcggctctatcaccaccggcgagttctactggaactggttcagacagcctcctggcaaaggactggaatggatgggagccattgccgccagcggcagcacaacatacagccctagcttcgagagccggaccagcatcagcagagacaccagcaagaatcagttcagcctgaagctgagcagcgtgacagccgccgatacagccgtgtattactgcggcagatcctttggagtggccgccgtgacaaccggccagaatagaggacagggcaccctggtcacagtgtctagcggtaccggcggaggcggatctggcggcggaggtagcggtggcggaggatctgaattccagatcgtgctgacacagagccccgccatcatgtctgttagccctggcgagaaagtgaccatgacctgtagcgccagcagcagcgtgaactacatgcactggttccagcagaagcccggcacaagccctaagctgtgggtgtacagcaccagcaatctggcctctggcgtgccagccagattttctggctctggcagcggcaccagctacagcctgacaatcagcagcatggaagccgaggatgccgccacctactattgtcagcagcggagcatctacccaccttggacatttggcggaggcaccaagctggaaatcaaactcgagatccagaaccctgatcctgccgtgtaccagctgcgggatagcaagagcagcgacaagagcgtgtgtctgttcaccgacttcgacagccagaccaacgtgtcccagagcaaggactccgacgtgtacatcaccgataagtgcgtgctggacatgcggagcatggacttcaagagcaactccgccgtggcctggtccaacaagtccgatttcgcctgcgccaacgccttcaacaacagcattatccccgaggacacattcttcccaagcagcgacgtgccctgcgacgtgaagctggtggaaaagagcttcgagacagacaccaacctgaacttccagaacctgagcgtgatcggcttcagaatcctgctgctgaaagtggccggctttaacctgctgatgaccctgcggctgtggtccagccgcgccaagagaagcggatctggcgtgaagcagaccctgaatttcgacctgctgaagctggctggcgacgtggaatccaacccaggccctactagtaccatggactggatttggcgcatccttttccttgtcggcgctgctaccggcgcccattccgggcccgaagtgcaactggttgaatccggtggcggcctggtgcaacccggcggatctctcagacttagctgtgccgcctccggcagaaccttcacaatgggatggtacaggcaggctccagggaaagagagagagttcgtcgccgccatctctctgtctcccacactggcctactacgccgactctgtgaaaggccggttcaccatctccagagataatagcaagaacaccgtggtgctgcaaatgaactctctgagagccgaggatacagccctgtactattgtgccgctgaccggaagtccgtgatgagcatcagacccgattactggggacagggcacactggtcacagtgtctagtggatccggcggcggaggatctggcggaggcggatctgggggcggaggctctttcgaagaagttcagctccagcagagcggccctgagcttgtgaaacctggcgcttccgtgaagatcagctgcaaggccagcggctacagcttcaccggctacaccatgaactgggtcaagcagtcccacggcaagaacctggaatggatcggcctgattaacccctacaacggcggcacctcctacaaccagaagttcaaggccaaggccacactgaccgtggacaagagcagcagcacagcctacatgcagctgaagtccctgaccagcgaggacagcgccgtgtactactgcgccagagattacggctacgtgctggactattggggccagggcacaagcgtgacagtgtctagtacgcgtgaggacctgaagaacgtgttcccacctgaggtggccgtgttcgagcctagcaaggccgagatcgcccacacccagaaagccaccctcgtgtgcctggctaccggcttctaccccgaccatgtggaactgtcttggtgggtcaacggcaaagaggtgcacagcggcgtgtgtaccgacccccagccactgaaagaacagcccgccctgaacgacagccggtactgcctgagcagcagactgagagtgtccgccaccttctggcagaacccccggaaccacttcagatgccaggtgcagttctacggcctgagcgagaacgacgagtggacccaggacagagccaagcccgtgacccagatcgtgtctgccgaagcctggggcagagccgattgcggcatcaccagcgccagctaccaccagggcgtgctgagcgccaccatcctgtacgagatcctgctgggcaaggccaccctgtacgccgtgctggtgtctgccctggtgctgatggctatggtcaagcggaaggacagccgggga

SEQ ID NO: 35110 - DNA, 2289 bp, synthetic construct
  source 1..2289: mol_type = other DNA
atggccttaccagtgaccgccttgctcctgccgctggccttgctgctccacgccgccaggccgcaggttcagctgcaagagtctggccctggcctggtcaagcctagccaaacactgagcctgacctgtaccgtgtctggcggctctatcaccaccggcgagttctactggaactggttcagacagcctcctggcaaaggactggaatggatgggagccattgccgccagcggcagcacaacatacagccctagcttcgagagccggaccagcatcagcagagacaccagcaagaatcagttcagcctgaagctgagcagcgtgacagccgccgatacagccgtgtattactgcggcagatcctttggagtggccgccgtgacaaccggccagaatagaggacagggcaccctggtcacagtgtctagcggtaccggcggaggcggatctggcggcggaggtagcggtggcggaggatctgaattccagatcgtgctgacacagagccccgccatcatgtctgttagccctggcgagaaagtgaccatgacctgtagcgccagcagcagcgtgaactacatgcactggttccagcagaagcccggcacaagccctaagctgtgggtgtacagcaccagcaatctggcctctggcgtgccagccagattttctggctctggcagcggcaccagctacagcctgacaatcagcagcatggaagccgaggatgccgccacctactattgtcagcagcggagcatctacccaccttggacatttggcggaggcaccaagctggaaatcaaactcgagatccagaaccctgatcctgccgtgtaccagctgcgggatagcaagagcagcgacaagagcgtgtgtctgttcaccgacttcgacagccagaccaacgtgtcccagagcaaggactccgacgtgtacatcaccgataagtgcgtgctggacatgcggagcatggacttcaagagcaactccgccgtggcctggtccaacaagtccgatttcgcctgcgccaacgccttcaacaacagcattatccccgaggacacattcttcccaagcagcgacgtgccctgcgacgtgaagctggtggaaaagagcttcgagacagacaccaacctgaacttccagaacctgagcgtgatcggcttcagaatcctgctgctgaaagtggccggctttaacctgctgatgaccctgcggctgtggtccagccgcgccaagagaagcggatctggcgtgaagcagaccctgaatttcgacctgctgaagctggctggcgacgtggaatccaacccaggccctactagtaccatggactggatttggcgcatccttttccttgtcggcgctgctaccggcgcccattccttcgaagaagttcagctccagcagagcggccctgagcttgtgaaacctggcgcttccgtgaagatcagctgcaaggccagcggctacagcttcaccggctacaccatgaactgggtcaagcagtcccacggcaagaacctggaatggatcggcctgattaacccctacaacggcggcacctcctacaaccagaagttcaaggccaaggccacactgaccgtggacaagagcagcagcacagcctacatgcagctgaagtccctgaccagcgaggacagcgccgtgtactactgcgccagagattacggctacgtgctggactattggggccagggcacaagcgtgacagtgtctagtacgcgtgaggacctgaagaacgtgttcccacctgaggtggccgtgttcgagcctagcaaggccgagatcgcccacacccagaaagccaccctcgtgtgcctggctaccggcttctaccccgaccatgtggaactgtcttggtgggtcaacggcaaagaggtgcacagcggcgtgtgtaccgacccccagccactgaaagaacagcccgccctgaacgacagccggtactgcctgagcagcagactgagagtgtccgccaccttctggcagaacccccggaaccacttcagatgccaggtgcagttctacggcctgagcgagaacgacgagtggacccaggacagagccaagcccgtgacccagatcgtgtctgccgaagcctggggcagagccgattgcggcatcaccagcgccagctaccaccagggcgtgctgagcgccaccatcctgtacgagatcctgctgggcaaggccaccctgtacgccgtgctggtgtctgccctggtgctgatggctatggtcaagcggaaggacagccgggga

SEQ ID NO: 35111 - DNA, 2688 bp, synthetic construct
  source 1..2688: mol_type = other DNA
atggccttaccagtgaccgccttgctcctgccgctggccttgctgctccacgccgccaggccggaagtgcagctggttgaatctggcggaggactggttcaggctggcggatctctgagactgtcttgtgccgccagcggcagaacctttagcatgggctggtttagacaggcccctggcaaagagagagagttcgtcgccgccatcacatactctggcggcagcccttactacgccgactctgtgaagggcagattcaccatcagccgggacaacgccaagaacaccgtgtacctccagatgaacagcctgaagcctgaggacaccgccgtgtactactgcgccgccaatccaacatacggcagcgactggaacgccgagaattggggccagggaacccaagtgacagtgtctagcggtaccggcggaggcggatctggcggcggaggtagcggtggcggaggatctgaattccagatcgtgctgacacagagccccgccatcatgtctgttagccctggcgagaaagtgaccatgacctgtagcgccagcagcagcgtgaactacatgcactggttccagcagaagcccggcacaagccctaagctgtgggtgtacagcaccagcaatctggcctctggcgtgccagccagattttctggctctggcagcggcaccagctacagcctgacaatcagcagcatggaagccgaggatgccgccacctactattgtcagcagcggagcatctacccaccttggacatttggcggaggcaccaagctggaaatcaaactcgaggacctgaagaacgtgttcccacctgaggtggccgtgttcgagcctagcgaggccgagatcagccacacccagaaagccaccctcgtgtgcctggctaccggcttctaccccgaccatgtggaactgtcttggtgggtcaacggcaaagaggtgcacagcggcgtgtgtaccgacccccagccactgaaagaacagcccgccctgaacgacagccggtactgcctgagcagcagactgagagtgtccgccaccttctggcagaacccccggaaccacttcagatgccaggtgcagttctacggcctgagcgagaacgacgagtggacccaggacagagccaagcccgtgacccagatcgtgtctgccgaagcctggggcagagccgattgcggctttaccagcgagagctaccagcagggcgtgctgagcgccaccatcctgtacgagatcctgctgggcaaggccaccctgtacgccgtgctggtgtctgccctggtgctgatggctatggtcaagcggaaggacagccggggaagggccaagcgatctggatctggagcaacaaacttctcactactcaaacaagcaggtgacgtggaggagaatcccgggcctactagtaccatggactggatttggcgcatccttttccttgtcggcgctgctaccggcgcccattccgggccccaggtgcagctccaagaaagcggacccggactggttaagccctctcagaccctgtctctgacctgcacagttagcggagccagcattaccacaggcgagtattattggaattggtttcggcagccaccaggcaaggggcttgagtggatgggtgctattgctgcctctggcagcaccacctactctcccagctttgagagcagaacctccatcagccgggacacctccaaaaaccagttctctctgaagctgtcctccgtgaccgctgctgacaccgccgtctattattgtggccggtctttcggcgtggcagctgtgaccacaggacagaacagaggccagggaacacttgtgaccgtgtcctctggatccggcggcggaggatctggcggaggcggatctgggggcggaggctctttcgaagaagttcagctccagcagagcggccctgagcttgtgaaacctggcgcttccgtgaagatcagctgcaaggccagcggctacagcttcaccggctacaccatgaactgggtcaagcagtcccacggcaagaacctggaatggatcggcctgattaacccctacaacggcggcacctcctacaaccagaagttcaaggccaaggccacactgaccgtggacaagagcagcagcacagcctacatgcagctgaagtccctgaccagcgaggacagcgccgtgtactactgcgccagagattacggctacgtgctggactattggggccagggcacaagcgtgacagtgtctagtacgcgtatccagaaccctgatcctgccgtgtaccagctgcgggatagcaagagcagcgacaagagcgtgtgtctgttcaccgacttcgacagccagaccaacgtgtcccagagcaaggactccgacgtgtacatcaccgataagtgcgtgctggacatgcggagcatggacttcaagagcaactccgccgtggcctggtccaacaagtccgatttcgcctgcgccaacgccttcaacaacagcattatccccgaggacacattcttcccaagccccgagagcagctgcgacgtgaagctggtggaaaagagcttcgagacagacaccaacctgaacttccagaacctgagcgtgatcggcttcagaatcctgctgctgaaagtggccggctttaacctgctgatgaccctgcggctgtggtccagc

SEQ ID NO: 35112 - DNA, 2709 bp, synthetic construct
  source 1..2709: mol_type = other DNA
atggccttaccagtgaccgccttgctcctgccgctggccttgctgctccacgccgccaggccggaagtgcagctggttgaatctggcggaggactggttcaggctggcggatctctgagactgtcttgtgccgccagcggcagaacctttagcatgggctggtttagacaggcccctggcaaagagagagagttcgtcgccgccatcacatactctggcggcagcccttactacgccgactctgtgaagggcagattcaccatcagccgggacaacgccaagaacaccgtgtacctccagatgaacagcctgaagcctgaggacaccgccgtgtactactgcgccgccaatccaacatacggcagcgactggaacgccgagaattggggccagggaacccaagtgacagtgtctagcggtaccggcggaggcggatctggcggcggaggtagcggtggcggaggatctgaattccagatcgtgctgacacagagccccgccatcatgtctgttagccctggcgagaaagtgaccatgacctgtagcgccagcagcagcgtgaactacatgcactggttccagcagaagcccggcacaagccctaagctgtgggtgtacagcaccagcaatctggcctctggcgtgccagccagattttctggctctggcagcggcaccagctacagcctgacaatcagcagcatggaagccgaggatgccgccacctactattgtcagcagcggagcatctacccaccttggacatttggcggaggcaccaagctggaaatcaaactcgagatccagaaccctgatcctgccgtgtaccagctgcgggatagcaagagcagcgacaagagcgtgtgtctgttcaccgacttcgacagccagaccaacgtgtcccagagcaaggactccgacgtgtacatcaccgataagtgcgtgctggacatgcggagcatggacttcaagagcaactccgccgtggcctggtccaacaagtccgatttcgcctgcgccaacgccttcaacaacagcattatccccgaggacacattcttcccaagcagcgacgtgccctgcgacgtgaagctggtggaaaagagcttcgagacagacaccaacctgaacttccagaacctgagcgtgatcggcttcagaatcctgctgctgaaagtggccggctttaacctgctgatgaccctgcggctgtggtccagccgcgccaagagaagcggatctggcgtgaagcagaccctgaatttcgacctgctgaagctggctggcgacgtggaatccaacccaggccctactagtaccatggactggatttggcgcatccttttccttgtcggcgctgctaccggcgcccattccgggccccaggtgcagctggttgaatctggcggaggactggttcagcctggcggatctctgagactgtcttgtgccgccagcggcaacatcaacagcagaaactgcatgggctggttcagacaggcccctggcaagggaagagaaggcgtggcagctatcggccaagtgaccggcagaacctactacgtggacagcgtgaagggcagattcaccatcagcctggacaacagcaagaacaccctgtacctccagatgaacagcctgagagccgaggacaccgccgtgtactattgtgctgctgcccctggctgtctgctgtctgcacttagaagcgccgactacagaaactggggccagggcacactggtcaccgtttcttctggatccggcggcggaggatctggcggaggcggatctgggggcggaggctctttcgaagaagttcagctccagcagagcggccctgagcttgtgaaacctggcgcttccgtgaagatcagctgcaaggccagcggctacagcttcaccggctacaccatgaactgggtcaagcagtcccacggcaagaacctggaatggatcggcctgattaacccctacaacggcggcacctcctacaaccagaagttcaaggccaaggccacactgaccgtggacaagagcagcagcacagcctacatgcagctgaagtccctgaccagcgaggacagcgccgtgtactactgcgccagagattacggctacgtgctggactattggggccagggcacaagcgtgacagtgtctagtacgcgtgaggacctgaagaacgtgttcccacctgaggtggccgtgttcgagcctagcaaggccgagatcgcccacacccagaaagccaccctcgtgtgcctggctaccggcttctaccccgaccatgtggaactgtcttggtgggtcaacggcaaagaggtgcacagcggcgtgtgtaccgacccccagccactgaaagaacagcccgccctgaacgacagccggtactgcctgagcagcagactgagagtgtccgccaccttctggcagaacccccggaaccacttcagatgccaggtgcagttctacggcctgagcgagaacgacgagtggacccaggacagagccaagcccgtgacccagatcgtgtctgccgaagcctggggcagagccgattgcggcatcaccagcgccagctaccaccagggcgtgctgagcgccaccatcctgtacgagatcctgctgggcaaggccaccctgtacgccgtgctggtgtctgccctggtgctgatggctatggtcaagcggaaggacagccgggga

SEQ ID NO: 35113 - DNA, 2697 bp, synthetic construct
  source 1..2697: mol_type = other DNA
atggccttaccagtgaccgccttgctcctgccgctggccttgctgctccacgccgccaggccggaagtgcagctggttgaatctggcggaggactggttcaggctggcggatctctgagactgtcttgtgccgccagcggcagaacctttagcatgggctggtttagacaggcccctggcaaagagagagagttcgtcgccgccatcacatactctggcggcagcccttactacgccgactctgtgaagggcagattcaccatcagccgggacaacgccaagaacaccgtgtacctccagatgaacagcctgaagcctgaggacaccgccgtgtactactgcgccgccaatccaacatacggcagcgactggaacgccgagaattggggccagggaacccaagtgacagtgtctagcggtaccggcggaggcggatctggcggcggaggtagcggtggcggaggatctgaattccagatcgtgctgacacagagccccgccatcatgtctgttagccctggcgagaaagtgaccatgacctgtagcgccagcagcagcgtgaactacatgcactggttccagcagaagcccggcacaagccctaagctgtgggtgtacagcaccagcaatctggcctctggcgtgccagccagattttctggctctggcagcggcaccagctacagcctgacaatcagcagcatggaagccgaggatgccgccacctactattgtcagcagcggagcatctacccaccttggacatttggcggaggcaccaagctggaaatcaaactcgaggacctgaagaacgtgttcccacctgaggtggccgtgttcgagcctagcgaggccgagatcagccacacccagaaagccaccctcgtgtgcctggctaccggcttctaccccgaccatgtggaactgtcttggtgggtcaacggcaaagaggtgcacagcggcgtgtgtaccgacccccagccactgaaagaacagcccgccctgaacgacagccggtactgcctgagcagcagactgagagtgtccgccaccttctggcagaacccccggaaccacttcagatgccaggtgcagttctacggcctgagcgagaacgacgagtggacccaggacagagccaagcccgtgacccagatcgtgtctgccgaagcctggggcagagccgattgcggctttaccagcgagagctaccagcagggcgtgctgagcgccaccatcctgtacgagatcctgctgggcaaggccaccctgtacgccgtgctggtgtctgccctggtgctgatggctatggtcaagcggaaggacagccggggaagggccaagcgatctggatctggagcaacaaacttctcactactcaaacaagcaggtgacgtggaggagaatcccgggcctactagtaccatggactggatttggcgcatccttttccttgtcggcgctgctaccggcgcccattccgggccccaggtgcagctggttgaatctggcggaggactggttcagcctggcggatctctgagactgtcttgtgccgccagcggcaacatcaacagcagaaactgcatgggctggttcagacaggcccctggcaagggaagagaaggcgtggcagctatcggccaagtgaccggcagaacctactacgtggacagcgtgaagggcagattcaccatcagcctggacaacagcaagaacaccctgtacctccagatgaacagcctgagagccgaggacaccgccgtgtactattgtgctgctgcccctggctgtctgctgtctgcacttagaagcgccgactacagaaactggggccagggcacactggtcaccgtttcttctggatccggcggcggaggatctggcggaggcggatctgggggcggaggctctttcgaagaagttcagctccagcagagcggccctgagcttgtgaaacctggcgcttccgtgaagatcagctgcaaggccagcggctacagcttcaccggctacaccatgaactgggtcaagcagtcccacggcaagaacctggaatggatcggcctgattaacccctacaacggcggcacctcctacaaccagaagttcaaggccaaggccacactgaccgtggacaagagcagcagcacagcctacatgcagctgaagtccctgaccagcgaggacagcgccgtgtactactgcgccagagattacggctacgtgctggactattggggccagggcacaagcgtgacagtgtctagtacgcgtatccagaaccctgatcctgccgtgtaccagctgcgggatagcaagagcagcgacaagagcgtgtgtctgttcaccgacttcgacagccagaccaacgtgtcccagagcaaggactccgacgtgtacatcaccgataagtgcgtgctggacatgcggagcatggacttcaagagcaactccgccgtggcctggtccaacaagtccgatttcgcctgcgccaacgccttcaacaacagcattatccccgaggacacattcttcccaagccccgagagcagctgcgacgtgaagctggtggaaaagagcttcgagacagacaccaacctgaacttccagaacctgagcgtgatcggcttcagaatcctgctgctgaaagtggccggctttaacctgctgatgaccctgcggctgtggtccagc

SEQ ID NO: 35114 - DNA, 2697 bp, synthetic construct
  source 1..2697: mol_type = other DNA
atggccttaccagtgaccgccttgctcctgccgctggccttgctgctccacgccgccaggccggaagtgcaactggttgaatccggtggcggcctggtgcaagcaggcggatctctcagacttagctgtgccgcctccggcagaaccttcacaatgggatggtttaggcaggctccagggaaagagagagagttcgtcgccgccatctctctgtctcccacactggcctactacgccgactctgtgaaaggccggttcaccatctccagagataatgccaagaacaccgtggtgctgcaaatgaactctctgaaacccgaggatacagccctgtactattgtgccgctgaccggaagtccgtgatgagcatcagacccgattactggggacagggcacacaagtcacagtgtcctctggtaccggcggaggcggatctggcggcggaggtagcggtggcggaggatctgaattccagatcgtgctgacacagagccccgccatcatgtctgttagccctggcgagaaagtgaccatgacctgtagcgccagcagcagcgtgaactacatgcactggttccagcagaagcccggcacaagccctaagctgtgggtgtacagcaccagcaatctggcctctggcgtgccagccagattttctggctctggcagcggcaccagctacagcctgacaatcagcagcatggaagccgaggatgccgccacctactattgtcagcagcggagcatctacccaccttggacatttggcggaggcaccaagctggaaatcaaactcgaggacctgaagaacgtgttcccacctgaggtggccgtgttcgagcctagcgaggccgagatcagccacacccagaaagccaccctcgtgtgcctggctaccggcttctaccccgaccatgtggaactgtcttggtgggtcaacggcaaagaggtgcacagcggcgtgtgtaccgacccccagccactgaaagaacagcccgccctgaacgacagccggtactgcctgagcagcagactgagagtgtccgccaccttctggcagaacccccggaaccacttcagatgccaggtgcagttctacggcctgagcgagaacgacgagtggacccaggacagagccaagcccgtgacccagatcgtgtctgccgaagcctggggcagagccgattgcggctttaccagcgagagctaccagcagggcgtgctgagcgccaccatcctgtacgagatcctgctgggcaaggccaccctgtacgccgtgctggtgtctgccctggtgctgatggctatggtcaagcggaaggacagccggggaagggccaagcgatctggatctggagcaacaaacttctcactactcaaacaagcaggtgacgtggaggagaatcccgggcctactagtaccatggactggatttggcgcatccttttccttgtcggcgctgctaccggcgcccattccgggccccaggtgcagctggttgaatctggcggaggactggttcagcctggcggatctctgagactgtcttgtgccgccagcggcaacatcaacagcagaaactgcatgggctggttcagacaggcccctggcaagggaagagaaggcgtggcagctatcggccaagtgaccggcagaacctactacgtggacagcgtgaagggcagattcaccatcagcctggacaacagcaagaacaccctgtacctccagatgaacagcctgagagccgaggacaccgccgtgtactattgtgctgctgcccctggctgtctgctgtctgcacttagaagcgccgactacagaaactggggccagggcacactggtcaccgtttcttctggatccggcggcggaggatctggcggaggcggatctgggggcggaggctctttcgaagaagttcagctccagcagagcggccctgagcttgtgaaacctggcgcttccgtgaagatcagctgcaaggccagcggctacagcttcaccggctacaccatgaactgggtcaagcagtcccacggcaagaacctggaatggatcggcctgattaacccctacaacggcggcacctcctacaaccagaagttcaaggccaaggccacactgaccgtggacaagagcagcagcacagcctacatgcagctgaagtccctgaccagcgaggacagcgccgtgtactactgcgccagagattacggctacgtgctggactattggggccagggcacaagcgtgacagtgtctagtacgcgtatccagaaccctgatcctgccgtgtaccagctgcgggatagcaagagcagcgacaagagcgtgtgtctgttcaccgacttcgacagccagaccaacgtgtcccagagcaaggactccgacgtgtacatcaccgataagtgcgtgctggacatgcggagcatggacttcaagagcaactccgccgtggcctggtccaacaagtccgatttcgcctgcgccaacgccttcaacaacagcattatccccgaggacacattcttcccaagccccgagagcagctgcgacgtgaagctggtggaaaagagcttcgagacagacaccaacctgaacttccagaacctgagcgtgatcggcttcagaatcctgctgctgaaagtggccggctttaacctgctgatgaccctgcggctgtggtccagc

SEQ ID NO: 35115 - DNA, 2709 bp, synthetic construct
  source 1..2709: mol_type = other DNA
atggccttaccagtgaccgccttgctcctgccgctggccttgctgctccacgccgccaggccgcaggttcagctgcaagagtctggccctggcctggtcaagcctagccaaacactgagcctgacctgtaccgtgtctggcggctctatcaccaccggcgagttctactggaactggttcagacagcctcctggcaaaggactggaatggatgggagccattgccgccagcggcagcacaacatacagccctagcttcgagagccggaccagcatcagcagagacaccagcaagaatcagttcagcctgaagctgagcagcgtgacagccgccgatacagccgtgtattactgcggcagatcctttggagtggccgccgtgacaaccggccagaatagaggacagggcaccctggtcacagtgtctagcggtaccggcggaggcggatctggcggcggaggtagcggtggcggaggatctgaattccagatcgtgctgacacagagccccgccatcatgtctgttagccctggcgagaaagtgaccatgacctgtagcgccagcagcagcgtgaactacatgcactggttccagcagaagcccggcacaagccctaagctgtgggtgtacagcaccagcaatctggcctctggcgtgccagccagattttctggctctggcagcggcaccagctacagcctgacaatcagcagcatggaagccgaggatgccgccacctactattgtcagcagcggagcatctacccaccttggacatttggcggaggcaccaagctggaaatcaaactcgaggacctgaagaacgtgttcccacctgaggtggccgtgttcgagcctagcgaggccgagatcagccacacccagaaagccaccctcgtgtgcctggctaccggcttctaccccgaccatgtggaactgtcttggtgggtcaacggcaaagaggtgcacagcggcgtgtgtaccgacccccagccactgaaagaacagcccgccctgaacgacagccggtactgcctgagcagcagactgagagtgtccgccaccttctggcagaacccccggaaccacttcagatgccaggtgcagttctacggcctgagcgagaacgacgagtggacccaggacagagccaagcccgtgacccagatcgtgtctgccgaagcctggggcagagccgattgcggctttaccagcgagagctaccagcagggcgtgctgagcgccaccatcctgtacgagatcctgctgggcaaggccaccctgtacgccgtgctggtgtctgccctggtgctgatggctatggtcaagcggaaggacagccggggaagggccaagcgatctggatctggagcaacaaacttctcactactcaaacaagcaggtgacgtggaggagaatcccgggcctactagtaccatggactggatttggcgcatccttttccttgtcggcgctgctaccggcgcccattccgggccccaggtgcagctggttgaatctggcggaggactggttcagcctggcggatctctgagactgtcttgtgccgccagcggcaacatcaacagcagaaactgcatgggctggttcagacaggcccctggcaagggaagagaaggcgtggcagctatcggccaagtgaccggcagaacctactacgtggacagcgtgaagggcagattcaccatcagcctggacaacagcaagaacaccctgtacctccagatgaacagcctgagagccgaggacaccgccgtgtactattgtgctgctgcccctggctgtctgctgtctgcacttagaagcgccgactacagaaactggggccagggcacactggtcaccgtttcttctggatccggcggcggaggatctggcggaggcggatctgggggcggaggctctttcgaagaagttcagctccagcagagcggccctgagcttgtgaaacctggcgcttccgtgaagatcagctgcaaggccagcggctacagcttcaccggctacaccatgaactgggtcaagcagtcccacggcaagaacctggaatggatcggcctgattaacccctacaacggcggcacctcctacaaccagaagttcaaggccaaggccacactgaccgtggacaagagcagcagcacagcctacatgcagctgaagtccctgaccagcgaggacagcgccgtgtactactgcgccagagattacggctacgtgctggactattggggccagggcacaagcgtgacagtgtctagtacgcgtatccagaaccctgatcctgccgtgtaccagctgcgggatagcaagagcagcgacaagagcgtgtgtctgttcaccgacttcgacagccagaccaacgtgtcccagagcaaggactccgacgtgtacatcaccgataagtgcgtgctggacatgcggagcatggacttcaagagcaactccgccgtggcctggtccaacaagtccgatttcgcctgcgccaacgccttcaacaacagcattatccccgaggacacattcttcccaagccccgagagcagctgcgacgtgaagctggtggaaaagagcttcgagacagacaccaacctgaacttccagaacctgagcgtgatcggcttcagaatcctgctgctgaaagtggccggctttaacctgctgatgaccctgcggctgtggtccagc

SEQ ID NO: 35116 - DNA, 1452 bp, synthetic construct
  source 1..1452: mol_type = other DNA
atggccttaccagtgaccgccttgctcctgccgctggccttgctgctccacgccgccaggccggacatcgtgatgacccagagccctgccaccctgtccgtgtctccaggcgaaagagccaccctgagctgcagagcttcccagagcgtgtccaacgacgtcgtgtggtatcagcagaagcccggccaggcccccagactgctgatctactacgccagcaacagatacaccggcatccccgccagattcagcggctctggcagcggcaccgagttcaccctgacaatcagcagcctccagagcgaggacttcgccgtgtactactgtcagcaggactacaccagcccctggaccttcggccagggcaccaagctggaaatcaagagaggcggaggcggaagtggaggcggaggatctggcggcggaggctctgaggtgcaactggtgcagagcggagccgaagtgaagaaacctggggccagcgtgcgggtgtcctgcaaggccagcggctacacctttaccaactacggcatgaactgggtgcgccaggctcctggacagggcctggaatggatgggctggatcaacacctacaccggcgagcccacctacgccgacgacttcaagggcagagtgaccatgaccaccgacaccagcacctccaccgcctacatggaactgcggagcctgagaagcgacgacaccgccgtgtattattgcgcccggatcggcgacagcagccccagcgattattggggccagggaaccctcgtgaccgtgtcctctacgcgtaaaattgaagttatgtatcctcctccttacctagacaatgagaagagcaatggaaccattatccatgtgaaagggaaacacctttgtccaagtcccctatttcccggaccttctaagcccttttgggtgctggtggtggttgggggagtcctggcttgctatagcttgctagtaacagtggcctttattattttctgggtgaggagtaagaggagcaggctcctgcacagtgactacatgaacatgactccacgccgccccggacccacccgcaagcattaccagccctatgccccaccacgcgacttcgcagcctatcgctccagagtgaagttcagcaggagcgcagacgcccccgcgtaccagcagggccagaaccagctctataacgagctcaatctaggacgaagagaggagtacgatgttttggacaagagacgtggccgggaccctgagatggggggaaagccgagaaggaagaaccctcaggaaggcctgtacaatgaactgcagaaagataagatggcggaggcctacagtgagattgggatgaaaggcgagcgccggaggggcaaggggcacgatggcctttaccagggtctcagtacagccaccaaggacacctacgacgcccttcacatgcaggccctgccccctcgc

SEQ ID NO: 35117 - DNA, 1470 bp, synthetic construct
  source 1..1470: mol_type = other DNA
atggccttaccagtgaccgccttgctcctgccgctggccttgctgctccacgccgccaggccggacatcgtgatgacccagagccctgccaccctgtccgtgtctccaggcgaaagagccaccctgagctgcagagcttcccagagcgtgtccaacgacgtcgtgtggtatcagcagaagcccggccaggcccccagactgctgatctactacgccagcaacagatacaccggcatccccgccagattcagcggctctggcagcggcaccgagttcaccctgacaatcagcagcctccagagcgaggacttcgccgtgtactactgtcagcaggactacaccagcccctggaccttcggccagggcaccaagctggaaatcaagagaggcggaggcggaagtggaggcggaggatctggcggcggaggctctgaggtgcaactggtgcagagcggagccgaagtgaagaaacctggggccagcgtgcgggtgtcctgcaaggccagcggctacacctttaccaactacggcatgaactgggtgcgccaggctcctggacagggcctggaatggatgggctggatcaacacctacaccggcgagcccacctacgccgacgacttcaagggcagagtgaccatgaccaccgacaccagcacctccaccgcctacatggaactgcggagcctgagaagcgacgacaccgccgtgtattattgcgcccggatcggcgacagcagccccagcgattattggggccagggaaccctcgtgaccgtgtcctctacgcgtgcgaagcccaccacgacgccagcgccgcgaccaccaacaccggcgcccaccatcgcgtcgcagcccctgtccctgcgcccagaggcgtgccggccagcggcggggggcgcagtgcacacgagggggctggacttcgcctgtgacatctacatctgggcgcccttggccgggacttgtggggtccttctcctgtcactggttatcaccctttactgcaaacggggcagaaagaaactcctgtatatattcaaacaaccatttatgagaccagtacaaactactcaagaggaagatggctgtagctgccgatttccagaagaagaagaaggaggatgtgaactgagagtgaagttcagcaggagcgcagacgcccccgcgtaccagcagggccagaaccagctctataacgagctgaatctaggacgaagagaggagtacgatgttttggacaagagacgtggccgggaccctgagatggggggaaagccgagaaggaagaaccctcaggaaggcctgtacaatgaactgcagaaagataagatggcggaggcctacagtgagattgggatgaaaggcgagcgccggaggggcaaggggcacgatggcctttaccagggtctcagtacagccaccaaggacacctacgacgcccttcacatgcaggccctgccccctcgc

SEQ ID NO: 35118 - DNA, 1470 bp, synthetic construct
  source 1..1470: mol_type = other DNA
atggccttaccagtgaccgccttgctcctgccgctggccttgctgctccacgccgccaggccggaggtgcaactggtgcagagcggagccgaagtgaagaaacctggggccagcgtgcgggtgtcctgcaaggccagcggctacacctttaccaactacggcatgaactgggtgcgccaggctcctggacagggcctggaatggatgggctggatcaacacctacaccggcgagcccacctacgccgacgacttcaagggcagagtgaccatgaccaccgacaccagcacctccaccgcctacatggaactgcggagcctgagaagcgacgacaccgccgtgtattattgcgcccggatcggcgacagcagccccagcgattattggggccagggaaccctcgtgaccgtgtcctctggcggaggcggaagtggaggcggaggatctggcggcggaggctctgacatcgtgatgacccagagccctgccaccctgtccgtgtctccaggcgaaagagccaccctgagctgcagagcttcccagagcgtgtccaacgacgtcgtgtggtatcagcagaagcccggccaggcccccagactgctgatctactacgccagcaacagatacaccggcatccccgccagattcagcggctctggcagcggcaccgagttcaccctgacaatcagcagcctccagagcgaggacttcgccgtgtactactgtcagcaggactacaccagcccctggaccttcggccagggcaccaagctggaaatcaagagaacgcgtgcgaagcccaccacgacgccagcgccgcgaccaccaacaccggcgcccaccatcgcgtcgcagcccctgtccctgcgcccagaggcgtgccggccagcggcggggggcgcagtgcacacgagggggctggacttcgcctgtgacatctacatctgggcgcccttggccgggacttgtggggtccttctcctgtcactggttatcaccctttactgcaaacggggcagaaagaaactcctgtatatattcaaacaaccatttatgagaccagtacaaactactcaagaggaagatggctgtagctgccgatttccagaagaagaagaaggaggatgtgaactgagagtgaagttcagcaggagcgcagacgcccccgcgtaccagcagggccagaaccagctctataacgagctgaatctaggacgaagagaggagtacgatgttttggacaagagacgtggccgggaccctgagatggggggaaagccgagaaggaagaaccctcaggaaggcctgtacaatgaactgcagaaagataagatggcggaggcctacagtgagattgggatgaaaggcgagcgccggaggggcaaggggcacgatggcctttaccagggtctcagtacagccaccaaggacacctacgacgcccttcacatgcaggccctgccccctcgc

SEQ ID NO: 35119 - DNA, 1869 bp, synthetic construct
  source 1..1869: mol_type = other DNA
atggccttaccagtgaccgccttgctcctgccgctggccttgctgctccacgccgccaggccggacatcgtgatgacccagagccctgccaccctgtccgtgtctccaggcgaaagagccaccctgagctgcagagcttcccagagcgtgtccaacgacgtcgtgtggtatcagcagaagcccggccaggcccccagactgctgatctactacgccagcaacagatacaccggcatccccgccagattcagcggctctggcagcggcaccgagttcaccctgacaatcagcagcctccagagcgaggacttcgccgtgtactactgtcagcaggactacaccagcccctggaccttcggccagggcaccaagctggaaatcaagagactcgagatccagaaccctgatcctgccgtgtaccagctgcgggatagcaagagcagcgacaagagcgtgtgtctgttcaccgacttcgacagccagaccaacgtgtcccagagcaaggactccgacgtgtacatcaccgataagtgcgtgctggacatgcggagcatggacttcaagagcaactccgccgtggcctggtccaacaagtccgatttcgcctgcgccaacgccttcaacaacagcattatccccgaggacacattcttcccaagcagcgacgtgccctgcgacgtgaagctggtggaaaagagcttcgagacagacaccaacctgaacttccagaacctgagcgtgatcggcttcagaatcctgctgctgaaagtggccggctttaacctgctgatgaccctgcggctgtggtccagccgcgccaagagaagcggatctggcgtgaagcagaccctgaatttcgacctgctgaagctggctggcgacgtggaatccaacccaggccctactagtatggactggatttggcgcatccttttccttgtcggcgctgctaccggcgcgcattccttcgaagaggtgcaactggtgcagagcggagccgaagtgaagaaacctggggccagcgtgcgggtgtcctgcaaggccagcggctacacctttaccaactacggcatgaactgggtgcgccaggctcctggacagggcctggaatggatgggctggatcaacacctacaccggcgagcccacctacgccgacgacttcaagggcagagtgaccatgaccaccgacaccagcacctccaccgcctacatggaactgcggagcctgagaagcgacgacaccgccgtgtattattgcgcccggatcggcgacagcagccccagcgattattggggccagggaaccctcgtgaccgtgtcctctacgcgtgaggacctgaagaacgtgttcccacctgaggtggccgtgttcgagcctagcaaggccgagatcgcccacacccagaaagccaccctcgtgtgcctggctaccggcttctaccccgaccatgtggaactgtcttggtgggtcaacggcaaagaggtgcacagcggcgtgtgtaccgacccccagccactgaaagaacagcccgccctgaacgacagccggtactgcctgagcagcagactgagagtgtccgccaccttctggcagaacccccggaaccacttcagatgccaggtgcagttctacggcctgagcgagaacgacgagtggacccaggacagagccaagcccgtgacccagatcgtgtctgccgaagcctggggcagagccgattgcggcatcaccagcgccagctaccaccagggcgtgctgagcgccaccatcctgtacgagatcctgctgggcaaggccaccctgtacgccgtgctggtgtctgccctggtgctgatggctatggtcaagcggaaggacagccgggga

SEQ ID NO: 35120 - DNA, 1857 bp, synthetic construct
  source 1..1857: mol_type = other DNA
atggccttaccagtgaccgccttgctcctgccgctggccttgctgctccacgccgccaggccggacatcgtgatgacccagagccctgccaccctgtccgtgtctccaggcgaaagagccaccctgagctgcagagcttcccagagcgtgtccaacgacgtcgtgtggtatcagcagaagcccggccaggcccccagactgctgatctactacgccagcaacagatacaccggcatccccgccagattcagcggctctggcagcggcaccgagttcaccctgacaatcagcagcctccagagcgaggacttcgccgtgtactactgtcagcaggactacaccagcccctggaccttcggccagggcaccaagctggaaatcaagagactcgaggacctgaagaacgtgttcccacctgaggtggccgtgttcgagcctagcaaggccgagatcgcccacacccagaaagccaccctcgtgtgcctggctaccggcttctaccccgaccatgtggaactgtcttggtgggtcaacggcaaagaggtgcacagcggcgtgtgtaccgacccccagccactgaaagaacagcccgccctgaacgacagccggtactgcctgagcagcagactgagagtgtccgccaccttctggcagaacccccggaaccacttcagatgccaggtgcagttctacggcctgagcgagaacgacgagtggacccaggacagagccaagcccgtgacccagatcgtgtctgccgaagcctggggcagagccgattgcggcatcaccagcgccagctaccaccagggcgtgctgagcgccaccatcctgtacgagatcctgctgggcaaggccaccctgtacgccgtgctggtgtctgccctggtgctgatggctatggtcaagcggaaggacagccggggaagggccaagcgatctggatctggagcaacaaacttctcactactcaaacaagcaggtgacgtggaggagaatcccgggcctactagtatggactggatttggcgcatccttttccttgtcggcgctgctaccggcgcgcattccttcgaagaggtgcaactggtgcagagcggagccgaagtgaagaaacctggggccagcgtgcgggtgtcctgcaaggccagcggctacacctttaccaactacggcatgaactgggtgcgccaggctcctggacagggcctggaatggatgggctggatcaacacctacaccggcgagcccacctacgccgacgacttcaagggcagagtgaccatgaccaccgacaccagcacctccaccgcctacatggaactgcggagcctgagaagcgacgacaccgccgtgtattattgcgcccggatcggcgacagcagccccagcgattattggggccagggaaccctcgtgaccgtgtcctctacgcgtatccagaaccctgatcctgccgtgtaccagctgcgggatagcaagagcagcgacaagagcgtgtgtctgttcaccgacttcgacagccagaccaacgtgtcccagagcaaggactccgacgtgtacatcaccgataagtgcgtgctggacatgcggagcatggacttcaagagcaactccgccgtggcctggtccaacaagtccgatttcgcctgcgccaacgccttcaacaacagcattatccccgaggacacattcttcccaagcagcgacgtgccctgcgacgtgaagctggtggaaaagagcttcgagacagacaccaacctgaacttccagaacctgagcgtgatcggcttcagaatcctgctgctgaaagtggccggctttaacctgctgatgaccctgcggctgtggtccagc

SEQ ID NO: 35121 - DNA, 1857 bp, synthetic construct; identical to SEQ ID NO: 3765
  source 1..1857: mol_type = other DNA

SEQ ID NO: 35122 - DNA, 1869 bp, synthetic construct; identical to SEQ ID NO: 3767
  source 1..1869: mol_type = other DNA

SEQ ID NO: 35123 - DNA, 1905 bp, synthetic construct
  source 1..1905: mol_type = other DNA
atggccttaccagtgaccgccttgctcctgccgctggccttgctgctccacgccgccaggccgctcgaggaggacctgaagaacgtgttcccacctgaggtggccgtgttcgagcctagcaaggccgagatcgcccacacccagaaagccaccctcgtgtgcctggctaccggcttctaccccgaccatgtggaactgtcttggtgggtcaacggcaaagaggtgcacagcggcgtgtgtaccgacccccagccactgaaagaacagcccgccctgaacgacagccggtactgcctgagcagcagactgagagtgtccgccaccttctggcagaacccccggaaccacttcagatgccaggtgcagttctacggcctgagcgagaacgacgagtggacccaggacagagccaagcccgtgacccagatcgtgtctgccgaagcctggggcagagccgattgcggcatcaccagcgccagctaccaccagggcgtgctgagcgccaccatcctgtacgagatcctgctgggcaaggccaccctgtacgccgtgctggtgtctgccctggtgctgatggctatggtcaagcggaaggacagccggggaagggccaagcgatctggatctggagcaacaaacttctcactactcaaacaagcaggtgacgtggaggagaatcccgggcctactagcatggccttaccagtgaccgccttgctcctgccgctggccttgctgctccacgccgccaggccggacatcgtgatgacccagagccctgccaccctgtccgtgtctccaggcgaaagagccaccctgagctgcagagcttcccagagcgtgtccaacgacgtcgtgtggtatcagcagaagcccggccaggcccccagactgctgatctactacgccagcaacagatacaccggcatccccgccagattcagcggctctggcagcggcaccgagttcaccctgacaatcagcagcctccagagcgaggacttcgccgtgtactactgtcagcaggactacaccagcccctggaccttcggccagggcaccaagctggaaatcaagagaggcggaggcggaagtggaggcggaggatctggcggcggaggctctgaggtgcaactggtgcagagcggagccgaagtgaagaaacctggggccagcgtgcgggtgtcctgcaaggccagcggctacacctttaccaactacggcatgaactgggtgcgccaggctcctggacagggcctggaatggatgggctggatcaacacctacaccggcgagcccacctacgccgacgacttcaagggcagagtgaccatgaccaccgacaccagcacctccaccgcctacatggaactgcggagcctgagaagcgacgacaccgccgtgtattattgcgcccggatcggcgacagcagccccagcgattattggggccagggaaccctcgtgaccgtgtcctctacgcgtatccagaaccctgatcctgccgtgtaccagctgcgggatagcaagagcagcgacaagagcgtgtgtctgttcaccgacttcgacagccagaccaacgtgtcccagagcaaggactccgacgtgtacatcaccgataagtgcgtgctggacatgcggagcatggacttcaagagcaactccgccgtggcctggtccaacaagtccgatttcgcctgcgccaacgccttcaacaacagcattatccccgaggacacattcttcccaagcagcgacgtgccctgcgacgtgaagctggtggaaaagagcttcgagacagacaccaacctgaacttccagaacctgagcgtgatcggcttcagaatcctgctgctgaaagtggccggctttaacctgctgatgaccctgcggctgtggtccagc

SEQ ID NO: 35124 - DNA, 1926 bp, synthetic construct
  source 1..1926: mol_type = other DNA
atggccttaccagtgaccgccttgctcctgccgctggccttgctgctccacgccgccaggccgctcgagggctccggcgatcgccctgatcctgccgtgtaccagctgcgggatagcaagagcagcgacaagagcgtgtgtctgttcaccgacttcgacagccagaccaacgtgtcccagagcaaggactccgacgtgtacatcaccgataagtgcgtgctggacatgcggagcatggacttcaagagcaactccgccgtggcctggtccaacaagtccgatttcgcctgcgccaacgccttcaacaacagcattatccccgaggacacattcttcccaagccccgagagcagctgcgacgtgaagctggtggaaaagagcttcgagacagacaccaacctgaacttccagaacctgagcgtgatcggcttcagaatcctgctgctgaaagtggccggctttaacctgctgatgaccctgcggctgtggtccagctctagtcgcgccaagagaagcggatctggcgtgaagcagaccctgaatttcgacctgctgaagctggctggcgacgtggaatccaacccaggccccactagcatggccttaccagtgaccgccttgctcctgccgctggccttgctgctccacgccgccaggccggacatcgtgatgacccagagccctgccaccctgtccgtgtctccaggcgaaagagccaccctgagctgcagagcttcccagagcgtgtccaacgacgtcgtgtggtatcagcagaagcccggccaggcccccagactgctgatctactacgccagcaacagatacaccggcatccccgccagattcagcggctctggcagcggcaccgagttcaccctgacaatcagcagcctccagagcgaggacttcgccgtgtactactgtcagcaggactacaccagcccctggaccttcggccagggcaccaagctggaaatcaagagaggcggaggcggaagtggaggcggaggatctggcggcggaggctctgaggtgcaactggtgcagagcggagccgaagtgaagaaacctggggccagcgtgcgggtgtcctgcaaggccagcggctacacctttaccaactacggcatgaactgggtgcgccaggctcctggacagggcctggaatggatgggctggatcaacacctacaccggcgagcccacctacgccgacgacttcaagggcagagtgaccatgaccaccgacaccagcacctccaccgcctacatggaactgcggagcctgagaagcgacgacaccgccgtgtattattgcgcccggatcggcgacagcagccccagcgattattggggccagggaaccctcgtgaccgtgtcctctacgcgtgaggacctgaagaacgtgttcccacctgaggtggccgtgttcgagcctagcgaggccgagatcagccacacccagaaagccaccctcgtgtgcctggctaccggcttctaccccgaccatgtggaactgtcttggtgggtcaacggcaaagaggtgcacagcggcgtgtgtaccgacccccagccactgaaagaacagcccgccctgaacgacagccggtactgcctgagcagcagactgagagtgtccgccaccttctggcagaacccccggaaccacttcagatgccaggtgcagttctacggcctgagcgagaacgacgagtggacccaggacagagccaagcccgtgacccagatcgtgtctgccgaagcctggggcagagccgattgcggctttaccagcgagagctaccagcagggcgtgctgagcgccaccatcctgtacgagatcctgctgggcaaggccaccctgtacgccgtgctggtgtctgccctggtgctgatggctatggtcaagcggaaggacagccgggga

SEQ ID NO: 35125 - DNA, 1857 bp, synthetic construct
  source 1..1857: mol_type = other DNA
atggccttaccagtgaccgccttgctcctgccgctggccttgctgctccacgccgccaggccggacatcgtgatgacccagagccctgccaccctgtccgtgtctccaggcgaaagagccaccctgagctgcagagcttcccagagcgtgtccaacgacgtcgtgtggtatcagcagaagcccggccaggcccccagactgctgatctactacgccagcaacagatacaccggcatccccgccagattcagcggctctggcagcggcaccgagttcaccctgacaatcagcagcctccagagcgaggacttcgccgtgtactactgtcagcaggactacaccagcccctggaccttcggccagggcaccaagctggaaatcaagagactcgaggacctgaagaacgtgttcccacctgaggtggccgtgttcgagcctagcgaggccgagatcagccacacccagaaagccaccctcgtgtgcctggctaccggcttctaccccgaccatgtggaactgtcttggtgggtcaacggcaaagaggtgcacagcggcgtgtctaccgacccccagccactgaaagaacagcccgccctgaacgacagccggtactgcctgagcagcagactgagagtgtccgccaccttctggcagaacccccggaaccacttcagatgccaggtgcagttctacggcctgagcgagaacgacgagtggacccaggacagagccaagcccgtgacccagatcgtgtctgccgaagcctggggcagagccgattgcggctttaccagcgagagctaccagcagggcgtgctgagcgccaccatcctgtacgagatcctgctgggcaaggccaccctgtacgccgtgctggtgtctgccctggtgctgatggctatggtcaagcggaaggacagccggggaagggccaagcgatctggatctggagcaacaaacttctcactactcaaacaagcaggtgacgtggaggagaatcccgggcctactagtatggactggatttggcgcatccttttccttgtcggcgctgctaccggcgcgcattccttcgaagaggtgcaactggtgcagagcggagccgaagtgaagaaacctggggccagcgtgcgggtgtcctgcaaggccagcggctacacctttaccaactacggcatgaactgggtgcgccaggctcctggacagggcctggaatggatgggctggatcaacacctacaccggcgagcccacctacgccgacgacttcaagggcagagtgaccatgaccaccgacaccagcacctccaccgcctacatggaactgcggagcctgagaagcgacgacaccgccgtgtattattgcgcccggatcggcgacagcagccccagcgattattggggccagggaaccctcgtgaccgtgtcctctacgcgtatccagaaccctgatcctgccgtgtaccagctgcgggatagcaagagcagcgacaagagcgtgtgtctgttcaccgacttcgacagccagaccaacgtgtcccagagcaaggactccgacgtgtacatcaccgataagaccgtgctggacatgcggagcatggacttcaagagcaactccgccgtggcctggtccaacaagtccgatttcgcctgcgccaacgccttcaacaacagcattatccccgaggacacattcttcccaagccccgagagcagctgcgacgtgaagctggtggaaaagagcttcgagacagacaccaacctgaacttccagaacctgagcgtgatcggcttcagaatcctgctgctgaaagtggccggctttaacctgctgatgaccctgcggctgtggtccagc

SEQ ID NO: 35126 - DNA, 1881 bp, synthetic construct
  source 1..1881: mol_type = other DNA
atggccttaccagtgaccgccttgctcctgccgctggccttgctgctccacgccgccaggccggacatcgtgatgacccagagccctgccaccctgtccgtgtctccaggcgaaagagccaccctgagctgcagagcttcccagagcgtgtccaacgacgtcgtgtggtatcagcagaagcccggccaggcccccagactgctgatctactacgccagcaacagatacaccggcatccccgccagattcagcggctctggcagcggcaccgagttcaccctgacaatcagcagcctccagagcgaggacttcgccgtgtactactgtcagcaggactacaccagcccctggaccttcggccagggcaccaagctggaaatcaagagactcgaggacaagcagctggacgccgacgtgtcccccaagcctaccatcttcctgccctctatcgccgagacaaagctccagaaggccggcacctacctgtgcctgctggaaaagttcttcccagatgtgattaagatccactggcaggaaaagaagtccaacaccatcctgggcagccaggaaggcaacaccatgaagaccaacgacacctacatgaagttcagctggctgaccgtgcccgagaagtccctggacaaagaacacagatgcatcgtgcggcacgaaaacaacaagaacggcgtggaccaggaaatcatcttcccacccatcaagaccgatgtgattacaatggaccccaaggacaactgctccaaggacgccaacgataccctgctgctccagctgaccaacaccagcgcctactacatgtacttgttgctgctgctgaagtccgtggtgtacttcgccatcatcacatgctgcctgctgcggagaaccgccttctgctgcaacggcgagaagtctagggccaagcgatctggatctggagcaacaaacttctcactactcaaacaagcaggtgacgtggaggagaatcccgggcctactagtatggactggatttggcgcatccttttccttgtcggcgctgctaccggcgcgcattccttcgaagaggtgcaactggtgcagagcggagccgaagtgaagaaacctggggccagcgtgcgggtgtcctgcaaggccagcggctacacctttaccaactacggcatgaactgggtgcgccaggctcctggacagggcctggaatggatgggctggatcaacacctacaccggcgagcccacctacgccgacgacttcaagggcagagtgaccatgaccaccgacaccagcacctccaccgcctacatggaactgcggagcctgagaagcgacgacaccgccgtgtattattgcgcccggatcggcgacagcagccccagcgattattggggccagggaaccctcgtgaccgtgtcctctacgcgtagccagcctcacaccaagcccagcgtgttcgtgatgaagaacggcaccaacgtggcctgcctcgtgaaagagttctaccccaaggacatcaggatcaacctggtgtccagcaagaagatcaccgagttcgaccccgccatcgtgatctcccccagcggcaagtacaacgccgtgaagctggggaagtacgaggacagcaacagcgtgacctgctccgtgcagcacgacaacaagaccgtgcacagcaccgactttgaagtgaaaaccgactccaccgaccacgtgaagcccaaagagacagagaacaccaagcagcccagcaagagctgccacaagcccaaggccatcgtgcacaccgagaaagtgaacatgatgagcctgaccgtgctgggcctgcggatgctgttcgccaaaaccgtggccgtgaacttcctgctgaccgccaagctgttcttcctc

SEQ ID NO: 35127 - DNA, 1881 bp, synthetic construct; identical to SEQ ID NO: 3775
  source 1..1881: mol_type = other DNA

SEQ ID NO: 35128 - DNA, 1926 bp, synthetic construct
  source 1..1926: mol_type = other DNA
atggccttaccagtgaccgccttgctcctgccgctggccttgctgctccacgccgccaggccgctcgaggacaagcagctggacgccgacgtgtcccccaagcctaccatcttcctgccctctatcgccgagacaaagctccagaaggccggcacctacctgtgcctgctggaaaagttcttcccagatgtgattaagatccactggcaggaaaagaagtccaacaccatcctgggcagccaggaaggcaacaccatgaagaccaacgacacctacatgaagttcagctggctgaccgtgcccgagaagtccctggacaaagaacacagatgcatcgtgcggcacgaaaacaacaagaacggcgtggaccaggaaatcatcttcccacccatcaagaccgatgtgattacaatggaccccaaggacaactgctccaaggacgccaacgataccctgctgctccagctgaccaacaccagcgcctactacatgtacttgttgctgctgctgaagtccgtggtgtacttcgccatcatcacatgctgcctgctgcggagaaccgccttctgctgcaacggcgagaagtctagggccaagcgatctggatctggagcaacaaacttctcactactcaaacaagcaggtgacgtggaggagaatcccgggcctactagcatggccttaccagtgaccgccttgctcctgccgctggccttgctgctccacgccgccaggccggacatcgtgatgacccagagccctgccaccctgtccgtgtctccaggcgaaagagccaccctgagctgcagagcttcccagagcgtgtccaacgacgtcgtgtggtatcagcagaagcccggccaggcccccagactgctgatctactacgccagcaacagatacaccggcatccccgccagattcagcggctctggcagcggcaccgagttcaccctgacaatcagcagcctccagagcgaggacttcgccgtgtactactgtcagcaggactacaccagcccctggaccttcggccagggcaccaagctggaaatcaagagaggcggaggcggaagtggaggcggaggatctggcggcggaggctctgaggtgcaactggtgcagagcggagccgaagtgaagaaacctggggccagcgtgcgggtgtcctgcaaggccagcggctacacctttaccaactacggcatgaactgggtgcgccaggctcctggacagggcctggaatggatgggctggatcaacacctacaccggcgagcccacctacgccgacgacttcaagggcagagtgaccatgaccaccgacaccagcacctccaccgcctacatggaactgcggagcctgagaagcgacgacaccgccgtgtattattgcgcccggatcggcgacagcagccccagcgattattggggccagggaaccctcgtgaccgtgtcctctacgcgtagccagcctcacaccaagcccagcgtgttcgtgatgaagaacggcaccaacgtggcctgcctcgtgaaagagttctaccccaaggacatcaggatcaacctggtgtccagcaagaagatcaccgagttcgaccccgccatcgtgatctcccccagcggcaagtacaacgccgtgaagctggggaagtacgaggacagcaacagcgtgacctgctccgtgcagcacgacaacaagaccgtgcacagcaccgactttgaagtgaaaaccgactccaccgaccacgtgaagcccaaagagacagagaacaccaagcagcccagcaagagctgccacaagcccaaggccatcgtgcacaccgagaaagtgaacatgatgagcctgaccgtgctgggcctgcggatgctgttcgccaaaaccgtggccgtgaacttcctgctgaccgccaagctgttcttcctc

SEQ ID NO: 35129 - DNA, 2388 bp, synthetic construct
  source 1..2388: mol_type = other DNA
atggccttaccagtgaccgccttgctcctgccgctggccttgctgctccacgccgccaggccggacatcgtgatgacccagagccctgccaccctgtccgtgtctccaggcgaaagagccaccctgagctgcagagcttcccagagcgtgtccaacgacgtcgtgtggtatcagcagaagcccggccaggcccccagactgctgatctactacgccagcaacagatacaccggcatccccgccagattcagcggctctggcagcggcaccgagttcaccctgacaatcagcagcctccagagcgaggacttcgccgtgtactactgtcagcaggactacaccagcccctggaccttcggccagggcaccaagctggaaatcaagagaggacagcctaaggccaatcctaccgtgacactgttccctccaagcagcgaagaactccaggccaacaaggccacacttgtgtgcctgatctccgacttctaccctggggctgtgacagtggcttggaaggccgatggatctcctgtgaaagccggcgtggaaaccaccaagccatccaagcagagcaacaacaaatacgccgccagctcctacctgagcctgacacctgagcagtggaagtcccacagatcctacagctgccaagtgacccacgaaggcagcaccgtggaaaagacagtggcccctacagagtgcagcggatcccagagcttcggcctgctggaccccaagctgtgctacctgctggatggcatcctgttcatctacggcgtgatcctgaccgccctgttcctgagagtgaagttcagcagaagcgccgacgcccctgcctaccagcagggacagaaccaactgtacaacgagctgaacctgggcagacgggaagagtacgacgtgctggacaagcggagaggcagggaccctgagatgggcggaaagccccagcggagaaagaacccccaggaaggactgtataacgaactccagaaagacaagatggccgaagcctacagcgagatcggcatgaagggcgagcggagaagaggcaagggccacgatggcctgtaccagggcctgagcaccgccaccaaggacacctatgacgccctgcacatgcaggccctgcctccaagaagggccaagcgatctggatctggagcaacaaacttctcactactcaaacaagcaggtgacgtggaggagaatcccgggcctactagtatggactggatttggcgcatccttttccttgtcggcgctgctaccggcgcgcattccttcgaagaggtgcaactggtgcagagcggagccgaagtgaagaaacctggggccagcgtgcgggtgtcctgcaaggccagcggctacacctttaccaactacggcatgaactgggtgcgccaggctcctggacagggcctggaatggatgggctggatcaacacctacaccggcgagcccacctacgccgacgacttcaagggcagagtgaccatgaccaccgacaccagcacctccaccgcctacatggaactgcggagcctgagaagcgacgacaccgccgtgtattattgcgcccggatcggcgacagcagccccagcgattattggggccagggaaccctcgtgaccgtgtcctctgcctctacaaagggaccctccgtgtttcctctggctcccagcagcaagtctacaagcggaggaacagccgctctgggctgcctggtcaaggattactttcccgagcctgtgaccgtgtcctggaatagcggagcactgacaagcggcgtgcacacctttccagccgtgctgcaaagcagcggcctgtactctctgagcagcgtggtcacagtgcctagctctagcctgggcacccagacctacatctgcaatgtgaaccacaagcctagcaacaccaaggtggacaagagagtggaacccaagagctgtggtacccagagttttgggttgttggaccctaaattgtgctatctgttggacggaatcctgttcatttacggagtgatcctgaccgcattgttcctgcgggttaagttttccagatccgcagacgcacccgcttaccaacaagggcagaaccaactctacaatgaacttaatttggggcggagggaagagtacgacgttctggacaaaaggaggggacgagatcccgagatgggcggaaagcctcagcgaaggaagaatccgcaagaggggctttataacgaactccagaaagataaaatggcagaagcctatagtgagattgggatgaagggagaaaggaggaggggtaaaggtcacgatgggttgtaccaaggattgagcacagccactaaagatacctatgatgcgctccacatgcaggccctgccgccaaga

SEQ ID NO: 35130 - DNA, 2445 bp, synthetic construct; identical to SEQ ID NO: 3778
  source 1..2445: mol_type = other DNA

SEQ ID NO: 35131 - DNA, 2571 bp, synthetic construct
  source 1..2571: mol_type = other DNA
atggccttaccagtgaccgccttgctcctgccgctggccttgctgctccacgccgccaggccggacatcgtgatgacccagagccctgccaccctgtccgtgtctccaggcgaaagagccaccctgagctgcagagcttcccagagcgtgtccaacgacgtcgtgtggtatcagcagaagcccggccaggcccccagactgctgatctactacgccagcaacagatacaccggcatccccgccagattcagcggctctggcagcggcaccgagttcaccctgacaatcagcagcctccagagcgaggacttcgccgtgtactactgtcagcaggactacaccagcccctggaccttcggccagggcaccaagctggaaatcaagagactcgaggaggacctgaagaacgtgttcccacctgaggtggccgtgttcgagcctagcgaggccgagatcagccacacccagaaagccaccctcgtgtgcctggctaccggcttctaccccgaccatgtggaactgtcttggtgggtcaacggcaaagaggtgcacagcggcgtgtctaccgacccccagccactgaaagaacagcccgccctgaacgacagccggtactgcctgagcagcagactgagagtgtccgccaccttctggcagaacccccggaaccacttcagatgccaggtgcagttctacggcctgagcgagaacgacgagtggacccaggacagagccaagcccgtgacccagatcgtgtctgccgaagcctggggcagagccgattgcggatcccagagcttcggcctgctggaccccaagctgtgctacctgctggatggcatcctgttcatctacggcgtgatcctgaccgccctgttcctgagagtgaagttcagcagaagcgccgacgcccctgcctaccagcagggacagaaccaactgtacaacgagctgaacctgggcagacgggaagagtacgacgtgctggacaagcggagaggcagggaccctgagatgggcggaaagccccagcggagaaagaacccccaggaaggactgtataacgaactccagaaagacaagatggccgaagcctacagcgagatcggcatgaagggcgagcggagaagaggcaagggccacgatggcctgtaccagggcctgagcaccgccaccaaggacacctatgacgccctgcacatgcaggccctgcctccaagaagggccaagcgatctggatctggagcaacaaacttctcactactcaaacaagcaggtgacgtggaggagaatcccgggcctactagtatggactggatttggcgcatccttttccttgtcggcgctgctaccggcgcgcattccttcgaagaggtgcaactggtgcagagcggagccgaagtgaagaaacctggggccagcgtgcgggtgtcctgcaaggccagcggctacacctttaccaactacggcatgaactgggtgcgccaggctcctggacagggcctggaatggatgggctggatcaacacctacaccggcgagcccacctacgccgacgacttcaagggcagagtgaccatgaccaccgacaccagcacctccaccgcctacatggaactgcggagcctgagaagcgacgacaccgccgtgtattattgcgcccggatcggcgacagcagccccagcgattattggggccagggaaccctcgtgaccgtgtcctctacgcgtatccagaaccctgatcctgccgtgtaccagctgcgggatagcaagagcagcgacaagagcgtgtgtctgttcaccgacttcgacagccagaccaacgtgtcccagagcaaggactccgacgtgtacatcaccgataagaccgtgctggacatgcggagcatggacttcaagagcaactccgccgtggcctggtccaacaagtccgatttcgcctgcgccaacgccttcaacaacagcattatccccgaggacacattcttcccaagccccgagagcagctgcggtacccagagttttgggttgttggaccctaaattgtgctatctgttggacggaatcctgttcatttacggagtgatcctgaccgcattgttcctgaggagcaagcggtcacggctgctccacagcgattacatgaatatgacaccacgaagaccgggtcctactcgcaaacactaccaaccctacgcacctccccgcgactttgcagcgtaccgatctcgggttaagttttccagatccgcagacgcacccgcttaccaacaagggcagaaccaactctacaatgaacttaatttggggcggagggaagagtacgacgttctggacaaaaggaggggacgagatcccgagatgggcggaaagcctcagcgaaggaagaatccgcaagaggggctttataacgaactccagaaagataaaatggcagaagcctatagtgagattgggatgaagggagaaaggaggaggggtaaaggtcacgatgggttgtaccaaggattgagcacagccactaaagatacctatgatgcgctccacatgcaggccctgccgccaaga

SEQ ID NO: 35132 - DNA, 2700 bp, synthetic construct
  source 1..2700: mol_type = other DNA
atggccttaccagtgaccgccttgctcctgccgctggccttgctgctccacgccgccaggccggacatcgtgatgacccagagccctgccaccctgtccgtgtctccaggcgaaagagccaccctgagctgcagagcttcccagagcgtgtccaacgacgtcgtgtggtatcagcagaagcccggccaggcccccagactgctgatctactacgccagcaacagatacaccggcatccccgccagattcagcggctctggcagcggcaccgagttcaccctgacaatcagcagcctccagagcgaggacttcgccgtgtactactgtcagcaggactacaccagcccctggaccttcggccagggcaccaagctggaaatcaagagactcgaggaggacctgaagaacgtgttcccacctgaggtggccgtgttcgagcctagcgaggccgagatcagccacacccagaaagccaccctcgtgtgcctggctaccggcttctaccccgaccatgtggaactgtcttggtgggtcaacggcaaagaggtgcacagcggcgtgtctaccgacccccagccactgaaagaacagcccgccctgaacgacagccggtactgcctgagcagcagactgagagtgtccgccaccttctggcagaacccccggaaccacttcagatgccaggtgcagttctacggcctgagcgagaacgacgagtggacccaggacagagccaagcccgtgacccagatcgtgtctgccgaagcctggggcagagccgattgcggatcccagagcttcggcctgctggaccccaagctgtgctacctgctggatggcatcctgttcatctacggcgtgatcctgaccgccctgttcctgaaacggggcagaaagaaactcctgtatatattcaaacaaccatttatgagaccagtacaaactactcaagaggaagatggctgtagctgccgatttccagaagaagaagaaggaggatgtgaactgagagtgaagttcagcagaagcgccgacgcccctgcctaccagcagggacagaaccaactgtacaacgagctgaacctgggcagacgggaagagtacgacgtgctggacaagcggagaggcagggaccctgagatgggcggaaagccccagcggagaaagaacccccaggaaggactgtataacgaactccagaaagacaagatggccgaagcctacagcgagatcggcatgaagggcgagcggagaagaggcaagggccacgatggcctgtaccagggcctgagcaccgccaccaaggacacctatgacgccctgcacatgcaggccctgcctccaagaagggccaagcgatctggatctggagcaacaaacttctcactactcaaacaagcaggtgacgtggaggagaatcccgggcctactagtatggactggatttggcgcatccttttccttgtcggcgctgctaccggcgcgcattccttcgaagaggtgcaactggtgcagagcggagccgaagtgaagaaacctggggccagcgtgcgggtgtcctgcaaggccagcggctacacctttaccaactacggcatgaactgggtgcgccaggctcctggacagggcctggaatggatgggctggatcaacacctacaccggcgagcccacctacgccgacgacttcaagggcagagtgaccatgaccaccgacaccagcacctccaccgcctacatggaactgcggagcctgagaagcgacgacaccgccgtgtattattgcgcccggatcggcgacagcagccccagcgattattggggccagggaaccctcgtgaccgtgtcctctacgcgtatccagaaccctgatcctgccgtgtaccagctgcgggatagcaagagcagcgacaagagcgtgtgtctgttcaccgacttcgacagccagaccaacgtgtcccagagcaaggactccgacgtgtacatcaccgataagaccgtgctggacatgcggagcatggacttcaagagcaactccgccgtggcctggtccaacaagtccgatttcgcctgcgccaacgccttcaacaacagcattatccccgaggacacattcttcccaagccccgagagcagctgcggtacccagagttttgggttgttggaccctaaattgtgctatctgttggacggaatcctgttcatttacggagtgatcctgaccgcattgttcctgaagagaggccggaagaagctgctgtacatcttcaagcagcctttcatgcggcccgtgcagaccacccaggaagaggacggctgctcctgccggttccccgaggaagaagaaggcggctgcgagctgcgggttaagttttccagatccgcagacgcacccgcttaccaacaagggcagaaccaactctacaatgaacttaatttggggcggagggaagagtacgacgttctggacaaaaggaggggacgagatcccgagatgggcggaaagcctcagcgaaggaagaatccgcaagaggggctttataacgaactccagaaagataaaatggcagaagcctatagtgagattgggatgaagggagaaaggaggaggggtaaaggtcacgatgggttgtaccaaggattgagcacagccactaaagatacctatgatgcgctccacatgcaggccctgccgccaaga

SEQ ID NO: 35133 - DNA, 1761 bp, synthetic construct
  source 1..1761: mol_type = other DNA
atggccttaccagtgaccgccttgctcctgccgctggccttgctgctccacgccgccaggccggacatcgtgatgacccagagccctgccaccctgtccgtgtctccaggcgaaagagccaccctgagctgcagagcttcccagagcgtgtccaacgacgtcgtgtggtatcagcagaagcccggccaggcccccagactgctgatctactacgccagcaacagatacaccggcatccccgccagattcagcggctctggcagcggcaccgagttcaccctgacaatcagcagcctccagagcgaggacttcgccgtgtactactgtcagcaggactacaccagcccctggaccttcggccagggcaccaagctggaaatcaagagactcgagcagagcttcggcctgctggaccccaagctgtgctacctgctggatggcatcctgttcatctacggcgtgatcctgaccgccctgttcctgagagtgaagttcagcagaagcgccgacgcccctgcctaccagcagggacagaaccaactgtacaacgagctgaacctgggcagacgggaagagtacgacgtgctggacaagcggagaggcagggaccctgagatgggcggaaagccccagcggagaaagaacccccaggaaggactgtataacgaactccagaaagacaagatggccgaagcctacagcgagatcggcatgaagggcgagcggagaagaggcaagggccacgatggcctgtaccagggcctgagcaccgccaccaaggacacctatgacgccctgcacatgcaggccctgcctccaagaagggccaagcgatctggatctggagcaacaaacttctcactactcaaacaagcaggtgacgtggaggagaatcccgggcctactagtatggactggatttggcgcatccttttccttgtcggcgctgctaccggcgcgcattccttcgaagaggtgcaactggtgcagagcggagccgaagtgaagaaacctggggccagcgtgcgggtgtcctgcaaggccagcggctacacctttaccaactacggcatgaactgggtgcgccaggctcctggacagggcctggaatggatgggctggatcaacacctacaccggcgagcccacctacgccgacgacttcaagggcagagtgaccatgaccaccgacaccagcacctccaccgcctacatggaactgcggagcctgagaagcgacgacaccgccgtgtattattgcgcccggatcggcgacagcagccccagcgattattggggccagggaaccctcgtgaccgtgtcctctacgcgtcagagttttgggttgttggaccctaaattgtgctatctgttggacggaatcctgttcatttacggagtgatcctgaccgcattgttcctgcgggttaagttttccagatccgcagacgcacccgcttaccaacaagggcagaaccaactctacaatgaacttaatttggggcggagggaagagtacgacgttctggacaaaaggaggggacgagatcccgagatgggcggaaagcctcagcgaaggaagaatccgcaagaggggctttataacgaactccagaaagataaaatggcagaagcctatagtgagattgggatgaagggagaaaggaggaggggtaaaggtcacgatgggttgtaccaaggattgagcacagccactaaagatacctatgatgcgctccacatgcaggccctgccgccaaga

SEQ ID NO: 35134 - DNA, 1935 bp, synthetic construct; identical to SEQ ID NO: 3785
  source 1..1935: mol_type = other DNA

SEQ ID NO: 35135 - DNA, 1869 bp, synthetic construct; identical to SEQ ID NO: 3786
  source 1..1869: mol_type = other DNA

SEQ ID NO: 35136 - DNA, 1869 bp, synthetic construct; identical to SEQ ID NO: 3787
  source 1..1869: mol_type = other DNA

SEQ ID NO: 35137 - DNA, 1347 bp, synthetic construct; identical to SEQ ID NO: 3788
  source 1..1347: mol_type = other DNA

SEQ ID NO: 35138 - DNA, 1242 bp, synthetic construct; identical to SEQ ID NO: 3789
  source 1..1242: mol_type = other DNA

SEQ ID NO: 35139 - DNA, 1272 bp, synthetic construct; identical to SEQ ID NO: 3790
  source 1..1272: mol_type = other DNA

SEQ ID NO: 35140 - DNA, 1221 bp, synthetic construct; identical to SEQ ID NO: 3791
  source 1..1221: mol_type = other DNA

SEQ ID NO: 35141 - DNA, 1506 bp, synthetic construct; identical to SEQ ID NO: 3796
  source 1..1506: mol_type = other DNA

SEQ ID NO: 35142 - DNA, 1431 bp, synthetic construct
  source 1..1431: mol_type = other DNA
atggccttaccagtgaccgccttgctcctgccgctggccttgctgctccacgccgccaggccggacatcgtgatgacccagagccctgccaccctgtccgtgtctccaggcgaaagagccaccctgagctgcagagcttcccagagcgtgtccaacgacgtcgtgtggtatcagcagaagcccggccaggcccccagactgctgatctactacgccagcaacagatacaccggcatccccgccagattcagcggctctggcagcggcaccgagttcaccctgacaatcagcagcctccagagcgaggacttcgccgtgtactactgtcagcaggactacaccagcccctggaccttcggccagggcaccaagctggaaatcaagagaggcggaggcggaagtggaggcggaggatctggcggcggaggctctgaggtgcaactggtgcagagcggagccgaagtgaagaaacctggggccagcgtgcgggtgtcctgcaaggccagcggctacacctttaccaactacggcatgaactgggtgcgccaggctcctggacagggcctggaatggatgggctggatcaacacctacaccggcgagcccacctacgccgacgacttcaagggcagagtgaccatgaccaccgacaccagcacctccaccgcctacatggaactgcggagcctgagaagcgacgacaccgccgtgtattattgcgcccggatcggcgacagcagccccagcgattattggggccagggaaccctcgtgaccgtgtcctctacgcgtggaatgaggactgaggatcttcccaaagctgtcgtctttctcgaaccccaatggtatcgggtgctcgaaaaagactctgtgacactgaaatgccaaggggcctactctcccgaggacaactccacacagtggtttcataatgagtccctcatcagctctcaggccagctcttatttcattgatgccgctacagtggacgactccggcgagtatcggtgtcagaccaatctgtctacactgtctgaccccgtgcagcttgaggtccacattggatggttgctcttgcaagccccacgctgggttttcaaagaggaagatccaatccatctgcggtgccacagctggaaaaacaccgctctccacaaagtcacatacctgcaaaatggcaaaggacgcaaatacttccatcacaattccgatttttacattccgaaggctaccctgaaagacagcggcagctatttctgccggggactcgtcggctccaagaatgtgtcctccgaaaccgtgaatatcacgattacccaaggactggctgtgcctacaatctctagcttctttccgcctggataccaagtctccttctgtcttgtgatggtcctcctgtttgctgtggacacaggactgtacttttccgtg

SEQ ID NO: 35143 - DNA, 1434 bp, synthetic construct
  source 1..1434: mol_type = other DNA
atggccttaccagtgaccgccttgctcctgccgctggccttgctgctccacgccgccaggccggacatcgtgatgacccagagccctgccaccctgtccgtgtctccaggcgaaagagccaccctgagctgcagagcttcccagagcgtgtccaacgacgtcgtgtggtatcagcagaagcccggccaggcccccagactgctgatctactacgccagcaacagatacaccggcatccccgccagattcagcggctctggcagcggcaccgagttcaccctgacaatcagcagcctccagagcgaggacttcgccgtgtactactgtcagcaggactacaccagcccctggaccttcggccagggcaccaagctggaaatcaagagaggcggaggcggaagtggaggcggaggatctggcggcggaggctctgaggtgcaactggtgcagagcggagccgaagtgaagaaacctggggccagcgtgcgggtgtcctgcaaggccagcggctacacctttaccaactacggcatgaactgggtgcgccaggctcctggacagggcctggaatggatgggctggatcaacacctacaccggcgagcccacctacgccgacgacttcaagggcagagtgaccatgaccaccgacaccagcacctccaccgcctacatggaactgcggagcctgagaagcgacgacaccgccgtgtattattgcgcccggatcggcgacagcagccccagcgattattggggccagggaaccctcgtgaccgtgtcctctacgcgtggaatgaggactgaggatcttcccaaagctgtcgtctttctcgaaccccaatggtatcgggtgctcgaaaaagactctgtgacactgaaatgccaaggggcctactctcccgaggacaactccacacagtggtttcataatgagtccctcatcagctctcaggccagctcttatttcattgatgccgctacagtggacgactccggcgagtatcggtgtcagaccaatctgtctacactgtctgaccccgtgcagcttgaggtccacattggatggttgctcttgcaagccccacgctgggttttcaaagaggaagatccaatccatctgcggtgccacagctggaaaaacaccgctctccacaaagtcacatacctgcaaaatggcaaaggacgcaaatacttccatcacaattccgatttttacattccgaaggctaccctgaaagacagcggcagctatttctgccggggactcgtcggctccaagaatgtgtcctccgaaaccgtgaatatcacgattacccaaggactggctgtgcctacaatctctagcttctttccgcctggataccaagtctccttctgtcttgtgatggtcctcctgtttgctgtggacacaggactgtacttttccgtgaaa

SEQ ID NO: 35144 - DNA, 2166 bp, synthetic construct
  source 1..2166: mol_type = other DNA
atggccttaccagtgaccgccttgctcctgccgctggccttgctgctccacgccgccaggccggacatcgtgatgacccagagccctgccaccctgtccgtgtctccaggcgaaagagccaccctgagctgcagagcttcccagagcgtgtccaacgacgtcgtgtggtatcagcagaagcccggccaggcccccagactgctgatctactacgccagcaacagatacaccggcatccccgccagattcagcggctctggcagcggcaccgagttcaccctgacaatcagcagcctccagagcgaggacttcgccgtgtactactgtcagcaggactacaccagcccctggaccttcggccagggcaccaagctggaaatcaagagactcgagggacagcctaaggccaatcctaccgtgacactgttccctccaagcagcgaagaactccaggccaacaaggccacacttgtgtgcctgatctccgacttctaccctggggctgtgacagtggcttggaaggccgatggatctcctgtgaaagccggcgtggaaaccaccaagccatccaagcagagcaacaacaaatacgccgccagctcctacctgagcctgacacctgagcagtggaagtcccacagatcctacagctgccaagtgacccacgaaggcagcaccgtggaaaagacagtggcccctacagagtgcagcggatcccagagcttcggcctgctggaccccaagctgtgctacctgctggatggcatcctgttcatctacggcgtgatcctgaccgccctgttcctgagagtgaagttcagcagaagcgccgacgcccctgcctaccagcagggacagaaccaactgtacaacgagctgaacctgggcagacgggaagagtacgacgtgctggacaagcggagaggcagggaccctgagatgggcggaaagccccagcggagaaagaacccccaggaaggactgtataacgaactccagaaagacaagatggccgaagcctacagcgagatcggcatgaagggcgagcggagaagaggcaagggccacgatggcctgtaccagggcctgagcaccgccaccaaggacacctatgacgccctgcacatgcaggccctgcctccaagaagggccaagcgatctggatctggagcaacaaacttctcactactcaaacaagcaggtgacgtggaggagaatcccgggcctactagtatggactggatttggcgcatccttttccttgtcggcgctgctaccggcgcgcattccttcgaagaggtgcaactggtgcagagcggagccgaagtgaagaaacctggggccagcgtgcgggtgtcctgcaaggccagcggctacacctttaccaactacggcatgaactgggtgcgccaggctcctggacagggcctggaatggatgggctggatcaacacctacaccggcgagcccacctacgccgacgacttcaagggcagagtgaccatgaccaccgacaccagcacctccaccgcctacatggaactgcggagcctgagaagcgacgacaccgccgtgtattattgcgcccggatcggcgacagcagccccagcgattattggggccagggaaccctcgtgaccgtgtcctctacgcgtgcctctacaaagggaccctccgtgtttcctctggctcccagcagcaagtctacaagcggaggaacagccgctctgggctgcctggtcaaggattactttcccgagcctgtgaccgtgtcctggaatagcggagcactgacaagcggcgtgcacacctttccagccgtgctgcaaagcagcggcctgtactctctgagcagcgtggtcacagtgcctagctctagcctgggcacccagacctacatctgcaatgtgaaccacaagcctagcaacaccaaggtggacaagagagtggaacccaagagctgtggtaccatcactcaaggtttggcagtgtcaaccatctcatcattctttccacctggctaccaagtgtccttctgcctggtcatggtgctgctgttcgccgtggataccggcctgtacttcagcgtcaagaccaacatccggtccagcaccagagactggaaggaccacaagttcaagtggcggaaggaccctcaggacaag

SEQ ID NO: 35145 - DNA, 2211 bp, synthetic construct
  source 1..2211: mol_type = other DNA
atggccttaccagtgaccgccttgctcctgccgctggccttgctgctccacgccgccaggccggacatcgtgatgacccagagccctgccaccctgtccgtgtctccaggcgaaagagccaccctgagctgcagagcttcccagagcgtgtccaacgacgtcgtgtggtatcagcagaagcccggccaggcccccagactgctgatctactacgccagcaacagatacaccggcatccccgccagattcagcggctctggcagcggcaccgagttcaccctgacaatcagcagcctccagagcgaggacttcgccgtgtactactgtcagcaggactacaccagcccctggaccttcggccagggcaccaagctggaaatcaagagactcgaggacctgaagaacgtgttcccacctgaggtggccgtgttcgagcctagcgaggccgagatcagccacacccagaaagccaccctcgtgtgcctggctaccggcttctaccccgaccatgtggaactgtcttggtgggtcaacggcaaagaggtgcacagcggcgtgtctaccgacccccagccactgaaagaacagcccgccctgaacgacagccggtactgcctgagcagcagactgagagtgtccgccaccttctggcagaacccccggaaccacttcagatgccaggtgcagttctacggcctgagcgagaacgacgagtggacccaggacagagccaagcccgtgacccagatcgtgtctgccgaagcctggggcagagccgattgcggatcccagagcttcggcctgctggaccccaagctgtgctacctgctggatggcatcctgttcatctacggcgtgatcctgaccgccctgttcctgagagtgaagttcagcagaagcgccgacgcccctgcctaccagcagggacagaaccaactgtacaacgagctgaacctgggcagacgggaagagtacgacgtgctggacaagcggagaggcagggaccctgagatgggcggaaagccccagcggagaaagaacccccaggaaggactgtataacgaactccagaaagacaagatggccgaagcctacagcgagatcggcatgaagggcgagcggagaagaggcaagggccacgatggcctgtaccagggcctgagcaccgccaccaaggacacctatgacgccctgcacatgcaggccctgcctccaagaagggccaagcgatctggatctggagcaacaaacttctcactactcaaacaagcaggtgacgtggaggagaatcccgggcctactagtatggactggatttggcgcatccttttccttgtcggcgctgctaccggcgcgcattccttcgaagaggtgcaactggtgcagagcggagccgaagtgaagaaacctggggccagcgtgcgggtgtcctgcaaggccagcggctacacctttaccaactacggcatgaactgggtgcgccaggctcctggacagggcctggaatggatgggctggatcaacacctacaccggcgagcccacctacgccgacgacttcaagggcagagtgaccatgaccaccgacaccagcacctccaccgcctacatggaactgcggagcctgagaagcgacgacaccgccgtgtattattgcgcccggatcggcgacagcagccccagcgattattggggccagggaaccctcgtgaccgtgtcctctacgcgtatccagaaccctgatcctgccgtgtaccagctgcgggatagcaagagcagcgacaagagcgtgtgtctgttcaccgacttcgacagccagaccaacgtgtcccagagcaaggactccgacgtgtacatcaccgataagaccgtgctggacatgcggagcatggacttcaagagcaactccgccgtggcctggtccaacaagtccgatttcgcctgcgccaacgccttcaacaacagcattatccccgaggacacattcttcccaagccccgagagcagctgcggtaccatcactcaaggtttggcagtgtcaaccatctcatcattctttccacctggctaccaagtgtccttctgcctggtcatggtgctgctgttcgccgtggataccggcctgtacttcagcgtcaagaccaacatccggtccagcaccagagactggaaggaccacaagttcaagtggcggaaggaccctcaggacaag

SEQ ID NO: 35146 - DNA, 2136 bp, synthetic construct
  source 1..2136: mol_type = other DNA
atggccttaccagtgaccgccttgctcctgccgctggccttgctgctccacgccgccaggccggacatcgtgatgacccagagccctgccaccctgtccgtgtctccaggcgaaagagccaccctgagctgcagagcttcccagagcgtgtccaacgacgtcgtgtggtatcagcagaagcccggccaggcccccagactgctgatctactacgccagcaacagatacaccggcatccccgccagattcagcggctctggcagcggcaccgagttcaccctgacaatcagcagcctccagagcgaggacttcgccgtgtactactgtcagcaggactacaccagcccctggaccttcggccagggcaccaagctggaaatcaagagactcgaggacctgaagaacgtgttcccacctgaggtggccgtgttcgagcctagcgaggccgagatcagccacacccagaaagccaccctcgtgtgcctggctaccggcttctaccccgaccatgtggaactgtcttggtgggtcaacggcaaagaggtgcacagcggcgtgtctaccgacccccagccactgaaagaacagcccgccctgaacgacagccggtactgcctgagcagcagactgagagtgtccgccaccttctggcagaacccccggaaccacttcagatgccaggtgcagttctacggcctgagcgagaacgacgagtggacccaggacagagccaagcccgtgacccagatcgtgtctgccgaagcctggggcagagccgattgcggatcccagagcttcggcctgctggaccccaagctgtgctacctgctggatggcatcctgttcatctacggcgtgatcctgaccgccctgttcctgagagtgaagttcagcagaagcgccgacgcccctgcctaccagcagggacagaaccaactgtacaacgagctgaacctgggcagacgggaagagtacgacgtgctggacaagcggagaggcagggaccctgagatgggcggaaagccccagcggagaaagaacccccaggaaggactgtataacgaactccagaaagacaagatggccgaagcctacagcgagatcggcatgaagggcgagcggagaagaggcaagggccacgatggcctgtaccagggcctgagcaccgccaccaaggacacctatgacgccctgcacatgcaggccctgcctccaagaagggccaagcgatctggatctggagcaacaaacttctcactactcaaacaagcaggtgacgtggaggagaatcccgggcctactagtatggactggatttggcgcatccttttccttgtcggcgctgctaccggcgcgcattccttcgaagaggtgcaactggtgcagagcggagccgaagtgaagaaacctggggccagcgtgcgggtgtcctgcaaggccagcggctacacctttaccaactacggcatgaactgggtgcgccaggctcctggacagggcctggaatggatgggctggatcaacacctacaccggcgagcccacctacgccgacgacttcaagggcagagtgaccatgaccaccgacaccagcacctccaccgcctacatggaactgcggagcctgagaagcgacgacaccgccgtgtattattgcgcccggatcggcgacagcagccccagcgattattggggccagggaaccctcgtgaccgtgtcctctacgcgtatccagaaccctgatcctgccgtgtaccagctgcgggatagcaagagcagcgacaagagcgtgtgtctgttcaccgacttcgacagccagaccaacgtgtcccagagcaaggactccgacgtgtacatcaccgataagaccgtgctggacatgcggagcatggacttcaagagcaactccgccgtggcctggtccaacaagtccgatttcgcctgcgccaacgccttcaacaacagcattatccccgaggacacattcttcccaagccccgagagcagctgcggtaccatcactcaaggtttggcagtgtcaaccatctcatcattctttccacctggctaccaagtgtccttctgcctggtcatggtgctgctgttcgccgtggataccggcctgtacttcagcgtc

SEQ ID NO: 35147 - DNA, 2139 bp, synthetic construct
  source 1..2139: mol_type = other DNA
atggccttaccagtgaccgccttgctcctgccgctggccttgctgctccacgccgccaggccggacatcgtgatgacccagagccctgccaccctgtccgtgtctccaggcgaaagagccaccctgagctgcagagcttcccagagcgtgtccaacgacgtcgtgtggtatcagcagaagcccggccaggcccccagactgctgatctactacgccagcaacagatacaccggcatccccgccagattcagcggctctggcagcggcaccgagttcaccctgacaatcagcagcctccagagcgaggacttcgccgtgtactactgtcagcaggactacaccagcccctggaccttcggccagggcaccaagctggaaatcaagagactcgaggacctgaagaacgtgttcccacctgaggtggccgtgttcgagcctagcgaggccgagatcagccacacccagaaagccaccctcgtgtgcctggctaccggcttctaccccgaccatgtggaactgtcttggtgggtcaacggcaaagaggtgcacagcggcgtgtctaccgacccccagccactgaaagaacagcccgccctgaacgacagccggtactgcctgagcagcagactgagagtgtccgccaccttctggcagaacccccggaaccacttcagatgccaggtgcagttctacggcctgagcgagaacgacgagtggacccaggacagagccaagcccgtgacccagatcgtgtctgccgaagcctggggcagagccgattgcggatcccagagcttcggcctgctggaccccaagctgtgctacctgctggatggcatcctgttcatctacggcgtgatcctgaccgccctgttcctgagagtgaagttcagcagaagcgccgacgcccctgcctaccagcagggacagaaccaactgtacaacgagctgaacctgggcagacgggaagagtacgacgtgctggacaagcggagaggcagggaccctgagatgggcggaaagccccagcggagaaagaacccccaggaaggactgtataacgaactccagaaagacaagatggccgaagcctacagcgagatcggcatgaagggcgagcggagaagaggcaagggccacgatggcctgtaccagggcctgagcaccgccaccaaggacacctatgacgccctgcacatgcaggccctgcctccaagaagggccaagcgatctggatctggagcaacaaacttctcactactcaaacaagcaggtgacgtggaggagaatcccgggcctactagtatggactggatttggcgcatccttttccttgtcggcgctgctaccggcgcgcattccttcgaagaggtgcaactggtgcagagcggagccgaagtgaagaaacctggggccagcgtgcgggtgtcctgcaaggccagcggctacacctttaccaactacggcatgaactgggtgcgccaggctcctggacagggcctggaatggatgggctggatcaacacctacaccggcgagcccacctacgccgacgacttcaagggcagagtgaccatgaccaccgacaccagcacctccaccgcctacatggaactgcggagcctgagaagcgacgacaccgccgtgtattattgcgcccggatcggcgacagcagccccagcgattattggggccagggaaccctcgtgaccgtgtcctctacgcgtatccagaaccctgatcctgccgtgtaccagctgcgggatagcaagagcagcgacaagagcgtgtgtctgttcaccgacttcgacagccagaccaacgtgtcccagagcaaggactccgacgtgtacatcaccgataagaccgtgctggacatgcggagcatggacttcaagagcaactccgccgtggcctggtccaacaagtccgatttcgcctgcgccaacgccttcaacaacagcattatccccgaggacacattcttcccaagccccgagagcagctgcggtaccatcactcaaggtttggcagtgtcaaccatctcatcattctttccacctggctaccaagtgtccttctgcctggtcatggtgctgctgttcgccgtggataccggcctgtacttcagcgtcaag

SEQ ID NO: 35148 - DNA, 2142 bp, synthetic construct
  source 1..2142: mol_type = other DNA
atggccttaccagtgaccgccttgctcctgccgctggccttgctgctccacgccgccaggccggacatcgtgatgacccagagccctgccaccctgtccgtgtctccaggcgaaagagccaccctgagctgcagagcttcccagagcgtgtccaacgacgtcgtgtggtatcagcagaagcccggccaggcccccagactgctgatctactacgccagcaacagatacaccggcatccccgccagattcagcggctctggcagcggcaccgagttcaccctgacaatcagcagcctccagagcgaggacttcgccgtgtactactgtcagcaggactacaccagcccctggaccttcggccagggcaccaagctggaaatcaagagactcgaggacctgaagaacgtgttcccacctgaggtggccgtgttcgagcctagcgaggccgagatcagccacacccagaaagccaccctcgtgtgcctggctaccggcttctaccccgaccatgtggaactgtcttggtgggtcaacggcaaagaggtgcacagcggcgtgtctaccgacccccagccactgaaagaacagcccgccctgaacgacagccggtactgcctgagcagcagactgagagtgtccgccaccttctggcagaacccccggaaccacttcagatgccaggtgcagttctacggcctgagcgagaacgacgagtggacccaggacagagccaagcccgtgacccagatcgtgtctgccgaagcctggggcagagccgattgcggatcccagagcttcggcctgctggaccccaagctgtgctacctgctggatggcatcctgttcatctacggcgtgatcctgaccgccctgttcctgagagtgaagttcagcagaagcgccgacgcccctgcctaccagcagggacagaaccaactgtacaacgagctgaacctgggcagacgggaagagtacgacgtgctggacaagcggagaggcagggaccctgagatgggcggaaagccccagcggagaaagaacccccaggaaggactgtataacgaactccagaaagacaagatggccgaagcctacagcgagatcggcatgaagggcgagcggagaagaggcaagggccacgatggcctgtaccagggcctgagcaccgccaccaaggacacctatgacgccctgcacatgcaggccctgcctccaagaagggccaagcgatctggatctggagcaacaaacttctcactactcaaacaagcaggtgacgtggaggagaatcccgggcctactagtatggactggatttggcgcatccttttccttgtcggcgctgctaccggcgcgcattccttcgaagaggtgcaactggtgcagagcggagccgaagtgaagaaacctggggccagcgtgcgggtgtcctgcaaggccagcggctacacctttaccaactacggcatgaactgggtgcgccaggctcctggacagggcctggaatggatgggctggatcaacacctacaccggcgagcccacctacgccgacgacttcaagggcagagtgaccatgaccaccgacaccagcacctccaccgcctacatggaactgcggagcctgagaagcgacgacaccgccgtgtattattgcgcccggatcggcgacagcagccccagcgattattggggccagggaaccctcgtgaccgtgtcctctacgcgtatccagaaccctgatcctgccgtgtaccagctgcgggatagcaagagcagcgacaagagcgtgtgtctgttcaccgacttcgacagccagaccaacgtgtcccagagcaaggactccgacgtgtacatcaccgataagaccgtgctggacatgcggagcatggacttcaagagcaactccgccgtggcctggtccaacaagtccgatttcgcctgcgccaacgccttcaacaacagcattatccccgaggacacattcttcccaagccccgagagcagctgcggtaccatcactcaaggtttggcagtgtcaaccatctcatcattctttccacctggctaccaagtgtccttctgcctggtcatggtgctgctgttcgccgtggataccggcctgtacttcagcgtcaagacc

SEQ ID NO: 35149 - DNA, 1953 bp, synthetic construct; identical to SEQ ID NO: 3815
  source 1..1953: mol_type = other DNA

SEQ ID NO: 35150 - DNA, 1860 bp, synthetic construct
  source 1..1860: mol_type = other DNA
atggccttaccagtgaccgccttgctcctgccgctggccttgctgctccacgccgccaggccggacatcgtgatgacccagagccctgccaccctgtccgtgtctccaggcgaaagagccaccctgagctgcagagcttcccagagcgtgtccaacgacgtcgtgtggtatcagcagaagcccggccaggcccccagactgctgatctactacgccagcaacagatacaccggcatccccgccagattcagcggctctggcagcggcaccgagttcaccctgacaatcagcagcctccagagcgaggacttcgccgtgtactactgtcagcaggactacaccagcccctggaccttcggccagggcaccaagctggaaatcaagagactcgaggacctgaagaacgtgttcccacctgaggtggccgtgttcgagcctagcgaggccgagatcagccacacccagaaagccaccctcgtgtgcctggctaccggcttctaccccgaccatgtggaactgtcttggtgggtcaacggcaaagaggtgcacagcggcgtgtgtaccgacccccagccactgaaagaacagcccgccctgaacgacagccggtactgcctgagcagcagactgagagtgtccgccaccttctggcagaacccccggaaccacttcagatgccaggtgcagttctacggcctgagcgagaacgacgagtggacccaggacagagccaagcccgtgacccagatcgtgtctgccgaagcctggggcagagccgattgcggctttaccagcgagagctaccagcagggcgtgctgagcgcctactacatgtacttgttgctgctgctgaagtccgtggtgtacttcgccatcatcacatgctgcctgctgcggagaaccgccttctgctgcaacggcgagaagtctagggccaagcgatctggatctggagcaacaaacttctcactactcaaacaagcaggtgacgtggaggagaatcccgggcctactagtatggactggatttggcgcatccttttccttgtcggcgctgctaccggcgcgcattccttcgaagaggtgcaactggtgcagagcggagccgaagtgaagaaacctggggccagcgtgcgggtgtcctgcaaggccagcggctacacctttaccaactacggcatgaactgggtgcgccaggctcctggacagggcctggaatggatgggctggatcaacacctacaccggcgagcccacctacgccgacgacttcaagggcagagtgaccatgaccaccgacaccagcacctccaccgcctacatggaactgcggagcctgagaagcgacgacaccgccgtgtattattgcgcccggatcggcgacagcagccccagcgattattggggccagggaaccctcgtgaccgtgtcctctacgcgtatccagaaccctgatcctgccgtgtaccagctgcgggatagcaagagcagcgacaagagcgtgtgtctgttcaccgacttcgacagccagaccaacgtgtcccagagcaaggactccgacgtgtacatcaccgataagtgcgtgctggacatgcggagcatggacttcaagagcaactccgccgtggcctggtccaacaagtccgatttcgcctgcgccaacgccttcaacaacagcattatccccgaggacacattcttcccaagccccgagagcagctgcgacgtgaagctggtggaaaagagcttcgagacagacaccaacctgaacttccagaacctgagcgtgatcggcttcagaatcctgctgctgaaagtggccggctttaacctgctgatgaccctgcggctgtggtccagc

SEQ ID NO: 35151 - DNA, 1881 bp, synthetic construct
  source 1..1881: mol_type = other DNA
atggccttaccagtgaccgccttgctcctgccgctggccttgctgctccacgccgccaggccggacatcgtgatgacccagagccctgccaccctgtccgtgtctccaggcgaaagagccaccctgagctgcagagcttcccagagcgtgtccaacgacgtcgtgtggtatcagcagaagcccggccaggcccccagactgctgatctactacgccagcaacagatacaccggcatccccgccagattcagcggctctggcagcggcaccgagttcaccctgacaatcagcagcctccagagcgaggacttcgccgtgtactactgtcagcaggactacaccagcccctggaccttcggccagggcaccaagctggaaatcaagagactcgaggacaagcagctggacgccgacgtgtcccccaagcctaccatcttcctgccctctatcgccgagacaaagctccagaaggccggcacctacctgtgcctgctggaaaagttcttcccagatgtgattaagatccactggcaggaaaagaagtccaacaccatcctgggcagccaggaaggcaacaccatgaagaccaacgacacctacatgaagttcagctggctgaccgtgcccgagaagtccctggacaaagaacacagatgcatcgtgcggcacgaaaacaacaagaacggcgtggaccaggaaatcatcttcccacccatcaagaccgatgtgattacaatggaccccaaggacaactgctccaaggacgccaacgataccctgctgctccagctgaccaacaccagcgcctactacatgtacgagatcctgctgggcaaggccaccctgtacgccgtgctggtgtctgccctggtgctgatggctatggtcaagcggaaggacagccggggaagggccaagcgatctggatctggagcaacaaacttctcactactcaaacaagcaggtgacgtggaggagaatcccgggcctactagtatggactggatttggcgcatccttttccttgtcggcgctgctaccggcgcgcattccttcgaagaggtgcaactggtgcagagcggagccgaagtgaagaaacctggggccagcgtgcgggtgtcctgcaaggccagcggctacacctttaccaactacggcatgaactgggtgcgccaggctcctggacagggcctggaatggatgggctggatcaacacctacaccggcgagcccacctacgccgacgacttcaagggcagagtgaccatgaccaccgacaccagcacctccaccgcctacatggaactgcggagcctgagaagcgacgacaccgccgtgtattattgcgcccggatcggcgacagcagccccagcgattattggggccagggaaccctcgtgaccgtgtcctctacgcgtagccagcctcacaccaagcccagcgtgttcgtgatgaagaacggcaccaacgtggcctgcctcgtgaaagagttctaccccaaggacatcaggatcaacctggtgtccagcaagaagatcaccgagttcgaccccgccatcgtgatctcccccagcggcaagtacaacgccgtgaagctggggaagtatgaggacagcaacagcgtgacctgctccgtgcagcacgacaacaagaccgtgcacagcaccgactttgaagtgaaaaccgactccaccgaccacgtgaagcccaaagagacagagaacaccaagcagcccagcaagagctgccacaagcccaaggccatcgtgcacaccgagaaagtgaacatgatgagcctgaccgtgatcggcttcagaatcctgctgctgaaagtggccggctttaacctgctgatgaccctgcggctgtggtccagctaa

SEQ ID NO: 35152 - DNA, 1881 bp, synthetic construct
  source 1..1881: mol_type = other DNA
atggccttaccagtgaccgccttgctcctgccgctggccttgctgctccacgccgccaggccggacatcgtgatgacccagagccctgccaccctgtccgtgtctccaggcgaaagagccaccctgagctgcagagcttcccagagcgtgtccaacgacgtcgtgtggtatcagcagaagcccggccaggcccccagactgctgatctactacgccagcaacagatacaccggcatccccgccagattcagcggctctggcagcggcaccgagttcaccctgacaatcagcagcctccagagcgaggacttcgccgtgtactactgtcagcaggactacaccagcccctggaccttcggccagggcaccaagctggaaatcaagagactcgaggacaagcagctggacgccgacgtgtcccccaagcctaccatcttcctgccctctatcgccgagacaaagctccagaaggccggcacctacctgtgcctgctggaaaagttcttcccagatgtgattaagatccactggcaggaaaagaagtccaacaccatcctgggcagccaggaaggcaacaccatgaagaccaacgacacctacatgaagttcagctggctgaccgtgcccgagaagtccctggacaaagaacacagatgcatcgtgcggcacgaaaacaacaagaacggcgtggaccaggaaatcatcttcccacccatcaagaccgatgtgattacaatggaccccaaggacaactgctccaaggacgccaacgataccctgctgctccagctgaccaacaccagcgccaccatcctgtacgagatcctgctgggcaaggccaccctgtacgccgtgctggtgtctgccctggtgctgatggctatggtcaagcggaaggacagccggggaagggccaagcgatctggatctggagcaacaaacttctcactactcaaacaagcaggtgacgtggaggagaatcccgggcctactagtatggactggatttggcgcatccttttccttgtcggcgctgctaccggcgcgcattccttcgaagaggtgcaactggtgcagagcggagccgaagtgaagaaacctggggccagcgtgcgggtgtcctgcaaggccagcggctacacctttaccaactacggcatgaactgggtgcgccaggctcctggacagggcctggaatggatgggctggatcaacacctacaccggcgagcccacctacgccgacgacttcaagggcagagtgaccatgaccaccgacaccagcacctccaccgcctacatggaactgcggagcctgagaagcgacgacaccgccgtgtattattgcgcccggatcggcgacagcagccccagcgattattggggccagggaaccctcgtgaccgtgtcctctacgcgtagccagcctcacaccaagcccagcgtgttcgtgatgaagaacggcaccaacgtggcctgcctcgtgaaagagttctaccccaaggacatcaggatcaacctggtgtccagcaagaagatcaccgagttcgaccccgccatcgtgatctcccccagcggcaagtacaacgccgtgaagctggggaagtatgaggacagcaacagcgtgacctgctccgtgcagcacgacaacaagaccgtgcacagcaccgactttgaagtgaaaaccgactccaccgaccacgtgaagcccaaagagacagagaacaccaagcagcccagcaagagctgccacaagcccaaggccatcgtgcacaccgagaaagtgaacatgatgagcctgaccgtgatcggcttcagaatcctgctgctgaaagtggccggctttaacctgctgatgaccctgcggctgtggtccagctaa

SEQ ID NO: 35153 - DNA, 1881 bp, synthetic construct
  source 1..1881: mol_type = other DNA
atggccttaccagtgaccgccttgctcctgccgctggccttgctgctccacgccgccaggccggacatcgtgatgacccagagccctgccaccctgtccgtgtctccaggcgaaagagccaccctgagctgcagagcttcccagagcgtgtccaacgacgtcgtgtggtatcagcagaagcccggccaggcccccagactgctgatctactacgccagcaacagatacaccggcatccccgccagattcagcggctctggcagcggcaccgagttcaccctgacaatcagcagcctccagagcgaggacttcgccgtgtactactgtcagcaggactacaccagcccctggaccttcggccagggcaccaagctggaaatcaagagactcgaggacaagcagctggacgccgacgtgtcccccaagcctaccatcttcctgccctctatcgccgagacaaagctccagaaggccggcacctacctgtgcctgctggaaaagttcttcccagatgtgattaagatccactggcaggaaaagaagtccaacaccatcctgggcagccaggaaggcaacaccatgaagaccaacgacacctacatgaagttcagctggctgaccgtgcccgagaagtccctggacaaagaacacagatgcatcgtgcggcacgaaaacaacaagaacggcgtggaccaggaaatcatcttcccacccatcaagaccgatgtgattacaatggaccccaaggacaactgctccaaggacgccaacgataccctgctgctccagctgaccaacaccagcgcctactacatgtacgagatcctgctgggcaaggccaccctgtacgccgtgctggtgtctgccctggtgctgatggctatggtcaagcggaaggacagccggggaagggccaagcgatctggatctggagcaacaaacttctcactactcaaacaagcaggtgacgtggaggagaatcccgggcctactagtatggactggatttggcgcatccttttccttgtcggcgctgctaccggcgcgcattccttcgaagaggtgcaactggtgcagagcggagccgaagtgaagaaacctggggccagcgtgcgggtgtcctgcaaggccagcggctacacctttaccaactacggcatgaactgggtgcgccaggctcctggacagggcctggaatggatgggctggatcaacacctacaccggcgagcccacctacgccgacgacttcaagggcagagtgaccatgaccaccgacaccagcacctccaccgcctacatggaactgcggagcctgagaagcgacgacaccgccgtgtattattgcgcccggatcggcgacagcagccccagcgattattggggccagggaaccctcgtgaccgtgtcctctacgcgtagccagcctcacaccaagcccagcgtgttcgtgatgaagaacggcaccaacgtggcctgcctcgtgaaagagttctaccccaaggacatcaggatcaacctggtgtccagcaagaagatcaccgagttcgaccccgccatcgtgatctcccccagcggcaagtacaacgccgtgaagctggggaagtacgaggacagcaacagcgtgacctgctccgtgcagcacgacaacaagaccgtgcacagcaccgactttgaagtgaaaaccgactccaccgaccacgtgaagcccaaagagacagagaacaccaagcagcccagcaagagctgccacaagcccaaggccatcgtgcacaccgagaaagtgaacatgatgagcctgaccgtgctgggcttcagaatcctgctgctgaaagtggccggctttaacctgctgatgaccctgcggctgtggtccagctaa

SEQ ID NO: 35154 - DNA, 1881 bp, synthetic construct
  source 1..1881: mol_type = other DNA
atggccttaccagtgaccgccttgctcctgccgctggccttgctgctccacgccgccaggccggacatcgtgatgacccagagccctgccaccctgtccgtgtctccaggcgaaagagccaccctgagctgcagagcttcccagagcgtgtccaacgacgtcgtgtggtatcagcagaagcccggccaggcccccagactgctgatctactacgccagcaacagatacaccggcatccccgccagattcagcggctctggcagcggcaccgagttcaccctgacaatcagcagcctccagagcgaggacttcgccgtgtactactgtcagcaggactacaccagcccctggaccttcggccagggcaccaagctggaaatcaagagactcgaggacaagcagctggacgccgacgtgtcccccaagcctaccatcttcctgccctctatcgccgagacaaagctccagaaggccggcacctacctgtgcctgctggaaaagttcttcccagatgtgattaagatccactggcaggaaaagaagtccaacaccatcctgggcagccaggaaggcaacaccatgaagaccaacgacacctacatgaagttcagctggctgaccgtgcccgagaagtccctggacaaagaacacagatgcatcgtgcggcacgaaaacaacaagaacggcgtggaccaggaaatcatcttcccacccatcaagaccgatgtgattacaatggaccccaaggacaactgctccaaggacgccaacgataccctgctgctccagctgaccaacaccagcgccaccatcctgtacgagatcctgctgggcaaggccaccctgtacgccgtgctggtgtctgccctggtgctgatggctatggtcaagcggaaggacagccggggaagggccaagcgatctggatctggagcaacaaacttctcactactcaaacaagcaggtgacgtggaggagaatcccgggcctactagtatggactggatttggcgcatccttttccttgtcggcgctgctaccggcgcgcattccttcgaagaggtgcaactggtgcagagcggagccgaagtgaagaaacctggggccagcgtgcgggtgtcctgcaaggccagcggctacacctttaccaactacggcatgaactgggtgcgccaggctcctggacagggcctggaatggatgggctggatcaacacctacaccggcgagcccacctacgccgacgacttcaagggcagagtgaccatgaccaccgacaccagcacctccaccgcctacatggaactgcggagcctgagaagcgacgacaccgccgtgtattattgcgcccggatcggcgacagcagccccagcgattattggggccagggaaccctcgtgaccgtgtcctctacgcgtagccagcctcacaccaagcccagcgtgttcgtgatgaagaacggcaccaacgtggcctgcctcgtgaaagagttctaccccaaggacatcaggatcaacctggtgtccagcaagaagatcaccgagttcgaccccgccatcgtgatctcccccagcggcaagtacaacgccgtgaagctggggaagtacgaggacagcaacagcgtgacctgctccgtgcagcacgacaacaagaccgtgcacagcaccgactttgaagtgaaaaccgactccaccgaccacgtgaagcccaaagagacagagaacaccaagcagcccagcaagagctgccacaagcccaaggccatcgtgcacaccgagaaagtgaacatgatgagcctgaccgtgctgggcttcagaatcctgctgctgaaagtggccggctttaacctgctgatgaccctgcggctgtggtccagctaa

SEQ ID NO: 35155 - DNA, 1863 bp, synthetic construct
  source 1..1863: mol_type = other DNA
atggccttaccagtgaccgccttgctcctgccgctggccttgctgctccacgccgccaggccggacatcgtgatgacccagagccctgccaccctgtccgtgtctccaggcgaaagagccaccctgagctgcagagcttcccagagcgtgtccaacgacgtcgtgtggtatcagcagaagcccggccaggcccccagactgctgatctactacgccagcaacagatacaccggcatccccgccagattcagcggctctggcagcggcaccgagttcaccctgacaatcagcagcctccagagcgaggacttcgccgtgtactactgtcagcaggactacaccagcccctggaccttcggccagggcaccaagctggaaatcaagagactcgaggacctgaagaacgtgttcccacctgaggtggccgtgttcgagcctagcgaggccgagatcagccacacccagaaagccaccctcgtgtgcctggctaccggcttctaccccgaccatgtggaactgtcttggtgggtcaacggcaaagaggtgcacagcggcgtgtgtaccgacccccagccactgaaagaacagcccgccctgaacgacagccggtactgcctgagcagcagactgagagtgtccgccaccttctggcagaacccccggaaccacttcagatgccaggtgcagttctacggcctgagcgagaacgacgagtggacccaggacagagccaagcccgtgacccagatcgtgtctgccgaagcctggggcagagccgattgcggctttaccagcgagagctaccagcagggcgtgctgagcgccaccatcctgtacttgttgctgctgctgaagtccgtggtgtacttcgccatcatcacatgctgcctgctgcggagaaccgccttctgctgcaacggcgagaagtctagggccaagcgatctggatctggagcaacaaacttctcactactcaaacaagcaggtgacgtggaggagaatcccgggcctactagtatggactggatttggcgcatccttttccttgtcggcgctgctaccggcgcgcattccttcgaagaggtgcaactggtgcagagcggagccgaagtgaagaaacctggggccagcgtgcgggtgtcctgcaaggccagcggctacacctttaccaactacggcatgaactgggtgcgccaggctcctggacagggcctggaatggatgggctggatcaacacctacaccggcgagcccacctacgccgacgacttcaagggcagagtgaccatgaccaccgacaccagcacctccaccgcctacatggaactgcggagcctgagaagcgacgacaccgccgtgtattattgcgcccggatcggcgacagcagccccagcgattattggggccagggaaccctcgtgaccgtgtcctctacgcgtatccagaaccctgatcctgccgtgtaccagctgcgggatagcaagagcagcgacaagagcgtgtgtctgttcaccgacttcgacagccagaccaacgtgtcccagagcaaggactccgacgtgtacatcaccgataagtgcgtgctggacatgcggagcatggacttcaagagcaactccgccgtggcctggtccaacaagtccgatttcgcctgcgccaacgccttcaacaacagcattatccccgaggacacattcttcccaagccccgagagcagctgcgacgtgaagctggtggaaaagagcttcgagacagacaccaacctgaacttccagaacctgagcgtgatcggcctgcggatgctgttcgccaaaaccgtggccgtgaacttcctgctgaccgccaagctgttcttcctctaa

SEQ ID NO: 35156 - DNA, 1950 bp, synthetic construct
  source 1..1950: mol_type = other DNA
atggccttaccagtgaccgccttgctcctgccgctggccttgctgctccacgccgccaggccggacatcgtgatgacccagagccctgccaccctgtccgtgtctccaggcgaaagagccaccctgagctgcagagcttcccagagcgtgtccaacgacgtcgtgtggtatcagcagaagcccggccaggcccccagactgctgatctactacgccagcaacagatacaccggcatccccgccagattcagcggctctggcagcggcaccgagttcaccctgacaatcagcagcctccagagcgaggacttcgccgtgtactactgtcagcaggactacaccagcccctggaccttcggccagggcaccaagctggaaatcaagagactcgaggacctgaagaacgtgttcccacctgaggtggccgtgttcgagcctagcgaggccgagatcagccacacccagaaagccaccctcgtgtgcctggctaccggcttctaccccgaccatgtggaactgtcttggtgggtcaacggcaaagaggtgcacagcggcgtgtctaccgacccccagccactgaaagaacagcccgccctgaacgacagccggtactgcctgagcagcagactgagagtgtccgccaccttctggcagaacccccggaaccacttcagatgccaggtgcagttctacggcctgagcgagaacgacgagtggacccaggacagagccaagcccgtgacccagatcgtgtctgccgaagcctggggcagagccgattgcggatcctccaaggacgccaacgataccctgctgctccagctgaccaacaccagcgcctactacatgtacttgttgctgctgctgaagtccgtggtgtacttcgccatcatcacatgctgcctgctgcggagaaccgccttctgctgcaacggcgagaagtctagggccaagcgatctggatctggagcaacaaacttctcactactcaaacaagcaggtgacgtggaggagaatcccgggcctactagtatggactggatttggcgcatccttttccttgtcggcgctgctaccggcgcgcattccttcgaagaggtgcaactggtgcagagcggagccgaagtgaagaaacctggggccagcgtgcgggtgtcctgcaaggccagcggctacacctttaccaactacggcatgaactgggtgcgccaggctcctggacagggcctggaatggatgggctggatcaacacctacaccggcgagcccacctacgccgacgacttcaagggcagagtgaccatgaccaccgacaccagcacctccaccgcctacatggaactgcggagcctgagaagcgacgacaccgccgtgtattattgcgcccggatcggcgacagcagccccagcgattattggggccagggaaccctcgtgaccgtgtcctctacgcgtatccagaaccctgatcctgccgtgtaccagctgcgggatagcaagagcagcgacaagagcgtgtgtctgttcaccgacttcgacagccagaccaacgtgtcccagagcaaggactccgacgtgtacatcaccgataagaccgtgctggacatgcggagcatggacttcaagagcaactccgccgtggcctggtccaacaagtccgatttcgcctgcgccaacgccttcaacaacagcattatccccgaggacacattcttcccaagccccgagagcagctgcggtaccgaagtgaaaaccgactccaccgaccacgtgaagcccaaagagacagagaacaccaagcagcccagcaagagctgccacaagcccaaggccatcgtgcacaccgagaaagtgaacatgatgagcctgaccgtgctgggcctgcggatgctgttcgccaaaaccgtggccgtgaacttcctgctgaccgccaagctgttcttcctctaa

SEQ ID NO: 35157 - DNA, 1860 bp, synthetic construct
  source 1..1860: mol_type = other DNA
atggccttaccagtgaccgccttgctcctgccgctggccttgctgctccacgccgccaggccggacatcgtgatgacccagagccctgccaccctgtccgtgtctccaggcgaaagagccaccctgagctgcagagcttcccagagcgtgtccaacgacgtcgtgtggtatcagcagaagcccggccaggcccccagactgctgatctactacgccagcaacagatacaccggcatccccgccagattcagcggctctggcagcggcaccgagttcaccctgacaatcagcagcctccagagcgaggacttcgccgtgtactactgtcagcaggactacaccagcccctggaccttcggccagggcaccaagctggaaatcaagagactcgaggacctgaagaacgtgttcccacctgaggtggccgtgttcgagcctagcgaggccgagatcagccacacccagaaagccaccctcgtgtgcctggctaccggcttctaccccgaccatgtggaactgtcttggtgggtcaacggcaaagaggtgcacagcggcgtgtgtaccgacccccagccactgaaagaacagcccgccctgaacgacagccggtactgcctgagcagcagactgagagtgtccgccaccttctggcagaacccccggaaccacttcagatgccaggtgcagttctacggcctgagcgagaacgacgagtggacccaggacagagccaagcccgtgacccagatcgtgtctgccgaagcctggggcagagccgattgcgacgtgaagctggtggaaaagagcttcgagacagacaccaacctgaacttccagaacctgagcgtgatcggcttcagaatcctgctgctgaaagtggccggctttaacctgctgatgaccctgcggctgtggtccagcagggccaagcgatctggatctggagcaacaaacttctcactactcaaacaagcaggtgacgtggaggagaatcccgggcctactagtatggactggatttggcgcatccttttccttgtcggcgctgctaccggcgcgcattccttcgaagaggtgcaactggtgcagagcggagccgaagtgaagaaacctggggccagcgtgcgggtgtcctgcaaggccagcggctacacctttaccaactacggcatgaactgggtgcgccaggctcctggacagggcctggaatggatgggctggatcaacacctacaccggcgagcccacctacgccgacgacttcaagggcagagtgaccatgaccaccgacaccagcacctccaccgcctacatggaactgcggagcctgagaagcgacgacaccgccgtgtattattgcgcccggatcggcgacagcagccccagcgattattggggccagggaaccctcgtgaccgtgtcctctacgcgtatccagaaccctgatcctgccgtgtaccagctgcgggatagcaagagcagcgacaagagcgtgtgtctgttcaccgacttcgacagccagaccaacgtgtcccagagcaaggactccgacgtgtacatcaccgataagtgcgtgctggacatgcggagcatggacttcaagagcaactccgccgtggcctggtccaacaagtccgatttcgcctgcgccaacgccttcaacaacagcattatccccgaggacacattcttcccaagccccgagagcagctgcggctttaccagcgagagctaccagcagggcgtgctgagcgccaccatcctgtacgagatcctgctgggcaaggccaccctgtacgccgtgctggtgtctgccctggtgctgatggctatggtcaagcggaaggacagccggggataa

SEQ ID NO: 35158 - DNA, 1860 bp, synthetic construct
  source 1..1860: mol_type = other DNA
atggccttaccagtgaccgccttgctcctgccgctggccttgctgctccacgccgccaggccggacatcgtgatgacccagagccctgccaccctgtccgtgtctccaggcgaaagagccaccctgagctgcagagcttcccagagcgtgtccaacgacgtcgtgtggtatcagcagaagcccggccaggcccccagactgctgatctactacgccagcaacagatacaccggcatccccgccagattcagcggctctggcagcggcaccgagttcaccctgacaatcagcagcctccagagcgaggacttcgccgtgtactactgtcagcaggactacaccagcccctggaccttcggccagggcaccaagctggaaatcaagagactcgaggacctgaagaacgtgttcccacctgaggtggccgtgttcgagcctagcgaggccgagatcagccacacccagaaagccaccctcgtgtgcctggctaccggcttctaccccgaccatgtggaactgtcttggtgggtcaacggcaaagaggtgcacagcggcgtgtgtaccgacccccagccactgaaagaacagcccgccctgaacgacagccggtactgcctgagcagcagactgagagtgtccgccaccttctggcagaacccccggaaccacttcagatgccaggtgcagttctacggcctgagcgagaacgacgagtggacccaggacagagccaagcccgtgacccagatcgtgtctgccgaagcctggggcagagccgattgcggctttaccagcgagagctaccagcagggcgtgctgagcgccaccaacctgagcgtgatcggcttcagaatcctgctgctgaaagtggccggctttaacctgctgatgaccctgcggctgtggtccagcagggccaagcgatctggatctggagcaacaaacttctcactactcaaacaagcaggtgacgtggaggagaatcccgggcctactagtatggactggatttggcgcatccttttccttgtcggcgctgctaccggcgcgcattccttcgaagaggtgcaactggtgcagagcggagccgaagtgaagaaacctggggccagcgtgcgggtgtcctgcaaggccagcggctacacctttaccaactacggcatgaactgggtgcgccaggctcctggacagggcctggaatggatgggctggatcaacacctacaccggcgagcccacctacgccgacgacttcaagggcagagtgaccatgaccaccgacaccagcacctccaccgcctacatggaactgcggagcctgagaagcgacgacaccgccgtgtattattgcgcccggatcggcgacagcagccccagcgattattggggccagggaaccctcgtgaccgtgtcctctacgcgtatccagaaccctgatcctgccgtgtaccagctgcgggatagcaagagcagcgacaagagcgtgtgtctgttcaccgacttcgacagccagaccaacgtgtcccagagcaaggactccgacgtgtacatcaccgataagtgcgtgctggacatgcggagcatggacttcaagagcaactccgccgtggcctggtccaacaagtccgatttcgcctgcgccaacgccttcaacaacagcattatccccgaggacacattcttcccaagccccgagagcagctgcgacgtgaagctggtggaaaagagcttcgagacagacaccaacctgaacttccagatcctgtacgagatcctgctgggcaaggccaccctgtacgccgtgctggtgtctgccctggtgctgatggctatggtcaagcggaaggacagccggggataa

SEQ ID NO: 35159 - DNA, 1860 bp, synthetic construct; identical to SEQ ID NO: 35157
  source 1..1860: mol_type = other DNA

SEQ ID NO: 35160 - DNA, 1860 bp, synthetic construct; identical to SEQ ID NO: 35158
  source 1..1860: mol_type = other DNA

SEQ ID NO: 35161 - DNA, 1857 bp, synthetic construct
  source 1..1857: mol_type = other DNA
atggccttaccagtgaccgccttgctcctgccgctggccttgctgctccacgccgccaggccggacatcgtgatgacccagagccctgccaccctgtccgtgtctccaggcgaaagagccaccctgagctgcagagcttcccagagcgtgtccaacgacgtcgtgtggtatcagcagaagcccggccaggcccccagactgctgatctactacgccagcaacagatacaccggcatccccgccagattcagcggctctggcagcggcaccgagttcaccctgacaatcagcagcctccagagcgaggacttcgccgtgtactactgtcagcaggactacaccagcccctggaccttcggccagggcaccaagctggaaatcaagagactcgaggacctgaagaacgtgttcccacctgaggtggccgtgttcgagcctagcgaggccgagatcagccacacccagaaagccaccctcgtgtgcctggctaccggcttctaccccgaccatgtggaactgtcttggtgggtcaacggcaaagaggtgcacagcggcgtgtgtaccgacccccagccactgaaagaacagcccgccctgaacgacagccggtactgcctgagcagcagactgagagtgtccgccaccttctggcagaacccccggaaccacttcagatgccaggtgcagttctacggcctgagcgagaacgacgagtggacccaggacagagccaagcccgtgacccagatcgtgtctgccgaagcctggggcagagccgattgcgacgtgaagctggtggaaaagagcttcgagacagacaccaacctgaacttccagaacctgagcgtgatcggcttcagaatcctgctgctgaaagtggccggctttaacctgctgatgaccctgcggctgtggtccagcagggccaagcgatctggatctggagcaacaaacttctcactactcaaacaagcaggtgacgtggaggagaatcccgggcctactagtatggactggatttggcgcatccttttccttgtcggcgctgctaccggcgcgcattccttcgaagaggtgcaactggtgcagagcggagccgaagtgaagaaacctggggccagcgtgcgggtgtcctgcaaggccagcggctacacctttaccaactacggcatgaactgggtgcgccaggctcctggacagggcctggaatggatgggctggatcaacacctacaccggcgagcccacctacgccgacgacttcaagggcagagtgaccatgaccaccgacaccagcacctccaccgcctacatggaactgcggagcctgagaagcgacgacaccgccgtgtattattgcgcccggatcggcgacagcagccccagcgattattggggccagggaaccctcgtgaccgtgtcctctacgcgtatccagaaccctgatcctgccgtgtaccagctgcgggatagcaagagcagcgacaagagcgtgtgtctgttcaccgacttcgacagccagaccaacgtgtcccagagcaaggactccgacgtgtacatcaccgataagtgcgtgctggacatgcggagcatggacttcaagagcaactccgccgtggcctggtccaacaagtccgatttcgcctgcgccaacgccttcaacaacagcattatccccgaggacacattcttcccaagccccgagagcagctgcggctttaccagcgagagctaccagcagggcgtgctgagcgccaccatcctgtacgagatcctgctgggcaaggccaccctgtacgccgtgctggtgtctgccctggtgctgatggctatggtcaagcggaaggacagccgggga

SEQ ID NO: 35162 - DNA, 1869 bp, synthetic construct
  source 1..1869: mol_type = other DNA
atggccttaccagtgaccgccttgctcctgccgctggccttgctgctccacgccgccaggccggacatcgtgatgacccagagccctgccaccctgtccgtgtctccaggcgaaagagccaccctgagctgcagagcttcccagagcgtgtccaacgacgtcgtgtggtatcagcagaagcccggccaggcccccagactgctgatctactacgccagcaacagatacaccggcatccccgccagattcagcggctctggcagcggcaccgagttcaccctgacaatcagcagcctccagagcgaggacttcgccgtgtactactgtcagcaggactacaccagcccctggaccttcggccagggcaccaagctggaaatcaagagactcgaggccgacgtgtcccccaagcctaccatcttcctgccctctatcgccgagacaaagctccagaaggccggcacctacctgtgcctgctggaaaagttcttcccagatgtgattaagatccactggcaggaaaagaagtccaacaccatcctgggcagccaggaaggcaacaccatgaagaccaacgacacctacatgaagttcagctggctgaccgtgcccgagaagtccctggacaaagaacacagatgcatcgtgcggcacgaaaacaacaagaacggcgtggaccaggaaatcatcttcccacccatcaagaccgatgtgattacaatggaccccaaggacaactgctccaaggacgccaacgataccctgctgctccagctgaccaacaccagcgcctactacatgtacttgttgctgctgctgaagtccgtggtgtacttcgccatcatcacatgctgcctgctgcggagaaccgccttctgctgcaacggcgagaagtctagggccaagcgatctggatctggagcaacaaacttctcactactcaaacaagcaggtgacgtggaggagaatcccgggcctactagtatggactggatttggcgcatccttttccttgtcggcgctgctaccggcgcgcattccttcgaagaggtgcaactggtgcagagcggagccgaagtgaagaaacctggggccagcgtgcgggtgtcctgcaaggccagcggctacacctttaccaactacggcatgaactgggtgcgccaggctcctggacagggcctggaatggatgggctggatcaacacctacaccggcgagcccacctacgccgacgacttcaagggcagagtgaccatgaccaccgacaccagcacctccaccgcctacatggaactgcggagcctgagaagcgacgacaccgccgtgtattattgcgcccggatcggcgacagcagccccagcgattattggggccagggaaccctcgtgaccgtgtcctctacgcgtagccagcctcacaccaagcccagcgtgttcgtgatgaagaacggcaccaacgtggcctgcctcgtgaaagagttctaccccaaggacatcaggatcaacctggtgtccagcaagaagatcaccgagttcgaccccgccatcgtgatctcccccagcggcaagtacaacgccgtgaagctggggaagtatgaggacagcaacagcgtgacctgctccgtgcagcacgacaacaagaccgtgcacagcaccgactttgaagtgaaaaccgactccaccgaccacgtgaagcccaaagagacagagaacaccaagcagcccagcaagagctgccacaagcccaaggccatcgtgcacaccgagaaagtgaacatgatgagcctgaccgtgatcggcttcagaatcctgctgctgaaagtggccggctttaacctgctgatgaccctgcggctgtggtccagctaa

SEQ ID NO: 35163 - DNA, 1869 bp, synthetic construct
  source 1..1869: mol_type = other DNA
atggccttaccagtgaccgccttgctcctgccgctggccttgctgctccacgccgccaggccggacatcgtgatgacccagagccctgccaccctgtccgtgtctccaggcgaaagagccaccctgagctgcagagcttcccagagcgtgtccaacgacgtcgtgtggtatcagcagaagcccggccaggcccccagactgctgatctactacgccagcaacagatacaccggcatccccgccagattcagcggctctggcagcggcaccgagttcaccctgacaatcagcagcctccagagcgaggacttcgccgtgtactactgtcagcaggactacaccagcccctggaccttcggccagggcaccaagctggaaatcaagagactcgaggccgacgtgtcccccaagcctaccatcttcctgccctctatcgccgagacaaagctccagaaggccggcacctacctgtgcctgctggaaaagttcttcccagatgtgattaagatccactggcaggaaaagaagtccaacaccatcctgggcagccaggaaggcaacaccatgaagaccaacgacacctacatgaagttcagctggctgaccgtgcccgagaagtccctggacaaagaacacagatgcatcgtgcggcacgaaaacaacaagaacggcgtggaccaggaaatcatcttcccacccatcaagaccgatgtgattacaatggaccccaaggacaactgctccaaggacgccaacgataccctgctgctccagctgaccaacaccagcgcctactacatgtacttgttgctgctgctgaagtccgtggtgtacttcgccatcatcacatgctgcctgctgcggagaaccgccttctgctgcaacggcgagaagtctagggccaagcgatctggatctggagcaacaaacttctcactactcaaacaagcaggtgacgtggaggagaatcccgggcctactagtatggactggatttggcgcatccttttccttgtcggcgctgctaccggcgcgcattccttcgaagaggtgcaactggtgcagagcggagccgaagtgaagaaacctggggccagcgtgcgggtgtcctgcaaggccagcggctacacctttaccaactacggcatgaactgggtgcgccaggctcctggacagggcctggaatggatgggctggatcaacacctacaccggcgagcccacctacgccgacgacttcaagggcagagtgaccatgaccaccgacaccagcacctccaccgcctacatggaactgcggagcctgagaagcgacgacaccgccgtgtattattgcgcccggatcggcgacagcagccccagcgattattggggccagggaaccctcgtgaccgtgtcctctacgcgtagccagcctcacaccaagcccagcgtgttcgtgatgaagaacggcaccaacgtggcctgcctcgtgaaagagttctaccccaaggacatcaggatcaacctggtgtccagcaagaagatcaccgagttcgaccccgccatcgtgatctcccccagcggcaagtacaacgccgtgaagctggggaagtacgaggacagcaacagcgtgacctgctccgtgcagcacgacaacaagaccgtgcacagcaccgactttgaagtgaaaaccgactccaccgaccacgtgaagcccaaagagacagagaacaccaagcagcccagcaagagctgccacaagcccaaggccatcgtgcacaccgagaaagtgaacatgatgagcctgaccgtgctgggcttcagaatcctgctgctgaaagtggccggctttaacctgctgatgaccctgcggctgtggtccagctaa

SEQ ID NO: 35164 - DNA, 1857 bp, synthetic construct; identical to SEQ ID NO: 35161
  source 1..1857: mol_type = other DNA

SEQ ID NO: 35165 - DNA, 1869 bp, synthetic construct
  source 1..1869: mol_type = other DNA
atggccttaccagtgaccgccttgctcctgccgctggccttgctgctccacgccgccaggccggacatcgtgatgacccagagccctgccaccctgtccgtgtctccaggcgaaagagccaccctgagctgcagagcttcccagagcgtgtccaacgacgtcgtgtggtatcagcagaagcccggccaggcccccagactgctgatctactacgccagcaacagatacaccggcatccccgccagattcagcggctctggcagcggcaccgagttcaccctgacaatcagcagcctccagagcgaggacttcgccgtgtactactgtcagcaggactacaccagcccctggaccttcggccagggcaccaagctggaaatcaagagactcgagatccagaaccctgatcctgccgtgtaccagctgcgggatagcaagagcagcgacaagagcgtgtgtctgttcaccgacttcgacagccagaccaacgtgtcccagagcaaggactccgacgtgtacatcaccgataagtgcgtgctggacatgcggagcatggacttcaagagcaactccgccgtggcctggtccaacaagtccgatttcgcctgcgccaacgccttcaacaacagcattatccccgaggacacattcttcccaagccccgagagcagctgcggctttaccagcgagagctaccagcagggcgtgctgagcgccaccatcctgtacgagatcctgctgggcaaggccaccctgtacgccgtgctggtgtctgccctggtgctgatggctatggtcaagcggaaggacagccggggacgcgccaagagaagcggatctggcgtgaagcagaccctgaatttcgacctgctgaagctggctggcgacgtggaatccaacccaggccctactagtatggactggatttggcgcatccttttccttgtcggcgctgctaccggcgcgcattccttcgaagaggtgcaactggtgcagagcggagccgaagtgaagaaacctggggccagcgtgcgggtgtcctgcaaggccagcggctacacctttaccaactacggcatgaactgggtgcgccaggctcctggacagggcctggaatggatgggctggatcaacacctacaccggcgagcccacctacgccgacgacttcaagggcagagtgaccatgaccaccgacaccagcacctccaccgcctacatggaactgcggagcctgagaagcgacgacaccgccgtgtattattgcgcccggatcggcgacagcagccccagcgattattggggccagggaaccctcgtgaccgtgtcctctacgcgtgaggacctgaagaacgtgttcccacctgaggtggccgtgttcgagcctagcgaggccgagatcagccacacccagaaagccaccctcgtgtgcctggctaccggcttctaccccgaccatgtggaactgtcttggtgggtcaacggcaaagaggtgcacagcggcgtgtgtaccgacccccagccactgaaagaacagcccgccctgaacgacagccggtactgcctgagcagcagactgagagtgtccgccaccttctggcagaacccccggaaccacttcagatgccaggtgcagttctacggcctgagcgagaacgacgagtggacccaggacagagccaagcccgtgacccagatcgtgtctgccgaagcctggggcagagccgattgcgacgtgaagctggtggaaaagagcttcgagacagacaccaacctgaacttccagaacctgagcgtgatcggcttcagaatcctgctgctgaaagtggccggctttaacctgctgatgaccctgcggctgtggtccagc

SEQ ID NO: 35166 - DNA, 2262 bp, synthetic construct
  source 1..2262: mol_type = other DNA
atggccttaccagtgaccgccttgctcctgccgctggccttgctgctccacgccgccaggccggaagtgcagctggttgaatctggcggaggactggttcagcctggcggatctctgagactgtcttgtgccgccagcggcttcagcttcagcgacttttggatgagctgggtccgacaggcccctggcaaaggacttgaatgggtcgccacaatcagccaggccggcagcgagaaggactacgtggactctgtgaagggcagattcaccatcagccgggacaacgccaagaagtccctgtacctccagatgaacagcctgagagccgaggacaccgccgtgtactattgtgcctctggcgtgtacagcttcgactacagaggccagggcaccctggtcacagtctcttctggtaccggcggaggcggatctggcggcggaggtagcggtggcggaggatctgaattcgacatcgtgatgacccagagccctgccaccctgtccgtgtctccaggcgaaagagccaccctgagctgcagagcttcccagagcgtgtccaacgacgtcgtgtggtatcagcagaagcccggccaggcccccagactgctgatctactacgccagcaacagatacaccggcatccccgccagattcagcggctctggcagcggcaccgagttcaccctgacaatcagcagcctccagagcgaggacttcgccgtgtactactgtcagcaggactacaccagcccctggaccttcggccagggcaccaagctggaaatcaagagactcgaggacctgaagaacgtgttcccacctgaggtggccgtgttcgagcctagcgaggccgagatcagccacacccagaaagccaccctcgtgtgcctggctaccggcttctaccccgaccatgtggaactgtcttggtgggtcaacggcaaagaggtgcacagcggcgtgtgtaccgacccccagccactgaaagaacagcccgccctgaacgacagccggtactgcctgagcagcagactgagagtgtccgccaccttctggcagaacccccggaaccacttcagatgccaggtgcagttctacggcctgagcgagaacgacgagtggacccaggacagagccaagcccgtgacccagatcgtgtctgccgaagcctggggcagagccgattgcgacgtgaagctggtggaaaagagcttcgagacagacaccaacctgaacttccagaacctgagcgtgatcggcttcagaatcctgctgctgaaagtggccggctttaacctgctgatgaccctgcggctgtggtccagcagggccaagcgatctggatctggagcaacaaacttctcactactcaaacaagcaggtgacgtggaggagaatcccgggcctactagtatggactggatttggcgcatccttttccttgtcggcgctgctaccggcgcgcattccttcgaagaggtgcaactggtgcagagcggagccgaagtgaagaaacctggggccagcgtgcgggtgtcctgcaaggccagcggctacacctttaccaactacggcatgaactgggtgcgccaggctcctggacagggcctggaatggatgggctggatcaacacctacaccggcgagcccacctacgccgacgacttcaagggcagagtgaccatgaccaccgacaccagcacctccaccgcctacatggaactgcggagcctgagaagcgacgacaccgccgtgtattattgcgcccggatcggcgacagcagccccagcgattattggggccagggaaccctcgtgaccgtgtcctctacgcgtatccagaaccctgatcctgccgtgtaccagctgcgggatagcaagagcagcgacaagagcgtgtgtctgttcaccgacttcgacagccagaccaacgtgtcccagagcaaggactccgacgtgtacatcaccgataagtgcgtgctggacatgcggagcatggacttcaagagcaactccgccgtggcctggtccaacaagtccgatttcgcctgcgccaacgccttcaacaacagcattatccccgaggacacattcttcccaagccccgagagcagctgcggctttaccagcgagagctaccagcagggcgtgctgagcgccaccatcctgtacgagatcctgctgggcaaggccaccctgtacgccgtgctggtgtctgccctggtgctgatggctatggtcaagcggaaggacagccgggga

SEQ ID NO: 35167 - DNA, 2274 bp, synthetic construct
  source 1..2274: mol_type = other DNA
atggccttaccagtgaccgccttgctcctgccgctggccttgctgctccacgccgccaggccggaagtgcagctggttgaatctggcggaggactggttcagcctggcggatctctgagactgtcttgtgccgccagcggcttcagcttcagcgacttttggatgagctgggtccgacaggcccctggcaaaggacttgaatgggtcgccacaatcagccaggccggcagcgagaaggactacgtggactctgtgaagggcagattcaccatcagccgggacaacgccaagaagtccctgtacctccagatgaacagcctgagagccgaggacaccgccgtgtactattgtgcctctggcgtgtacagcttcgactacagaggccagggcaccctggtcacagtctcttctggtaccggcggaggcggatctggcggcggaggtagcggtggcggaggatctgaattcgacatcgtgatgacccagagccctgccaccctgtccgtgtctccaggcgaaagagccaccctgagctgcagagcttcccagagcgtgtccaacgacgtcgtgtggtatcagcagaagcccggccaggcccccagactgctgatctactacgccagcaacagatacaccggcatccccgccagattcagcggctctggcagcggcaccgagttcaccctgacaatcagcagcctccagagcgaggacttcgccgtgtactactgtcagcaggactacaccagcccctggaccttcggccagggcaccaagctggaaatcaagagactcgagatccagaaccctgatcctgccgtgtaccagctgcgggatagcaagagcagcgacaagagcgtgtgtctgttcaccgacttcgacagccagaccaacgtgtcccagagcaaggactccgacgtgtacatcaccgataagtgcgtgctggacatgcggagcatggacttcaagagcaactccgccgtggcctggtccaacaagtccgatttcgcctgcgccaacgccttcaacaacagcattatccccgaggacacattcttcccaagccccgagagcagctgcggctttaccagcgagagctaccagcagggcgtgctgagcgccaccatcctgtacgagatcctgctgggcaaggccaccctgtacgccgtgctggtgtctgccctggtgctgatggctatggtcaagcggaaggacagccggggacgcgccaagagaagcggatctggcgtgaagcagaccctgaatttcgacctgctgaagctggctggcgacgtggaatccaacccaggccctactagtatggactggatttggcgcatccttttccttgtcggcgctgctaccggcgcgcattccttcgaagaggtgcaactggtgcagagcggagccgaagtgaagaaacctggggccagcgtgcgggtgtcctgcaaggccagcggctacacctttaccaactacggcatgaactgggtgcgccaggctcctggacagggcctggaatggatgggctggatcaacacctacaccggcgagcccacctacgccgacgacttcaagggcagagtgaccatgaccaccgacaccagcacctccaccgcctacatggaactgcggagcctgagaagcgacgacaccgccgtgtattattgcgcccggatcggcgacagcagccccagcgattattggggccagggaaccctcgtgaccgtgtcctctacgcgtgaggacctgaagaacgtgttcccacctgaggtggccgtgttcgagcctagcgaggccgagatcagccacacccagaaagccaccctcgtgtgcctggctaccggcttctaccccgaccatgtggaactgtcttggtgggtcaacggcaaagaggtgcacagcggcgtgtgtaccgacccccagccactgaaagaacagcccgccctgaacgacagccggtactgcctgagcagcagactgagagtgtccgccaccttctggcagaacccccggaaccacttcagatgccaggtgcagttctacggcctgagcgagaacgacgagtggacccaggacagagccaagcccgtgacccagatcgtgtctgccgaagcctggggcagagccgattgcgacgtgaagctggtggaaaagagcttcgagacagacaccaacctgaacttccagaacctgagcgtgatcggcttcagaatcctgctgctgaaagtggccggctttaacctgctgatgaccctgcggctgtggtccagc

SEQ ID NO: 35168 - DNA, 2673 bp, synthetic construct
  source 1..2673: mol_type = other DNA
atggccttaccagtgaccgccttgctcctgccgctggccttgctgctccacgccgccaggccggaagtgcagctggttgaatctggcggaggactggttcagcctggcggatctctgagactgtcttgtgccgccagcggcttcagcttcagcgacttttggatgagctgggtccgacaggcccctggcaaaggacttgaatgggtcgccacaatcagccaggccggcagcgagaaggactacgtggactctgtgaagggcagattcaccatcagccgggacaacgccaagaagtccctgtacctccagatgaacagcctgagagccgaggacaccgccgtgtactattgtgcctctggcgtgtacagcttcgactacagaggccagggcaccctggtcacagtctcttctggtaccggcggaggcggatctggcggcggaggtagcggtggcggaggatctgaattcgacatcgtgatgacccagagccctgccaccctgtccgtgtctccaggcgaaagagccaccctgagctgcagagcttcccagagcgtgtccaacgacgtcgtgtggtatcagcagaagcccggccaggcccccagactgctgatctactacgccagcaacagatacaccggcatccccgccagattcagcggctctggcagcggcaccgagttcaccctgacaatcagcagcctccagagcgaggacttcgccgtgtactactgtcagcaggactacaccagcccctggaccttcggccagggcaccaagctggaaatcaagagactcgaggacctgaagaacgtgttcccacctgaggtggccgtgttcgagcctagcgaggccgagatcagccacacccagaaagccaccctcgtgtgcctggctaccggcttctaccccgaccatgtggaactgtcttggtgggtcaacggcaaagaggtgcacagcggcgtgtgtaccgacccccagccactgaaagaacagcccgccctgaacgacagccggtactgcctgagcagcagactgagagtgtccgccaccttctggcagaacccccggaaccacttcagatgccaggtgcagttctacggcctgagcgagaacgacgagtggacccaggacagagccaagcccgtgacccagatcgtgtctgccgaagcctggggcagagccgattgcgacgtgaagctggtggaaaagagcttcgagacagacaccaacctgaacttccagaacctgagcgtgatcggcttcagaatcctgctgctgaaagtggccggctttaacctgctgatgaccctgcggctgtggtccagcagggccaagcgatctggatctggagcaacaaacttctcactactcaaacaagcaggtgacgtggaggagaatcccgggcctactagtatggactggatttggcgcatccttttccttgtcggcgctgctaccggcgcgcattccgggccccagctccagctgcaagagtctggacctggcctggtcaagcctagcgagacactgagcctgacctgtaccgtgtccggcgatagcatcagcagcggcgattactactggggctggatcagacagcctcctggcaaaggactggaatggatcggccacatctactacagcggcgtgacctactacaaccccagcctgaagtccagagtgaccatcagcgtggacaccagccggaaccagttctccctgaagctgtctagcgtgacagccgccgataccgccgtgtactactgcaccagagaggacagcagcaactggcggagtagaggccagggaacactggtcacagttagctctggatccggcggaggcggaagtggaggcggaggatctggcggcggaggctctttcgaagaggtgcaactggtgcagagcggagccgaagtgaagaaacctggggccagcgtgcgggtgtcctgcaaggccagcggctacacctttaccaactacggcatgaactgggtgcgccaggctcctggacagggcctggaatggatgggctggatcaacacctacaccggcgagcccacctacgccgacgacttcaagggcagagtgaccatgaccaccgacaccagcacctccaccgcctacatggaactgcggagcctgagaagcgacgacaccgccgtgtattattgcgcccggatcggcgacagcagccccagcgattattggggccagggaaccctcgtgaccgtgtcctctacgcgtatccagaaccctgatcctgccgtgtaccagctgcgggatagcaagagcagcgacaagagcgtgtgtctgttcaccgacttcgacagccagaccaacgtgtcccagagcaaggactccgacgtgtacatcaccgataagtgcgtgctggacatgcggagcatggacttcaagagcaactccgccgtggcctggtccaacaagtccgatttcgcctgcgccaacgccttcaacaacagcattatccccgaggacacattcttcccaagccccgagagcagctgcggctttaccagcgagagctaccagcagggcgtgctgagcgccaccatcctgtacgagatcctgctgggcaaggccaccctgtacgccgtgctggtgtctgccctggtgctgatggctatggtcaagcggaaggacagccgggga

SEQ ID NO: 35169 - DNA, 2685 bp, synthetic construct
  source 1..2685: mol_type = other DNA
atggccttaccagtgaccgccttgctcctgccgctggccttgctgctccacgccgccaggccggaagtgcagctggttgaatctggcggaggactggttcagcctggcggatctctgagactgtcttgtgccgccagcggcttcagcttcagcgacttttggatgagctgggtccgacaggcccctggcaaaggacttgaatgggtcgccacaatcagccaggccggcagcgagaaggactacgtggactctgtgaagggcagattcaccatcagccgggacaacgccaagaagtccctgtacctccagatgaacagcctgagagccgaggacaccgccgtgtactattgtgcctctggcgtgtacagcttcgactacagaggccagggcaccctggtcacagtctcttctggtaccggcggaggcggatctggcggcggaggtagcggtggcggaggatctgaattcgacatcgtgatgacccagagccctgccaccctgtccgtgtctccaggcgaaagagccaccctgagctgcagagcttcccagagcgtgtccaacgacgtcgtgtggtatcagcagaagcccggccaggcccccagactgctgatctactacgccagcaacagatacaccggcatccccgccagattcagcggctctggcagcggcaccgagttcaccctgacaatcagcagcctccagagcgaggacttcgccgtgtactactgtcagcaggactacaccagcccctggaccttcggccagggcaccaagctggaaatcaagagactcgagatccagaaccctgatcctgccgtgtaccagctgcgggatagcaagagcagcgacaagagcgtgtgtctgttcaccgacttcgacagccagaccaacgtgtcccagagcaaggactccgacgtgtacatcaccgataagtgcgtgctggacatgcggagcatggacttcaagagcaactccgccgtggcctggtccaacaagtccgatttcgcctgcgccaacgccttcaacaacagcattatccccgaggacacattcttcccaagccccgagagcagctgcggctttaccagcgagagctaccagcagggcgtgctgagcgccaccatcctgtacgagatcctgctgggcaaggccaccctgtacgccgtgctggtgtctgccctggtgctgatggctatggtcaagcggaaggacagccggggacgcgccaagagaagcggatctggcgtgaagcagaccctgaatttcgacctgctgaagctggctggcgacgtggaatccaacccaggccctactagtatggactggatttggcgcatccttttccttgtcggcgctgctaccggcgcgcattccgggccccagctccagctgcaagagtctggacctggcctggtcaagcctagcgagacactgagcctgacctgtaccgtgtccggcgatagcatcagcagcggcgattactactggggctggatcagacagcctcctggcaaaggactggaatggatcggccacatctactacagcggcgtgacctactacaaccccagcctgaagtccagagtgaccatcagcgtggacaccagccggaaccagttctccctgaagctgtctagcgtgacagccgccgataccgccgtgtactactgcaccagagaggacagcagcaactggcggagtagaggccagggaacactggtcacagttagctctggatccggcggaggcggaagtggaggcggaggatctggcggcggaggctctttcgaagaggtgcaactggtgcagagcggagccgaagtgaagaaacctggggccagcgtgcgggtgtcctgcaaggccagcggctacacctttaccaactacggcatgaactgggtgcgccaggctcctggacagggcctggaatggatgggctggatcaacacctacaccggcgagcccacctacgccgacgacttcaagggcagagtgaccatgaccaccgacaccagcacctccaccgcctacatggaactgcggagcctgagaagcgacgacaccgccgtgtattattgcgcccggatcggcgacagcagccccagcgattattggggccagggaaccctcgtgaccgtgtcctctacgcgtgaggacctgaagaacgtgttcccacctgaggtggccgtgttcgagcctagcgaggccgagatcagccacacccagaaagccaccctcgtgtgcctggctaccggcttctaccccgaccatgtggaactgtcttggtgggtcaacggcaaagaggtgcacagcggcgtgtgtaccgacccccagccactgaaagaacagcccgccctgaacgacagccggtactgcctgagcagcagactgagagtgtccgccaccttctggcagaacccccggaaccacttcagatgccaggtgcagttctacggcctgagcgagaacgacgagtggacccaggacagagccaagcccgtgacccagatcgtgtctgccgaagcctggggcagagccgattgcgacgtgaagctggtggaaaagagcttcgagacagacaccaacctgaacttccagaacctgagcgtgatcggcttcagaatcctgctgctgaaagtggccggctttaacctgctgatgaccctgcggctgtggtccagc

SEQ ID NO: 35170 - DNA, 2067 bp, synthetic construct
  source 1..2067: mol_type = other DNA
atggccttaccagtgaccgccttgctcctgccgctggccttgctgctccacgccgccaggccggacatcgtgatgacccagagccctgccaccctgtccgtgtctccaggcgaaagagccaccctgagctgcagagcttcccagagcgtgtccaacgacgtcgtgtggtatcagcagaagcccggccaggcccccagactgctgatctactacgccagcaacagatacaccggcatccccgccagattcagcggctctggcagcggcaccgagttcaccctgacaatcagcagcctccagagcgaggacttcgccgtgtactactgtcagcaggactacaccagcccctggaccttcggccagggcaccaagctggaaatcaagagactcgaggacctgaagaacgtgttcccacctgaggtggccgtgttcgagcctagcgaggccgagatcagccacacccagaaagccaccctcgtgtgcctggctaccggcttctaccccgaccatgtggaactgtcttggtgggtcaacggcaaagaggtgcacagcggcgtgtgtaccgacccccagccactgaaagaacagcccgccctgaacgacagccggtactgcctgagcagcagactgagagtgtccgccaccttctggcagaacccccggaaccacttcagatgccaggtgcagttctacggcctgagcgagaacgacgagtggacccaggacagagccaagcccgtgacccagatcgtgtctgccgaagcctggggcagagccgattgcgacgtgaagctggtggaaaagagcttcgagacagacaccaacctgaacttccagaacctgagcgtgatcggcttcagaatcctgctgctgaaagtggccggctttaacctgctgatgaccctgcggctgtggtccagcagggccaagcgatctggatctggagcaacaaacttctcactactcaaacaagcaggtgacgtggaggagaatcccgggcctactagtatggactggatttggcgcatccttttccttgtcggcgctgctaccggcgcccattccgggcccatggaccccgacctggaaatcagagccgccttcctgcggcagagaaacacagccctgagaacagaggtggccgagctggaacaagaggtgcagcggctggaaaacgaggtgtcccagtacgagacaagatacggccctctcggaggcggaaaaggatccggcggcggaggatctggcggaggcggatctgggggcggaggctctttcgaagaggtgcaactggtgcagagcggagccgaagtgaagaaacctggggccagcgtgcgggtgtcctgcaaggccagcggctacacctttaccaactacggcatgaactgggtgcgccaggctcctggacagggcctggaatggatgggctggatcaacacctacaccggcgagcccacctacgccgacgacttcaagggcagagtgaccatgaccaccgacaccagcacctccaccgcctacatggaactgcggagcctgagaagcgacgacaccgccgtgtattattgcgcccggatcggcgacagcagccccagcgattattggggccagggaaccctcgtgaccgtgtcctctacgcgtatccagaaccctgatcctgccgtgtaccagctgcgggatagcaagagcagcgacaagagcgtgtgtctgttcaccgacttcgacagccagaccaacgtgtcccagagcaaggactccgacgtgtacatcaccgataagtgcgtgctggacatgcggagcatggacttcaagagcaactccgccgtggcctggtccaacaagtccgatttcgcctgcgccaacgccttcaacaacagcattatccccgaggacacattcttcccaagccccgagagcagctgcggctttaccagcgagagctaccagcagggcgtgctgagcgccaccatcctgtacgagatcctgctgggcaaggccaccctgtacgccgtgctggtgtctgccctggtgctgatggctatggtcaagcggaaggacagccgggga

SEQ ID NO: 35171 - DNA, 2079 bp, synthetic construct
  source 1..2079: mol_type = other DNA
atggccttaccagtgaccgccttgctcctgccgctggccttgctgctccacgccgccaggccggacatcgtgatgacccagagccctgccaccctgtccgtgtctccaggcgaaagagccaccctgagctgcagagcttcccagagcgtgtccaacgacgtcgtgtggtatcagcagaagcccggccaggcccccagactgctgatctactacgccagcaacagatacaccggcatccccgccagattcagcggctctggcagcggcaccgagttcaccctgacaatcagcagcctccagagcgaggacttcgccgtgtactactgtcagcaggactacaccagcccctggaccttcggccagggcaccaagctggaaatcaagagactcgagatccagaaccctgatcctgccgtgtaccagctgcgggatagcaagagcagcgacaagagcgtgtgtctgttcaccgacttcgacagccagaccaacgtgtcccagagcaaggactccgacgtgtacatcaccgataagtgcgtgctggacatgcggagcatggacttcaagagcaactccgccgtggcctggtccaacaagtccgatttcgcctgcgccaacgccttcaacaacagcattatccccgaggacacattcttcccaagccccgagagcagctgcggctttaccagcgagagctaccagcagggcgtgctgagcgccaccatcctgtacgagatcctgctgggcaaggccaccctgtacgccgtgctggtgtctgccctggtgctgatggctatggtcaagcggaaggacagccggggacgcgccaagagaagcggatctggcgtgaagcagaccctgaatttcgacctgctgaagctggctggcgacgtggaatccaacccaggccctactagtatggactggatttggcgcatccttttccttgtcggcgctgctaccggcgcccattccgggcccatggaccccgacctggaaatcagagccgccttcctgcggcagagaaacacagccctgagaacagaggtggccgagctggaacaagaggtgcagcggctggaaaacgaggtgtcccagtacgagacaagatacggccctctcggaggcggaaaaggatccggcggcggaggatctggcggaggcggatctgggggcggaggctctttcgaagaggtgcaactggtgcagagcggagccgaagtgaagaaacctggggccagcgtgcgggtgtcctgcaaggccagcggctacacctttaccaactacggcatgaactgggtgcgccaggctcctggacagggcctggaatggatgggctggatcaacacctacaccggcgagcccacctacgccgacgacttcaagggcagagtgaccatgaccaccgacaccagcacctccaccgcctacatggaactgcggagcctgagaagcgacgacaccgccgtgtattattgcgcccggatcggcgacagcagccccagcgattattggggccagggaaccctcgtgaccgtgtcctctacgcgtgaggacctgaagaacgtgttcccacctgaggtggccgtgttcgagcctagcgaggccgagatcagccacacccagaaagccaccctcgtgtgcctggctaccggcttctaccccgaccatgtggaactgtcttggtgggtcaacggcaaagaggtgcacagcggcgtgtgtaccgacccccagccactgaaagaacagcccgccctgaacgacagccggtactgcctgagcagcagactgagagtgtccgccaccttctggcagaacccccggaaccacttcagatgccaggtgcagttctacggcctgagcgagaacgacgagtggacccaggacagagccaagcccgtgacccagatcgtgtctgccgaagcctggggcagagccgattgcgacgtgaagctggtggaaaagagcttcgagacagacaccaacctgaacttccagaacctgagcgtgatcggcttcagaatcctgctgctgaaagtggccggctttaacctgctgatgaccctgcggctgtggtccagc

SEQ ID NO: 35172 - DNA, 1998 bp, synthetic construct
  source 1..1998: mol_type = other DNA
atggccttaccagtgaccgccttgctcctgccgctggccttgctgctccacgccgccaggccggacatcgtgatgacccagagccctgccaccctgtccgtgtctccaggcgaaagagccaccctgagctgcagagcttcccagagcgtgtccaacgacgtcgtgtggtatcagcagaagcccggccaggcccccagactgctgatctactacgccagcaacagatacaccggcatccccgccagattcagcggctctggcagcggcaccgagttcaccctgacaatcagcagcctccagagcgaggacttcgccgtgtactactgtcagcaggactacaccagcccctggaccttcggccagggcaccaagctggaaatcaagagactcgaggacctgaagaacgtgttcccacctgaggtggccgtgttcgagcctagcgaggccgagatcagccacacccagaaagccaccctcgtgtgcctggctaccggcttctaccccgaccatgtggaactgtcttggtgggtcaacggcaaagaggtgcacagcggcgtgtgtaccgacccccagccactgaaagaacagcccgccctgaacgacagccggtactgcctgagcagcagactgagagtgtccgccaccttctggcagaacccccggaaccacttcagatgccaggtgcagttctacggcctgagcgagaacgacgagtggacccaggacagagccaagcccgtgacccagatcgtgtctgccgaagcctggggcagagccgattgcgacgtgaagctggtggaaaagagcttcgagacagacaccaacctgaacttccagaacctgagcgtgatcggcttcagaatcctgctgctgaaagtggccggctttaacctgctgatgaccctgcggctgtggtccagcagggccaagcgatctggatctggagcaacaaacttctcactactcaaacaagcaggtgacgtggaggagaatcccgggcctactagtatggactggatttggcgcatccttttccttgtcggcgctgctaccggcgcccattccgggcccgaagttgctgccctcgagaaggaggtagcagctttggaaaaagaagtcgcagcccttgagaaagaagttgcggctctggagaagggatccggcggcggaggatctggcggaggcggatctgggggcggaggctctttcgaagaggtgcaactggtgcagagcggagccgaagtgaagaaacctggggccagcgtgcgggtgtcctgcaaggccagcggctacacctttaccaactacggcatgaactgggtgcgccaggctcctggacagggcctggaatggatgggctggatcaacacctacaccggcgagcccacctacgccgacgacttcaagggcagagtgaccatgaccaccgacaccagcacctccaccgcctacatggaactgcggagcctgagaagcgacgacaccgccgtgtattattgcgcccggatcggcgacagcagccccagcgattattggggccagggaaccctcgtgaccgtgtcctctacgcgtatccagaaccctgatcctgccgtgtaccagctgcgggatagcaagagcagcgacaagagcgtgtgtctgttcaccgacttcgacagccagaccaacgtgtcccagagcaaggactccgacgtgtacatcaccgataagtgcgtgctggacatgcggagcatggacttcaagagcaactccgccgtggcctggtccaacaagtccgatttcgcctgcgccaacgccttcaacaacagcattatccccgaggacacattcttcccaagccccgagagcagctgcggctttaccagcgagagctaccagcagggcgtgctgagcgccaccatcctgtacgagatcctgctgggcaaggccaccctgtacgccgtgctggtgtctgccctggtgctgatggctatggtcaagcggaaggacagccgggga

SEQ ID NO: 35173 - DNA, 2010 bp, synthetic construct
  source 1..2010: mol_type = other DNA
atggccttaccagtgaccgccttgctcctgccgctggccttgctgctccacgccgccaggccggacatcgtgatgacccagagccctgccaccctgtccgtgtctccaggcgaaagagccaccctgagctgcagagcttcccagagcgtgtccaacgacgtcgtgtggtatcagcagaagcccggccaggcccccagactgctgatctactacgccagcaacagatacaccggcatccccgccagattcagcggctctggcagcggcaccgagttcaccctgacaatcagcagcctccagagcgaggacttcgccgtgtactactgtcagcaggactacaccagcccctggaccttcggccagggcaccaagctggaaatcaagagactcgagatccagaaccctgatcctgccgtgtaccagctgcgggatagcaagagcagcgacaagagcgtgtgtctgttcaccgacttcgacagccagaccaacgtgtcccagagcaaggactccgacgtgtacatcaccgataagtgcgtgctggacatgcggagcatggacttcaagagcaactccgccgtggcctggtccaacaagtccgatttcgcctgcgccaacgccttcaacaacagcattatccccgaggacacattcttcccaagccccgagagcagctgcggctttaccagcgagagctaccagcagggcgtgctgagcgccaccatcctgtacgagatcctgctgggcaaggccaccctgtacgccgtgctggtgtctgccctggtgctgatggctatggtcaagcggaaggacagccggggacgcgccaagagaagcggatctggcgtgaagcagaccctgaatttcgacctgctgaagctggctggcgacgtggaatccaacccaggccctactagtatggactggatttggcgcatccttttccttgtcggcgctgctaccggcgcccattccgggcccgaagttgctgccctcgagaaggaggtagcagctttggaaaaagaagtcgcagcccttgagaaagaagttgcggctctggagaagggatccggcggcggaggatctggcggaggcggatctgggggcggaggctctttcgaagaggtgcaactggtgcagagcggagccgaagtgaagaaacctggggccagcgtgcgggtgtcctgcaaggccagcggctacacctttaccaactacggcatgaactgggtgcgccaggctcctggacagggcctggaatggatgggctggatcaacacctacaccggcgagcccacctacgccgacgacttcaagggcagagtgaccatgaccaccgacaccagcacctccaccgcctacatggaactgcggagcctgagaagcgacgacaccgccgtgtattattgcgcccggatcggcgacagcagccccagcgattattggggccagggaaccctcgtgaccgtgtcctctacgcgtgaggacctgaagaacgtgttcccacctgaggtggccgtgttcgagcctagcgaggccgagatcagccacacccagaaagccaccctcgtgtgcctggctaccggcttctaccccgaccatgtggaactgtcttggtgggtcaacggcaaagaggtgcacagcggcgtgtgtaccgacccccagccactgaaagaacagcccgccctgaacgacagccggtactgcctgagcagcagactgagagtgtccgccaccttctggcagaacccccggaaccacttcagatgccaggtgcagttctacggcctgagcgagaacgacgagtggacccaggacagagccaagcccgtgacccagatcgtgtctgccgaagcctggggcagagccgattgcgacgtgaagctggtggaaaagagcttcgagacagacaccaacctgaacttccagaacctgagcgtgatcggcttcagaatcctgctgctgaaagtggccggctttaacctgctgatgaccctgcggctgtggtccagc

SEQ ID NO: 35174 - DNA, 2268 bp, synthetic construct
  source 1..2268: mol_type = other DNA
atggccttaccagtgaccgccttgctcctgccgctggccttgctgctccacgccgccaggccggacatcgtgatgacccagagccctgccaccctgtccgtgtctccaggcgaaagagccaccctgagctgcagagcttcccagagcgtgtccaacgacgtcgtgtggtatcagcagaagcccggccaggcccccagactgctgatctactacgccagcaacagatacaccggcatccccgccagattcagcggctctggcagcggcaccgagttcaccctgacaatcagcagcctccagagcgaggacttcgccgtgtactactgtcagcaggactacaccagcccctggaccttcggccagggcaccaagctggaaatcaagagactcgaggacctgaagaacgtgttcccacctgaggtggccgtgttcgagcctagcgaggccgagatcagccacacccagaaagccaccctcgtgtgcctggctaccggcttctaccccgaccatgtggaactgtcttggtgggtcaacggcaaagaggtgcacagcggcgtgtgtaccgacccccagccactgaaagaacagcccgccctgaacgacagccggtactgcctgagcagcagactgagagtgtccgccaccttctggcagaacccccggaaccacttcagatgccaggtgcagttctacggcctgagcgagaacgacgagtggacccaggacagagccaagcccgtgacccagatcgtgtctgccgaagcctggggcagagccgattgcgacgtgaagctggtggaaaagagcttcgagacagacaccaacctgaacttccagaacctgagcgtgatcggcttcagaatcctgctgctgaaagtggccggctttaacctgctgatgaccctgcggctgtggtccagcagggccaagcgatctggatctggagcaacaaacttctcactactcaaacaagcaggtgacgtggaggagaatcccgggcctactagtatggactggatttggcgcatccttttccttgtcggcgctgctaccggcgcccattccgggccccaggttcagctgcaagagtctggcggaggacttgctcaagctggcggaagcctgagactgtcttgtgccgcctctggcagaaccttcagcatgggctggtttagacaggcccctggcaaagagagagagttcgtcgccgccatcacatacagcggcggcagcccttactacgcctcttctgtcagaggccggttcaccatcagccgggacaacgccaagaacaccgtgtacctccagatgaacagcctgaagccagaggacaccgccgtgtactactgtgccgccaatccaacctacggcagcgactggaatgccgagaattggggccagggcacccaagtgacagtgtctagtggatccggcggcggaggatctggcggaggcggatctgggggcggaggctctttcgaagaggtgcaactggtgcagagcggagccgaagtgaagaaacctggggccagcgtgcgggtgtcctgcaaggccagcggctacacctttaccaactacggcatgaactgggtgcgccaggctcctggacagggcctggaatggatgggctggatcaacacctacaccggcgagcccacctacgccgacgacttcaagggcagagtgaccatgaccaccgacaccagcacctccaccgcctacatggaactgcggagcctgagaagcgacgacaccgccgtgtattattgcgcccggatcggcgacagcagccccagcgattattggggccagggaaccctcgtgaccgtgtcctctacgcgtatccagaaccctgatcctgccgtgtaccagctgcgggatagcaagagcagcgacaagagcgtgtgtctgttcaccgacttcgacagccagaccaacgtgtcccagagcaaggactccgacgtgtacatcaccgataagtgcgtgctggacatgcggagcatggacttcaagagcaactccgccgtggcctggtccaacaagtccgatttcgcctgcgccaacgccttcaacaacagcattatccccgaggacacattcttcccaagccccgagagcagctgcggctttaccagcgagagctaccagcagggcgtgctgagcgccaccatcctgtacgagatcctgctgggcaaggccaccctgtacgccgtgctggtgtctgccctggtgctgatggctatggtcaagcggaaggacagccgggga

SEQ ID NO: 35175 - DNA, 2280 bp, synthetic construct
  source 1..2280: mol_type = other DNA
atggccttaccagtgaccgccttgctcctgccgctggccttgctgctccacgccgccaggccggacatcgtgatgacccagagccctgccaccctgtccgtgtctccaggcgaaagagccaccctgagctgcagagcttcccagagcgtgtccaacgacgtcgtgtggtatcagcagaagcccggccaggcccccagactgctgatctactacgccagcaacagatacaccggcatccccgccagattcagcggctctggcagcggcaccgagttcaccctgacaatcagcagcctccagagcgaggacttcgccgtgtactactgtcagcaggactacaccagcccctggaccttcggccagggcaccaagctggaaatcaagagactcgagatccagaaccctgatcctgccgtgtaccagctgcgggatagcaagagcagcgacaagagcgtgtgtctgttcaccgacttcgacagccagaccaacgtgtcccagagcaaggactccgacgtgtacatcaccgataagtgcgtgctggacatgcggagcatggacttcaagagcaactccgccgtggcctggtccaacaagtccgatttcgcctgcgccaacgccttcaacaacagcattatccccgaggacacattcttcccaagccccgagagcagctgcggctttaccagcgagagctaccagcagggcgtgctgagcgccaccatcctgtacgagatcctgctgggcaaggccaccctgtacgccgtgctggtgtctgccctggtgctgatggctatggtcaagcggaaggacagccggggacgcgccaagagaagcggatctggcgtgaagcagaccctgaatttcgacctgctgaagctggctggcgacgtggaatccaacccaggccctactagtatggactggatttggcgcatccttttccttgtcggcgctgctaccggcgcccattccgggccccaggttcagctgcaagagtctggcggaggacttgctcaagctggcggaagcctgagactgtcttgtgccgcctctggcagaaccttcagcatgggctggtttagacaggcccctggcaaagagagagagttcgtcgccgccatcacatacagcggcggcagcccttactacgcctcttctgtcagaggccggttcaccatcagccgggacaacgccaagaacaccgtgtacctccagatgaacagcctgaagccagaggacaccgccgtgtactactgtgccgccaatccaacctacggcagcgactggaatgccgagaattggggccagggcacccaagtgacagtgtctagtggatccggcggcggaggatctggcggaggcggatctgggggcggaggctctttcgaagaggtgcaactggtgcagagcggagccgaagtgaagaaacctggggccagcgtgcgggtgtcctgcaaggccagcggctacacctttaccaactacggcatgaactgggtgcgccaggctcctggacagggcctggaatggatgggctggatcaacacctacaccggcgagcccacctacgccgacgacttcaagggcagagtgaccatgaccaccgacaccagcacctccaccgcctacatggaactgcggagcctgagaagcgacgacaccgccgtgtattattgcgcccggatcggcgacagcagccccagcgattattggggccagggaaccctcgtgaccgtgtcctctacgcgtgaggacctgaagaacgtgttcccacctgaggtggccgtgttcgagcctagcgaggccgagatcagccacacccagaaagccaccctcgtgtgcctggctaccggcttctaccccgaccatgtggaactgtcttggtgggtcaacggcaaagaggtgcacagcggcgtgtgtaccgacccccagccactgaaagaacagcccgccctgaacgacagccggtactgcctgagcagcagactgagagtgtccgccaccttctggcagaacccccggaaccacttcagatgccaggtgcagttctacggcctgagcgagaacgacgagtggacccaggacagagccaagcccgtgacccagatcgtgtctgccgaagcctggggcagagccgattgcgacgtgaagctggtggaaaagagcttcgagacagacaccaacctgaacttccagaacctgagcgtgatcggcttcagaatcctgctgctgaaagtggccggctttaacctgctgatgaccctgcggctgtggtccagc

SEQ ID NO: 35176 - DNA, 2286 bp, synthetic construct
  source 1..2286: mol_type = other DNA
atggccttaccagtgaccgccttgctcctgccgctggccttgctgctccacgccgccaggccggaagtgcaactggtggaatctggaggctctctggtgcagccagggggaagcctgagactgtcttgtgccgcttccggcttcaccttcgacgactacgccatgagctgggtgcgccaggtgccaggcaaaggcctggaatgggtgtccagcatcaactggagcggcacccacaccgattacgccgactccgtgaaaggcagattcacaatcagcagaaacaacgccaacaataccctgtacctgcagatgaactccctgaagtctgaggatacagcagtgtattattgcgccaagaactggcgggacgccggcaccacttggtttgagaaaagcggctctgccggacagggaacccaagtgacagtgtcctccggtaccggcggaggcggatctggcggcggaggtagcggtggcggaggatctgaattcgacatcgtgatgacccagagccctgccaccctgtccgtgtctccaggcgaaagagccaccctgagctgcagagcttcccagagcgtgtccaacgacgtcgtgtggtatcagcagaagcccggccaggcccccagactgctgatctactacgccagcaacagatacaccggcatccccgccagattcagcggctctggcagcggcaccgagttcaccctgacaatcagcagcctccagagcgaggacttcgccgtgtactactgtcagcaggactacaccagcccctggaccttcggccagggcaccaagctggaaatcaagagactcgaggacctgaagaacgtgttcccacctgaggtggccgtgttcgagcctagcgaggccgagatcagccacacccagaaagccaccctcgtgtgcctggctaccggcttctaccccgaccatgtggaactgtcttggtgggtcaacggcaaagaggtgcacagcggcgtgtgtaccgacccccagccactgaaagaacagcccgccctgaacgacagccggtactgcctgagcagcagactgagagtgtccgccaccttctggcagaacccccggaaccacttcagatgccaggtgcagttctacggcctgagcgagaacgacgagtggacccaggacagagccaagcccgtgacccagatcgtgtctgccgaagcctggggcagagccgattgcgacgtgaagctggtggaaaagagcttcgagacagacaccaacctgaacttccagaacctgagcgtgatcggcttcagaatcctgctgctgaaagtggccggctttaacctgctgatgaccctgcggctgtggtccagcagggccaagcgatctggatctggagcaacaaacttctcactactcaaacaagcaggtgacgtggaggagaatcccgggcctactagtatggactggatttggcgcatccttttccttgtcggcgctgctaccggcgcgcattccttcgaagaggtgcaactggtgcagagcggagccgaagtgaagaaacctggggccagcgtgcgggtgtcctgcaaggccagcggctacacctttaccaactacggcatgaactgggtgcgccaggctcctggacagggcctggaatggatgggctggatcaacacctacaccggcgagcccacctacgccgacgacttcaagggcagagtgaccatgaccaccgacaccagcacctccaccgcctacatggaactgcggagcctgagaagcgacgacaccgccgtgtattattgcgcccggatcggcgacagcagccccagcgattattggggccagggaaccctcgtgaccgtgtcctctacgcgtatccagaaccctgatcctgccgtgtaccagctgcgggatagcaagagcagcgacaagagcgtgtgtctgttcaccgacttcgacagccagaccaacgtgtcccagagcaaggactccgacgtgtacatcaccgataagtgcgtgctggacatgcggagcatggacttcaagagcaactccgccgtggcctggtccaacaagtccgatttcgcctgcgccaacgccttcaacaacagcattatccccgaggacacattcttcccaagccccgagagcagctgcggctttaccagcgagagctaccagcagggcgtgctgagcgccaccatcctgtacgagatcctgctgggcaaggccaccctgtacgccgtgctggtgtctgccctggtgctgatggctatggtcaagcggaaggacagccgggga

SEQ ID NO: 35177 - DNA, 2298 bp, synthetic construct
  source 1..2298: mol_type = other DNA
atggccttaccagtgaccgccttgctcctgccgctggccttgctgctccacgccgccaggccggaagtgcaactggtggaatctggaggctctctggtgcagccagggggaagcctgagactgtcttgtgccgcttccggcttcaccttcgacgactacgccatgagctgggtgcgccaggtgccaggcaaaggcctggaatgggtgtccagcatcaactggagcggcacccacaccgattacgccgactccgtgaaaggcagattcacaatcagcagaaacaacgccaacaataccctgtacctgcagatgaactccctgaagtctgaggatacagcagtgtattattgcgccaagaactggcgggacgccggcaccacttggtttgagaaaagcggctctgccggacagggaacccaagtgacagtgtcctccggtaccggcggaggcggatctggcggcggaggtagcggtggcggaggatctgaattcgacatcgtgatgacccagagccctgccaccctgtccgtgtctccaggcgaaagagccaccctgagctgcagagcttcccagagcgtgtccaacgacgtcgtgtggtatcagcagaagcccggccaggcccccagactgctgatctactacgccagcaacagatacaccggcatccccgccagattcagcggctctggcagcggcaccgagttcaccctgacaatcagcagcctccagagcgaggacttcgccgtgtactactgtcagcaggactacaccagcccctggaccttcggccagggcaccaagctggaaatcaagagactcgagatccagaaccctgatcctgccgtgtaccagctgcgggatagcaagagcagcgacaagagcgtgtgtctgttcaccgacttcgacagccagaccaacgtgtcccagagcaaggactccgacgtgtacatcaccgataagtgcgtgctggacatgcggagcatggacttcaagagcaactccgccgtggcctggtccaacaagtccgatttcgcctgcgccaacgccttcaacaacagcattatccccgaggacacattcttcccaagccccgagagcagctgcggctttaccagcgagagctaccagcagggcgtgctgagcgccaccatcctgtacgagatcctgctgggcaaggccaccctgtacgccgtgctggtgtctgccctggtgctgatggctatggtcaagcggaaggacagccggggacgcgccaagagaagcggatctggcgtgaagcagaccctgaatttcgacctgctgaagctggctggcgacgtggaatccaacccaggccctactagtatggactggatttggcgcatccttttccttgtcggcgctgctaccggcgcgcattccttcgaagaggtgcaactggtgcagagcggagccgaagtgaagaaacctggggccagcgtgcgggtgtcctgcaaggccagcggctacacctttaccaactacggcatgaactgggtgcgccaggctcctggacagggcctggaatggatgggctggatcaacacctacaccggcgagcccacctacgccgacgacttcaagggcagagtgaccatgaccaccgacaccagcacctccaccgcctacatggaactgcggagcctgagaagcgacgacaccgccgtgtattattgcgcccggatcggcgacagcagccccagcgattattggggccagggaaccctcgtgaccgtgtcctctacgcgtgaggacctgaagaacgtgttcccacctgaggtggccgtgttcgagcctagcgaggccgagatcagccacacccagaaagccaccctcgtgtgcctggctaccggcttctaccccgaccatgtggaactgtcttggtgggtcaacggcaaagaggtgcacagcggcgtgtgtaccgacccccagccactgaaagaacagcccgccctgaacgacagccggtactgcctgagcagcagactgagagtgtccgccaccttctggcagaacccccggaaccacttcagatgccaggtgcagttctacggcctgagcgagaacgacgagtggacccaggacagagccaagcccgtgacccagatcgtgtctgccgaagcctggggcagagccgattgcgacgtgaagctggtggaaaagagcttcgagacagacaccaacctgaacttccagaacctgagcgtgatcggcttcagaatcctgctgctgaaagtggccggctttaacctgctgatgaccctgcggctgtggtccagc

SEQ ID NO: 35178 - DNA, 2280 bp, synthetic construct
  source 1..2280: mol_type = other DNA
atggccttaccagtgaccgccttgctcctgccgctggccttgctgctccacgccgccaggccggaagttcagctgcttgagtctggcggaggactggttcaacctggcggaagcctgagactgtcttgtgccgccagcggcttcatcttcagcagctacgccatgagctgggtccgacaggctcctggaaagggccaagaatgggtttccggcgttagcggcacaggcgtgaacacctactacgccgatagcgtgaagggcagattcaccatcagccgggacaacagcaagaacaccctgtacctccagatgaacagcctgagagccgaggacaccgccgtgtactattgtgcctctggcaaaggctgggacagcggctcttggtacgaggactatagaggccagggcaccctggtcacagtttcttcaggtaccggcggaggcggatctggcggcggaggtagcggtggcggaggatctgaattcgacatcgtgatgacccagagccctgccaccctgtccgtgtctccaggcgaaagagccaccctgagctgcagagcttcccagagcgtgtccaacgacgtcgtgtggtatcagcagaagcccggccaggcccccagactgctgatctactacgccagcaacagatacaccggcatccccgccagattcagcggctctggcagcggcaccgagttcaccctgacaatcagcagcctccagagcgaggacttcgccgtgtactactgtcagcaggactacaccagcccctggaccttcggccagggcaccaagctggaaatcaagagactcgaggacctgaagaacgtgttcccacctgaggtggccgtgttcgagcctagcgaggccgagatcagccacacccagaaagccaccctcgtgtgcctggctaccggcttctaccccgaccatgtggaactgtcttggtgggtcaacggcaaagaggtgcacagcggcgtgtgtaccgacccccagccactgaaagaacagcccgccctgaacgacagccggtactgcctgagcagcagactgagagtgtccgccaccttctggcagaacccccggaaccacttcagatgccaggtgcagttctacggcctgagcgagaacgacgagtggacccaggacagagccaagcccgtgacccagatcgtgtctgccgaagcctggggcagagccgattgcgacgtgaagctggtggaaaagagcttcgagacagacaccaacctgaacttccagaacctgagcgtgatcggcttcagaatcctgctgctgaaagtggccggctttaacctgctgatgaccctgcggctgtggtccagcagggccaagcgatctggatctggagcaacaaacttctcactactcaaacaagcaggtgacgtggaggagaatcccgggcctactagtatggactggatttggcgcatccttttccttgtcggcgctgctaccggcgcgcattccttcgaagaggtgcaactggtgcagagcggagccgaagtgaagaaacctggggccagcgtgcgggtgtcctgcaaggccagcggctacacctttaccaactacggcatgaactgggtgcgccaggctcctggacagggcctggaatggatgggctggatcaacacctacaccggcgagcccacctacgccgacgacttcaagggcagagtgaccatgaccaccgacaccagcacctccaccgcctacatggaactgcggagcctgagaagcgacgacaccgccgtgtattattgcgcccggatcggcgacagcagccccagcgattattggggccagggaaccctcgtgaccgtgtcctctacgcgtatccagaaccctgatcctgccgtgtaccagctgcgggatagcaagagcagcgacaagagcgtgtgtctgttcaccgacttcgacagccagaccaacgtgtcccagagcaaggactccgacgtgtacatcaccgataagtgcgtgctggacatgcggagcatggacttcaagagcaactccgccgtggcctggtccaacaagtccgatttcgcctgcgccaacgccttcaacaacagcattatccccgaggacacattcttcccaagccccgagagcagctgcggctttaccagcgagagctaccagcagggcgtgctgagcgccaccatcctgtacgagatcctgctgggcaaggccaccctgtacgccgtgctggtgtctgccctggtgctgatggctatggtcaagcggaaggacagccgggga

SEQ ID NO: 35179 - DNA, 2292 bp, synthetic construct
  source 1..2292: mol_type = other DNA
atggccttaccagtgaccgccttgctcctgccgctggccttgctgctccacgccgccaggccggaagttcagctgcttgagtctggcggaggactggttcaacctggcggaagcctgagactgtcttgtgccgccagcggcttcatcttcagcagctacgccatgagctgggtccgacaggctcctggaaagggccaagaatgggtttccggcgttagcggcacaggcgtgaacacctactacgccgatagcgtgaagggcagattcaccatcagccgggacaacagcaagaacaccctgtacctccagatgaacagcctgagagccgaggacaccgccgtgtactattgtgcctctggcaaaggctgggacagcggctcttggtacgaggactatagaggccagggcaccctggtcacagtttcttcaggtaccggcggaggcggatctggcggcggaggtagcggtggcggaggatctgaattcgacatcgtgatgacccagagccctgccaccctgtccgtgtctccaggcgaaagagccaccctgagctgcagagcttcccagagcgtgtccaacgacgtcgtgtggtatcagcagaagcccggccaggcccccagactgctgatctactacgccagcaacagatacaccggcatccccgccagattcagcggctctggcagcggcaccgagttcaccctgacaatcagcagcctccagagcgaggacttcgccgtgtactactgtcagcaggactacaccagcccctggaccttcggccagggcaccaagctggaaatcaagagactcgagatccagaaccctgatcctgccgtgtaccagctgcgggatagcaagagcagcgacaagagcgtgtgtctgttcaccgacttcgacagccagaccaacgtgtcccagagcaaggactccgacgtgtacatcaccgataagtgcgtgctggacatgcggagcatggacttcaagagcaactccgccgtggcctggtccaacaagtccgatttcgcctgcgccaacgccttcaacaacagcattatccccgaggacacattcttcccaagccccgagagcagctgcggctttaccagcgagagctaccagcagggcgtgctgagcgccaccatcctgtacgagatcctgctgggcaaggccaccctgtacgccgtgctggtgtctgccctggtgctgatggctatggtcaagcggaaggacagccggggacgcgccaagagaagcggatctggcgtgaagcagaccctgaatttcgacctgctgaagctggctggcgacgtggaatccaacccaggccctactagtatggactggatttggcgcatccttttccttgtcggcgctgctaccggcgcgcattccttcgaagaggtgcaactggtgcagagcggagccgaagtgaagaaacctggggccagcgtgcgggtgtcctgcaaggccagcggctacacctttaccaactacggcatgaactgggtgcgccaggctcctggacagggcctggaatggatgggctggatcaacacctacaccggcgagcccacctacgccgacgacttcaagggcagagtgaccatgaccaccgacaccagcacctccaccgcctacatggaactgcggagcctgagaagcgacgacaccgccgtgtattattgcgcccggatcggcgacagcagccccagcgattattggggccagggaaccctcgtgaccgtgtcctctacgcgtgaggacctgaagaacgtgttcccacctgaggtggccgtgttcgagcctagcgaggccgagatcagccacacccagaaagccaccctcgtgtgcctggctaccggcttctaccccgaccatgtggaactgtcttggtgggtcaacggcaaagaggtgcacagcggcgtgtgtaccgacccccagccactgaaagaacagcccgccctgaacgacagccggtactgcctgagcagcagactgagagtgtccgccaccttctggcagaacccccggaaccacttcagatgccaggtgcagttctacggcctgagcgagaacgacgagtggacccaggacagagccaagcccgtgacccagatcgtgtctgccgaagcctggggcagagccgattgcgacgtgaagctggtggaaaagagcttcgagacagacaccaacctgaacttccagaacctgagcgtgatcggcttcagaatcctgctgctgaaagtggccggctttaacctgctgatgaccctgcggctgtggtccagc

SEQ ID NO: 35180 - DNA, 2184 bp, synthetic construct
  source 1..2184: mol_type = other DNA
atggccttaccagtgaccgccttgctcctgccgctggccttgctgctccacgccgccaggccgatgctgcccgctcctaagaatctggtggtgtccagaatcaccgaggacagcgccagactgtcttggacagctcctgatgccgccttcgacagcttccccatccggtacatcgagacactgatctggggcgaagccatctggctggatgtgcctggaagcgagagaagctacgacctgaccggactgaagcctggcacagagtatgccgtggtcatcaccggcgtgaaaggcggcagattctctagccctctggtggcctctttcaccaccggtaccggcggaggcggatctggcggcggaggtagcggtggcggaggatctgaattcgacatcgtgatgacccagagccctgccaccctgtccgtgtctccaggcgaaagagccaccctgagctgcagagcttcccagagcgtgtccaacgacgtcgtgtggtatcagcagaagcccggccaggcccccagactgctgatctactacgccagcaacagatacaccggcatccccgccagattcagcggctctggcagcggcaccgagttcaccctgacaatcagcagcctccagagcgaggacttcgccgtgtactactgtcagcaggactacaccagcccctggaccttcggccagggcaccaagctggaaatcaagagactcgaggacctgaagaacgtgttcccacctgaggtggccgtgttcgagcctagcgaggccgagatcagccacacccagaaagccaccctcgtgtgcctggctaccggcttctaccccgaccatgtggaactgtcttggtgggtcaacggcaaagaggtgcacagcggcgtgtgtaccgacccccagccactgaaagaacagcccgccctgaacgacagccggtactgcctgagcagcagactgagagtgtccgccaccttctggcagaacccccggaaccacttcagatgccaggtgcagttctacggcctgagcgagaacgacgagtggacccaggacagagccaagcccgtgacccagatcgtgtctgccgaagcctggggcagagccgattgcgacgtgaagctggtggaaaagagcttcgagacagacaccaacctgaacttccagaacctgagcgtgatcggcttcagaatcctgctgctgaaagtggccggctttaacctgctgatgaccctgcggctgtggtccagcagggccaagcgatctggatctggagcaacaaacttctcactactcaaacaagcaggtgacgtggaggagaatcccgggcctactagtatggactggatttggcgcatccttttccttgtcggcgctgctaccggcgcgcattccttcgaagaggtgcaactggtgcagagcggagccgaagtgaagaaacctggggccagcgtgcgggtgtcctgcaaggccagcggctacacctttaccaactacggcatgaactgggtgcgccaggctcctggacagggcctggaatggatgggctggatcaacacctacaccggcgagcccacctacgccgacgacttcaagggcagagtgaccatgaccaccgacaccagcacctccaccgcctacatggaactgcggagcctgagaagcgacgacaccgccgtgtattattgcgcccggatcggcgacagcagccccagcgattattggggccagggaaccctcgtgaccgtgtcctctacgcgtatccagaaccctgatcctgccgtgtaccagctgcgggatagcaagagcagcgacaagagcgtgtgtctgttcaccgacttcgacagccagaccaacgtgtcccagagcaaggactccgacgtgtacatcaccgataagtgcgtgctggacatgcggagcatggacttcaagagcaactccgccgtggcctggtccaacaagtccgatttcgcctgcgccaacgccttcaacaacagcattatccccgaggacacattcttcccaagccccgagagcagctgcggctttaccagcgagagctaccagcagggcgtgctgagcgccaccatcctgtacgagatcctgctgggcaaggccaccctgtacgccgtgctggtgtctgccctggtgctgatggctatggtcaagcggaaggacagccgggga

SEQ ID NO: 35181 - DNA, 2196 bp, synthetic construct
  source 1..2196: mol_type = other DNA
atggccttaccagtgaccgccttgctcctgccgctggccttgctgctccacgccgccaggccgatgctgcccgctcctaagaatctggtggtgtccagaatcaccgaggacagcgccagactgtcttggacagctcctgatgccgccttcgacagcttccccatccggtacatcgagacactgatctggggcgaagccatctggctggatgtgcctggaagcgagagaagctacgacctgaccggactgaagcctggcacagagtatgccgtggtcatcaccggcgtgaaaggcggcagattctctagccctctggtggcctctttcaccaccggtaccggcggaggcggatctggcggcggaggtagcggtggcggaggatctgaattcgacatcgtgatgacccagagccctgccaccctgtccgtgtctccaggcgaaagagccaccctgagctgcagagcttcccagagcgtgtccaacgacgtcgtgtggtatcagcagaagcccggccaggcccccagactgctgatctactacgccagcaacagatacaccggcatccccgccagattcagcggctctggcagcggcaccgagttcaccctgacaatcagcagcctccagagcgaggacttcgccgtgtactactgtcagcaggactacaccagcccctggaccttcggccagggcaccaagctggaaatcaagagactcgagatccagaaccctgatcctgccgtgtaccagctgcgggatagcaagagcagcgacaagagcgtgtgtctgttcaccgacttcgacagccagaccaacgtgtcccagagcaaggactccgacgtgtacatcaccgataagtgcgtgctggacatgcggagcatggacttcaagagcaactccgccgtggcctggtccaacaagtccgatttcgcctgcgccaacgccttcaacaacagcattatccccgaggacacattcttcccaagccccgagagcagctgcggctttaccagcgagagctaccagcagggcgtgctgagcgccaccatcctgtacgagatcctgctgggcaaggccaccctgtacgccgtgctggtgtctgccctggtgctgatggctatggtcaagcggaaggacagccggggacgcgccaagagaagcggatctggcgtgaagcagaccctgaatttcgacctgctgaagctggctggcgacgtggaatccaacccaggccctactagtatggactggatttggcgcatccttttccttgtcggcgctgctaccggcgcgcattccttcgaagaggtgcaactggtgcagagcggagccgaagtgaagaaacctggggccagcgtgcgggtgtcctgcaaggccagcggctacacctttaccaactacggcatgaactgggtgcgccaggctcctggacagggcctggaatggatgggctggatcaacacctacaccggcgagcccacctacgccgacgacttcaagggcagagtgaccatgaccaccgacaccagcacctccaccgcctacatggaactgcggagcctgagaagcgacgacaccgccgtgtattattgcgcccggatcggcgacagcagccccagcgattattggggccagggaaccctcgtgaccgtgtcctctacgcgtgaggacctgaagaacgtgttcccacctgaggtggccgtgttcgagcctagcgaggccgagatcagccacacccagaaagccaccctcgtgtgcctggctaccggcttctaccccgaccatgtggaactgtcttggtgggtcaacggcaaagaggtgcacagcggcgtgtgtaccgacccccagccactgaaagaacagcccgccctgaacgacagccggtactgcctgagcagcagactgagagtgtccgccaccttctggcagaacccccggaaccacttcagatgccaggtgcagttctacggcctgagcgagaacgacgagtggacccaggacagagccaagcccgtgacccagatcgtgtctgccgaagcctggggcagagccgattgcgacgtgaagctggtggaaaagagcttcgagacagacaccaacctgaacttccagaacctgagcgtgatcggcttcagaatcctgctgctgaaagtggccggctttaacctgctgatgaccctgcggctgtggtccagc

SEQ ID NO: 35182 - DNA, 2271 bp, synthetic construct
  source 1..2271: mol_type = other DNA
atggccttaccagtgaccgccttgctcctgccgctggccttgctgctccacgccgccaggccggaggtgcagctggttgaatctggcggaggactggttcagcctggcggatctctgagactgtcttgtgccgccagcggcttcaacatcaaggatacctgtatcggctgggttcgcagagcccctggcaaagaggaagaactggtcgccaaaatctgcaagtacagcggccacaccagatacgccgacagcgtgaagggcagattcaccatcagcgccgacaccagcaagaacaccgcctacctccagatgaacagcctgagagccgaggacaccgccgtgtactattgtgccgctgtgtccgtcagagatgggcactacaattactggggccagggcaccaccgtgaccgtttcttcaggtaccggcggaggcggatctggcggcggaggtagcggtggcggaggatctgaattcgacatcgtgatgacccagagccctgccaccctgtccgtgtctccaggcgaaagagccaccctgagctgcagagcttcccagagcgtgtccaacgacgtcgtgtggtatcagcagaagcccggccaggcccccagactgctgatctactacgccagcaacagatacaccggcatccccgccagattcagcggctctggcagcggcaccgagttcaccctgacaatcagcagcctccagagcgaggacttcgccgtgtactactgtcagcaggactacaccagcccctggaccttcggccagggcaccaagctggaaatcaagagactcgaggacctgaagaacgtgttcccacctgaggtggccgtgttcgagcctagcgaggccgagatcagccacacccagaaagccaccctcgtgtgcctggctaccggcttctaccccgaccatgtggaactgtcttggtgggtcaacggcaaagaggtgcacagcggcgtgtgtaccgacccccagccactgaaagaacagcccgccctgaacgacagccggtactgcctgagcagcagactgagagtgtccgccaccttctggcagaacccccggaaccacttcagatgccaggtgcagttctacggcctgagcgagaacgacgagtggacccaggacagagccaagcccgtgacccagatcgtgtctgccgaagcctggggcagagccgattgcgacgtgaagctggtggaaaagagcttcgagacagacaccaacctgaacttccagaacctgagcgtgatcggcttcagaatcctgctgctgaaagtggccggctttaacctgctgatgaccctgcggctgtggtccagcagggccaagcgatctggatctggagcaacaaacttctcactactcaaacaagcaggtgacgtggaggagaatcccgggcctactagtatggactggatttggcgcatccttttccttgtcggcgctgctaccggcgcgcattccttcgaagaggtgcaactggtgcagagcggagccgaagtgaagaaacctggggccagcgtgcgggtgtcctgcaaggccagcggctacacctttaccaactacggcatgaactgggtgcgccaggctcctggacagggcctggaatggatgggctggatcaacacctacaccggcgagcccacctacgccgacgacttcaagggcagagtgaccatgaccaccgacaccagcacctccaccgcctacatggaactgcggagcctgagaagcgacgacaccgccgtgtattattgcgcccggatcggcgacagcagccccagcgattattggggccagggaaccctcgtgaccgtgtcctctacgcgtatccagaaccctgatcctgccgtgtaccagctgcgggatagcaagagcagcgacaagagcgtgtgtctgttcaccgacttcgacagccagaccaacgtgtcccagagcaaggactccgacgtgtacatcaccgataagtgcgtgctggacatgcggagcatggacttcaagagcaactccgccgtggcctggtccaacaagtccgatttcgcctgcgccaacgccttcaacaacagcattatccccgaggacacattcttcccaagccccgagagcagctgcggctttaccagcgagagctaccagcagggcgtgctgagcgccaccatcctgtacgagatcctgctgggcaaggccaccctgtacgccgtgctggtgtctgccctggtgctgatggctatggtcaagcggaaggacagccgggga

SEQ ID NO: 35183 - DNA, 2283 bp, synthetic construct
  source 1..2283: mol_type = other DNA
atggccttaccagtgaccgccttgctcctgccgctggccttgctgctccacgccgccaggccggaggtgcagctggttgaatctggcggaggactggttcagcctggcggatctctgagactgtcttgtgccgccagcggcttcaacatcaaggatacctgtatcggctgggttcgcagagcccctggcaaagaggaagaactggtcgccaaaatctgcaagtacagcggccacaccagatacgccgacagcgtgaagggcagattcaccatcagcgccgacaccagcaagaacaccgcctacctccagatgaacagcctgagagccgaggacaccgccgtgtactattgtgccgctgtgtccgtcagagatgggcactacaattactggggccagggcaccaccgtgaccgtttcttcaggtaccggcggaggcggatctggcggcggaggtagcggtggcggaggatctgaattcgacatcgtgatgacccagagccctgccaccctgtccgtgtctccaggcgaaagagccaccctgagctgcagagcttcccagagcgtgtccaacgacgtcgtgtggtatcagcagaagcccggccaggcccccagactgctgatctactacgccagcaacagatacaccggcatccccgccagattcagcggctctggcagcggcaccgagttcaccctgacaatcagcagcctccagagcgaggacttcgccgtgtactactgtcagcaggactacaccagcccctggaccttcggccagggcaccaagctggaaatcaagagactcgagatccagaaccctgatcctgccgtgtaccagctgcgggatagcaagagcagcgacaagagcgtgtgtctgttcaccgacttcgacagccagaccaacgtgtcccagagcaaggactccgacgtgtacatcaccgataagtgcgtgctggacatgcggagcatggacttcaagagcaactccgccgtggcctggtccaacaagtccgatttcgcctgcgccaacgccttcaacaacagcattatccccgaggacacattcttcccaagccccgagagcagctgcggctttaccagcgagagctaccagcagggcgtgctgagcgccaccatcctgtacgagatcctgctgggcaaggccaccctgtacgccgtgctggtgtctgccctggtgctgatggctatggtcaagcggaaggacagccggggacgcgccaagagaagcggatctggcgtgaagcagaccctgaatttcgacctgctgaagctggctggcgacgtggaatccaacccaggccctactagtatggactggatttggcgcatccttttccttgtcggcgctgctaccggcgcgcattccttcgaagaggtgcaactggtgcagagcggagccgaagtgaagaaacctggggccagcgtgcgggtgtcctgcaaggccagcggctacacctttaccaactacggcatgaactgggtgcgccaggctcctggacagggcctggaatggatgggctggatcaacacctacaccggcgagcccacctacgccgacgacttcaagggcagagtgaccatgaccaccgacaccagcacctccaccgcctacatggaactgcggagcctgagaagcgacgacaccgccgtgtattattgcgcccggatcggcgacagcagccccagcgattattggggccagggaaccctcgtgaccgtgtcctctacgcgtgaggacctgaagaacgtgttcccacctgaggtggccgtgttcgagcctagcgaggccgagatcagccacacccagaaagccaccctcgtgtgcctggctaccggcttctaccccgaccatgtggaactgtcttggtgggtcaacggcaaagaggtgcacagcggcgtgtgtaccgacccccagccactgaaagaacagcccgccctgaacgacagccggtactgcctgagcagcagactgagagtgtccgccaccttctggcagaacccccggaaccacttcagatgccaggtgcagttctacggcctgagcgagaacgacgagtggacccaggacagagccaagcccgtgacccagatcgtgtctgccgaagcctggggcagagccgattgcgacgtgaagctggtggaaaagagcttcgagacagacaccaacctgaacttccagaacctgagcgtgatcggcttcagaatcctgctgctgaaagtggccggctttaacctgctgatgaccctgcggctgtggtccagc

SEQ ID NO: 35184 - DNA, 3387 bp, synthetic construct
  source 1..3387: mol_type = other DNA
atggccttaccagtgaccgccttgctcctgccgctggccttgctgctccacgccgccaggccggaagtgcagctggttgaatctggcggaggactggttcaggctggcggatctctgagactgtcttgtgccgccagcggcagaacctttagcatgggctggtttagacaggcccctggcaaagagagagagttcgtcgccgccatcacatactctggcggcagcccttactacgccgactctgtgaagggcagattcaccatcagccgggacaacgccaagaacaccgtgtacctccagatgaacagcctgaagcctgaggacaccgccgtgtactactgcgccgccaatccaacatacggcagcgactggaacgccgagaattggggccagggaacccaagtgacagtgtctagcggtaccggcggaggcggatctggcggcggaggtagcggtggcggaggatctgaattcgacatcgtgatgacccagagccctgccaccctgtccgtgtctccaggcgaaagagccaccctgagctgcagagcttcccagagcgtgtccaacgacgtcgtgtggtatcagcagaagcccggccaggcccccagactgctgatctactacgccagcaacagatacaccggcatccccgccagattcagcggctctggcagcggcaccgagttcaccctgacaatcagcagcctccagagcgaggacttcgccgtgtactactgtcagcaggactacaccagcccctggaccttcggccagggcaccaagctggaaatcaagagactcgaggacctgaagaacgtgttcccacctgaggtggccgtgttcgagcctagcgaggccgagatcagccacacccagaaagccaccctcgtgtgcctggctaccggcttctaccccgaccatgtggaactgtcttggtgggtcaacggcaaagaggtgcacagcggcgtgtgtaccgacccccagccactgaaagaacagcccgccctgaacgacagccggtactgcctgagcagcagactgagagtgtccgccaccttctggcagaacccccggaaccacttcagatgccaggtgcagttctacggcctgagcgagaacgacgagtggacccaggacagagccaagcccgtgacccagatcgtgtctgccgaagcctggggcagagccgattgcgacgtgaagctggtggaaaagagcttcgagacagacaccaacctgaacttccagaacctgagcgtgatcggcttcagaatcctgctgctgaaagtggccggctttaacctgctgatgaccctgcggctgtggtccagcagggccaagcgatctggatctggagcaacaaacttctcactactcaaacaagcaggtgacgtggaggagaatcccgggcctactagtgccaccatggactggatttggcgcatccttttccttgtcggcgctgctaccggcgcccattccgggcccgaagtgcaactggttgaatccggtggcggcctggtgcaagcaggcggatctctcagacttagctgtgccgcctccggcagaaccttcacaatgggatggtttaggcaggctccagggaaagagagagagttcgtcgccgccatctctctgtctcccacactggcctactacgccgactctgtgaaaggccggttcaccatctccagagataatgccaagaacaccgtggtgctgcaaatgaactctctgaaacccgaggatacagccctgtactattgtgccgctgaccggaagtccgtgatgagcatcagacccgattactggggacagggcacacaagtcacagtgtcctctggatccggcggcggaggatctggcggaggcggatctgggggcggaggctctttcgaagaggtgcaactggtgcagagcggagccgaagtgaagaaacctggggccagcgtgcgggtgtcctgcaaggccagcggctacacctttaccaactacggcatgaactgggtgcgccaggctcctggacagggcctggaatggatgggctggatcaacacctacaccggcgagcccacctacgccgacgacttcaagggcagagtgaccatgaccaccgacaccagcacctccaccgcctacatggaactgcggagcctgagaagcgacgacaccgccgtgtattattgcgcccggatcggcgacagcagccccagcgattattggggccagggaaccctcgtgaccgtgtcctctacgcgtatccagaaccctgatcctgccgtgtaccagctgcgggatagcaagagcagcgacaagagcgtgtgtctgttcaccgacttcgacagccagaccaacgtgtcccagagcaaggactccgacgtgtacatcaccgataagtgcgtgctggacatgcggagcatggacttcaagagcaactccgccgtggcctggtccaacaagtccgatttcgcctgcgccaacgccttcaacaacagcattatccccgaggacacattcttcccaagccccgagagcagctgcggctttaccagcgagagctaccagcagggcgtgctgagcgccaccatcctgtacgagatcctgctgggcaaggccaccctgtacgccgtgctggtgtctgccctggtgctgatggctatggtcaagcggaaggacagccggggacgcgccaagagaagcggatctggcgtgaagcagaccctgaatttcgacctgctgaagctggctggcgacgtggaatccaacccaggcccttctagaggccatatgaccgagtacaagcccacggtgcgcctcgccacccgcgacgacgtccccagggccgtacgcaccctcgccgccgcgttcgccgactaccccgccacgcgccacaccgtcgatccggaccgccacatcgagcgggtcaccgagctgcaagaactcttcctcacgcgcgtcgggctcgacatcggcaaggtgtgggtcgcggacgacggcgccgcggtggcggtctggaccacgccggagagcgtcgaagcgggggcggtgttcgccgagatcggcccgcgcatggccgagttgagcggttcccggctggccgcgcagcaacagatggaaggcctcctggcgccgcaccggcccaaggagcccgcgtggttcctggccaccgtcggcgtctcgcccgaccaccagggcaagggtctgggcagcgccgtcgtgctccccggagtggaggcggccgagcgcgccggggtgcccgccttcctggagacctccgcgccccgcaacctccccttctacgagcggctcggcttcaccgtcaccgccgacgtcgaggtgcccgaaggaccgcgcacctggtgcatgacccgcaagcccggtgcctga

SEQ ID NO: 35185 - DNA, 2301 bp, synthetic construct
  source 1..2301: mol_type = other DNA
atggccttaccagtgaccgccttgctcctgccgctggccttgctgctccacgccgccaggccggaagtgcagctggttgaatctggcggaggactggttcagcctggcggatctctgagactgtcttgtgccgcctctggcttcgccagcgactactatatcatcggctggttcagacaggcccctggcaaagagagagagggcgtcagctgtatcagcagcagatacgccaacaccaactacgccgacagcgtgaagggcagattcaccatcagccgggacaacgccaagaacaccgtgtacctccagatgaacagcctgaagcctgaggacaccgccgtgtactactgtgccgccgacaccagaagatacacctgtcctgacattgccaccatgcaccggaacttcgattcttggggccagggcacactggtcaccgtttcttctggtaccggcggaggcggatctggcggcggaggtagcggtggcggaggatctgaattcgacatcgtgatgacccagagccctgccaccctgtccgtgtctccaggcgaaagagccaccctgagctgcagagcttcccagagcgtgtccaacgacgtcgtgtggtatcagcagaagcccggccaggcccccagactgctgatctactacgccagcaacagatacaccggcatccccgccagattcagcggctctggcagcggcaccgagttcaccctgacaatcagcagcctccagagcgaggacttcgccgtgtactactgtcagcaggactacaccagcccctggaccttcggccagggcaccaagctggaaatcaagagactcgaggacctgaagaacgtgttcccacctgaggtggccgtgttcgagcctagcgaggccgagatcagccacacccagaaagccaccctcgtgtgcctggctaccggcttctaccccgaccatgtggaactgtcttggtgggtcaacggcaaagaggtgcacagcggcgtgtgtaccgacccccagccactgaaagaacagcccgccctgaacgacagccggtactgcctgagcagcagactgagagtgtccgccaccttctggcagaacccccggaaccacttcagatgccaggtgcagttctacggcctgagcgagaacgacgagtggacccaggacagagccaagcccgtgacccagatcgtgtctgccgaagcctggggcagagccgattgcgacgtgaagctggtggaaaagagcttcgagacagacaccaacctgaacttccagaacctgagcgtgatcggcttcagaatcctgctgctgaaagtggccggctttaacctgctgatgaccctgcggctgtggtccagcagggccaagcgatctggatctggagcaacaaacttctcactactcaaacaagcaggtgacgtggaggagaatcccgggcctactagtatggactggatttggcgcatccttttccttgtcggcgctgctaccggcgcgcattccttcgaagaggtgcaactggtgcagagcggagccgaagtgaagaaacctggggccagcgtgcgggtgtcctgcaaggccagcggctacacctttaccaactacggcatgaactgggtgcgccaggctcctggacagggcctggaatggatgggctggatcaacacctacaccggcgagcccacctacgccgacgacttcaagggcagagtgaccatgaccaccgacaccagcacctccaccgcctacatggaactgcggagcctgagaagcgacgacaccgccgtgtattattgcgcccggatcggcgacagcagccccagcgattattggggccagggaaccctcgtgaccgtgtcctctacgcgtatccagaaccctgatcctgccgtgtaccagctgcgggatagcaagagcagcgacaagagcgtgtgtctgttcaccgacttcgacagccagaccaacgtgtcccagagcaaggactccgacgtgtacatcaccgataagtgcgtgctggacatgcggagcatggacttcaagagcaactccgccgtggcctggtccaacaagtccgatttcgcctgcgccaacgccttcaacaacagcattatccccgaggacacattcttcccaagccccgagagcagctgcggctttaccagcgagagctaccagcagggcgtgctgagcgccaccatcctgtacgagatcctgctgggcaaggccaccctgtacgccgtgctggtgtctgccctggtgctgatggctatggtcaagcggaaggacagccggggataa

SEQ ID NO: 35186 - DNA, 2301 bp, synthetic construct
  source 1..2301: mol_type = other DNA
atggccttaccagtgaccgccttgctcctgccgctggccttgctgctccacgccgccaggccggaagtgcagctggttgaatctggcggaggactggttcagcctggcggatctctgagactgagctgtgaagccagcggcttcgccagcgacgattacatcatcggctggttcagacaggcccctggcaaagagagagagggcgtcagctgcatcagctctaagtacgccaacaccgtgtacaccgacagcgtgaagggcagattcagactgagcagaggcaccgccaagaataccgtgtacctccagatgagcgccctgaagcctgaggataccgccgtgtactactgcgctatggacagccgcagagtgacatgccctgagatcagcaccatgcaccggaacttcgattcttggggccagggcacactggtcacagtgtcatctggtaccggcggaggcggatctggcggcggaggtagcggtggcggaggatctgaattcgacatcgtgatgacccagagccctgccaccctgtccgtgtctccaggcgaaagagccaccctgagctgcagagcttcccagagcgtgtccaacgacgtcgtgtggtatcagcagaagcccggccaggcccccagactgctgatctactacgccagcaacagatacaccggcatccccgccagattcagcggctctggcagcggcaccgagttcaccctgacaatcagcagcctccagagcgaggacttcgccgtgtactactgtcagcaggactacaccagcccctggaccttcggccagggcaccaagctggaaatcaagagactcgaggacctgaagaacgtgttcccacctgaggtggccgtgttcgagcctagcgaggccgagatcagccacacccagaaagccaccctcgtgtgcctggctaccggcttctaccccgaccatgtggaactgtcttggtgggtcaacggcaaagaggtgcacagcggcgtgtgtaccgacccccagccactgaaagaacagcccgccctgaacgacagccggtactgcctgagcagcagactgagagtgtccgccaccttctggcagaacccccggaaccacttcagatgccaggtgcagttctacggcctgagcgagaacgacgagtggacccaggacagagccaagcccgtgacccagatcgtgtctgccgaagcctggggcagagccgattgcgacgtgaagctggtggaaaagagcttcgagacagacaccaacctgaacttccagaacctgagcgtgatcggcttcagaatcctgctgctgaaagtggccggctttaacctgctgatgaccctgcggctgtggtccagcagggccaagcgatctggatctggagcaacaaacttctcactactcaaacaagcaggtgacgtggaggagaatcccgggcctactagtatggactggatttggcgcatccttttccttgtcggcgctgctaccggcgcgcattccttcgaagaggtgcaactggtgcagagcggagccgaagtgaagaaacctggggccagcgtgcgggtgtcctgcaaggccagcggctacacctttaccaactacggcatgaactgggtgcgccaggctcctggacagggcctggaatggatgggctggatcaacacctacaccggcgagcccacctacgccgacgacttcaagggcagagtgaccatgaccaccgacaccagcacctccaccgcctacatggaactgcggagcctgagaagcgacgacaccgccgtgtattattgcgcccggatcggcgacagcagccccagcgattattggggccagggaaccctcgtgaccgtgtcctctacgcgtatccagaaccctgatcctgccgtgtaccagctgcgggatagcaagagcagcgacaagagcgtgtgtctgttcaccgacttcgacagccagaccaacgtgtcccagagcaaggactccgacgtgtacatcaccgataagtgcgtgctggacatgcggagcatggacttcaagagcaactccgccgtggcctggtccaacaagtccgatttcgcctgcgccaacgccttcaacaacagcattatccccgaggacacattcttcccaagccccgagagcagctgcggctttaccagcgagagctaccagcagggcgtgctgagcgccaccatcctgtacgagatcctgctgggcaaggccaccctgtacgccgtgctggtgtctgccctggtgctgatggctatggtcaagcggaaggacagccggggataa

SEQ ID NO: 35187 - DNA, 2298 bp, synthetic construct
  source 1..2298: mol_type = other DNA
atggccttaccagtgaccgccttgctcctgccgctggccttgctgctccacgccgccaggccggaagtgcagctggttgaatctggcggaggactggttcagcctggcggatctctgagactgtcttgtgccgcctctggcttcgccagcgactactatatcatcggctggttcagacaggcccctggcaaagagagagagggcgtcagctgtatcagcagcagatacgccaacaccaactacgccgacagcgtgaagggcagattcaccatcagccgggacaacgccaagaacaccgtgtacctccagatgaacagcctgaagcctgaggacaccgccgtgtactactgtgccgccgacaccagaagatacacctgtcctgacattgccaccatgcaccggaacttcgattcttggggccagggcacactggtcaccgtttcttctggtaccggcggaggcggatctggcggcggaggtagcggtggcggaggatctgaattcgacatcgtgatgacccagagccctgccaccctgtccgtgtctccaggcgaaagagccaccctgagctgcagagcttcccagagcgtgtccaacgacgtcgtgtggtatcagcagaagcccggccaggcccccagactgctgatctactacgccagcaacagatacaccggcatccccgccagattcagcggctctggcagcggcaccgagttcaccctgacaatcagcagcctccagagcgaggacttcgccgtgtactactgtcagcaggactacaccagcccctggaccttcggccagggcaccaagctggaaatcaagagactcgagatccagaaccctgatcctgccgtgtaccagctgcgggatagcaagagcagcgacaagagcgtgtgtctgttcaccgacttcgacagccagaccaacgtgtcccagagcaaggactccgacgtgtacatcaccgataagtgcgtgctggacatgcggagcatggacttcaagagcaactccgccgtggcctggtccaacaagtccgatttcgcctgcgccaacgccttcaacaacagcattatccccgaggacacattcttcccaagccccgagagcagctgcggctttaccagcgagagctaccagcagggcgtgctgagcgccaccatcctgtacgagatcctgctgggcaaggccaccctgtacgccgtgctggtgtctgccctggtgctgatggctatggtcaagcggaaggacagccggggaagggccaagcgatctggatctggagcaacaaacttctcactactcaaacaagcaggtgacgtggaggagaatcccgggcctactagtatggactggatttggcgcatccttttccttgtcggcgctgctaccggcgcgcattccttcgaagaggtgcaactggtgcagagcggagccgaagtgaagaaacctggggccagcgtgcgggtgtcctgcaaggccagcggctacacctttaccaactacggcatgaactgggtgcgccaggctcctggacagggcctggaatggatgggctggatcaacacctacaccggcgagcccacctacgccgacgacttcaagggcagagtgaccatgaccaccgacaccagcacctccaccgcctacatggaactgcggagcctgagaagcgacgacaccgccgtgtattattgcgcccggatcggcgacagcagccccagcgattattggggccagggaaccctcgtgaccgtgtcctctacgcgtgacctgaagaacgtgttcccacctgaggtggccgtgttcgagcctagcgaggccgagatcagccacacccagaaagccaccctcgtgtgcctggctaccggcttctaccccgaccatgtggaactgtcttggtgggtcaacggcaaagaggtgcacagcggcgtgtgtaccgacccccagccactgaaagaacagcccgccctgaacgacagccggtactgcctgagcagcagactgagagtgtccgccaccttctggcagaacccccggaaccacttcagatgccaggtgcagttctacggcctgagcgagaacgacgagtggacccaggacagagccaagcccgtgacccagatcgtgtctgccgaagcctggggcagagccgattgcgacgtgaagctggtggaaaagagcttcgagacagacaccaacctgaacttccagaacctgagcgtgatcggcttcagaatcctgctgctgaaagtggccggctttaacctgctgatgaccctgcggctgtggtccagc

SEQ ID NO: 35188 - DNA, 2298 bp, synthetic construct
  source 1..2298: mol_type = other DNA
atggccttaccagtgaccgccttgctcctgccgctggccttgctgctccacgccgccaggccggaagtgcagctggttgaatctggcggaggactggttcagcctggcggatctctgagactgagctgtgaagccagcggcttcgccagcgacgattacatcatcggctggttcagacaggcccctggcaaagagagagagggcgtcagctgcatcagctctaagtacgccaacaccgtgtacaccgacagcgtgaagggcagattcagactgagcagaggcaccgccaagaataccgtgtacctccagatgagcgccctgaagcctgaggataccgccgtgtactactgcgctatggacagccgcagagtgacatgccctgagatcagcaccatgcaccggaacttcgattcttggggccagggcacactggtcacagtgtcatctggtaccggcggaggcggatctggcggcggaggtagcggtggcggaggatctgaattcgacatcgtgatgacccagagccctgccaccctgtccgtgtctccaggcgaaagagccaccctgagctgcagagcttcccagagcgtgtccaacgacgtcgtgtggtatcagcagaagcccggccaggcccccagactgctgatctactacgccagcaacagatacaccggcatccccgccagattcagcggctctggcagcggcaccgagttcaccctgacaatcagcagcctccagagcgaggacttcgccgtgtactactgtcagcaggactacaccagcccctggaccttcggccagggcaccaagctggaaatcaagagactcgagatccagaaccctgatcctgccgtgtaccagctgcgggatagcaagagcagcgacaagagcgtgtgtctgttcaccgacttcgacagccagaccaacgtgtcccagagcaaggactccgacgtgtacatcaccgataagtgcgtgctggacatgcggagcatggacttcaagagcaactccgccgtggcctggtccaacaagtccgatttcgcctgcgccaacgccttcaacaacagcattatccccgaggacacattcttcccaagccccgagagcagctgcggctttaccagcgagagctaccagcagggcgtgctgagcgccaccatcctgtacgagatcctgctgggcaaggccaccctgtacgccgtgctggtgtctgccctggtgctgatggctatggtcaagcggaaggacagccggggaagggccaagcgatctggatctggagcaacaaacttctcactactcaaacaagcaggtgacgtggaggagaatcccgggcctactagtatggactggatttggcgcatccttttccttgtcggcgctgctaccggcgcgcattccttcgaagaggtgcaactggtgcagagcggagccgaagtgaagaaacctggggccagcgtgcgggtgtcctgcaaggccagcggctacacctttaccaactacggcatgaactgggtgcgccaggctcctggacagggcctggaatggatgggctggatcaacacctacaccggcgagcccacctacgccgacgacttcaagggcagagtgaccatgaccaccgacaccagcacctccaccgcctacatggaactgcggagcctgagaagcgacgacaccgccgtgtattattgcgcccggatcggcgacagcagccccagcgattattggggccagggaaccctcgtgaccgtgtcctctacgcgtgacctgaagaacgtgttcccacctgaggtggccgtgttcgagcctagcgaggccgagatcagccacacccagaaagccaccctcgtgtgcctggctaccggcttctaccccgaccatgtggaactgtcttggtgggtcaacggcaaagaggtgcacagcggcgtgtgtaccgacccccagccactgaaagaacagcccgccctgaacgacagccggtactgcctgagcagcagactgagagtgtccgccaccttctggcagaacccccggaaccacttcagatgccaggtgcagttctacggcctgagcgagaacgacgagtggacccaggacagagccaagcccgtgacccagatcgtgtctgccgaagcctggggcagagccgattgcgacgtgaagctggtggaaaagagcttcgagacagacaccaacctgaacttccagaacctgagcgtgatcggcttcagaatcctgctgctgaaagtggccggctttaacctgctgatgaccctgcggctgtggtccagc

SEQ ID NO: 35189 - DNA, 2271 bp, synthetic construct
  source 1..2271: mol_type = other DNA
atggccttaccagtgaccgccttgctcctgccgctggccttgctgctccacgccgccaggccgcaagtcaaactggaagaaagcggtggcggcctggtgcaacctggcgaatctctgagactgagctgtagcgccagcggctccatcttcaaggtgttcagagtgttcgccatgagctggtacaggcaaggccctggcaagcagagagagctggtcgcctctatcagcagcggcgagacaaccacatacgccgaatctgtgaaaggccggttcaccatcagccgggataatgccaagaataccgcctatctccagatggactccctgaagcctgaagatacagctgtgtactactgcaacgccgaccataccttcaccggcgatttttggggccagggaacccaagtgaccgtgtctagtggtaccggcggaggcggatctggcggcggaggtagcggtggcggaggatctgaattcgacatcgtgatgacccagagccctgccaccctgtccgtgtctccaggcgaaagagccaccctgagctgcagagcttcccagagcgtgtccaacgacgtcgtgtggtatcagcagaagcccggccaggcccccagactgctgatctactacgccagcaacagatacaccggcatccccgccagattcagcggctctggcagcggcaccgagttcaccctgacaatcagcagcctccagagcgaggacttcgccgtgtactactgtcagcaggactacaccagcccctggaccttcggccagggcaccaagctggaaatcaagagactcgagatccagaaccctgatcctgccgtgtaccagctgcgggatagcaagagcagcgacaagagcgtgtgtctgttcaccgacttcgacagccagaccaacgtgtcccagagcaaggactccgacgtgtacatcaccgataagtgcgtgctggacatgcggagcatggacttcaagagcaactccgccgtggcctggtccaacaagtccgatttcgcctgcgccaacgccttcaacaacagcattatccccgaggacacattcttcccaagccccgagagcagctgcggctttaccagcgagagctaccagcagggcgtgctgagcgccaccatcctgtacgagatcctgctgggcaaggccaccctgtacgccgtgctggtgtctgccctggtgctgatggctatggtcaagcggaaggacagccggggaagggccaagcgatctggatctggagcaacaaacttctcactactcaaacaagcaggtgacgtggaggagaatcccgggcctactagtatggactggatttggcgcatccttttccttgtcggcgctgctaccggcgcgcattccttcgaagaggtgcaactggtgcagagcggagccgaagtgaagaaacctggggccagcgtgcgggtgtcctgcaaggccagcggctacacctttaccaactacggcatgaactgggtgcgccaggctcctggacagggcctggaatggatgggctggatcaacacctacaccggcgagcccacctacgccgacgacttcaagggcagagtgaccatgaccaccgacaccagcacctccaccgcctacatggaactgcggagcctgagaagcgacgacaccgccgtgtattattgcgcccggatcggcgacagcagccccagcgattattggggccagggaaccctcgtgaccgtgtcctctacgcgtgacctgaagaacgtgttcccacctgaggtggccgtgttcgagcctagcgaggccgagatcagccacacccagaaagccaccctcgtgtgcctggctaccggcttctaccccgaccatgtggaactgtcttggtgggtcaacggcaaagaggtgcacagcggcgtgtgtaccgacccccagccactgaaagaacagcccgccctgaacgacagccggtactgcctgagcagcagactgagagtgtccgccaccttctggcagaacccccggaaccacttcagatgccaggtgcagttctacggcctgagcgagaacgacgagtggacccaggacagagccaagcccgtgacccagatcgtgtctgccgaagcctggggcagagccgattgcgacgtgaagctggtggaaaagagcttcgagacagacaccaacctgaacttccagaacctgagcgtgatcggcttcagaatcctgctgctgaaagtggccggctttaacctgctgatgaccctgcggctgtggtccagc

SEQ ID NO: 35190 - DNA, 2277 bp, synthetic construct
  source 1..2277: mol_type = other DNA
atggccttaccagtgaccgccttgctcctgccgctggccttgctgctccacgccgccaggccggacatcgtgatgacccagagccctgccaccctgtccgtgtctccaggcgaaagagccaccctgagctgcagagcttcccagagcgtgtccaacgacgtcgtgtggtatcagcagaagcccggccaggcccccagactgctgatctactacgccagcaacagatacaccggcatccccgccagattcagcggctctggcagcggcaccgagttcaccctgacaatcagcagcctccagagcgaggacttcgccgtgtactactgtcagcaggactacaccagcccctggaccttcggccagggcaccaagctggaaatcaagagactcgaggacctgaagaacgtgttcccacctgaggtggccgtgttcgagcctagcgaggccgagatcagccacacccagaaagccaccctcgtgtgcctggctaccggcttctaccccgaccatgtggaactgtcttggtgggtcaacggcaaagaggtgcacagcggcgtgtgtaccgacccccagccactgaaagaacagcccgccctgaacgacagccggtactgcctgagcagcagactgagagtgtccgccaccttctggcagaacccccggaaccacttcagatgccaggtgcagttctacggcctgagcgagaacgacgagtggacccaggacagagccaagcccgtgacccagatcgtgtctgccgaagcctggggcagagccgattgcgacgtgaagctggtggaaaagagcttcgagacagacaccaacctgaacttccagaacctgagcgtgatcggcttcagaatcctgctgctgaaagtggccggctttaacctgctgatgaccctgcggctgtggtccagcagggccaagcgatctggatctggagcaacaaacttctcactactcaaacaagcaggtgacgtggaggagaatcccgggcctactagtgccaccatggactggatttggcgcatccttttccttgtcggcgctgctaccggcgcccattccgggcccgaagtgcagctggttgaatctggcggaggactggttcaggctggcggatctctgagactgtcttgtgccgccagcggcagaacctttagcatgggctggtttagacaggcccctggcaaagagagagagttcgtcgccgccatcacatactctggcggcagcccttactacgccgactctgtgaagggcagattcaccatcagccgggacaacgccaagaacaccgtgtacctccagatgaacagcctgaagcctgaggacaccgccgtgtactactgcgccgccaatccaacatacggcagcgactggaacgccgagaattggggccagggaacccaagtgacagtgtctagcggatccggcggcggaggatctggcggaggcggatctgggggcggaggctctttcgaagaggtgcaactggtgcagagcggagccgaagtgaagaaacctggggccagcgtgcgggtgtcctgcaaggccagcggctacacctttaccaactacggcatgaactgggtgcgccaggctcctggacagggcctggaatggatgggctggatcaacacctacaccggcgagcccacctacgccgacgacttcaagggcagagtgaccatgaccaccgacaccagcacctccaccgcctacatggaactgcggagcctgagaagcgacgacaccgccgtgtattattgcgcccggatcggcgacagcagccccagcgattattggggccagggaaccctcgtgaccgtgtcctctacgcgtatccagaaccctgatcctgccgtgtaccagctgcgggatagcaagagcagcgacaagagcgtgtgtctgttcaccgacttcgacagccagaccaacgtgtcccagagcaaggactccgacgtgtacatcaccgataagtgcgtgctggacatgcggagcatggacttcaagagcaactccgccgtggcctggtccaacaagtccgatttcgcctgcgccaacgccttcaacaacagcattatccccgaggacacattcttcccaagccccgagagcagctgcggctttaccagcgagagctaccagcagggcgtgctgagcgccaccatcctgtacgagatcctgctgggcaaggccaccctgtacgccgtgctggtgtctgccctggtgctgatggctatggtcaagcggaaggacagccggggataa

SEQ ID NO: 35191 - DNA, 2280 bp, synthetic construct
  source 1..2280: mol_type = other DNA
atggccttaccagtgaccgccttgctcctgccgctggccttgctgctccacgccgccaggccggacatcgtgatgacccagagccctgccaccctgtccgtgtctccaggcgaaagagccaccctgagctgcagagcttcccagagcgtgtccaacgacgtcgtgtggtatcagcagaagcccggccaggcccccagactgctgatctactacgccagcaacagatacaccggcatccccgccagattcagcggctctggcagcggcaccgagttcaccctgacaatcagcagcctccagagcgaggacttcgccgtgtactactgtcagcaggactacaccagcccctggaccttcggccagggcaccaagctggaaatcaagagactcgaggacctgaagaacgtgttcccacctgaggtggccgtgttcgagcctagcgaggccgagatcagccacacccagaaagccaccctcgtgtgcctggctaccggcttctaccccgaccatgtggaactgtcttggtgggtcaacggcaaagaggtgcacagcggcgtgtgtaccgacccccagccactgaaagaacagcccgccctgaacgacagccggtactgcctgagcagcagactgagagtgtccgccaccttctggcagaacccccggaaccacttcagatgccaggtgcagttctacggcctgagcgagaacgacgagtggacccaggacagagccaagcccgtgacccagatcgtgtctgccgaagcctggggcagagccgattgcgacgtgaagctggtggaaaagagcttcgagacagacaccaacctgaacttccagaacctgagcgtgatcggcttcagaatcctgctgctgaaagtggccggctttaacctgctgatgaccctgcggctgtggtccagcagggccaagcgatctggatctggagcaacaaacttctcactactcaaacaagcaggtgacgtggaggagaatcccgggcctactagtgccaccatggactggatttggcgcatccttttccttgtcggcgctgctaccggcgcccattccgggcccgaagtgcaactggtggaatctgggggcggactggtgcagccaggcggaagtctgaggctgtcttgtgccgcctccggcagcatcttcggcttcaacgacatggcctggtatcggcaggctcccggaaaacagcgcgagctggtggctctgattagcagagtgggcgtgaccagcagcgccgactctgtgaagggcagattcacaatctccagagtgaacgccaaggatacagtgtacctccagatgaactctctgaaacctgaggatacagcagtgtactattgctacatggaccagcggctggacggcagcacactggcctactggggacagggaactcaagtgacagtgtctagcggatccggcggcggaggatctggcggaggcggatctgggggcggaggctctttcgaagaggtgcaactggtgcagagcggagccgaagtgaagaaacctggggccagcgtgcgggtgtcctgcaaggccagcggctacacctttaccaactacggcatgaactgggtgcgccaggctcctggacagggcctggaatggatgggctggatcaacacctacaccggcgagcccacctacgccgacgacttcaagggcagagtgaccatgaccaccgacaccagcacctccaccgcctacatggaactgcggagcctgagaagcgacgacaccgccgtgtattattgcgcccggatcggcgacagcagccccagcgattattggggccagggaaccctcgtgaccgtgtcctctacgcgtatccagaaccctgatcctgccgtgtaccagctgcgggatagcaagagcagcgacaagagcgtgtgtctgttcaccgacttcgacagccagaccaacgtgtcccagagcaaggactccgacgtgtacatcaccgataagtgcgtgctggacatgcggagcatggacttcaagagcaactccgccgtggcctggtccaacaagtccgatttcgcctgcgccaacgccttcaacaacagcattatccccgaggacacattcttcccaagccccgagagcagctgcggctttaccagcgagagctaccagcagggcgtgctgagcgccaccatcctgtacgagatcctgctgggcaaggccaccctgtacgccgtgctggtgtctgccctggtgctgatggctatggtcaagcggaaggacagccggggataa

SEQ ID NO: 35192 - DNA, 2268 bp, synthetic construct
  source 1..2268: mol_type = other DNA
atggccttaccagtgaccgccttgctcctgccgctggccttgctgctccacgccgccaggccggacatcgtgatgacccagagccctgccaccctgtccgtgtctccaggcgaaagagccaccctgagctgcagagcttcccagagcgtgtccaacgacgtcgtgtggtatcagcagaagcccggccaggcccccagactgctgatctactacgccagcaacagatacaccggcatccccgccagattcagcggctctggcagcggcaccgagttcaccctgacaatcagcagcctccagagcgaggacttcgccgtgtactactgtcagcaggactacaccagcccctggaccttcggccagggcaccaagctggaaatcaagagactcgaggacctgaagaacgtgttcccacctgaggtggccgtgttcgagcctagcgaggccgagatcagccacacccagaaagccaccctcgtgtgcctggctaccggcttctaccccgaccatgtggaactgtcttggtgggtcaacggcaaagaggtgcacagcggcgtgtgtaccgacccccagccactgaaagaacagcccgccctgaacgacagccggtactgcctgagcagcagactgagagtgtccgccaccttctggcagaacccccggaaccacttcagatgccaggtgcagttctacggcctgagcgagaacgacgagtggacccaggacagagccaagcccgtgacccagatcgtgtctgccgaagcctggggcagagccgattgcgacgtgaagctggtggaaaagagcttcgagacagacaccaacctgaacttccagaacctgagcgtgatcggcttcagaatcctgctgctgaaagtggccggctttaacctgctgatgaccctgcggctgtggtccagcagggccaagcgatctggatctggagcaacaaacttctcactactcaaacaagcaggtgacgtggaggagaatcccgggcctactagtgccaccatggactggatttggcgcatccttttccttgtcggcgctgctaccggcgcccattccgggcccgaggtgcagctggttgaatctggcggaggactggttcaggctggcggatctctgagactgtcttgtgccgccagcggctctgtgttcagcggcaatgtgatgggctggtacagacaggcccctggcaaagaaagagagtgggttgccgccattgccagcggcggcagcatctactacagagactctgtgaagggcagattcaccatcagccgggacaacgccaagaacaccgtgtacctccagatgaacagcctgaagcctgaggacaccgccgtgtactactgcaactctcaccctcctacactgccctattggggcctgggaacccaagtgacagtgtcctctggatccggcggcggaggatctggcggaggcggatctgggggcggaggctctttcgaagaggtgcaactggtgcagagcggagccgaagtgaagaaacctggggccagcgtgcgggtgtcctgcaaggccagcggctacacctttaccaactacggcatgaactgggtgcgccaggctcctggacagggcctggaatggatgggctggatcaacacctacaccggcgagcccacctacgccgacgacttcaagggcagagtgaccatgaccaccgacaccagcacctccaccgcctacatggaactgcggagcctgagaagcgacgacaccgccgtgtattattgcgcccggatcggcgacagcagccccagcgattattggggccagggaaccctcgtgaccgtgtcctctacgcgtatccagaaccctgatcctgccgtgtaccagctgcgggatagcaagagcagcgacaagagcgtgtgtctgttcaccgacttcgacagccagaccaacgtgtcccagagcaaggactccgacgtgtacatcaccgataagtgcgtgctggacatgcggagcatggacttcaagagcaactccgccgtggcctggtccaacaagtccgatttcgcctgcgccaacgccttcaacaacagcattatccccgaggacacattcttcccaagccccgagagcagctgcggctttaccagcgagagctaccagcagggcgtgctgagcgccaccatcctgtacgagatcctgctgggcaaggccaccctgtacgccgtgctggtgtctgccctggtgctgatggctatggtcaagcggaaggacagccggggataa

SEQ ID NO: 35193 - DNA, 2262 bp, synthetic construct
  source 1..2262: mol_type = other DNA
atggccttaccagtgaccgccttgctcctgccgctggccttgctgctccacgccgccaggccggacatcgtgatgacccagagccctgccaccctgtccgtgtctccaggcgaaagagccaccctgagctgcagagcttcccagagcgtgtccaacgacgtcgtgtggtatcagcagaagcccggccaggcccccagactgctgatctactacgccagcaacagatacaccggcatccccgccagattcagcggctctggcagcggcaccgagttcaccctgacaatcagcagcctccagagcgaggacttcgccgtgtactactgtcagcaggactacaccagcccctggaccttcggccagggcaccaagctggaaatcaagagactcgaggacctgaagaacgtgttcccacctgaggtggccgtgttcgagcctagcgaggccgagatcagccacacccagaaagccaccctcgtgtgcctggctaccggcttctaccccgaccatgtggaactgtcttggtgggtcaacggcaaagaggtgcacagcggcgtgtgtaccgacccccagccactgaaagaacagcccgccctgaacgacagccggtactgcctgagcagcagactgagagtgtccgccaccttctggcagaacccccggaaccacttcagatgccaggtgcagttctacggcctgagcgagaacgacgagtggacccaggacagagccaagcccgtgacccagatcgtgtctgccgaagcctggggcagagccgattgcgacgtgaagctggtggaaaagagcttcgagacagacaccaacctgaacttccagaacctgagcgtgatcggcttcagaatcctgctgctgaaagtggccggctttaacctgctgatgaccctgcggctgtggtccagcagggccaagcgatctggatctggagcaacaaacttctcactactcaaacaagcaggtgacgtggaggagaatcccgggcctactagtgccaccatggactggatttggcgcatccttttccttgtcggcgctgctaccggcgcccattccgggcccgaagttcagctgctggaatctggcggaggactcgttcaacctggcggctctctgagactgagctgtgccgcttctggcttcagcttctctagctacgccctgagctgggttcgacaagctcccggaaagggccttgaatgggtgtccagcatcggcgagaatgacggcaccacagactatgccgatgccgtgaaaggccggtttaccatcagcagagacaattccaagaacacgctctatctgcaaatgaactccctgcgcgtggaagatacagccgtgtattattgcgtgaaggacggcatccactggggacagggaaccctggttacagtgtctagcggatccggcggcggaggatctggcggaggcggatctgggggcggaggctctttcgaagaggtgcaactggtgcagagcggagccgaagtgaagaaacctggggccagcgtgcgggtgtcctgcaaggccagcggctacacctttaccaactacggcatgaactgggtgcgccaggctcctggacagggcctggaatggatgggctggatcaacacctacaccggcgagcccacctacgccgacgacttcaagggcagagtgaccatgaccaccgacaccagcacctccaccgcctacatggaactgcggagcctgagaagcgacgacaccgccgtgtattattgcgcccggatcggcgacagcagccccagcgattattggggccagggaaccctcgtgaccgtgtcctctacgcgtatccagaaccctgatcctgccgtgtaccagctgcgggatagcaagagcagcgacaagagcgtgtgtctgttcaccgacttcgacagccagaccaacgtgtcccagagcaaggactccgacgtgtacatcaccgataagtgcgtgctggacatgcggagcatggacttcaagagcaactccgccgtggcctggtccaacaagtccgatttcgcctgcgccaacgccttcaacaacagcattatccccgaggacacattcttcccaagccccgagagcagctgcggctttaccagcgagagctaccagcagggcgtgctgagcgccaccatcctgtacgagatcctgctgggcaaggccaccctgtacgccgtgctggtgtctgccctggtgctgatggctatggtcaagcggaaggacagccggggataa

SEQ ID NO: 35194 - DNA, 3369 bp, synthetic construct
  source 1..3369: mol_type = other DNA
atgggacccagactgctgttttgggctctgctgtgtctgctcggcacaggacctgttgaagctggcgtgacacagagccccacacacctgattaagaccagaggccagcaggccacactgagatgcagccctatcagcggccacaccagcgtgtactggtatcagcaggctctcggactgggcctccagttcctgctttggtacgacgagggcgaagagagaaaccggggcaacttccctcctcggttttccggcagacagttccccaactacagcagcgagctgaacgtgaacgccctggaactggaagatagcgccctgtacctgtgtgcctcttctcttggtggacctcgcggactggctggactgagaggggatgagcagtttttcggccctggcaccagactgaccgtgctggaaggtaccggcggaggcggatctggcggcggagaattcgacatcgtgatgacccagagccctgccaccctgtccgtgtctccaggcgaaagagccaccctgagctgcagagcttcccagagcgtgtccaacgacgtcgtgtggtatcagcagaagcccggccaggcccccagactgctgatctactacgccagcaacagatacaccggcatccccgccagattcagcggctctggcagcggcaccgagttcaccctgacaatcagcagcctccagagcgaggacttcgccgtgtactactgtcagcaggactacaccagcccctggaccttcggccagggcaccaagctggaaatcaagagactcgaggacctgaagaacgtgttcccacctgaggtggccgtgttcgagcctagcgaggccgagatcagccacacccagaaagccaccctcgtgtgcctggctaccggcttctaccccgaccatgtggaactgtcttggtgggtcaacggcaaagaggtgcacagcggcgtgtgtaccgacccccagccactgaaagaacagcccgccctgaacgacagccggtactgcctgagcagcagactgagagtgtccgccaccttctggcagaacccccggaaccacttcagatgccaggtgcagttctacggcctgagcgagaacgacgagtggacccaggacagagccaagcccgtgacccagatcgtgtctgccgaagcctggggcagagccgattgcgacgtgaagctggtggaaaagagcttcgagacagacaccaacctgaacttccagaacctgagcgtgatcggcttcagaatcctgctgctgaaagtggccggctttaacctgctgatgaccctgcggctgtggtccagcagggccaagcgatctggatctggagcaacaaacttctcactactcaaacaagcaggtgacgtggaggagaatcccgggcctactagtgccaccatggactggatttggcgcatccttttccttgtcggcgctgctaccggcgcccattccgggcccgaagtgcagctggttgaatctggcggaggactggttcaggctggcggatctctgagactgtcttgtgccgccagcggcagaacctttagcatgggctggtttagacaggcccctggcaaagagagagagttcgtcgccgccatcacatactctggcggcagcccttactacgccgactctgtgaagggcagattcaccatcagccgggacaacgccaagaacaccgtgtacctccagatgaacagcctgaagcctgaggacaccgccgtgtactactgcgccgccaatccaacatacggcagcgactggaacgccgagaattggggccagggaacccaagtgacagtgtctagcggatccggcggcggaggatctggcggaggcggatctgggggcggaggctctttcgaagaggtgcaactggtgcagagcggagccgaagtgaagaaacctggggccagcgtgcgggtgtcctgcaaggccagcggctacacctttaccaactacggcatgaactgggtgcgccaggctcctggacagggcctggaatggatgggctggatcaacacctacaccggcgagcccacctacgccgacgacttcaagggcagagtgaccatgaccaccgacaccagcacctccaccgcctacatggaactgcggagcctgagaagcgacgacaccgccgtgtattattgcgcccggatcggcgacagcagccccagcgattattggggccagggaaccctcgtgaccgtgtcctctacgcgtatccagaaccctgatcctgccgtgtaccagctgcgggatagcaagagcagcgacaagagcgtgtgtctgttcaccgacttcgacagccagaccaacgtgtcccagagcaaggactccgacgtgtacatcaccgataagtgcgtgctggacatgcggagcatggacttcaagagcaactccgccgtggcctggtccaacaagtccgatttcgcctgcgccaacgccttcaacaacagcattatccccgaggacacattcttcccaagccccgagagcagctgcggctttaccagcgagagctaccagcagggcgtgctgagcgccaccatcctgtacgagatcctgctgggcaaggccaccctgtacgccgtgctggtgtctgccctggtgctgatggctatggtcaagcggaaggacagccggggacgcgccaagagaagcggatctggcgtgaagcagaccctgaatttcgacctgctgaagctggctggcgacgtggaatccaacccaggcccttctagaggccatatgaccgagtacaagcccacggtgcgcctcgccacccgcgacgacgtccccagggccgtacgcaccctcgccgccgcgttcgccgactaccccgccacgcgccacaccgtcgatccggaccgccacatcgagcgggtcaccgagctgcaagaactcttcctcacgcgcgtcgggctcgacatcggcaaggtgtgggtcgcggacgacggcgccgcggtggcggtctggaccacgccggagagcgtcgaagcgggggcggtgttcgccgagatcggcccgcgcatggccgagttgagcggttcccggctggccgcgcagcaacagatggaaggcctcctggcgccgcaccggcccaaggagcccgcgtggttcctggccaccgtcggcgtctcgcccgaccaccagggcaagggtctgggcagcgccgtcgtgctccccggagtggaggcggccgagcgcgccggggtgcccgccttcctggagacctccgcgccccgcaacctccccttctacgagcggctcggcttcaccgtcaccgccgacgtcgaggtgcccgaaggaccgcgcacctggtgcatgacccgcaagcccggtgcctga

SEQ ID NO: 35195 - DNA, 3366 bp, synthetic construct
  source 1..3366: mol_type = other DNA
atgggacccagactgctgttttgggctctgctgtgtctgctcggcacaggacctgttgaagctggcgtgacacagagccccacacacctgattaagaccagaggccagcaggccacactgagatgcagccctatcagcggccacaccagcgtgtactggtatcagcaggctctcggactgggcctccagttcctgctttggtacgacgagggcgaagagagaaaccggggcaacttccctcctcggttttccggcagacagttccccaactacagcagcgagctgaacgtgaacgccctggaactggaagatagcgccctgtacctgtgtgccagctctctcggcggagatgaactgggagccgatggcaacgagcagttctttggccctggcaccagactgaccgtgctggaaggtaccggcggaggcggatctggcggcggaagcgaattcgacatcgtgatgacccagagccctgccaccctgtccgtgtctccaggcgaaagagccaccctgagctgcagagcttcccagagcgtgtccaacgacgtcgtgtggtatcagcagaagcccggccaggcccccagactgctgatctactacgccagcaacagatacaccggcatccccgccagattcagcggctctggcagcggcaccgagttcaccctgacaatcagcagcctccagagcgaggacttcgccgtgtactactgtcagcaggactacaccagcccctggaccttcggccagggcaccaagctggaaatcaagagactcgaggacctgaagaacgtgttcccacctgaggtggccgtgttcgagcctagcgaggccgagatcagccacacccagaaagccaccctcgtgtgcctggctaccggcttctaccccgaccatgtggaactgtcttggtgggtcaacggcaaagaggtgcacagcggcgtgtgtaccgacccccagccactgaaagaacagcccgccctgaacgacagccggtactgcctgagcagcagactgagagtgtccgccaccttctggcagaacccccggaaccacttcagatgccaggtgcagttctacggcctgagcgagaacgacgagtggacccaggacagagccaagcccgtgacccagatcgtgtctgccgaagcctggggcagagccgattgcgacgtgaagctggtggaaaagagcttcgagacagacaccaacctgaacttccagaacctgagcgtgatcggcttcagaatcctgctgctgaaagtggccggctttaacctgctgatgaccctgcggctgtggtccagcagggccaagcgatctggatctggagcaacaaacttctcactactcaaacaagcaggtgacgtggaggagaatcccgggcctactagtgccaccatggactggatttggcgcatccttttccttgtcggcgctgctaccggcgcccattccgggcccgaagtgcagctggttgaatctggcggaggactggttcaggctggcggatctctgagactgtcttgtgccgccagcggcagaacctttagcatgggctggtttagacaggcccctggcaaagagagagagttcgtcgccgccatcacatactctggcggcagcccttactacgccgactctgtgaagggcagattcaccatcagccgggacaacgccaagaacaccgtgtacctccagatgaacagcctgaagcctgaggacaccgccgtgtactactgcgccgccaatccaacatacggcagcgactggaacgccgagaattggggccagggaacccaagtgacagtgtctagcggatccggcggcggaggatctggcggaggcggatctgggggcggaggctctttcgaagaggtgcaactggtgcagagcggagccgaagtgaagaaacctggggccagcgtgcgggtgtcctgcaaggccagcggctacacctttaccaactacggcatgaactgggtgcgccaggctcctggacagggcctggaatggatgggctggatcaacacctacaccggcgagcccacctacgccgacgacttcaagggcagagtgaccatgaccaccgacaccagcacctccaccgcctacatggaactgcggagcctgagaagcgacgacaccgccgtgtattattgcgcccggatcggcgacagcagccccagcgattattggggccagggaaccctcgtgaccgtgtcctctacgcgtatccagaaccctgatcctgccgtgtaccagctgcgggatagcaagagcagcgacaagagcgtgtgtctgttcaccgacttcgacagccagaccaacgtgtcccagagcaaggactccgacgtgtacatcaccgataagtgcgtgctggacatgcggagcatggacttcaagagcaactccgccgtggcctggtccaacaagtccgatttcgcctgcgccaacgccttcaacaacagcattatccccgaggacacattcttcccaagccccgagagcagctgcggctttaccagcgagagctaccagcagggcgtgctgagcgccaccatcctgtacgagatcctgctgggcaaggccaccctgtacgccgtgctggtgtctgccctggtgctgatggctatggtcaagcggaaggacagccggggacgcgccaagagaagcggatctggcgtgaagcagaccctgaatttcgacctgctgaagctggctggcgacgtggaatccaacccaggcccttctagaggccatatgaccgagtacaagcccacggtgcgcctcgccacccgcgacgacgtccccagggccgtacgcaccctcgccgccgcgttcgccgactaccccgccacgcgccacaccgtcgatccggaccgccacatcgagcgggtcaccgagctgcaagaactcttcctcacgcgcgtcgggctcgacatcggcaaggtgtgggtcgcggacgacggcgccgcggtggcggtctggaccacgccggagagcgtcgaagcgggggcggtgttcgccgagatcggcccgcgcatggccgagttgagcggttcccggctggccgcgcagcaacagatggaaggcctcctggcgccgcaccggcccaaggagcccgcgtggttcctggccaccgtcggcgtctcgcccgaccaccagggcaagggtctgggcagcgccgtcgtgctccccggagtggaggcggccgagcgcgccggggtgcccgccttcctggagacctccgcgccccgcaacctccccttctacgagcggctcggcttcaccgtcaccgccgacgtcgaggtgcccgaaggaccgcgcacctggtgcatgacccgcaagcccggtgcctga

SEQ ID NO: 35196 - DNA, 2841 bp, synthetic construct
  source 1..2841: mol_type = other DNA
atggccttaccagtgaccgccttgctcctgccgctggccttgctgctccacgccgccaggccggacatcgtgatgacccagagccctgccaccctgtccgtgtctccaggcgaaagagccaccctgagctgcagagcttcccagagcgtgtccaacgacgtcgtgtggtatcagcagaagcccggccaggcccccagactgctgatctactacgccagcaacagatacaccggcatccccgccagattcagcggctctggcagcggcaccgagttcaccctgacaatcagcagcctccagagcgaggacttcgccgtgtactactgtcagcaggactacaccagcccctggaccttcggccagggcaccaagctggaaatcaagagactcgaggacctgaagaacgtgttcccacctgaggtggccgtgttcgagcctagcgaggccgagatcagccacacccagaaagccaccctcgtgtgcctggctaccggcttctaccccgaccatgtggaactgtcttggtgggtcaacggcaaagaggtgcacagcggcgtgtgtaccgacccccagccactgaaagaacagcccgccctgaacgacagccggtactgcctgagcagcagactgagagtgtccgccaccttctggcagaacccccggaaccacttcagatgccaggtgcagttctacggcctgagcgagaacgacgagtggacccaggacagagccaagcccgtgacccagatcgtgtctgccgaagcctggggcagagccgattgcgacgtgaagctggtggaaaagagcttcgagacagacaccaacctgaacttccagaacctgagcgtgatcggcttcagaatcctgctgctgaaagtggccggctttaacctgctgatgaccctgcggctgtggtccagcagggccaagcgatctggatctggagcaacaaacttctcactactcaaacaagcaggtgacgtggaggagaatcccgggcctactagtgccaccatggactggatttggcgcatccttttccttgtcggcgctgctaccggcgcccattccgggcccatgggaagctggcttgagttctaccacagactcaacgccattgacagcaggctgtgggcacttggcggaagcgaagctgaactcgccgcttttgaaaaagaaattgccgctttcgagtccgagcttcaggcttacaaaggcaaagggaatcctgaggtcgagagcctgagagatcacgctgcccacattagagagtggttgcaggcataccggcacaatggatccggcggcggaggatctggcggaggcggatctgggggcggaggctctttcgaagaggtgcaactggtgcagagcggagccgaagtgaagaaacctggggccagcgtgcgggtgtcctgcaaggccagcggctacacctttaccaactacggcatgaactgggtgcgccaggctcctggacagggcctggaatggatgggctggatcaacacctacaccggcgagcccacctacgccgacgacttcaagggcagagtgaccatgaccaccgacaccagcacctccaccgcctacatggaactgcggagcctgagaagcgacgacaccgccgtgtattattgcgcccggatcggcgacagcagccccagcgattattggggccagggaaccctcgtgaccgtgtcctctacgcgtatccagaaccctgatcctgccgtgtaccagctgcgggatagcaagagcagcgacaagagcgtgtgtctgttcaccgacttcgacagccagaccaacgtgtcccagagcaaggactccgacgtgtacatcaccgataagtgcgtgctggacatgcggagcatggacttcaagagcaactccgccgtggcctggtccaacaagtccgatttcgcctgcgccaacgccttcaacaacagcattatccccgaggacacattcttcccaagccccgagagcagctgcggctttaccagcgagagctaccagcagggcgtgctgagcgccaccatcctgtacgagatcctgctgggcaaggccaccctgtacgccgtgctggtgtctgccctggtgctgatggctatggtcaagcggaaggacagccggggacgcgccaagagaagcggatctggcgtgaagcagaccctgaatttcgacctgctgaagctggctggcgacgtggaatccaacccaggcccttctagaggccatatgaccgagtacaagcccacggtgcgcctcgccacccgcgacgacgtccccagggccgtacgcaccctcgccgccgcgttcgccgactaccccgccacgcgccacaccgtcgatccggaccgccacatcgagcgggtcaccgagctgcaagaactcttcctcacgcgcgtcgggctcgacatcggcaaggtgtgggtcgcggacgacggcgccgcggtggcggtctggaccacgccggagagcgtcgaagcgggggcggtgttcgccgagatcggcccgcgcatggccgagttgagcggttcccggctggccgcgcagcaacagatggaaggcctcctggcgccgcaccggcccaaggagcccgcgtggttcctggccaccgtcggcgtctcgcccgaccaccagggcaagggtctgggcagcgccgtcgtgctccccggagtggaggcggccgagcgcgccggggtgcccgccttcctggagacctccgcgccccgcaacctccccttctacgagcggctcggcttcaccgtcaccgccgacgtcgaggtgcccgaaggaccgcgcacctggtgcatgacccgcaagcccggtgcctga

SEQ ID NO: 35197 - DNA, 2841 bp, synthetic construct
  source 1..2841: mol_type = other DNA
atggccttaccagtgaccgccttgctcctgccgctggccttgctgctccacgccgccaggccggcatgcatgggcagttggttcgagttctacgaccggctgaatgccatcgacgccagactgtgggctctcggaggatctgaagctgagctggccgccttcgagaaagagatcgccgcctttgagagcgagctgcaagcctacaaaggcaagggcaaccccgaggtggaaaacctgagagtgcacgccgctgccatcagagaatggctccaggcttacagacacaacggtaccggcggaggcggatctggcggcggaggtagcggtggcggaggatctgaattcgacatcgtgatgacccagagccctgccaccctgtccgtgtctccaggcgaaagagccaccctgagctgcagagcttcccagagcgtgtccaacgacgtcgtgtggtatcagcagaagcccggccaggcccccagactgctgatctactacgccagcaacagatacaccggcatccccgccagattcagcggctctggcagcggcaccgagttcaccctgacaatcagcagcctccagagcgaggacttcgccgtgtactactgtcagcaggactacaccagcccctggaccttcggccagggcaccaagctggaaatcaagagactcgaggacctgaagaacgtgttcccacctgaggtggccgtgttcgagcctagcgaggccgagatcagccacacccagaaagccaccctcgtgtgcctggctaccggcttctaccccgaccatgtggaactgtcttggtgggtcaacggcaaagaggtgcacagcggcgtgtgtaccgacccccagccactgaaagaacagcccgccctgaacgacagccggtactgcctgagcagcagactgagagtgtccgccaccttctggcagaacccccggaaccacttcagatgccaggtgcagttctacggcctgagcgagaacgacgagtggacccaggacagagccaagcccgtgacccagatcgtgtctgccgaagcctggggcagagccgattgcgacgtgaagctggtggaaaagagcttcgagacagacaccaacctgaacttccagaacctgagcgtgatcggcttcagaatcctgctgctgaaagtggccggctttaacctgctgatgaccctgcggctgtggtccagcagggccaagcgatctggatctggagcaacaaacttctcactactcaaacaagcaggtgacgtggaggagaatcccgggcctactagtatggactggatttggcgcatccttttccttgtcggcgctgctaccggcgcgcattccttcgaagaggtgcaactggtgcagagcggagccgaagtgaagaaacctggggccagcgtgcgggtgtcctgcaaggccagcggctacacctttaccaactacggcatgaactgggtgcgccaggctcctggacagggcctggaatggatgggctggatcaacacctacaccggcgagcccacctacgccgacgacttcaagggcagagtgaccatgaccaccgacaccagcacctccaccgcctacatggaactgcggagcctgagaagcgacgacaccgccgtgtattattgcgcccggatcggcgacagcagccccagcgattattggggccagggaaccctcgtgaccgtgtcctctacgcgtatccagaaccctgatcctgccgtgtaccagctgcgggatagcaagagcagcgacaagagcgtgtgtctgttcaccgacttcgacagccagaccaacgtgtcccagagcaaggactccgacgtgtacatcaccgataagtgcgtgctggacatgcggagcatggacttcaagagcaactccgccgtggcctggtccaacaagtccgatttcgcctgcgccaacgccttcaacaacagcattatccccgaggacacattcttcccaagccccgagagcagctgcggctttaccagcgagagctaccagcagggcgtgctgagcgccaccatcctgtacgagatcctgctgggcaaggccaccctgtacgccgtgctggtgtctgccctggtgctgatggctatggtcaagcggaaggacagccggggacgcgccaagagaagcggatctggcgtgaagcagaccctgaatttcgacctgctgaagctggctggcgacgtggaatccaacccaggcccttctagaggccatatgaccgagtacaagcccacggtgcgcctcgccacccgcgacgacgtccccagggccgtacgcaccctcgccgccgcgttcgccgactaccccgccacgcgccacaccgtcgatccggaccgccacatcgagcgggtcaccgagctgcaagaactcttcctcacgcgcgtcgggctcgacatcggcaaggtgtgggtcgcggacgacggcgccgcggtggcggtctggaccacgccggagagcgtcgaagcgggggcggtgttcgccgagatcggcccgcgcatggccgagttgagcggttcccggctggccgcgcagcaacagatggaaggcctcctggcgccgcaccggcccaaggagcccgcgtggttcctggccaccgtcggcgtctcgcccgaccaccagggcaagggtctgggcagcgccgtcgtgctccccggagtggaggcggccgagcgcgccggggtgcccgccttcctggagacctccgcgccccgcaacctccccttctacgagcggctcggcttcaccgtcaccgccgacgtcgaggtgcccgaaggaccgcgcacctggtgcatgacccgcaagcccggtgcctga

SEQ ID NO: 35198 - DNA, 3192 bp, synthetic construct
  source 1..3192: mol_type = other DNA
atggccttaccagtgaccgccttgctcctgccgctggccttgctgctccacgccgccaggccggcatgcatggaccccgacctggaaatcagagccgccttcctgcggcagagaaacacagccctgagaacagaggtggccgagctggaacaagaggtgcagcggctggaaaacgaggtgtcccagtacgagacaagatacggccctctcggaggcggaaaaggtaccggcggaggcggatctggcggcggaggtagcggtggcggaggatctgaattcgacatcgtgatgacccagagccctgccaccctgtccgtgtctccaggcgaaagagccaccctgagctgcagagcttcccagagcgtgtccaacgacgtcgtgtggtatcagcagaagcccggccaggcccccagactgctgatctactacgccagcaacagatacaccggcatccccgccagattcagcggctctggcagcggcaccgagttcaccctgacaatcagcagcctccagagcgaggacttcgccgtgtactactgtcagcaggactacaccagcccctggaccttcggccagggcaccaagctggaaatcaagagactcgaggacctgaagaacgtgttcccacctgaggtggccgtgttcgagcctagcgaggccgagatcagccacacccagaaagccaccctcgtgtgcctggctaccggcttctaccccgaccatgtggaactgtcttggtgggtcaacggcaaagaggtgcacagcggcgtgtgtaccgacccccagccactgaaagaacagcccgccctgaacgacagccggtactgcctgagcagcagactgagagtgtccgccaccttctggcagaacccccggaaccacttcagatgccaggtgcagttctacggcctgagcgagaacgacgagtggacccaggacagagccaagcccgtgacccagatcgtgtctgccgaagcctggggcagagccgattgcgacgtgaagctggtggaaaagagcttcgagacagacaccaacctgaacttccagaacctgagcgtgatcggcttcagaatcctgctgctgaaagtggccggctttaacctgctgatgaccctgcggctgtggtccagcagggccaagcgatctggatctggagcaacaaacttctcactactcaaacaagcaggtgacgtggaggagaatcccgggcctactagtgccaccatggactggatttggcgcatccttttccttgtcggcgctgctaccggcgcccattccgggcccgaagtgcagctggttgaatctggcggaggactggttcaggctggcggatctctgagactgtcttgtgccgccagcggcagaacctttagcatgggctggtttagacaggcccctggcaaagagagagagttcgtcgccgccatcacatactctggcggcagcccttactacgccgactctgtgaagggcagattcaccatcagccgggacaacgccaagaacaccgtgtacctccagatgaacagcctgaagcctgaggacaccgccgtgtactactgcgccgccaatccaacatacggcagcgactggaacgccgagaattggggccagggaacccaagtgacagtgtctagcggatccggcggcggaggatctggcggaggcggatctgggggcggaggctctttcgaagaggtgcaactggtgcagagcggagccgaagtgaagaaacctggggccagcgtgcgggtgtcctgcaaggccagcggctacacctttaccaactacggcatgaactgggtgcgccaggctcctggacagggcctggaatggatgggctggatcaacacctacaccggcgagcccacctacgccgacgacttcaagggcagagtgaccatgaccaccgacaccagcacctccaccgcctacatggaactgcggagcctgagaagcgacgacaccgccgtgtattattgcgcccggatcggcgacagcagccccagcgattattggggccagggaaccctcgtgaccgtgtcctctacgcgtatccagaaccctgatcctgccgtgtaccagctgcgggatagcaagagcagcgacaagagcgtgtgtctgttcaccgacttcgacagccagaccaacgtgtcccagagcaaggactccgacgtgtacatcaccgataagtgcgtgctggacatgcggagcatggacttcaagagcaactccgccgtggcctggtccaacaagtccgatttcgcctgcgccaacgccttcaacaacagcattatccccgaggacacattcttcccaagccccgagagcagctgcggctttaccagcgagagctaccagcagggcgtgctgagcgccaccatcctgtacgagatcctgctgggcaaggccaccctgtacgccgtgctggtgtctgccctggtgctgatggctatggtcaagcggaaggacagccggggacgcgccaagagaagcggatctggcgtgaagcagaccctgaatttcgacctgctgaagctggctggcgacgtggaatccaacccaggcccttctagaggccatatgaccgagtacaagcccacggtgcgcctcgccacccgcgacgacgtccccagggccgtacgcaccctcgccgccgcgttcgccgactaccccgccacgcgccacaccgtcgatccggaccgccacatcgagcgggtcaccgagctgcaagaactcttcctcacgcgcgtcgggctcgacatcggcaaggtgtgggtcgcggacgacggcgccgcggtggcggtctggaccacgccggagagcgtcgaagcgggggcggtgttcgccgagatcggcccgcgcatggccgagttgagcggttcccggctggccgcgcagcaacagatggaaggcctcctggcgccgcaccggcccaaggagcccgcgtggttcctggccaccgtcggcgtctcgcccgaccaccagggcaagggtctgggcagcgccgtcgtgctccccggagtggaggcggccgagcgcgccggggtgcccgccttcctggagacctccgcgccccgcaacctccccttctacgagcggctcggcttcaccgtcaccgccgacgtcgaggtgcccgaaggaccgcgcacctggtgcatgacccgcaagcccggtgcctga

SEQ ID NO: 35199 - DNA, 2841 bp, synthetic construct
  source 1..2841: mol_type = other DNA
atggccttaccagtgaccgccttgctcctgccgctggccttgctgctccacgccgccaggccggacatcgtgatgacccagagccctgccaccctgtccgtgtctccaggcgaaagagccaccctgagctgcagagcttcccagagcgtgtccaacgacgtcgtgtggtatcagcagaagcccggccaggcccccagactgctgatctactacgccagcaacagatacaccggcatccccgccagattcagcggctctggcagcggcaccgagttcaccctgacaatcagcagcctccagagcgaggacttcgccgtgtactactgtcagcaggactacaccagcccctggaccttcggccagggcaccaagctggaaatcaagagactcgaggacctgaagaacgtgttcccacctgaggtggccgtgttcgagcctagcgaggccgagatcagccacacccagaaagccaccctcgtgtgcctggctaccggcttctaccccgaccatgtggaactgtcttggtgggtcaacggcaaagaggtgcacagcggcgtgtgtaccgacccccagccactgaaagaacagcccgccctgaacgacagccggtactgcctgagcagcagactgagagtgtccgccaccttctggcagaacccccggaaccacttcagatgccaggtgcagttctacggcctgagcgagaacgacgagtggacccaggacagagccaagcccgtgacccagatcgtgtctgccgaagcctggggcagagccgattgcgacgtgaagctggtggaaaagagcttcgagacagacaccaacctgaacttccagaacctgagcgtgatcggcttcagaatcctgctgctgaaagtggccggctttaacctgctgatgaccctgcggctgtggtccagcagggccaagcgatctggatctggagcaacaaacttctcactactcaaacaagcaggtgacgtggaggagaatcccgggcctactagtgccaccatggactggatttggcgcatccttttccttgtcggcgctgctaccggcgcccattccgggcccatgggatcttggagcgagttttacgatcggctgcacgccattcaccaccggctgtatgctctcggaggaagcgaagctgagctggccgcttttgaaaaagaaattgccgctttcgagtccgagcttcaggcttacaaaggcaaagggaatcctgaggtcgaggccctgagagataccgccgccttcatcagaacccggttgcaggcataccggcacaacggatccggcggcggaggatctggcggaggcggatctgggggcggaggctctttcgaagaggtgcaactggtgcagagcggagccgaagtgaagaaacctggggccagcgtgcgggtgtcctgcaaggccagcggctacacctttaccaactacggcatgaactgggtgcgccaggctcctggacagggcctggaatggatgggctggatcaacacctacaccggcgagcccacctacgccgacgacttcaagggcagagtgaccatgaccaccgacaccagcacctccaccgcctacatggaactgcggagcctgagaagcgacgacaccgccgtgtattattgcgcccggatcggcgacagcagccccagcgattattggggccagggaaccctcgtgaccgtgtcctctacgcgtatccagaaccctgatcctgccgtgtaccagctgcgggatagcaagagcagcgacaagagcgtgtgtctgttcaccgacttcgacagccagaccaacgtgtcccagagcaaggactccgacgtgtacatcaccgataagtgcgtgctggacatgcggagcatggacttcaagagcaactccgccgtggcctggtccaacaagtccgatttcgcctgcgccaacgccttcaacaacagcattatccccgaggacacattcttcccaagccccgagagcagctgcggctttaccagcgagagctaccagcagggcgtgctgagcgccaccatcctgtacgagatcctgctgggcaaggccaccctgtacgccgtgctggtgtctgccctggtgctgatggctatggtcaagcggaaggacagccggggacgcgccaagagaagcggatctggcgtgaagcagaccctgaatttcgacctgctgaagctggctggcgacgtggaatccaacccaggcccttctagaggccatatgaccgagtacaagcccacggtgcgcctcgccacccgcgacgacgtccccagggccgtacgcaccctcgccgccgcgttcgccgactaccccgccacgcgccacaccgtcgatccggaccgccacatcgagcgggtcaccgagctgcaagaactcttcctcacgcgcgtcgggctcgacatcggcaaggtgtgggtcgcggacgacggcgccgcggtggcggtctggaccacgccggagagcgtcgaagcgggggcggtgttcgccgagatcggcccgcgcatggccgagttgagcggttcccggctggccgcgcagcaacagatggaaggcctcctggcgccgcaccggcccaaggagcccgcgtggttcctggccaccgtcggcgtctcgcccgaccaccagggcaagggtctgggcagcgccgtcgtgctccccggagtggaggcggccgagcgcgccggggtgcccgccttcctggagacctccgcgccccgcaacctccccttctacgagcggctcggcttcaccgtcaccgccgacgtcgaggtgcccgaaggaccgcgcacctggtgcatgacccgcaagcccggtgcctga

SEQ ID NO: 35200 - DNA, 3471 bp, synthetic construct
  source 1..3471: mol_type = other DNA
atggccttaccagtgaccgccttgctcctgccgctggccttgctgctccacgccgccaggccggacatcgtgatgacccagagccctgccaccctgtccgtgtctccaggcgaaagagccaccctgagctgcagagcttcccagagcgtgtccaacgacgtcgtgtggtatcagcagaagcccggccaggcccccagactgctgatctactacgccagcaacagatacaccggcatccccgccagattcagcggctctggcagcggcaccgagttcaccctgacaatcagcagcctccagagcgaggacttcgccgtgtactactgtcagcaggactacaccagcccctggaccttcggccagggcaccaagctggaaatcaagagactcgaggacctgaagaacgtgttcccacctgaggtggccgtgttcgagcctagcgaggccgagatcagccacacccagaaagccaccctcgtgtgcctggctaccggcttctaccccgaccatgtggaactgtcttggtgggtcaacggcaaagaggtgcacagcggcgtgtgtaccgacccccagccactgaaagaacagcccgccctgaacgacagccggtactgcctgagcagcagactgagagtgtccgccaccttctggcagaacccccggaaccacttcagatgccaggtgcagttctacggcctgagcgagaacgacgagtggacccaggacagagccaagcccgtgacccagatcgtgtctgccgaagcctggggcagagccgattgcgacgtgaagctggtggaaaagagcttcgagacagacaccaacctgaacttccagaacctgagcgtgatcggcttcagaatcctgctgctgaaagtggccggctttaacctgctgatgaccctgcggctgtggtccagcagggccaagcgatctggatctggagcaacaaacttctcactactcaaacaagcaggtgacgtggaggagaatcccgggcctactagtaccatggactggatttggcgcatccttttccttgtcggcgctgctaccggcgcccattccctgttcaatcaagaggtgcagatccctctgaccgagagctactgtggcccctgtcctaagaactggatctgctacaagaacaactgctaccagttcttcgacgagagcaagaattggtacgagagccaggccagctgcatgagccagaatgccagcctgctgaaggtgtacagcaaagaggaccaggacctgctgaaactggtcaagagcgcccactggatgggccttgtgcacatccccaccaatggctcttggcagtgggaggacggcagcattctgagccctaacctgctgaccatcatcgagatgcagaagggcgactgcgccctgtacgccagcagctttaagggctacatcgagaattgcagcaccccgaacacctacatctgtatgcagagaaccgtttctggcggaggcggctctggaggaggcggaagtggcggcggaggcgacctctttaatcaagaagtccagattccactcaccgaatcctactgcggaccttgtccaaaaaattggatttgttataagaacaactgttatcaattctttgatgagtctaaaaattggtatgagtcccaggcttcctgcatgtctcagaacgcttctctgctgaaagtctactctaaagaagatcaggatctcctgaagctcgtcaagtctgcccattggatggggctcgtccacattcctaccaacggaagctggcaatgggaagatggctccatcctgtctccaaatctgctcacgattattgaaatgcagaaaggggattgtgctctctacgccagctccttcaagggatatattgagaactgtagcacgcccaatacttatatctgtatgcaacggaccgtgggatccggcggcggaggatctggcggaggcggatctgggggcggaggctctttcgaagaggtgcaactggtgcagagcggagccgaagtgaagaaacctggggccagcgtgcgggtgtcctgcaaggccagcggctacacctttaccaactacggcatgaactgggtgcgccaggctcctggacagggcctggaatggatgggctggatcaacacctacaccggcgagcccacctacgccgacgacttcaagggcagagtgaccatgaccaccgacaccagcacctccaccgcctacatggaactgcggagcctgagaagcgacgacaccgccgtgtattattgcgcccggatcggcgacagcagccccagcgattattggggccagggaaccctcgtgaccgtgtcctctacgcgtatccagaaccctgatcctgccgtgtaccagctgcgggatagcaagagcagcgacaagagcgtgtgtctgttcaccgacttcgacagccagaccaacgtgtcccagagcaaggactccgacgtgtacatcaccgataagtgcgtgctggacatgcggagcatggacttcaagagcaactccgccgtggcctggtccaacaagtccgatttcgcctgcgccaacgccttcaacaacagcattatccccgaggacacattcttcccaagccccgagagcagctgcggctttaccagcgagagctaccagcagggcgtgctgagcgccaccatcctgtacgagatcctgctgggcaaggccaccctgtacgccgtgctggtgtctgccctggtgctgatggctatggtcaagcggaaggacagccggggacgcgccaagagaagcggatctggcgtgaagcagaccctgaatttcgacctgctgaagctggctggcgacgtggaatccaacccaggcccttctagaggccatatgaccgagtacaagcccacggtgcgcctcgccacccgcgacgacgtccccagggccgtacgcaccctcgccgccgcgttcgccgactaccccgccacgcgccacaccgtcgatccggaccgccacatcgagcgggtcaccgagctgcaagaactcttcctcacgcgcgtcgggctcgacatcggcaaggtgtgggtcgcggacgacggcgccgcggtggcggtctggaccacgccggagagcgtcgaagcgggggcggtgttcgccgagatcggcccgcgcatggccgagttgagcggttcccggctggccgcgcagcaacagatggaaggcctcctggcgccgcaccggcccaaggagcccgcgtggttcctggccaccgtcggcgtctcgcccgaccaccagggcaagggtctgggcagcgccgtcgtgctccccggagtggaggcggccgagcgcgccggggtgcccgccttcctggagacctccgcgccccgcaacctccccttctacgagcggctcggcttcaccgtcaccgccgacgtcgaggtgcccgaaggaccgcgcacctggtgcatgacccgcaagcccggtgcctga

SEQ ID NO: 35201 - DNA, 1857 bp, synthetic construct
  source 1..1857: mol_type = other DNA
atggccttaccagtgaccgccttgctcctgccgctggccttgctgctccacgccgccaggccggacatcgtgatgacccagagccctgccaccctgtccgtgtctccaggcgaaagagccaccctgagctgcagagcttcccagagcgtgtccaacgacgtcgtgtggtatcagcagaagcccggccaggcccccagactgctgatctactacgccagcaacagatacaccggcatccccgccagattcagcggctctggcagcggcaccgagttcaccctgacaatcagcagcctccagagcgaggacttcgccgtgtactactgtcagcaggactacaccagcccctggaccttcggccagggcaccaagctggaaatcaagagactcgaggacctgaagaacgtgttcccacctgaggtggccgtgttcgagcctagcgaggccgagatcagccacacccagaaagccaccctcgtgtgcctggctaccggcttctaccccgaccatgtggaactgtcttggtgggtcaacggcaaagaggtgcacagcggcgtgtgtaccgacccccagccactgaaagaacagcccgccctgaacgacagccggtactgcctgagcagcagactgagagtgtccgccaccttctggcagaacccccggaaccacttcagatgccaggtgcagttctacggcctgagcgagaacgacgagtggacccaggacagagccaagcccgtgacccagatcgtgtctgccgaagcctggggcagagccgattgcggctttaccagcgagagctaccagcagggcgtgctgagcgccaccaacctgagcgtgatcggcttcagaatcctgctgctgaaagtggccggctttaacctgctgatgaccctgcggctgtggtccagcagggccaagcgatctggatctggagcaacaaacttctcactactcaaacaagcaggtgacgtggaggagaatcccgggcctactagtatggactggatttggcgcatccttttccttgtcggcgctgctaccggcgcgcattccttcgaagaggtgcaactggtgcagagcggagccgaagtgaagaaacctggggccagcgtgcgggtgtcctgcaaggccagcggctacacctttaccaactacggcatgaactgggtgcgccaggctcctggacagggcctggaatggatgggctggatcaacacctacaccggcgagcccacctacgccgacgacttcaagggcagagtgaccatgaccaccgacaccagcacctccaccgcctacatggaactgcggagcctgagaagcgacgacaccgccgtgtattattgcgcccggatcggcgacagcagccccagcgattattggggccagggaaccctcgtgaccgtgtcctctacgcgtatccagaaccctgatcctgccgtgtaccagctgcgggatagcaagagcagcgacaagagcgtgtgtctgttcaccgacttcgacagccagaccaacgtgtcccagagcaaggactccgacgtgtacatcaccgataagtgcgtgctggacatgcggagcatggacttcaagagcaactccgccgtggcctggtccaacaagtccgatttcgcctgcgccaacgccttcaacaacagcattatccccgaggacacattcttcccaagccccgagagcagctgcgacgtgaagctggtggaaaagagcttcgagacagacaccaacctgaacttccagatcctgtacgagatcctgctgggcaaggccaccctgtacgccgtgctggtgtctgccctggtgctgatggctatggtcaagcggaaggacagccgggga

SEQ ID NO: 35202 - DNA, 1869 bp, synthetic construct
  source 1..1869: mol_type = other DNA
atggccttaccagtgaccgccttgctcctgccgctggccttgctgctccacgccgccaggccggacatcgtgatgacccagagccctgccaccctgtccgtgtctccaggcgaaagagccaccctgagctgcagagcttcccagagcgtgtccaacgacgtcgtgtggtatcagcagaagcccggccaggcccccagactgctgatctactacgccagcaacagatacaccggcatccccgccagattcagcggctctggcagcggcaccgagttcaccctgacaatcagcagcctccagagcgaggacttcgccgtgtactactgtcagcaggactacaccagcccctggaccttcggccagggcaccaagctggaaatcaagagactcgagatccagaaccctgatcctgccgtgtaccagctgcgggatagcaagagcagcgacaagagcgtgtgtctgttcaccgacttcgacagccagaccaacgtgtcccagagcaaggactccgacgtgtacatcaccgataagtgcgtgctggacatgcggagcatggacttcaagagcaactccgccgtggcctggtccaacaagtccgatttcgcctgcgccaacgccttcaacaacagcattatccccgaggacacattcttcccaagccccgagagcagctgcgacgtgaagctggtggaaaagagcttcgagacagacaccaacctgaacttccagatcctgtacgagatcctgctgggcaaggccaccctgtacgccgtgctggtgtctgccctggtgctgatggctatggtcaagcggaaggacagccggggacgcgccaagagaagcggatctggcgtgaagcagaccctgaatttcgacctgctgaagctggctggcgacgtggaatccaacccaggccctactagtatggactggatttggcgcatccttttccttgtcggcgctgctaccggcgcgcattccttcgaagaggtgcaactggtgcagagcggagccgaagtgaagaaacctggggccagcgtgcgggtgtcctgcaaggccagcggctacacctttaccaactacggcatgaactgggtgcgccaggctcctggacagggcctggaatggatgggctggatcaacacctacaccggcgagcccacctacgccgacgacttcaagggcagagtgaccatgaccaccgacaccagcacctccaccgcctacatggaactgcggagcctgagaagcgacgacaccgccgtgtattattgcgcccggatcggcgacagcagccccagcgattattggggccagggaaccctcgtgaccgtgtcctctacgcgtgaggacctgaagaacgtgttcccacctgaggtggccgtgttcgagcctagcgaggccgagatcagccacacccagaaagccaccctcgtgtgcctggctaccggcttctaccccgaccatgtggaactgtcttggtgggtcaacggcaaagaggtgcacagcggcgtgtgtaccgacccccagccactgaaagaacagcccgccctgaacgacagccggtactgcctgagcagcagactgagagtgtccgccaccttctggcagaacccccggaaccacttcagatgccaggtgcagttctacggcctgagcgagaacgacgagtggacccaggacagagccaagcccgtgacccagatcgtgtctgccgaagcctggggcagagccgattgcggctttaccagcgagagctaccagcagggcgtgctgagcgccaccaacctgagcgtgatcggcttcagaatcctgctgctgaaagtggccggctttaacctgctgatgaccctgcggctgtggtccagc

SEQ ID NO: 35203 - DNA, 2262 bp, synthetic construct
  source 1..2262: mol_type = other DNA
atggccttaccagtgaccgccttgctcctgccgctggccttgctgctccacgccgccaggccggaagtgcagctggttgaatctggcggaggactggttcagcctggcggatctctgagactgtcttgtgccgccagcggcttcagcttcagcgacttttggatgagctgggtccgacaggcccctggcaaaggacttgaatgggtcgccacaatcagccaggccggcagcgagaaggactacgtggactctgtgaagggcagattcaccatcagccgggacaacgccaagaagtccctgtacctccagatgaacagcctgagagccgaggacaccgccgtgtactattgtgcctctggcgtgtacagcttcgactacagaggccagggcaccctggtcacagtctcttctggtaccggcggaggcggatctggcggcggaggtagcggtggcggaggatctgaattcgacatcgtgatgacccagagccctgccaccctgtccgtgtctccaggcgaaagagccaccctgagctgcagagcttcccagagcgtgtccaacgacgtcgtgtggtatcagcagaagcccggccaggcccccagactgctgatctactacgccagcaacagatacaccggcatccccgccagattcagcggctctggcagcggcaccgagttcaccctgacaatcagcagcctccagagcgaggacttcgccgtgtactactgtcagcaggactacaccagcccctggaccttcggccagggcaccaagctggaaatcaagagactcgaggacctgaagaacgtgttcccacctgaggtggccgtgttcgagcctagcgaggccgagatcagccacacccagaaagccaccctcgtgtgcctggctaccggcttctaccccgaccatgtggaactgtcttggtgggtcaacggcaaagaggtgcacagcggcgtgtgtaccgacccccagccactgaaagaacagcccgccctgaacgacagccggtactgcctgagcagcagactgagagtgtccgccaccttctggcagaacccccggaaccacttcagatgccaggtgcagttctacggcctgagcgagaacgacgagtggacccaggacagagccaagcccgtgacccagatcgtgtctgccgaagcctggggcagagccgattgcggctttaccagcgagagctaccagcagggcgtgctgagcgccaccaacctgagcgtgatcggcttcagaatcctgctgctgaaagtggccggctttaacctgctgatgaccctgcggctgtggtccagcagggccaagcgatctggatctggagcaacaaacttctcactactcaaacaagcaggtgacgtggaggagaatcccgggcctactagtatggactggatttggcgcatccttttccttgtcggcgctgctaccggcgcgcattccttcgaagaggtgcaactggtgcagagcggagccgaagtgaagaaacctggggccagcgtgcgggtgtcctgcaaggccagcggctacacctttaccaactacggcatgaactgggtgcgccaggctcctggacagggcctggaatggatgggctggatcaacacctacaccggcgagcccacctacgccgacgacttcaagggcagagtgaccatgaccaccgacaccagcacctccaccgcctacatggaactgcggagcctgagaagcgacgacaccgccgtgtattattgcgcccggatcggcgacagcagccccagcgattattggggccagggaaccctcgtgaccgtgtcctctacgcgtatccagaaccctgatcctgccgtgtaccagctgcgggatagcaagagcagcgacaagagcgtgtgtctgttcaccgacttcgacagccagaccaacgtgtcccagagcaaggactccgacgtgtacatcaccgataagtgcgtgctggacatgcggagcatggacttcaagagcaactccgccgtggcctggtccaacaagtccgatttcgcctgcgccaacgccttcaacaacagcattatccccgaggacacattcttcccaagccccgagagcagctgcgacgtgaagctggtggaaaagagcttcgagacagacaccaacctgaacttccagatcctgtacgagatcctgctgggcaaggccaccctgtacgccgtgctggtgtctgccctggtgctgatggctatggtcaagcggaaggacagccgggga

SEQ ID NO: 35204 - DNA, 2274 bp, synthetic construct
  source 1..2274: mol_type = other DNA
atggccttaccagtgaccgccttgctcctgccgctggccttgctgctccacgccgccaggccggaagtgcagctggttgaatctggcggaggactggttcagcctggcggatctctgagactgtcttgtgccgccagcggcttcagcttcagcgacttttggatgagctgggtccgacaggcccctggcaaaggacttgaatgggtcgccacaatcagccaggccggcagcgagaaggactacgtggactctgtgaagggcagattcaccatcagccgggacaacgccaagaagtccctgtacctccagatgaacagcctgagagccgaggacaccgccgtgtactattgtgcctctggcgtgtacagcttcgactacagaggccagggcaccctggtcacagtctcttctggtaccggcggaggcggatctggcggcggaggtagcggtggcggaggatctgaattcgacatcgtgatgacccagagccctgccaccctgtccgtgtctccaggcgaaagagccaccctgagctgcagagcttcccagagcgtgtccaacgacgtcgtgtggtatcagcagaagcccggccaggcccccagactgctgatctactacgccagcaacagatacaccggcatccccgccagattcagcggctctggcagcggcaccgagttcaccctgacaatcagcagcctccagagcgaggacttcgccgtgtactactgtcagcaggactacaccagcccctggaccttcggccagggcaccaagctggaaatcaagagactcgagatccagaaccctgatcctgccgtgtaccagctgcgggatagcaagagcagcgacaagagcgtgtgtctgttcaccgacttcgacagccagaccaacgtgtcccagagcaaggactccgacgtgtacatcaccgataagtgcgtgctggacatgcggagcatggacttcaagagcaactccgccgtggcctggtccaacaagtccgatttcgcctgcgccaacgccttcaacaacagcattatccccgaggacacattcttcccaagccccgagagcagctgcgacgtgaagctggtggaaaagagcttcgagacagacaccaacctgaacttccagatcctgtacgagatcctgctgggcaaggccaccctgtacgccgtgctggtgtctgccctggtgctgatggctatggtcaagcggaaggacagccggggacgcgccaagagaagcggatctggcgtgaagcagaccctgaatttcgacctgctgaagctggctggcgacgtggaatccaacccaggccctactagtatggactggatttggcgcatccttttccttgtcggcgctgctaccggcgcgcattccttcgaagaggtgcaactggtgcagagcggagccgaagtgaagaaacctggggccagcgtgcgggtgtcctgcaaggccagcggctacacctttaccaactacggcatgaactgggtgcgccaggctcctggacagggcctggaatggatgggctggatcaacacctacaccggcgagcccacctacgccgacgacttcaagggcagagtgaccatgaccaccgacaccagcacctccaccgcctacatggaactgcggagcctgagaagcgacgacaccgccgtgtattattgcgcccggatcggcgacagcagccccagcgattattggggccagggaaccctcgtgaccgtgtcctctacgcgtgaggacctgaagaacgtgttcccacctgaggtggccgtgttcgagcctagcgaggccgagatcagccacacccagaaagccaccctcgtgtgcctggctaccggcttctaccccgaccatgtggaactgtcttggtgggtcaacggcaaagaggtgcacagcggcgtgtgtaccgacccccagccactgaaagaacagcccgccctgaacgacagccggtactgcctgagcagcagactgagagtgtccgccaccttctggcagaacccccggaaccacttcagatgccaggtgcagttctacggcctgagcgagaacgacgagtggacccaggacagagccaagcccgtgacccagatcgtgtctgccgaagcctggggcagagccgattgcggctttaccagcgagagctaccagcagggcgtgctgagcgccaccaacctgagcgtgatcggcttcagaatcctgctgctgaaagtggccggctttaacctgctgatgaccctgcggctgtggtccagc

SEQ ID NO: 35205 - DNA, 2673 bp, synthetic construct
  source 1..2673: mol_type = other DNA
atggccttaccagtgaccgccttgctcctgccgctggccttgctgctccacgccgccaggccggaagtgcagctggttgaatctggcggaggactggttcagcctggcggatctctgagactgtcttgtgccgccagcggcttcagcttcagcgacttttggatgagctgggtccgacaggcccctggcaaaggacttgaatgggtcgccacaatcagccaggccggcagcgagaaggactacgtggactctgtgaagggcagattcaccatcagccgggacaacgccaagaagtccctgtacctccagatgaacagcctgagagccgaggacaccgccgtgtactattgtgcctctggcgtgtacagcttcgactacagaggccagggcaccctggtcacagtctcttctggtaccggcggaggcggatctggcggcggaggtagcggtggcggaggatctgaattcgacatcgtgatgacccagagccctgccaccctgtccgtgtctccaggcgaaagagccaccctgagctgcagagcttcccagagcgtgtccaacgacgtcgtgtggtatcagcagaagcccggccaggcccccagactgctgatctactacgccagcaacagatacaccggcatccccgccagattcagcggctctggcagcggcaccgagttcaccctgacaatcagcagcctccagagcgaggacttcgccgtgtactactgtcagcaggactacaccagcccctggaccttcggccagggcaccaagctggaaatcaagagactcgaggacctgaagaacgtgttcccacctgaggtggccgtgttcgagcctagcgaggccgagatcagccacacccagaaagccaccctcgtgtgcctggctaccggcttctaccccgaccatgtggaactgtcttggtgggtcaacggcaaagaggtgcacagcggcgtgtgtaccgacccccagccactgaaagaacagcccgccctgaacgacagccggtactgcctgagcagcagactgagagtgtccgccaccttctggcagaacccccggaaccacttcagatgccaggtgcagttctacggcctgagcgagaacgacgagtggacccaggacagagccaagcccgtgacccagatcgtgtctgccgaagcctggggcagagccgattgcggctttaccagcgagagctaccagcagggcgtgctgagcgccaccaacctgagcgtgatcggcttcagaatcctgctgctgaaagtggccggctttaacctgctgatgaccctgcggctgtggtccagcagggccaagcgatctggatctggagcaacaaacttctcactactcaaacaagcaggtgacgtggaggagaatcccgggcctactagtatggactggatttggcgcatccttttccttgtcggcgctgctaccggcgcgcattccgggccccagctccagctgcaagagtctggacctggcctggtcaagcctagcgagacactgagcctgacctgtaccgtgtccggcgatagcatcagcagcggcgattactactggggctggatcagacagcctcctggcaaaggactggaatggatcggccacatctactacagcggcgtgacctactacaaccccagcctgaagtccagagtgaccatcagcgtggacaccagccggaaccagttctccctgaagctgtctagcgtgacagccgccgataccgccgtgtactactgcaccagagaggacagcagcaactggcggagtagaggccagggaacactggtcacagttagctctggatccggcggaggcggaagtggaggcggaggatctggcggcggaggctctttcgaagaggtgcaactggtgcagagcggagccgaagtgaagaaacctggggccagcgtgcgggtgtcctgcaaggccagcggctacacctttaccaactacggcatgaactgggtgcgccaggctcctggacagggcctggaatggatgggctggatcaacacctacaccggcgagcccacctacgccgacgacttcaagggcagagtgaccatgaccaccgacaccagcacctccaccgcctacatggaactgcggagcctgagaagcgacgacaccgccgtgtattattgcgcccggatcggcgacagcagccccagcgattattggggccagggaaccctcgtgaccgtgtcctctacgcgtatccagaaccctgatcctgccgtgtaccagctgcgggatagcaagagcagcgacaagagcgtgtgtctgttcaccgacttcgacagccagaccaacgtgtcccagagcaaggactccgacgtgtacatcaccgataagtgcgtgctggacatgcggagcatggacttcaagagcaactccgccgtggcctggtccaacaagtccgatttcgcctgcgccaacgccttcaacaacagcattatccccgaggacacattcttcccaagccccgagagcagctgcgacgtgaagctggtggaaaagagcttcgagacagacaccaacctgaacttccagatcctgtacgagatcctgctgggcaaggccaccctgtacgccgtgctggtgtctgccctggtgctgatggctatggtcaagcggaaggacagccgggga

SEQ ID NO: 35206 - DNA, 2685 bp, synthetic construct
  source 1..2685: mol_type = other DNA
atggccttaccagtgaccgccttgctcctgccgctggccttgctgctccacgccgccaggccggaagtgcagctggttgaatctggcggaggactggttcagcctggcggatctctgagactgtcttgtgccgccagcggcttcagcttcagcgacttttggatgagctgggtccgacaggcccctggcaaaggacttgaatgggtcgccacaatcagccaggccggcagcgagaaggactacgtggactctgtgaagggcagattcaccatcagccgggacaacgccaagaagtccctgtacctccagatgaacagcctgagagccgaggacaccgccgtgtactattgtgcctctggcgtgtacagcttcgactacagaggccagggcaccctggtcacagtctcttctggtaccggcggaggcggatctggcggcggaggtagcggtggcggaggatctgaattcgacatcgtgatgacccagagccctgccaccctgtccgtgtctccaggcgaaagagccaccctgagctgcagagcttcccagagcgtgtccaacgacgtcgtgtggtatcagcagaagcccggccaggcccccagactgctgatctactacgccagcaacagatacaccggcatccccgccagattcagcggctctggcagcggcaccgagttcaccctgacaatcagcagcctccagagcgaggacttcgccgtgtactactgtcagcaggactacaccagcccctggaccttcggccagggcaccaagctggaaatcaagagactcgagatccagaaccctgatcctgccgtgtaccagctgcgggatagcaagagcagcgacaagagcgtgtgtctgttcaccgacttcgacagccagaccaacgtgtcccagagcaaggactccgacgtgtacatcaccgataagtgcgtgctggacatgcggagcatggacttcaagagcaactccgccgtggcctggtccaacaagtccgatttcgcctgcgccaacgccttcaacaacagcattatccccgaggacacattcttcccaagccccgagagcagctgcgacgtgaagctggtggaaaagagcttcgagacagacaccaacctgaacttccagatcctgtacgagatcctgctgggcaaggccaccctgtacgccgtgctggtgtctgccctggtgctgatggctatggtcaagcggaaggacagccggggacgcgccaagagaagcggatctggcgtgaagcagaccctgaatttcgacctgctgaagctggctggcgacgtggaatccaacccaggccctactagtatggactggatttggcgcatccttttccttgtcggcgctgctaccggcgcgcattccgggccccagctccagctgcaagagtctggacctggcctggtcaagcctagcgagacactgagcctgacctgtaccgtgtccggcgatagcatcagcagcggcgattactactggggctggatcagacagcctcctggcaaaggactggaatggatcggccacatctactacagcggcgtgacctactacaaccccagcctgaagtccagagtgaccatcagcgtggacaccagccggaaccagttctccctgaagctgtctagcgtgacagccgccgataccgccgtgtactactgcaccagagaggacagcagcaactggcggagtagaggccagggaacactggtcacagttagctctggatccggcggaggcggaagtggaggcggaggatctggcggcggaggctctttcgaagaggtgcaactggtgcagagcggagccgaagtgaagaaacctggggccagcgtgcgggtgtcctgcaaggccagcggctacacctttaccaactacggcatgaactgggtgcgccaggctcctggacagggcctggaatggatgggctggatcaacacctacaccggcgagcccacctacgccgacgacttcaagggcagagtgaccatgaccaccgacaccagcacctccaccgcctacatggaactgcggagcctgagaagcgacgacaccgccgtgtattattgcgcccggatcggcgacagcagccccagcgattattggggccagggaaccctcgtgaccgtgtcctctacgcgtgaggacctgaagaacgtgttcccacctgaggtggccgtgttcgagcctagcgaggccgagatcagccacacccagaaagccaccctcgtgtgcctggctaccggcttctaccccgaccatgtggaactgtcttggtgggtcaacggcaaagaggtgcacagcggcgtgtgtaccgacccccagccactgaaagaacagcccgccctgaacgacagccggtactgcctgagcagcagactgagagtgtccgccaccttctggcagaacccccggaaccacttcagatgccaggtgcagttctacggcctgagcgagaacgacgagtggacccaggacagagccaagcccgtgacccagatcgtgtctgccgaagcctggggcagagccgattgcggctttaccagcgagagctaccagcagggcgtgctgagcgccaccaacctgagcgtgatcggcttcagaatcctgctgctgaaagtggccggctttaacctgctgatgaccctgcggctgtggtccagc

SEQ ID NO: 35207 - DNA, 2169 bp, synthetic construct
  source 1..2169: mol_type = other DNA
atggccttaccagtgaccgccttgctcctgccgctggccttgctgctccacgccgccaggccggacatcgtgatgacccagagccctgccaccctgtccgtgtctccaggcgaaagagccaccctgagctgcagagcttcccagagcgtgtccaacgacgtcgtgtggtatcagcagaagcccggccaggcccccagactgctgatctactacgccagcaacagatacaccggcatccccgccagattcagcggctctggcagcggcaccgagttcaccctgacaatcagcagcctccagagcgaggacttcgccgtgtactactgtcagcaggactacaccagcccctggaccttcggccagggcaccaagctggaaatcaagagactcgaggacctgaagaacgtgttcccacctgaggtggccgtgttcgagcctagcgaggccgagatcagccacacccagaaagccaccctcgtgtgcctggctaccggcttctaccccgaccatgtggaactgtcttggtgggtcaacggcaaagaggtgcacagcggcgtgtgtaccgacccccagccactgaaagaacagcccgccctgaacgacagccggtactgcctgagcagcagactgagagtgtccgccaccttctggcagaacccccggaaccacttcagatgccaggtgcagttctacggcctgagcgagaacgacgagtggacccaggacagagccaagcccgtgacccagatcgtgtctgccgaagcctggggcagagccgatgatgtgattaagatccactggcaggaaaagaagtccaacaccatcctgggcagccaggaaggcaacaccatgaagaccaacgacacctacatgaagttcagctggctgaccgtgcccgagaagtccctggacaaagaacacagatgcatcgtgcggcacgaaaacaacaagaacggcgtggaccaggaaatcatcttcccacccatcaagaccgatgtgattacaatggaccccaaggacaactgctccaaggacgccaacgataccctgctgctccagctgaccaacaccagcgcctactacatgtacttgttgctgctgctgaagtccgtggtgtacttcgccatcatcacatgctgcctgctgatggctatggtcaagcggaaggacagccggggaagggccaagcgatctggatctggagcaacaaacttctcactactcaaacaagcaggtgacgtggaggagaatcccgggcctactagtatggactggatttggcgcatccttttccttgtcggcgctgctaccggcgcgcattccttcgaagaggtgcaactggtgcagagcggagccgaagtgaagaaacctggggccagcgtgcgggtgtcctgcaaggccagcggctacacctttaccaactacggcatgaactgggtgcgccaggctcctggacagggcctggaatggatgggctggatcaacacctacaccggcgagcccacctacgccgacgacttcaagggcagagtgaccatgaccaccgacaccagcacctccaccgcctacatggaactgcggagcctgagaagcgacgacaccgccgtgtattattgcgcccggatcggcgacagcagccccagcgattattggggccagggaaccctcgtgaccgtgtcctctacgcgtatccagaaccctgatcctgccgtgtaccagctgcgggatagcaagagcagcgacaagagcgtgtgtctgttcaccgacttcgacagccagaccaacgtgtcccagagcaaggactccgacgtgtacatcaccgataagtgcgtgctggacatgcggagcatggacttcaagagcaactccgccgtggcctggtccaacaagtccgatttcgcctgcgccaacgccttcaacaacagcattatccccgaggacacattcttcccaagccccgagagcagcgactccaccgaccacgtgaagcccaaagagacagagaacaccaagcagcccagcaagagctgccacaagcccaaggccatcgtgcacaccgagaaagtgaacatgatgagcctgaccgtgctgggcctgcggatgctgttcgccaaaaccgtggccgtgaacttcctgctgaccgccaagctgttcttcctcctcaccgcc

SEQ ID NO: 35208 - DNA, 2181 bp, synthetic construct
  source 1..2181: mol_type = other DNA
atggccttaccagtgaccgccttgctcctgccgctggccttgctgctccacgccgccaggccggacatcgtgatgacccagagccctgccaccctgtccgtgtctccaggcgaaagagccaccctgagctgcagagcttcccagagcgtgtccaacgacgtcgtgtggtatcagcagaagcccggccaggcccccagactgctgatctactacgccagcaacagatacaccggcatccccgccagattcagcggctctggcagcggcaccgagttcaccctgacaatcagcagcctccagagcgaggacttcgccgtgtactactgtcagcaggactacaccagcccctggaccttcggccagggcaccaagctggaaatcaagagactcgagatccagaaccctgatcctgccgtgtaccagctgcgggatagcaagagcagcgacaagagcgtgtgtctgttcaccgacttcgacagccagaccaacgtgtcccagagcaaggactccgacgtgtacatcaccgataagtgcgtgctggacatgcggagcatggacttcaagagcaactccgccgtggcctggtccaacaagtccgatttcgcctgcgccaacgccttcaacaacagcattatccccgaggacacattcttcccaagccccgagagcagcgactccaccgaccacgtgaagcccaaagagacagagaacaccaagcagcccagcaagagctgccacaagcccaaggccatcgtgcacaccgagaaagtgaacatgatgagcctgaccgtgctgggcctgcggatgctgttcgccaaaaccgtggccgtgaacttcctgctgaccgccaagctgttcttcctcctcaccgcccgcgccaagagaagcggatctggcgtgaagcagaccctgaatttcgacctgctgaagctggctggcgacgtggaatccaacccaggccctactagtatggactggatttggcgcatccttttccttgtcggcgctgctaccggcgcgcattccttcgaagaggtgcaactggtgcagagcggagccgaagtgaagaaacctggggccagcgtgcgggtgtcctgcaaggccagcggctacacctttaccaactacggcatgaactgggtgcgccaggctcctggacagggcctggaatggatgggctggatcaacacctacaccggcgagcccacctacgccgacgacttcaagggcagagtgaccatgaccaccgacaccagcacctccaccgcctacatggaactgcggagcctgagaagcgacgacaccgccgtgtattattgcgcccggatcggcgacagcagccccagcgattattggggccagggaaccctcgtgaccgtgtcctctacgcgtgaggacctgaagaacgtgttcccacctgaggtggccgtgttcgagcctagcgaggccgagatcagccacacccagaaagccaccctcgtgtgcctggctaccggcttctaccccgaccatgtggaactgtcttggtgggtcaacggcaaagaggtgcacagcggcgtgtgtaccgacccccagccactgaaagaacagcccgccctgaacgacagccggtactgcctgagcagcagactgagagtgtccgccaccttctggcagaacccccggaaccacttcagatgccaggtgcagttctacggcctgagcgagaacgacgagtggacccaggacagagccaagcccgtgacccagatcgtgtctgccgaagcctggggcagagccgatgatgtgattaagatccactggcaggaaaagaagtccaacaccatcctgggcagccaggaaggcaacaccatgaagaccaacgacacctacatgaagttcagctggctgaccgtgcccgagaagtccctggacaaagaacacagatgcatcgtgcggcacgaaaacaacaagaacggcgtggaccaggaaatcatcttcccacccatcaagaccgatgtgattacaatggaccccaaggacaactgctccaaggacgccaacgataccctgctgctccagctgaccaacaccagcgcctactacatgtacttgttgctgctgctgaagtccgtggtgtacttcgccatcatcacatgctgcctgctgatggctatggtcaagcggaaggacagccgggga

SEQ ID NO: 35209 - DNA, 2574 bp, synthetic construct
  source 1..2574: mol_type = other DNA
atggccttaccagtgaccgccttgctcctgccgctggccttgctgctccacgccgccaggccggaagtgcagctggttgaatctggcggaggactggttcagcctggcggatctctgagactgtcttgtgccgccagcggcttcagcttcagcgacttttggatgagctgggtccgacaggcccctggcaaaggacttgaatgggtcgccacaatcagccaggccggcagcgagaaggactacgtggactctgtgaagggcagattcaccatcagccgggacaacgccaagaagtccctgtacctccagatgaacagcctgagagccgaggacaccgccgtgtactattgtgcctctggcgtgtacagcttcgactacagaggccagggcaccctggtcacagtctcttctggtaccggcggaggcggatctggcggcggaggtagcggtggcggaggatctgaattcgacatcgtgatgacccagagccctgccaccctgtccgtgtctccaggcgaaagagccaccctgagctgcagagcttcccagagcgtgtccaacgacgtcgtgtggtatcagcagaagcccggccaggcccccagactgctgatctactacgccagcaacagatacaccggcatccccgccagattcagcggctctggcagcggcaccgagttcaccctgacaatcagcagcctccagagcgaggacttcgccgtgtactactgtcagcaggactacaccagcccctggaccttcggccagggcaccaagctggaaatcaagagactcgaggacctgaagaacgtgttcccacctgaggtggccgtgttcgagcctagcgaggccgagatcagccacacccagaaagccaccctcgtgtgcctggctaccggcttctaccccgaccatgtggaactgtcttggtgggtcaacggcaaagaggtgcacagcggcgtgtgtaccgacccccagccactgaaagaacagcccgccctgaacgacagccggtactgcctgagcagcagactgagagtgtccgccaccttctggcagaacccccggaaccacttcagatgccaggtgcagttctacggcctgagcgagaacgacgagtggacccaggacagagccaagcccgtgacccagatcgtgtctgccgaagcctggggcagagccgatgatgtgattaagatccactggcaggaaaagaagtccaacaccatcctgggcagccaggaaggcaacaccatgaagaccaacgacacctacatgaagttcagctggctgaccgtgcccgagaagtccctggacaaagaacacagatgcatcgtgcggcacgaaaacaacaagaacggcgtggaccaggaaatcatcttcccacccatcaagaccgatgtgattacaatggaccccaaggacaactgctccaaggacgccaacgataccctgctgctccagctgaccaacaccagcgcctactacatgtacttgttgctgctgctgaagtccgtggtgtacttcgccatcatcacatgctgcctgctgatggctatggtcaagcggaaggacagccggggaagggccaagcgatctggatctggagcaacaaacttctcactactcaaacaagcaggtgacgtggaggagaatcccgggcctactagtatggactggatttggcgcatccttttccttgtcggcgctgctaccggcgcgcattccttcgaagaggtgcaactggtgcagagcggagccgaagtgaagaaacctggggccagcgtgcgggtgtcctgcaaggccagcggctacacctttaccaactacggcatgaactgggtgcgccaggctcctggacagggcctggaatggatgggctggatcaacacctacaccggcgagcccacctacgccgacgacttcaagggcagagtgaccatgaccaccgacaccagcacctccaccgcctacatggaactgcggagcctgagaagcgacgacaccgccgtgtattattgcgcccggatcggcgacagcagccccagcgattattggggccagggaaccctcgtgaccgtgtcctctacgcgtatccagaaccctgatcctgccgtgtaccagctgcgggatagcaagagcagcgacaagagcgtgtgtctgttcaccgacttcgacagccagaccaacgtgtcccagagcaaggactccgacgtgtacatcaccgataagtgcgtgctggacatgcggagcatggacttcaagagcaactccgccgtggcctggtccaacaagtccgatttcgcctgcgccaacgccttcaacaacagcattatccccgaggacacattcttcccaagccccgagagcagcgactccaccgaccacgtgaagcccaaagagacagagaacaccaagcagcccagcaagagctgccacaagcccaaggccatcgtgcacaccgagaaagtgaacatgatgagcctgaccgtgctgggcctgcggatgctgttcgccaaaaccgtggccgtgaacttcctgctgaccgccaagctgttcttcctcctcaccgcc

SEQ ID NO: 35210 - DNA, 2586 bp, synthetic construct
  source 1..2586: mol_type = other DNA
atggccttaccagtgaccgccttgctcctgccgctggccttgctgctccacgccgccaggccggaagtgcagctggttgaatctggcggaggactggttcagcctggcggatctctgagactgtcttgtgccgccagcggcttcagcttcagcgacttttggatgagctgggtccgacaggcccctggcaaaggacttgaatgggtcgccacaatcagccaggccggcagcgagaaggactacgtggactctgtgaagggcagattcaccatcagccgggacaacgccaagaagtccctgtacctccagatgaacagcctgagagccgaggacaccgccgtgtactattgtgcctctggcgtgtacagcttcgactacagaggccagggcaccctggtcacagtctcttctggtaccggcggaggcggatctggcggcggaggtagcggtggcggaggatctgaattcgacatcgtgatgacccagagccctgccaccctgtccgtgtctccaggcgaaagagccaccctgagctgcagagcttcccagagcgtgtccaacgacgtcgtgtggtatcagcagaagcccggccaggcccccagactgctgatctactacgccagcaacagatacaccggcatccccgccagattcagcggctctggcagcggcaccgagttcaccctgacaatcagcagcctccagagcgaggacttcgccgtgtactactgtcagcaggactacaccagcccctggaccttcggccagggcaccaagctggaaatcaagagactcgagatccagaaccctgatcctgccgtgtaccagctgcgggatagcaagagcagcgacaagagcgtgtgtctgttcaccgacttcgacagccagaccaacgtgtcccagagcaaggactccgacgtgtacatcaccgataagtgcgtgctggacatgcggagcatggacttcaagagcaactccgccgtggcctggtccaacaagtccgatttcgcctgcgccaacgccttcaacaacagcattatccccgaggacacattcttcccaagccccgagagcagcgactccaccgaccacgtgaagcccaaagagacagagaacaccaagcagcccagcaagagctgccacaagcccaaggccatcgtgcacaccgagaaagtgaacatgatgagcctgaccgtgctgggcctgcggatgctgttcgccaaaaccgtggccgtgaacttcctgctgaccgccaagctgttcttcctcctcaccgcccgcgccaagagaagcggatctggcgtgaagcagaccctgaatttcgacctgctgaagctggctggcgacgtggaatccaacccaggccctactagtatggactggatttggcgcatccttttccttgtcggcgctgctaccggcgcgcattccttcgaagaggtgcaactggtgcagagcggagccgaagtgaagaaacctggggccagcgtgcgggtgtcctgcaaggccagcggctacacctttaccaactacggcatgaactgggtgcgccaggctcctggacagggcctggaatggatgggctggatcaacacctacaccggcgagcccacctacgccgacgacttcaagggcagagtgaccatgaccaccgacaccagcacctccaccgcctacatggaactgcggagcctgagaagcgacgacaccgccgtgtattattgcgcccggatcggcgacagcagccccagcgattattggggccagggaaccctcgtgaccgtgtcctctacgcgtgaggacctgaagaacgtgttcccacctgaggtggccgtgttcgagcctagcgaggccgagatcagccacacccagaaagccaccctcgtgtgcctggctaccggcttctaccccgaccatgtggaactgtcttggtgggtcaacggcaaagaggtgcacagcggcgtgtgtaccgacccccagccactgaaagaacagcccgccctgaacgacagccggtactgcctgagcagcagactgagagtgtccgccaccttctggcagaacccccggaaccacttcagatgccaggtgcagttctacggcctgagcgagaacgacgagtggacccaggacagagccaagcccgtgacccagatcgtgtctgccgaagcctggggcagagccgatgatgtgattaagatccactggcaggaaaagaagtccaacaccatcctgggcagccaggaaggcaacaccatgaagaccaacgacacctacatgaagttcagctggctgaccgtgcccgagaagtccctggacaaagaacacagatgcatcgtgcggcacgaaaacaacaagaacggcgtggaccaggaaatcatcttcccacccatcaagaccgatgtgattacaatggaccccaaggacaactgctccaaggacgccaacgataccctgctgctccagctgaccaacaccagcgcctactacatgtacttgttgctgctgctgaagtccgtggtgtacttcgccatcatcacatgctgcctgctgatggctatggtcaagcggaaggacagccgggga

SEQ ID NO: 35211 - DNA, 2985 bp, synthetic construct
  source 1..2985: mol_type = other DNA
atggccttaccagtgaccgccttgctcctgccgctggccttgctgctccacgccgccaggccggaagtgcagctggttgaatctggcggaggactggttcagcctggcggatctctgagactgtcttgtgccgccagcggcttcagcttcagcgacttttggatgagctgggtccgacaggcccctggcaaaggacttgaatgggtcgccacaatcagccaggccggcagcgagaaggactacgtggactctgtgaagggcagattcaccatcagccgggacaacgccaagaagtccctgtacctccagatgaacagcctgagagccgaggacaccgccgtgtactattgtgcctctggcgtgtacagcttcgactacagaggccagggcaccctggtcacagtctcttctggtaccggcggaggcggatctggcggcggaggtagcggtggcggaggatctgaattcgacatcgtgatgacccagagccctgccaccctgtccgtgtctccaggcgaaagagccaccctgagctgcagagcttcccagagcgtgtccaacgacgtcgtgtggtatcagcagaagcccggccaggcccccagactgctgatctactacgccagcaacagatacaccggcatccccgccagattcagcggctctggcagcggcaccgagttcaccctgacaatcagcagcctccagagcgaggacttcgccgtgtactactgtcagcaggactacaccagcccctggaccttcggccagggcaccaagctggaaatcaagagactcgaggacctgaagaacgtgttcccacctgaggtggccgtgttcgagcctagcgaggccgagatcagccacacccagaaagccaccctcgtgtgcctggctaccggcttctaccccgaccatgtggaactgtcttggtgggtcaacggcaaagaggtgcacagcggcgtgtgtaccgacccccagccactgaaagaacagcccgccctgaacgacagccggtactgcctgagcagcagactgagagtgtccgccaccttctggcagaacccccggaaccacttcagatgccaggtgcagttctacggcctgagcgagaacgacgagtggacccaggacagagccaagcccgtgacccagatcgtgtctgccgaagcctggggcagagccgatgatgtgattaagatccactggcaggaaaagaagtccaacaccatcctgggcagccaggaaggcaacaccatgaagaccaacgacacctacatgaagttcagctggctgaccgtgcccgagaagtccctggacaaagaacacagatgcatcgtgcggcacgaaaacaacaagaacggcgtggaccaggaaatcatcttcccacccatcaagaccgatgtgattacaatggaccccaaggacaactgctccaaggacgccaacgataccctgctgctccagctgaccaacaccagcgcctactacatgtacttgttgctgctgctgaagtccgtggtgtacttcgccatcatcacatgctgcctgctgatggctatggtcaagcggaaggacagccggggaagggccaagcgatctggatctggagcaacaaacttctcactactcaaacaagcaggtgacgtggaggagaatcccgggcctactagtatggactggatttggcgcatccttttccttgtcggcgctgctaccggcgcgcattccgggccccagctccagctgcaagagtctggacctggcctggtcaagcctagcgagacactgagcctgacctgtaccgtgtccggcgatagcatcagcagcggcgattactactggggctggatcagacagcctcctggcaaaggactggaatggatcggccacatctactacagcggcgtgacctactacaaccccagcctgaagtccagagtgaccatcagcgtggacaccagccggaaccagttctccctgaagctgtctagcgtgacagccgccgataccgccgtgtactactgcaccagagaggacagcagcaactggcggagtagaggccagggaacactggtcacagttagctctggatccggcggaggcggaagtggaggcggaggatctggcggcggaggctctttcgaagaggtgcaactggtgcagagcggagccgaagtgaagaaacctggggccagcgtgcgggtgtcctgcaaggccagcggctacacctttaccaactacggcatgaactgggtgcgccaggctcctggacagggcctggaatggatgggctggatcaacacctacaccggcgagcccacctacgccgacgacttcaagggcagagtgaccatgaccaccgacaccagcacctccaccgcctacatggaactgcggagcctgagaagcgacgacaccgccgtgtattattgcgcccggatcggcgacagcagccccagcgattattggggccagggaaccctcgtgaccgtgtcctctacgcgtatccagaaccctgatcctgccgtgtaccagctgcgggatagcaagagcagcgacaagagcgtgtgtctgttcaccgacttcgacagccagaccaacgtgtcccagagcaaggactccgacgtgtacatcaccgataagtgcgtgctggacatgcggagcatggacttcaagagcaactccgccgtggcctggtccaacaagtccgatttcgcctgcgccaacgccttcaacaacagcattatccccgaggacacattcttcccaagccccgagagcagcgactccaccgaccacgtgaagcccaaagagacagagaacaccaagcagcccagcaagagctgccacaagcccaaggccatcgtgcacaccgagaaagtgaacatgatgagcctgaccgtgctgggcctgcggatgctgttcgccaaaaccgtggccgtgaacttcctgctgaccgccaagctgttcttcctcctcaccgcc

SEQ ID NO: 35212 - DNA, 2997 bp, synthetic construct
  source 1..2997: mol_type = other DNA
atggccttaccagtgaccgccttgctcctgccgctggccttgctgctccacgccgccaggccggaagtgcagctggttgaatctggcggaggactggttcagcctggcggatctctgagactgtcttgtgccgccagcggcttcagcttcagcgacttttggatgagctgggtccgacaggcccctggcaaaggacttgaatgggtcgccacaatcagccaggccggcagcgagaaggactacgtggactctgtgaagggcagattcaccatcagccgggacaacgccaagaagtccctgtacctccagatgaacagcctgagagccgaggacaccgccgtgtactattgtgcctctggcgtgtacagcttcgactacagaggccagggcaccctggtcacagtctcttctggtaccggcggaggcggatctggcggcggaggtagcggtggcggaggatctgaattcgacatcgtgatgacccagagccctgccaccctgtccgtgtctccaggcgaaagagccaccctgagctgcagagcttcccagagcgtgtccaacgacgtcgtgtggtatcagcagaagcccggccaggcccccagactgctgatctactacgccagcaacagatacaccggcatccccgccagattcagcggctctggcagcggcaccgagttcaccctgacaatcagcagcctccagagcgaggacttcgccgtgtactactgtcagcaggactacaccagcccctggaccttcggccagggcaccaagctggaaatcaagagactcgagatccagaaccctgatcctgccgtgtaccagctgcgggatagcaagagcagcgacaagagcgtgtgtctgttcaccgacttcgacagccagaccaacgtgtcccagagcaaggactccgacgtgtacatcaccgataagtgcgtgctggacatgcggagcatggacttcaagagcaactccgccgtggcctggtccaacaagtccgatttcgcctgcgccaacgccttcaacaacagcattatccccgaggacacattcttcccaagccccgagagcagcgactccaccgaccacgtgaagcccaaagagacagagaacaccaagcagcccagcaagagctgccacaagcccaaggccatcgtgcacaccgagaaagtgaacatgatgagcctgaccgtgctgggcctgcggatgctgttcgccaaaaccgtggccgtgaacttcctgctgaccgccaagctgttcttcctcctcaccgcccgcgccaagagaagcggatctggcgtgaagcagaccctgaatttcgacctgctgaagctggctggcgacgtggaatccaacccaggccctactagtatggactggatttggcgcatccttttccttgtcggcgctgctaccggcgcgcattccgggccccagctccagctgcaagagtctggacctggcctggtcaagcctagcgagacactgagcctgacctgtaccgtgtccggcgatagcatcagcagcggcgattactactggggctggatcagacagcctcctggcaaaggactggaatggatcggccacatctactacagcggcgtgacctactacaaccccagcctgaagtccagagtgaccatcagcgtggacaccagccggaaccagttctccctgaagctgtctagcgtgacagccgccgataccgccgtgtactactgcaccagagaggacagcagcaactggcggagtagaggccagggaacactggtcacagttagctctggatccggcggaggcggaagtggaggcggaggatctggcggcggaggctctttcgaagaggtgcaactggtgcagagcggagccgaagtgaagaaacctggggccagcgtgcgggtgtcctgcaaggccagcggctacacctttaccaactacggcatgaactgggtgcgccaggctcctggacagggcctggaatggatgggctggatcaacacctacaccggcgagcccacctacgccgacgacttcaagggcagagtgaccatgaccaccgacaccagcacctccaccgcctacatggaactgcggagcctgagaagcgacgacaccgccgtgtattattgcgcccggatcggcgacagcagccccagcgattattggggccagggaaccctcgtgaccgtgtcctctacgcgtgaggacctgaagaacgtgttcccacctgaggtggccgtgttcgagcctagcgaggccgagatcagccacacccagaaagccaccctcgtgtgcctggctaccggcttctaccccgaccatgtggaactgtcttggtgggtcaacggcaaagaggtgcacagcggcgtgtgtaccgacccccagccactgaaagaacagcccgccctgaacgacagccggtactgcctgagcagcagactgagagtgtccgccaccttctggcagaacccccggaaccacttcagatgccaggtgcagttctacggcctgagcgagaacgacgagtggacccaggacagagccaagcccgtgacccagatcgtgtctgccgaagcctggggcagagccgatgatgtgattaagatccactggcaggaaaagaagtccaacaccatcctgggcagccaggaaggcaacaccatgaagaccaacgacacctacatgaagttcagctggctgaccgtgcccgagaagtccctggacaaagaacacagatgcatcgtgcggcacgaaaacaacaagaacggcgtggaccaggaaatcatcttcccacccatcaagaccgatgtgattacaatggaccccaaggacaactgctccaaggacgccaacgataccctgctgctccagctgaccaacaccagcgcctactacatgtacttgttgctgctgctgaagtccgtggtgtacttcgccatcatcacatgctgcctgctgatggctatggtcaagcggaaggacagccgggga

SEQ ID NO: 35213 - DNA, 2163 bp, synthetic construct
  source 1..2163: mol_type = other DNA
atggccttaccagtgaccgccttgctcctgccgctggccttgctgctccacgccgccaggccggacatcgtgatgacccagagccctgccaccctgtccgtgtctccaggcgaaagagccaccctgagctgcagagcttcccagagcgtgtccaacgacgtcgtgtggtatcagcagaagcccggccaggcccccagactgctgatctactacgccagcaacagatacaccggcatccccgccagattcagcggctctggcagcggcaccgagttcaccctgacaatcagcagcctccagagcgaggacttcgccgtgtactactgtcagcaggactacaccagcccctggaccttcggccagggcaccaagctggaaatcaagagactcgaggacctgaagaacgtgttcccacctgaggtggccgtgttcgagcctagcgaggccgagatcagccacacccagaaagccaccctcgtgtgcctggctaccggcttctaccccgaccatgtggaactgtcttggtgggtcaacggcaaagaggtgcacagcggcgtgtgtaccgacccccagccactgaaagaacagcccgccctgaacgacagccggtactgcctgagcagcagactgagagtgtccgccaccttctggcagaacccccggaaccacttcagatgccaggtgcagttctacggcctgagcgagaacgacgagtggacccaggacagagccaagcccgtgacccagatcgtgtctgccgaagcctggggcagagccgatgatgtgattaagatccactggcaggaaaagaagtccaacaccatcctgggcagccaggaaggcaacaccatgaagaccaacgacacctacatgaagttcagctggctgaccgtgcccgagaagtccctggacaaagaacacagatgcatcgtgcggcacgaaaacaacaagaacggcgtggaccaggaaatcatcttcccacccatcaagaccgatgtgattacaatggaccccaaggacaactgctccaaggacgccaacgataccctgctgctccagctgaccaacaccagcgcctactacatgtacttgttgctgctgctgaagtccgtggtgtacttcgccatcatcacatgctgcctgctgcggagaaccgccttctgctgcaacggcgagaagtctagggccaagcgatctggatctggagcaacaaacttctcactactcaaacaagcaggtgacgtggaggagaatcccgggcctactagtatggactggatttggcgcatccttttccttgtcggcgctgctaccggcgcgcattccttcgaagaggtgcaactggtgcagagcggagccgaagtgaagaaacctggggccagcgtgcgggtgtcctgcaaggccagcggctacacctttaccaactacggcatgaactgggtgcgccaggctcctggacagggcctggaatggatgggctggatcaacacctacaccggcgagcccacctacgccgacgacttcaagggcagagtgaccatgaccaccgacaccagcacctccaccgcctacatggaactgcggagcctgagaagcgacgacaccgccgtgtattattgcgcccggatcggcgacagcagccccagcgattattggggccagggaaccctcgtgaccgtgtcctctacgcgtatccagaaccctgatcctgccgtgtaccagctgcgggatagcaagagcagcgacaagagcgtgtgtctgttcaccgacttcgacagccagaccaacgtgtcccagagcaaggactccgacgtgtacatcaccgataagtgcgtgctggacatgcggagcatggacttcaagagcaactccgccgtggcctggtccaacaagtccgatttcgcctgcgccaacgccttcaacaacagcattatccccgaggacacattcttcccaagccccgagagcagcgactccaccgaccacgtgaagcccaaagagacagagaacaccaagcagcccagcaagagctgccacaagcccaaggccatcgtgcacaccgagaaagtgaacatgatgagcctgaccgtgctgggcctgcggatgctgttcgccaaaaccgtggccgtgaacttcctgctgaccgccaagctgttcttcctc

SEQ ID NO: 35214 - DNA, 2175 bp, synthetic construct
  source 1..2175: mol_type = other DNA
atggccttaccagtgaccgccttgctcctgccgctggccttgctgctccacgccgccaggccggacatcgtgatgacccagagccctgccaccctgtccgtgtctccaggcgaaagagccaccctgagctgcagagcttcccagagcgtgtccaacgacgtcgtgtggtatcagcagaagcccggccaggcccccagactgctgatctactacgccagcaacagatacaccggcatccccgccagattcagcggctctggcagcggcaccgagttcaccctgacaatcagcagcctccagagcgaggacttcgccgtgtactactgtcagcaggactacaccagcccctggaccttcggccagggcaccaagctggaaatcaagagactcgagatccagaaccctgatcctgccgtgtaccagctgcgggatagcaagagcagcgacaagagcgtgtgtctgttcaccgacttcgacagccagaccaacgtgtcccagagcaaggactccgacgtgtacatcaccgataagtgcgtgctggacatgcggagcatggacttcaagagcaactccgccgtggcctggtccaacaagtccgatttcgcctgcgccaacgccttcaacaacagcattatccccgaggacacattcttcccaagccccgagagcagcgactccaccgaccacgtgaagcccaaagagacagagaacaccaagcagcccagcaagagctgccacaagcccaaggccatcgtgcacaccgagaaagtgaacatgatgagcctgaccgtgctgggcctgcggatgctgttcgccaaaaccgtggccgtgaacttcctgctgaccgccaagctgttcttcctccgcgccaagagaagcggatctggcgtgaagcagaccctgaatttcgacctgctgaagctggctggcgacgtggaatccaacccaggccctactagtatggactggatttggcgcatccttttccttgtcggcgctgctaccggcgcgcattccttcgaagaggtgcaactggtgcagagcggagccgaagtgaagaaacctggggccagcgtgcgggtgtcctgcaaggccagcggctacacctttaccaactacggcatgaactgggtgcgccaggctcctggacagggcctggaatggatgggctggatcaacacctacaccggcgagcccacctacgccgacgacttcaagggcagagtgaccatgaccaccgacaccagcacctccaccgcctacatggaactgcggagcctgagaagcgacgacaccgccgtgtattattgcgcccggatcggcgacagcagccccagcgattattggggccagggaaccctcgtgaccgtgtcctctacgcgtgaggacctgaagaacgtgttcccacctgaggtggccgtgttcgagcctagcgaggccgagatcagccacacccagaaagccaccctcgtgtgcctggctaccggcttctaccccgaccatgtggaactgtcttggtgggtcaacggcaaagaggtgcacagcggcgtgtgtaccgacccccagccactgaaagaacagcccgccctgaacgacagccggtactgcctgagcagcagactgagagtgtccgccaccttctggcagaacccccggaaccacttcagatgccaggtgcagttctacggcctgagcgagaacgacgagtggacccaggacagagccaagcccgtgacccagatcgtgtctgccgaagcctggggcagagccgatgatgtgattaagatccactggcaggaaaagaagtccaacaccatcctgggcagccaggaaggcaacaccatgaagaccaacgacacctacatgaagttcagctggctgaccgtgcccgagaagtccctggacaaagaacacagatgcatcgtgcggcacgaaaacaacaagaacggcgtggaccaggaaatcatcttcccacccatcaagaccgatgtgattacaatggaccccaaggacaactgctccaaggacgccaacgataccctgctgctccagctgaccaacaccagcgcctactacatgtacttgttgctgctgctgaagtccgtggtgtacttcgccatcatcacatgctgcctgctgcggagaaccgccttctgctgcaacggcgagaagtct

SEQ ID NO: 35215 - DNA, 2568 bp, synthetic construct
  source 1..2568: mol_type = other DNA
atggccttaccagtgaccgccttgctcctgccgctggccttgctgctccacgccgccaggccggaagtgcagctggttgaatctggcggaggactggttcagcctggcggatctctgagactgtcttgtgccgccagcggcttcagcttcagcgacttttggatgagctgggtccgacaggcccctggcaaaggacttgaatgggtcgccacaatcagccaggccggcagcgagaaggactacgtggactctgtgaagggcagattcaccatcagccgggacaacgccaagaagtccctgtacctccagatgaacagcctgagagccgaggacaccgccgtgtactattgtgcctctggcgtgtacagcttcgactacagaggccagggcaccctggtcacagtctcttctggtaccggcggaggcggatctggcggcggaggtagcggtggcggaggatctgaattcgacatcgtgatgacccagagccctgccaccctgtccgtgtctccaggcgaaagagccaccctgagctgcagagcttcccagagcgtgtccaacgacgtcgtgtggtatcagcagaagcccggccaggcccccagactgctgatctactacgccagcaacagatacaccggcatccccgccagattcagcggctctggcagcggcaccgagttcaccctgacaatcagcagcctccagagcgaggacttcgccgtgtactactgtcagcaggactacaccagcccctggaccttcggccagggcaccaagctggaaatcaagagactcgaggacctgaagaacgtgttcccacctgaggtggccgtgttcgagcctagcgaggccgagatcagccacacccagaaagccaccctcgtgtgcctggctaccggcttctaccccgaccatgtggaactgtcttggtgggtcaacggcaaagaggtgcacagcggcgtgtgtaccgacccccagccactgaaagaacagcccgccctgaacgacagccggtactgcctgagcagcagactgagagtgtccgccaccttctggcagaacccccggaaccacttcagatgccaggtgcagttctacggcctgagcgagaacgacgagtggacccaggacagagccaagcccgtgacccagatcgtgtctgccgaagcctggggcagagccgatgatgtgattaagatccactggcaggaaaagaagtccaacaccatcctgggcagccaggaaggcaacaccatgaagaccaacgacacctacatgaagttcagctggctgaccgtgcccgagaagtccctggacaaagaacacagatgcatcgtgcggcacgaaaacaacaagaacggcgtggaccaggaaatcatcttcccacccatcaagaccgatgtgattacaatggaccccaaggacaactgctccaaggacgccaacgataccctgctgctccagctgaccaacaccagcgcctactacatgtacttgttgctgctgctgaagtccgtggtgtacttcgccatcatcacatgctgcctgctgcggagaaccgccttctgctgcaacggcgagaagtctagggccaagcgatctggatctggagcaacaaacttctcactactcaaacaagcaggtgacgtggaggagaatcccgggcctactagtatggactggatttggcgcatccttttccttgtcggcgctgctaccggcgcgcattccttcgaagaggtgcaactggtgcagagcggagccgaagtgaagaaacctggggccagcgtgcgggtgtcctgcaaggccagcggctacacctttaccaactacggcatgaactgggtgcgccaggctcctggacagggcctggaatggatgggctggatcaacacctacaccggcgagcccacctacgccgacgacttcaagggcagagtgaccatgaccaccgacaccagcacctccaccgcctacatggaactgcggagcctgagaagcgacgacaccgccgtgtattattgcgcccggatcggcgacagcagccccagcgattattggggccagggaaccctcgtgaccgtgtcctctacgcgtatccagaaccctgatcctgccgtgtaccagctgcgggatagcaagagcagcgacaagagcgtgtgtctgttcaccgacttcgacagccagaccaacgtgtcccagagcaaggactccgacgtgtacatcaccgataagtgcgtgctggacatgcggagcatggacttcaagagcaactccgccgtggcctggtccaacaagtccgatttcgcctgcgccaacgccttcaacaacagcattatccccgaggacacattcttcccaagccccgagagcagcgactccaccgaccacgtgaagcccaaagagacagagaacaccaagcagcccagcaagagctgccacaagcccaaggccatcgtgcacaccgagaaagtgaacatgatgagcctgaccgtgctgggcctgcggatgctgttcgccaaaaccgtggccgtgaacttcctgctgaccgccaagctgttcttcctc

SEQ ID NO: 35216 - DNA, 2979 bp, synthetic construct
  source 1..2979: mol_type = other DNA
atggccttaccagtgaccgccttgctcctgccgctggccttgctgctccacgccgccaggccggaagtgcagctggttgaatctggcggaggactggttcagcctggcggatctctgagactgtcttgtgccgccagcggcttcagcttcagcgacttttggatgagctgggtccgacaggcccctggcaaaggacttgaatgggtcgccacaatcagccaggccggcagcgagaaggactacgtggactctgtgaagggcagattcaccatcagccgggacaacgccaagaagtccctgtacctccagatgaacagcctgagagccgaggacaccgccgtgtactattgtgcctctggcgtgtacagcttcgactacagaggccagggcaccctggtcacagtctcttctggtaccggcggaggcggatctggcggcggaggtagcggtggcggaggatctgaattcgacatcgtgatgacccagagccctgccaccctgtccgtgtctccaggcgaaagagccaccctgagctgcagagcttcccagagcgtgtccaacgacgtcgtgtggtatcagcagaagcccggccaggcccccagactgctgatctactacgccagcaacagatacaccggcatccccgccagattcagcggctctggcagcggcaccgagttcaccctgacaatcagcagcctccagagcgaggacttcgccgtgtactactgtcagcaggactacaccagcccctggaccttcggccagggcaccaagctggaaatcaagagactcgaggacctgaagaacgtgttcccacctgaggtggccgtgttcgagcctagcgaggccgagatcagccacacccagaaagccaccctcgtgtgcctggctaccggcttctaccccgaccatgtggaactgtcttggtgggtcaacggcaaagaggtgcacagcggcgtgtgtaccgacccccagccactgaaagaacagcccgccctgaacgacagccggtactgcctgagcagcagactgagagtgtccgccaccttctggcagaacccccggaaccacttcagatgccaggtgcagttctacggcctgagcgagaacgacgagtggacccaggacagagccaagcccgtgacccagatcgtgtctgccgaagcctggggcagagccgatgatgtgattaagatccactggcaggaaaagaagtccaacaccatcctgggcagccaggaaggcaacaccatgaagaccaacgacacctacatgaagttcagctggctgaccgtgcccgagaagtccctggacaaagaacacagatgcatcgtgcggcacgaaaacaacaagaacggcgtggaccaggaaatcatcttcccacccatcaagaccgatgtgattacaatggaccccaaggacaactgctccaaggacgccaacgataccctgctgctccagctgaccaacaccagcgcctactacatgtacttgttgctgctgctgaagtccgtggtgtacttcgccatcatcacatgctgcctgctgcggagaaccgccttctgctgcaacggcgagaagtctagggccaagcgatctggatctggagcaacaaacttctcactactcaaacaagcaggtgacgtggaggagaatcccgggcctactagtatggactggatttggcgcatccttttccttgtcggcgctgctaccggcgcgcattccgggccccagctccagctgcaagagtctggacctggcctggtcaagcctagcgagacactgagcctgacctgtaccgtgtccggcgatagcatcagcagcggcgattactactggggctggatcagacagcctcctggcaaaggactggaatggatcggccacatctactacagcggcgtgacctactacaaccccagcctgaagtccagagtgaccatcagcgtggacaccagccggaaccagttctccctgaagctgtctagcgtgacagccgccgataccgccgtgtactactgcaccagagaggacagcagcaactggcggagtagaggccagggaacactggtcacagttagctctggatccggcggaggcggaagtggaggcggaggatctggcggcggaggctctttcgaagaggtgcaactggtgcagagcggagccgaagtgaagaaacctggggccagcgtgcgggtgtcctgcaaggccagcggctacacctttaccaactacggcatgaactgggtgcgccaggctcctggacagggcctggaatggatgggctggatcaacacctacaccggcgagcccacctacgccgacgacttcaagggcagagtgaccatgaccaccgacaccagcacctccaccgcctacatggaactgcggagcctgagaagcgacgacaccgccgtgtattattgcgcccggatcggcgacagcagccccagcgattattggggccagggaaccctcgtgaccgtgtcctctacgcgtatccagaaccctgatcctgccgtgtaccagctgcgggatagcaagagcagcgacaagagcgtgtgtctgttcaccgacttcgacagccagaccaacgtgtcccagagcaaggactccgacgtgtacatcaccgataagtgcgtgctggacatgcggagcatggacttcaagagcaactccgccgtggcctggtccaacaagtccgatttcgcctgcgccaacgccttcaacaacagcattatccccgaggacacattcttcccaagccccgagagcagcgactccaccgaccacgtgaagcccaaagagacagagaacaccaagcagcccagcaagagctgccacaagcccaaggccatcgtgcacaccgagaaagtgaacatgatgagcctgaccgtgctgggcctgcggatgctgttcgccaaaaccgtggccgtgaacttcctgctgaccgccaagctgttcttcctc

SEQ ID NO: 35217 - DNA, 1857 bp, synthetic construct
  source 1..1857: mol_type = other DNA
atggccttaccagtgaccgccttgctcctgccgctggccttgctgctccacgccgccaggccggacatcgtgatgacccagagccctgccaccctgtccgtgtctccaggcgaaagagccaccctgagctgcagagcttcccagagcgtgtccaacgacgtcgtgtggtatcagcagaagcccggccaggcccccagactgctgatctactacgccagcaacagatacaccggcatccccgccagattcagcggctctggcagcggcaccgagttcaccctgacaatcagcagcctccagagcgaggacttcgccgtgtactactgtcagcaggactacaccagcccctggaccttcggccagggcaccaagctggaaatcaagagactcgaggacctgaagaacgtgttcccacctgaggtggccgtgttcgagcctagcgaggccgagatcagccacacccagaaagccaccctcgtgtgcctggctaccggcttctaccccgaccatgtggaactgtcttggtgggtcaacggcaaagaggtgcacagcggcgtgtctaccgacccccagccactgaaagaacagcccgccctgaacgacagccggtactgcctgagcagcagactgagagtgtccgccaccttctggcagaacccccggaaccacttcagatgccaggtgcagttctacggcctgagcgagaacgacgagtggacccaggacagagccaagcccgtgacccagatcgtgtctgccgaagcctggggcagagccgattgcgacgtgaagctggtggaaaagagcttcgagacagacaccaacctgaacttccagaacctgagcgtgatcggcttcagaatcctgctgctgaaagtggccggctttaacctgctgatgaccctgcggctgtggtccagcagggccaagcgatctggatctggagcaacaaacttctcactactcaaacaagcaggtgacgtggaggagaatcccgggcctactagtatggactggatttggcgcatccttttccttgtcggcgctgctaccggcgcgcattccttcgaagaggtgcaactggtgcagagcggagccgaagtgaagaaacctggggccagcgtgcgggtgtcctgcaaggccagcggctacacctttaccaactacggcatgaactgggtgcgccaggctcctggacagggcctggaatggatgggctggatcaacacctacaccggcgagcccacctacgccgacgacttcaagggcagagtgaccatgaccaccgacaccagcacctccaccgcctacatggaactgcggagcctgagaagcgacgacaccgccgtgtattattgcgcccggatcggcgacagcagccccagcgattattggggccagggaaccctcgtgaccgtgtcctctacgcgtatccagaaccctgatcctgccgtgtaccagctgcgggatagcaagagcagcgacaagagcgtgtgtctgttcaccgacttcgacagccagaccaacgtgtcccagagcaaggactccgacgtgtacatcaccgataagaccgtgctggacatgcggagcatggacttcaagagcaactccgccgtggcctggtccaacaagtccgatttcgcctgcgccaacgccttcaacaacagcattatccccgaggacacattcttcccaagccccgagagcagctgcggctttaccagcgagagctaccagcagggcgtgctgagcgccaccatcctgtacgagatcctgctgggcaaggccaccctgtacgccgtgctggtgtctgccctggtgctgatggctatggtcaagcggaaggacagccgggga

SEQ ID NO: 35218 - DNA, 1857 bp, synthetic construct
  source 1..1857: mol_type = other DNA
atggccttaccagtgaccgccttgctcctgccgctggccttgctgctccacgccgccaggccggacatcgtgatgacccagagccctgccaccctgtccgtgtctccaggcgaaagagccaccctgagctgcagagcttcccagagcgtgtccaacgacgtcgtgtggtatcagcagaagcccggccaggcccccagactgctgatctactacgccagcaacagatacaccggcatccccgccagattcagcggctctggcagcggcaccgagttcaccctgacaatcagcagcctccagagcgaggacttcgccgtgtactactgtcagcaggactacaccagcccctggaccttcggccagggcaccaagctggaaatcaagagactcgaggacctgaagaacgtgttcccacctgaggtggccgtgttcgagcctagcgaggccgagatcagccacacccagaaagccaccctcgtgtgcctggctaccggcttctaccccgaccatgtggaactgtcttggtgggtcaacggcaaagaggtgcacagcggcgtgtctaccgacccccagccactgaaagaacagcccgccctgaacgacagccggtactgcctgagcagcagactgagagtgtccgccaccttctggcagaacccccggaaccacttcagatgccaggtgcagttctacggcctgagcgagaacgacgagtggacccaggacagagccaagcccgtgacccagatcgtgtctgccgaagcctggggcagagccgattgcggctttaccagcgagagctaccagcagggcgtgctgagcgccaccaacctgagcgtgatcggcttcagaatcctgctgctgaaagtggccggctttaacctgctgatgaccctgcggctgtggtccagcagggccaagcgatctggatctggagcaacaaacttctcactactcaaacaagcaggtgacgtggaggagaatcccgggcctactagtatggactggatttggcgcatccttttccttgtcggcgctgctaccggcgcgcattccttcgaagaggtgcaactggtgcagagcggagccgaagtgaagaaacctggggccagcgtgcgggtgtcctgcaaggccagcggctacacctttaccaactacggcatgaactgggtgcgccaggctcctggacagggcctggaatggatgggctggatcaacacctacaccggcgagcccacctacgccgacgacttcaagggcagagtgaccatgaccaccgacaccagcacctccaccgcctacatggaactgcggagcctgagaagcgacgacaccgccgtgtattattgcgcccggatcggcgacagcagccccagcgattattggggccagggaaccctcgtgaccgtgtcctctacgcgtatccagaaccctgatcctgccgtgtaccagctgcgggatagcaagagcagcgacaagagcgtgtgtctgttcaccgacttcgacagccagaccaacgtgtcccagagcaaggactccgacgtgtacatcaccgataagaccgtgctggacatgcggagcatggacttcaagagcaactccgccgtggcctggtccaacaagtccgatttcgcctgcgccaacgccttcaacaacagcattatccccgaggacacattcttcccaagccccgagagcagctgcgacgtgaagctggtggaaaagagcttcgagacagacaccaacctgaacttccagatcctgtacgagatcctgctgggcaaggccaccctgtacgccgtgctggtgtctgccctggtgctgatggctatggtcaagcggaaggacagccgggga

SEQ ID NO: 35219 - DNA, 2169 bp, synthetic construct
  source 1..2169: mol_type = other DNA
atggccttaccagtgaccgccttgctcctgccgctggccttgctgctccacgccgccaggccggacatcgtgatgacccagagccctgccaccctgtccgtgtctccaggcgaaagagccaccctgagctgcagagcttcccagagcgtgtccaacgacgtcgtgtggtatcagcagaagcccggccaggcccccagactgctgatctactacgccagcaacagatacaccggcatccccgccagattcagcggctctggcagcggcaccgagttcaccctgacaatcagcagcctccagagcgaggacttcgccgtgtactactgtcagcaggactacaccagcccctggaccttcggccagggcaccaagctggaaatcaagagactcgaggacctgaagaacgtgttcccacctgaggtggccgtgttcgagcctagcgaggccgagatcagccacacccagaaagccaccctcgtgtgcctggctaccggcttctaccccgaccatgtggaactgtcttggtgggtcaacggcaaagaggtgcacagcggcgtgtctaccgacccccagccactgaaagaacagcccgccctgaacgacagccggtactgcctgagcagcagactgagagtgtccgccaccttctggcagaacccccggaaccacttcagatgccaggtgcagttctacggcctgagcgagaacgacgagtggacccaggacagagccaagcccgtgacccagatcgtgtctgccgaagcctggggcagagccgatgatgtgattaagatccactggcaggaaaagaagtccaacaccatcctgggcagccaggaaggcaacaccatgaagaccaacgacacctacatgaagttcagctggctgaccgtgcccgagaagtccctggacaaagaacacagatgcatcgtgcggcacgaaaacaacaagaacggcgtggaccaggaaatcatcttcccacccatcaagaccgatgtgattacaatggaccccaaggacaactgctccaaggacgccaacgataccctgctgctccagctgaccaacaccagcgcctactacatgtacttgttgctgctgctgaagtccgtggtgtacttcgccatcatcacatgctgcctgctgatggctatggtcaagcggaaggacagccggggaagggccaagcgatctggatctggagcaacaaacttctcactactcaaacaagcaggtgacgtggaggagaatcccgggcctactagtatggactggatttggcgcatccttttccttgtcggcgctgctaccggcgcgcattccttcgaagaggtgcaactggtgcagagcggagccgaagtgaagaaacctggggccagcgtgcgggtgtcctgcaaggccagcggctacacctttaccaactacggcatgaactgggtgcgccaggctcctggacagggcctggaatggatgggctggatcaacacctacaccggcgagcccacctacgccgacgacttcaagggcagagtgaccatgaccaccgacaccagcacctccaccgcctacatggaactgcggagcctgagaagcgacgacaccgccgtgtattattgcgcccggatcggcgacagcagccccagcgattattggggccagggaaccctcgtgaccgtgtcctctacgcgtatccagaaccctgatcctgccgtgtaccagctgcgggatagcaagagcagcgacaagagcgtgtgtctgttcaccgacttcgacagccagaccaacgtgtcccagagcaaggactccgacgtgtacatcaccgataagaccgtgctggacatgcggagcatggacttcaagagcaactccgccgtggcctggtccaacaagtccgatttcgcctgcgccaacgccttcaacaacagcattatccccgaggacacattcttcccaagccccgagagcagcgactccaccgaccacgtgaagcccaaagagacagagaacaccaagcagcccagcaagagctgccacaagcccaaggccatcgtgcacaccgagaaagtgaacatgatgagcctgaccgtgctgggcctgcggatgctgttcgccaaaaccgtggccgtgaacttcctgctgaccgccaagctgttcttcctcctcaccgcc

SEQ ID NO: 35220 - DNA, 2163 bp, synthetic construct
  source 1..2163: mol_type = other DNA
atggccttaccagtgaccgccttgctcctgccgctggccttgctgctccacgccgccaggccggacatcgtgatgacccagagccctgccaccctgtccgtgtctccaggcgaaagagccaccctgagctgcagagcttcccagagcgtgtccaacgacgtcgtgtggtatcagcagaagcccggccaggcccccagactgctgatctactacgccagcaacagatacaccggcatccccgccagattcagcggctctggcagcggcaccgagttcaccctgacaatcagcagcctccagagcgaggacttcgccgtgtactactgtcagcaggactacaccagcccctggaccttcggccagggcaccaagctggaaatcaagagactcgaggacctgaagaacgtgttcccacctgaggtggccgtgttcgagcctagcgaggccgagatcagccacacccagaaagccaccctcgtgtgcctggctaccggcttctaccccgaccatgtggaactgtcttggtgggtcaacggcaaagaggtgcacagcggcgtgtctaccgacccccagccactgaaagaacagcccgccctgaacgacagccggtactgcctgagcagcagactgagagtgtccgccaccttctggcagaacccccggaaccacttcagatgccaggtgcagttctacggcctgagcgagaacgacgagtggacccaggacagagccaagcccgtgacccagatcgtgtctgccgaagcctggggcagagccgatgatgtgattaagatccactggcaggaaaagaagtccaacaccatcctgggcagccaggaaggcaacaccatgaagaccaacgacacctacatgaagttcagctggctgaccgtgcccgagaagtccctggacaaagaacacagatgcatcgtgcggcacgaaaacaacaagaacggcgtggaccaggaaatcatcttcccacccatcaagaccgatgtgattacaatggaccccaaggacaactgctccaaggacgccaacgataccctgctgctccagctgaccaacaccagcgcctactacatgtacttgttgctgctgctgaagtccgtggtgtacttcgccatcatcacatgctgcctgctgcggagaaccgccttctgctgcaacggcgagaagtctagggccaagcgatctggatctggagcaacaaacttctcactactcaaacaagcaggtgacgtggaggagaatcccgggcctactagtatggactggatttggcgcatccttttccttgtcggcgctgctaccggcgcgcattccttcgaagaggtgcaactggtgcagagcggagccgaagtgaagaaacctggggccagcgtgcgggtgtcctgcaaggccagcggctacacctttaccaactacggcatgaactgggtgcgccaggctcctggacagggcctggaatggatgggctggatcaacacctacaccggcgagcccacctacgccgacgacttcaagggcagagtgaccatgaccaccgacaccagcacctccaccgcctacatggaactgcggagcctgagaagcgacgacaccgccgtgtattattgcgcccggatcggcgacagcagccccagcgattattggggccagggaaccctcgtgaccgtgtcctctacgcgtatccagaaccctgatcctgccgtgtaccagctgcgggatagcaagagcagcgacaagagcgtgtgtctgttcaccgacttcgacagccagaccaacgtgtcccagagcaaggactccgacgtgtacatcaccgataagaccgtgctggacatgcggagcatggacttcaagagcaactccgccgtggcctggtccaacaagtccgatttcgcctgcgccaacgccttcaacaacagcattatccccgaggacacattcttcccaagccccgagagcagcgactccaccgaccacgtgaagcccaaagagacagagaacaccaagcagcccagcaagagctgccacaagcccaaggccatcgtgcacaccgagaaagtgaacatgatgagcctgaccgtgctgggcctgcggatgctgttcgccaaaaccgtggccgtgaacttcctgctgaccgccaagctgttcttcctc

SEQ ID NO: 35221 - DNA, 2595 bp, synthetic construct
  source 1..2595: mol_type = other DNA
atggccttaccagtgaccgccttgctcctgccgctggccttgctgctccacgccgccaggccgctcgaggaggacctgaagaacgtgttcccacctgaggtggccgtgttcgagcctagcgaggccgagatcagccacacccagaaagccaccctcgtgtgcctggctaccggcttctaccccgaccatgtggaactgtcttggtgggtcaacggcaaagaggtgcacagcggcgtgtgtaccgacccccagccactgaaagaacagcccgccctgaacgacagccggtactgcctgagcagcagactgagagtgtccgccaccttctggcagaacccccggaaccacttcagatgccaggtgcagttctacggcctgagcgagaacgacgagtggacccaggacagagccaagcccgtgacccagatcgtgtctgccgaagcctggggcagagccgattgcggctttaccagcgagagctaccagcagggcgtgctgagcgccaccaacctgagcgtgatcggcttcagaatcctgctgctgaaagtggccggctttaacctgctgatgaccctgcggctgtggtccagcagggccaagcgatctggatctggagcaacaaacttctcactactcaaacaagcaggtgacgtggaggagaatcccgggcctactagcatggccttaccagtgaccgccttgctcctgccgctggccttgctgctccacgccgccaggccggacatcgtgatgacccagagccctgccaccctgtccgtgtctccaggcgaaagagccaccctgagctgcagagcttcccagagcgtgtccaacgacgtcgtgtggtatcagcagaagcccggccaggcccccagactgctgatctactacgccagcaacagatacaccggcatccccgccagattcagcggctctggcagcggcaccgagttcaccctgacaatcagcagcctccagagcgaggacttcgccgtgtactactgtcagcaggactacaccagcccctggaccttcggccagggcaccaagctggaaatcaagagaggcggaggcggaagtggaggcggaggatctggcggcggaggctctgaggtgcaactggtgcagagcggagccgaagtgaagaaacctggggccagcgtgcgggtgtcctgcaaggccagcggctacacctttaccaactacggcatgaactgggtgcgccaggctcctggacagggcctggaatggatgggctggatcaacacctacaccggcgagcccacctacgccgacgacttcaagggcagagtgaccatgaccaccgacaccagcacctccaccgcctacatggaactgcggagcctgagaagcgacgacaccgccgtgtattattgcgcccggatcggcgacagcagccccagcgattattggggccagggaaccctcgtgaccgtgtcctctacgcgtatccagaaccctgatcctgccgtgtaccagctgcgggatagcaagagcagcgacaagagcgtgtgtctgttcaccgacttcgacagccagaccaacgtgtcccagagcaaggactccgacgtgtacatcaccgataagtgcgtgctggacatgcggagcatggacttcaagagcaactccgccgtggcctggtccaacaagtccgatttcgcctgcgccaacgccttcaacaacagcattatccccgaggacacattcttcccaagccccgagagcagctgcgacgtgaagctggtggaaaagagcttcgagacagacaccaacctgaacttccagatcctgtacgaggtgatcggcttcagaatcctgctgctgaaagtggccggctttaacctgctgatgaccctgcggctgtggtccagccgcgccaagagaagcggatctggcgtgaagcagaccctgaatttcgacctgctgaagctggctggcgacgtggaatccaacccaggcccttctagaggccatatgaccgagtacaagcccacggtgcgcctcgccacccgcgacgacgtccccagggccgtacgcaccctcgccgccgcgttcgccgactaccccgccacgcgccacaccgtcgatccggaccgccacatcgagcgggtcaccgagctgcaagaactcttcctcacgcgcgtcgggctcgacatcggcaaggtgtgggtcgcggacgacggcgccgcggtggcggtctggaccacgccggagagcgtcgaagcgggggcggtgttcgccgagatcggcccgcgcatggccgagttgagcggttcccggctggccgcgcagcaacagatggaaggcctcctggcgccgcaccggcccaaggagcccgcgtggttcctggccaccgtcggcgtctcgcccgaccaccagggcaagggtctgggcagcgccgtcgtgctccccggagtggaggcggccgagcgcgccggggtgcccgccttcctggagacctccgcgccccgcaacctccccttctacgagcggctcggcttcaccgtcaccgccgacgtcgaggtgcccgaaggaccgcgcacctggtgcatgacccgcaagcccggtgcctga

SEQ ID NO: 35222 - DNA, 2595 bp, synthetic construct
  source 1..2595: mol_type = other DNA
atggccttaccagtgaccgccttgctcctgccgctggccttgctgctccacgccgccaggccgctcgagatccagaaccctgatcctgccgtgtaccagctgcgggatagcaagagcagcgacaagagcgtgtgtctgttcaccgacttcgacagccagaccaacgtgtcccagagcaaggactccgacgtgtacatcaccgataagtgcgtgctggacatgcggagcatggacttcaagagcaactccgccgtggcctggtccaacaagtccgatttcgcctgcgccaacgccttcaacaacagcattatccccgaggacacattcttcccaagccccgagagcagctgcgacgtgaagctggtggaaaagagcttcgagacagacaccaacctgaacttccagatcctgtacgaggtgatcggcttcagaatcctgctgctgaaagtggccggctttaacctgctgatgaccctgcggctgtggtccagcagggccaagcgatctggatctggagcaacaaacttctcactactcaaacaagcaggtgacgtggaggagaatcccgggcctactagcatggccttaccagtgaccgccttgctcctgccgctggccttgctgctccacgccgccaggccggacatcgtgatgacccagagccctgccaccctgtccgtgtctccaggcgaaagagccaccctgagctgcagagcttcccagagcgtgtccaacgacgtcgtgtggtatcagcagaagcccggccaggcccccagactgctgatctactacgccagcaacagatacaccggcatccccgccagattcagcggctctggcagcggcaccgagttcaccctgacaatcagcagcctccagagcgaggacttcgccgtgtactactgtcagcaggactacaccagcccctggaccttcggccagggcaccaagctggaaatcaagagaggcggaggcggaagtggaggcggaggatctggcggcggaggctctgaggtgcaactggtgcagagcggagccgaagtgaagaaacctggggccagcgtgcgggtgtcctgcaaggccagcggctacacctttaccaactacggcatgaactgggtgcgccaggctcctggacagggcctggaatggatgggctggatcaacacctacaccggcgagcccacctacgccgacgacttcaagggcagagtgaccatgaccaccgacaccagcacctccaccgcctacatggaactgcggagcctgagaagcgacgacaccgccgtgtattattgcgcccggatcggcgacagcagccccagcgattattggggccagggaaccctcgtgaccgtgtcctctacgcgtgaggacctgaagaacgtgttcccacctgaggtggccgtgttcgagcctagcgaggccgagatcagccacacccagaaagccaccctcgtgtgcctggctaccggcttctaccccgaccatgtggaactgtcttggtgggtcaacggcaaagaggtgcacagcggcgtgtgtaccgacccccagccactgaaagaacagcccgccctgaacgacagccggtactgcctgagcagcagactgagagtgtccgccaccttctggcagaacccccggaaccacttcagatgccaggtgcagttctacggcctgagcgagaacgacgagtggacccaggacagagccaagcccgtgacccagatcgtgtctgccgaagcctggggcagagccgattgcggctttaccagcgagagctaccagcagggcgtgctgagcgccaccaacctgagcgtgatcggcttcagaatcctgctgctgaaagtggccggctttaacctgctgatgaccctgcggctgtggtccagccgcgccaagagaagcggatctggcgtgaagcagaccctgaatttcgacctgctgaagctggctggcgacgtggaatccaacccaggcccttctagaggccatatgaccgagtacaagcccacggtgcgcctcgccacccgcgacgacgtccccagggccgtacgcaccctcgccgccgcgttcgccgactaccccgccacgcgccacaccgtcgatccggaccgccacatcgagcgggtcaccgagctgcaagaactcttcctcacgcgcgtcgggctcgacatcggcaaggtgtgggtcgcggacgacggcgccgcggtggcggtctggaccacgccggagagcgtcgaagcgggggcggtgttcgccgagatcggcccgcgcatggccgagttgagcggttcccggctggccgcgcagcaacagatggaaggcctcctggcgccgcaccggcccaaggagcccgcgtggttcctggccaccgtcggcgtctcgcccgaccaccagggcaagggtctgggcagcgccgtcgtgctccccggagtggaggcggccgagcgcgccggggtgcccgccttcctggagacctccgcgccccgcaacctccccttctacgagcggctcggcttcaccgtcaccgccgacgtcgaggtgcccgaaggaccgcgcacctggtgcatgacccgcaagcccggtgcctga

SEQ ID NO: 35223 - DNA, 2595 bp, synthetic construct; identical to SEQ ID NO: 35221
  source 1..2595: mol_type = other DNA

SEQ ID NO: 35224 - DNA, 2919 bp, synthetic construct
  source 1..2919: mol_type = other DNA
atggccttaccagtgaccgccttgctcctgccgctggccttgctgctccacgccgccaggccgctcgaggaggacctgaagaacgtgttcccacctgaggtggccgtgttcgagcctagcgaggccgagatcagccacacccagaaagccaccctcgtgtgcctggctaccggcttctaccccgaccatgtggaactgtcttggtgggtcaacggcaaagaggtgcacagcggcgtgtctaccgacccccagccactgaaagaacagcccgccctgaacgacagccggtactgcctgagcagcagactgagagtgtccgccaccttctggcagaacccccggaaccacttcagatgccaggtgcagttctacggcctgagcgagaacgacgagtggacccaggacagagccaagcccgtgacccagatcgtgtctgccgaagcctggggcagagccgatgatgtgattaagatccactggcaggaaaagaagtccaacaccatcctgggcagccaggaaggcaacaccatgaagaccaacgacacctacatgaagttcagctggctgaccgtgcccgagaagtccctggacaaagaacacagatgcatcgtgcggcacgaaaacaacaagaacggcgtggaccaggaaatcatcttcccacccatcaagaccgatgtgattacaatggaccccaaggacaactgctccaaggacgccaacgataccctgctgctccagctgaccaacaccagcgcctactacatgtacttgttgctgctgctgaagtccgtggtgtacttcgccatcatcacatgctgcctgctgatggctatggtcaagcggaaggacagccggggaagggccaagcgatctggatctggagcaacaaacttctcactactcaaacaagcaggtgacgtggaggagaatcccgggcctactagcatggccttaccagtgaccgccttgctcctgccgctggccttgctgctccacgccgccaggccggacatcgtgatgacccagagccctgccaccctgtccgtgtctccaggcgaaagagccaccctgagctgcagagcttcccagagcgtgtccaacgacgtcgtgtggtatcagcagaagcccggccaggcccccagactgctgatctactacgccagcaacagatacaccggcatccccgccagattcagcggctctggcagcggcaccgagttcaccctgacaatcagcagcctccagagcgaggacttcgccgtgtactactgtcagcaggactacaccagcccctggaccttcggccagggcaccaagctggaaatcaagagaggcggaggcggaagtggaggcggaggatctggcggcggaggctctgaggtgcaactggtgcagagcggagccgaagtgaagaaacctggggccagcgtgcgggtgtcctgcaaggccagcggctacacctttaccaactacggcatgaactgggtgcgccaggctcctggacagggcctggaatggatgggctggatcaacacctacaccggcgagcccacctacgccgacgacttcaagggcagagtgaccatgaccaccgacaccagcacctccaccgcctacatggaactgcggagcctgagaagcgacgacaccgccgtgtattattgcgcccggatcggcgacagcagccccagcgattattggggccagggaaccctcgtgaccgtgtcctctacgcgtatccagaaccctgatcctgccgtgtaccagctgcgggatagcaagagcagcgacaagagcgtgtgtctgttcaccgacttcgacagccagaccaacgtgtcccagagcaaggactccgacgtgtacatcaccgataagaccgtgctggacatgcggagcatggacttcaagagcaactccgccgtggcctggtccaacaagtccgatttcgcctgcgccaacgccttcaacaacagcattatccccgaggacacattcttcccaagccccgagagcagcgactccaccgaccacgtgaagcccaaagagacagagaacaccaagcagcccagcaagagctgccacaagcccaaggccatcgtgcacaccgagaaagtgaacatgatgagcctgaccgtgctgggcctgcggatgctgttcgccaaaaccgtggccgtgaacttcctgctgaccgccaagctgttcttcctcctcaccgcccgcgccaagagaagcggatctggcgtgaagcagaccctgaatttcgacctgctgaagctggctggcgacgtggaatccaacccaggcccttctagaggccatatgaccgagtacaagcccacggtgcgcctcgccacccgcgacgacgtccccagggccgtacgcaccctcgccgccgcgttcgccgactaccccgccacgcgccacaccgtcgatccggaccgccacatcgagcgggtcaccgagctgcaagaactcttcctcacgcgcgtcgggctcgacatcggcaaggtgtgggtcgcggacgacggcgccgcggtggcggtctggaccacgccggagagcgtcgaagcgggggcggtgttcgccgagatcggcccgcgcatggccgagttgagcggttcccggctggccgcgcagcaacagatggaaggcctcctggcgccgcaccggcccaaggagcccgcgtggttcctggccaccgtcggcgtctcgcccgaccaccagggcaagggtctgggcagcgccgtcgtgctccccggagtggaggcggccgagcgcgccggggtgcccgccttcctggagacctccgcgccccgcaacctccccttctacgagcggctcggcttcaccgtcaccgccgacgtcgaggtgcccgaaggaccgcgcacctggtgcatgacccgcaagcccggtgcctga

SEQ ID NO: 35225 - DNA, 2919 bp, synthetic construct
  source 1..2919: mol_type = other DNA
atggccttaccagtgaccgccttgctcctgccgctggccttgctgctccacgccgccaggccgctcgagatccagaaccctgatcctgccgtgtaccagctgcgggatagcaagagcagcgacaagagcgtgtgtctgttcaccgacttcgacagccagaccaacgtgtcccagagcaaggactccgacgtgtacatcaccgataagaccgtgctggacatgcggagcatggacttcaagagcaactccgccgtggcctggtccaacaagtccgatttcgcctgcgccaacgccttcaacaacagcattatccccgaggacacattcttcccaagccccgagagcagcgactccaccgaccacgtgaagcccaaagagacagagaacaccaagcagcccagcaagagctgccacaagcccaaggccatcgtgcacaccgagaaagtgaacatgatgagcctgaccgtgctgggcctgcggatgctgttcgccaaaaccgtggccgtgaacttcctgctgaccgccaagctgttcttcctcctcaccgccagggccaagcgatctggatctggagcaacaaacttctcactactcaaacaagcaggtgacgtggaggagaatcccgggcctactagcatggccttaccagtgaccgccttgctcctgccgctggccttgctgctccacgccgccaggccggacatcgtgatgacccagagccctgccaccctgtccgtgtctccaggcgaaagagccaccctgagctgcagagcttcccagagcgtgtccaacgacgtcgtgtggtatcagcagaagcccggccaggcccccagactgctgatctactacgccagcaacagatacaccggcatccccgccagattcagcggctctggcagcggcaccgagttcaccctgacaatcagcagcctccagagcgaggacttcgccgtgtactactgtcagcaggactacaccagcccctggaccttcggccagggcaccaagctggaaatcaagagaggcggaggcggaagtggaggcggaggatctggcggcggaggctctgaggtgcaactggtgcagagcggagccgaagtgaagaaacctggggccagcgtgcgggtgtcctgcaaggccagcggctacacctttaccaactacggcatgaactgggtgcgccaggctcctggacagggcctggaatggatgggctggatcaacacctacaccggcgagcccacctacgccgacgacttcaagggcagagtgaccatgaccaccgacaccagcacctccaccgcctacatggaactgcggagcctgagaagcgacgacaccgccgtgtattattgcgcccggatcggcgacagcagccccagcgattattggggccagggaaccctcgtgaccgtgtcctctacgcgtgaggacctgaagaacgtgttcccacctgaggtggccgtgttcgagcctagcgaggccgagatcagccacacccagaaagccaccctcgtgtgcctggctaccggcttctaccccgaccatgtggaactgtcttggtgggtcaacggcaaagaggtgcacagcggcgtgtctaccgacccccagccactgaaagaacagcccgccctgaacgacagccggtactgcctgagcagcagactgagagtgtccgccaccttctggcagaacccccggaaccacttcagatgccaggtgcagttctacggcctgagcgagaacgacgagtggacccaggacagagccaagcccgtgacccagatcgtgtctgccgaagcctggggcagagccgatgatgtgattaagatccactggcaggaaaagaagtccaacaccatcctgggcagccaggaaggcaacaccatgaagaccaacgacacctacatgaagttcagctggctgaccgtgcccgagaagtccctggacaaagaacacagatgcatcgtgcggcacgaaaacaacaagaacggcgtggaccaggaaatcatcttcccacccatcaagaccgatgtgattacaatggaccccaaggacaactgctccaaggacgccaacgataccctgctgctccagctgaccaacaccagcgcctactacatgtacttgttgctgctgctgaagtccgtggtgtacttcgccatcatcacatgctgcctgctgatggctatggtcaagcggaaggacagccggggacgcgccaagagaagcggatctggcgtgaagcagaccctgaatttcgacctgctgaagctggctggcgacgtggaatccaacccaggcccttctagaggccatatgaccgagtacaagcccacggtgcgcctcgccacccgcgacgacgtccccagggccgtacgcaccctcgccgccgcgttcgccgactaccccgccacgcgccacaccgtcgatccggaccgccacatcgagcgggtcaccgagctgcaagaactcttcctcacgcgcgtcgggctcgacatcggcaaggtgtgggtcgcggacgacggcgccgcggtggcggtctggaccacgccggagagcgtcgaagcgggggcggtgttcgccgagatcggcccgcgcatggccgagttgagcggttcccggctggccgcgcagcaacagatggaaggcctcctggcgccgcaccggcccaaggagcccgcgtggttcctggccaccgtcggcgtctcgcccgaccaccagggcaagggtctgggcagcgccgtcgtgctccccggagtggaggcggccgagcgcgccggggtgcccgccttcctggagacctccgcgccccgcaacctccccttctacgagcggctcggcttcaccgtcaccgccgacgtcgaggtgcccgaaggaccgcgcacctggtgcatgacccgcaagcccggtgcctga

SEQ ID NO: 35226 - DNA, 2913 bp, synthetic construct
  source 1..2913: mol_type = other DNA
atggccttaccagtgaccgccttgctcctgccgctggccttgctgctccacgccgccaggccgctcgaggaggacctgaagaacgtgttcccacctgaggtggccgtgttcgagcctagcgaggccgagatcagccacacccagaaagccaccctcgtgtgcctggctaccggcttctaccccgaccatgtggaactgtcttggtgggtcaacggcaaagaggtgcacagcggcgtgtgtaccgacccccagccactgaaagaacagcccgccctgaacgacagccggtactgcctgagcagcagactgagagtgtccgccaccttctggcagaacccccggaaccacttcagatgccaggtgcagttctacggcctgagcgagaacgacgagtggacccaggacagagccaagcccgtgacccagatcgtgtctgccgaagcctggggcagagccgatgatgtgattaagatccactggcaggaaaagaagtccaacaccatcctgggcagccaggaaggcaacaccatgaagaccaacgacacctacatgaagttcagctggctgaccgtgcccgagaagtccctggacaaagaacacagatgcatcgtgcggcacgaaaacaacaagaacggcgtggaccaggaaatcatcttcccacccatcaagaccgatgtgattacaatggaccccaaggacaactgctccaaggacgccaacgataccctgctgctccagctgaccaacaccagcgcctactacatgtacttgttgctgctgctgaagtccgtggtgtacttcgccatcatcacatgctgcctgctgcggagaaccgccttctgctgcaacggcgagaagtctagggccaagcgatctggatctggagcaacaaacttctcactactcaaacaagcaggtgacgtggaggagaatcccgggcctactagcatggccttaccagtgaccgccttgctcctgccgctggccttgctgctccacgccgccaggccggacatcgtgatgacccagagccctgccaccctgtccgtgtctccaggcgaaagagccaccctgagctgcagagcttcccagagcgtgtccaacgacgtcgtgtggtatcagcagaagcccggccaggcccccagactgctgatctactacgccagcaacagatacaccggcatccccgccagattcagcggctctggcagcggcaccgagttcaccctgacaatcagcagcctccagagcgaggacttcgccgtgtactactgtcagcaggactacaccagcccctggaccttcggccagggcaccaagctggaaatcaagagaggcggaggcggaagtggaggcggaggatctggcggcggaggctctgaggtgcaactggtgcagagcggagccgaagtgaagaaacctggggccagcgtgcgggtgtcctgcaaggccagcggctacacctttaccaactacggcatgaactgggtgcgccaggctcctggacagggcctggaatggatgggctggatcaacacctacaccggcgagcccacctacgccgacgacttcaagggcagagtgaccatgaccaccgacaccagcacctccaccgcctacatggaactgcggagcctgagaagcgacgacaccgccgtgtattattgcgcccggatcggcgacagcagccccagcgattattggggccagggaaccctcgtgaccgtgtcctctacgcgtatccagaaccctgatcctgccgtgtaccagctgcgggatagcaagagcagcgacaagagcgtgtgtctgttcaccgacttcgacagccagaccaacgtgtcccagagcaaggactccgacgtgtacatcaccgataagtgcgtgctggacatgcggagcatggacttcaagagcaactccgccgtggcctggtccaacaagtccgatttcgcctgcgccaacgccttcaacaacagcattatccccgaggacacattcttcccaagccccgagagcagcgactccaccgaccacgtgaagcccaaagagacagagaacaccaagcagcccagcaagagctgccacaagcccaaggccatcgtgcacaccgagaaagtgaacatgatgagcctgaccgtgctgggcctgcggatgctgttcgccaaaaccgtggccgtgaacttcctgctgaccgccaagctgttcttcctccgcgccaagagaagcggatctggcgtgaagcagaccctgaatttcgacctgctgaagctggctggcgacgtggaatccaacccaggcccttctagaggccatatgaccgagtacaagcccacggtgcgcctcgccacccgcgacgacgtccccagggccgtacgcaccctcgccgccgcgttcgccgactaccccgccacgcgccacaccgtcgatccggaccgccacatcgagcgggtcaccgagctgcaagaactcttcctcacgcgcgtcgggctcgacatcggcaaggtgtgggtcgcggacgacggcgccgcggtggcggtctggaccacgccggagagcgtcgaagcgggggcggtgttcgccgagatcggcccgcgcatggccgagttgagcggttcccggctggccgcgcagcaacagatggaaggcctcctggcgccgcaccggcccaaggagcccgcgtggttcctggccaccgtcggcgtctcgcccgaccaccagggcaagggtctgggcagcgccgtcgtgctccccggagtggaggcggccgagcgcgccggggtgcccgccttcctggagacctccgcgccccgcaacctccccttctacgagcggctcggcttcaccgtcaccgccgacgtcgaggtgcccgaaggaccgcgcacctggtgcatgacccgcaagcccggtgcctga

SEQ ID NO: 35227 - DNA, 2913 bp, synthetic construct
  source 1..2913: mol_type = other DNA
atggccttaccagtgaccgccttgctcctgccgctggccttgctgctccacgccgccaggccgctcgagatccagaaccctgatcctgccgtgtaccagctgcgggatagcaagagcagcgacaagagcgtgtgtctgttcaccgacttcgacagccagaccaacgtgtcccagagcaaggactccgacgtgtacatcaccgataagtgcgtgctggacatgcggagcatggacttcaagagcaactccgccgtggcctggtccaacaagtccgatttcgcctgcgccaacgccttcaacaacagcattatccccgaggacacattcttcccaagccccgagagcagcgactccaccgaccacgtgaagcccaaagagacagagaacaccaagcagcccagcaagagctgccacaagcccaaggccatcgtgcacaccgagaaagtgaacatgatgagcctgaccgtgctgggcctgcggatgctgttcgccaaaaccgtggccgtgaacttcctgctgaccgccaagctgttcttcctcagggccaagcgatctggatctggagcaacaaacttctcactactcaaacaagcaggtgacgtggaggagaatcccgggcctactagcatggccttaccagtgaccgccttgctcctgccgctggccttgctgctccacgccgccaggccggacatcgtgatgacccagagccctgccaccctgtccgtgtctccaggcgaaagagccaccctgagctgcagagcttcccagagcgtgtccaacgacgtcgtgtggtatcagcagaagcccggccaggcccccagactgctgatctactacgccagcaacagatacaccggcatccccgccagattcagcggctctggcagcggcaccgagttcaccctgacaatcagcagcctccagagcgaggacttcgccgtgtactactgtcagcaggactacaccagcccctggaccttcggccagggcaccaagctggaaatcaagagaggcggaggcggaagtggaggcggaggatctggcggcggaggctctgaggtgcaactggtgcagagcggagccgaagtgaagaaacctggggccagcgtgcgggtgtcctgcaaggccagcggctacacctttaccaactacggcatgaactgggtgcgccaggctcctggacagggcctggaatggatgggctggatcaacacctacaccggcgagcccacctacgccgacgacttcaagggcagagtgaccatgaccaccgacaccagcacctccaccgcctacatggaactgcggagcctgagaagcgacgacaccgccgtgtattattgcgcccggatcggcgacagcagccccagcgattattggggccagggaaccctcgtgaccgtgtcctctacgcgtgaggacctgaagaacgtgttcccacctgaggtggccgtgttcgagcctagcgaggccgagatcagccacacccagaaagccaccctcgtgtgcctggctaccggcttctaccccgaccatgtggaactgtcttggtgggtcaacggcaaagaggtgcacagcggcgtgtgtaccgacccccagccactgaaagaacagcccgccctgaacgacagccggtactgcctgagcagcagactgagagtgtccgccaccttctggcagaacccccggaaccacttcagatgccaggtgcagttctacggcctgagcgagaacgacgagtggacccaggacagagccaagcccgtgacccagatcgtgtctgccgaagcctggggcagagccgatgatgtgattaagatccactggcaggaaaagaagtccaacaccatcctgggcagccaggaaggcaacaccatgaagaccaacgacacctacatgaagttcagctggctgaccgtgcccgagaagtccctggacaaagaacacagatgcatcgtgcggcacgaaaacaacaagaacggcgtggaccaggaaatcatcttcccacccatcaagaccgatgtgattacaatggaccccaaggacaactgctccaaggacgccaacgataccctgctgctccagctgaccaacaccagcgcctactacatgtacttgttgctgctgctgaagtccgtggtgtacttcgccatcatcacatgctgcctgctgcggagaaccgccttctgctgcaacggcgagaagtctcgcgccaagagaagcggatctggcgtgaagcagaccctgaatttcgacctgctgaagctggctggcgacgtggaatccaacccaggcccttctagaggccatatgaccgagtacaagcccacggtgcgcctcgccacccgcgacgacgtccccagggccgtacgcaccctcgccgccgcgttcgccgactaccccgccacgcgccacaccgtcgatccggaccgccacatcgagcgggtcaccgagctgcaagaactcttcctcacgcgcgtcgggctcgacatcggcaaggtgtgggtcgcggacgacggcgccgcggtggcggtctggaccacgccggagagcgtcgaagcgggggcggtgttcgccgagatcggcccgcgcatggccgagttgagcggttcccggctggccgcgcagcaacagatggaaggcctcctggcgccgcaccggcccaaggagcccgcgtggttcctggccaccgtcggcgtctcgcccgaccaccagggcaagggtctgggcagcgccgtcgtgctccccggagtggaggcggccgagcgcgccggggtgcccgccttcctggagacctccgcgccccgcaacctccccttctacgagcggctcggcttcaccgtcaccgccgacgtcgaggtgcccgaaggaccgcgcacctggtgcatgacccgcaagcccggtgcctga

SEQ ID NO: 35228 - DNA, 2913 bp, synthetic construct
  source 1..2913: mol_type = other DNA
atggccttaccagtgaccgccttgctcctgccgctggccttgctgctccacgccgccaggccgctcgaggaggacctgaagaacgtgttcccacctgaggtggccgtgttcgagcctagcgaggccgagatcagccacacccagaaagccaccctcgtgtgcctggctaccggcttctaccccgaccatgtggaactgtcttggtgggtcaacggcaaagaggtgcacagcggcgtgtctaccgacccccagccactgaaagaacagcccgccctgaacgacagccggtactgcctgagcagcagactgagagtgtccgccaccttctggcagaacccccggaaccacttcagatgccaggtgcagttctacggcctgagcgagaacgacgagtggacccaggacagagccaagcccgtgacccagatcgtgtctgccgaagcctggggcagagccgatgatgtgattaagatccactggcaggaaaagaagtccaacaccatcctgggcagccaggaaggcaacaccatgaagaccaacgacacctacatgaagttcagctggctgaccgtgcccgagaagtccctggacaaagaacacagatgcatcgtgcggcacgaaaacaacaagaacggcgtggaccaggaaatcatcttcccacccatcaagaccgatgtgattacaatggaccccaaggacaactgctccaaggacgccaacgataccctgctgctccagctgaccaacaccagcgcctactacatgtacttgttgctgctgctgaagtccgtggtgtacttcgccatcatcacatgctgcctgctgcggagaaccgccttctgctgcaacggcgagaagtctagggccaagcgatctggatctggagcaacaaacttctcactactcaaacaagcaggtgacgtggaggagaatcccgggcctactagcatggccttaccagtgaccgccttgctcctgccgctggccttgctgctccacgccgccaggccggacatcgtgatgacccagagccctgccaccctgtccgtgtctccaggcgaaagagccaccctgagctgcagagcttcccagagcgtgtccaacgacgtcgtgtggtatcagcagaagcccggccaggcccccagactgctgatctactacgccagcaacagatacaccggcatccccgccagattcagcggctctggcagcggcaccgagttcaccctgacaatcagcagcctccagagcgaggacttcgccgtgtactactgtcagcaggactacaccagcccctggaccttcggccagggcaccaagctggaaatcaagagaggcggaggcggaagtggaggcggaggatctggcggcggaggctctgaggtgcaactggtgcagagcggagccgaagtgaagaaacctggggccagcgtgcgggtgtcctgcaaggccagcggctacacctttaccaactacggcatgaactgggtgcgccaggctcctggacagggcctggaatggatgggctggatcaacacctacaccggcgagcccacctacgccgacgacttcaagggcagagtgaccatgaccaccgacaccagcacctccaccgcctacatggaactgcggagcctgagaagcgacgacaccgccgtgtattattgcgcccggatcggcgacagcagccccagcgattattggggccagggaaccctcgtgaccgtgtcctctacgcgtatccagaaccctgatcctgccgtgtaccagctgcgggatagcaagagcagcgacaagagcgtgtgtctgttcaccgacttcgacagccagaccaacgtgtcccagagcaaggactccgacgtgtacatcaccgataagaccgtgctggacatgcggagcatggacttcaagagcaactccgccgtggcctggtccaacaagtccgatttcgcctgcgccaacgccttcaacaacagcattatccccgaggacacattcttcccaagccccgagagcagcgactccaccgaccacgtgaagcccaaagagacagagaacaccaagcagcccagcaagagctgccacaagcccaaggccatcgtgcacaccgagaaagtgaacatgatgagcctgaccgtgctgggcctgcggatgctgttcgccaaaaccgtggccgtgaacttcctgctgaccgccaagctgttcttcctccgcgccaagagaagcggatctggcgtgaagcagaccctgaatttcgacctgctgaagctggctggcgacgtggaatccaacccaggcccttctagaggccatatgaccgagtacaagcccacggtgcgcctcgccacccgcgacgacgtccccagggccgtacgcaccctcgccgccgcgttcgccgactaccccgccacgcgccacaccgtcgatccggaccgccacatcgagcgggtcaccgagctgcaagaactcttcctcacgcgcgtcgggctcgacatcggcaaggtgtgggtcgcggacgacggcgccgcggtggcggtctggaccacgccggagagcgtcgaagcgggggcggtgttcgccgagatcggcccgcgcatggccgagttgagcggttcccggctggccgcgcagcaacagatggaaggcctcctggcgccgcaccggcccaaggagcccgcgtggttcctggccaccgtcggcgtctcgcccgaccaccagggcaagggtctgggcagcgccgtcgtgctccccggagtggaggcggccgagcgcgccggggtgcccgccttcctggagacctccgcgccccgcaacctccccttctacgagcggctcggcttcaccgtcaccgccgacgtcgaggtgcccgaaggaccgcgcacctggtgcatgacccgcaagcccggtgcctga

SEQ ID NO: 35229 - DNA, 2913 bp, synthetic construct
  source 1..2913: mol_type = other DNA
atggccttaccagtgaccgccttgctcctgccgctggccttgctgctccacgccgccaggccgctcgagatccagaaccctgatcctgccgtgtaccagctgcgggatagcaagagcagcgacaagagcgtgtgtctgttcaccgacttcgacagccagaccaacgtgtcccagagcaaggactccgacgtgtacatcaccgataagaccgtgctggacatgcggagcatggacttcaagagcaactccgccgtggcctggtccaacaagtccgatttcgcctgcgccaacgccttcaacaacagcattatccccgaggacacattcttcccaagccccgagagcagcgactccaccgaccacgtgaagcccaaagagacagagaacaccaagcagcccagcaagagctgccacaagcccaaggccatcgtgcacaccgagaaagtgaacatgatgagcctgaccgtgctgggcctgcggatgctgttcgccaaaaccgtggccgtgaacttcctgctgaccgccaagctgttcttcctcagggccaagcgatctggatctggagcaacaaacttctcactactcaaacaagcaggtgacgtggaggagaatcccgggcctactagcatggccttaccagtgaccgccttgctcctgccgctggccttgctgctccacgccgccaggccggacatcgtgatgacccagagccctgccaccctgtccgtgtctccaggcgaaagagccaccctgagctgcagagcttcccagagcgtgtccaacgacgtcgtgtggtatcagcagaagcccggccaggcccccagactgctgatctactacgccagcaacagatacaccggcatccccgccagattcagcggctctggcagcggcaccgagttcaccctgacaatcagcagcctccagagcgaggacttcgccgtgtactactgtcagcaggactacaccagcccctggaccttcggccagggcaccaagctggaaatcaagagaggcggaggcggaagtggaggcggaggatctggcggcggaggctctgaggtgcaactggtgcagagcggagccgaagtgaagaaacctggggccagcgtgcgggtgtcctgcaaggccagcggctacacctttaccaactacggcatgaactgggtgcgccaggctcctggacagggcctggaatggatgggctggatcaacacctacaccggcgagcccacctacgccgacgacttcaagggcagagtgaccatgaccaccgacaccagcacctccaccgcctacatggaactgcggagcctgagaagcgacgacaccgccgtgtattattgcgcccggatcggcgacagcagccccagcgattattggggccagggaaccctcgtgaccgtgtcctctacgcgtgaggacctgaagaacgtgttcccacctgaggtggccgtgttcgagcctagcgaggccgagatcagccacacccagaaagccaccctcgtgtgcctggctaccggcttctaccccgaccatgtggaactgtcttggtgggtcaacggcaaagaggtgcacagcggcgtgtctaccgacccccagccactgaaagaacagcccgccctgaacgacagccggtactgcctgagcagcagactgagagtgtccgccaccttctggcagaacccccggaaccacttcagatgccaggtgcagttctacggcctgagcgagaacgacgagtggacccaggacagagccaagcccgtgacccagatcgtgtctgccgaagcctggggcagagccgatgatgtgattaagatccactggcaggaaaagaagtccaacaccatcctgggcagccaggaaggcaacaccatgaagaccaacgacacctacatgaagttcagctggctgaccgtgcccgagaagtccctggacaaagaacacagatgcatcgtgcggcacgaaaacaacaagaacggcgtggaccaggaaatcatcttcccacccatcaagaccgatgtgattacaatggaccccaaggacaactgctccaaggacgccaacgataccctgctgctccagctgaccaacaccagcgcctactacatgtacttgttgctgctgctgaagtccgtggtgtacttcgccatcatcacatgctgcctgctgcggagaaccgccttctgctgcaacggcgagaagtctcgcgccaagagaagcggatctggcgtgaagcagaccctgaatttcgacctgctgaagctggctggcgacgtggaatccaacccaggcccttctagaggccatatgaccgagtacaagcccacggtgcgcctcgccacccgcgacgacgtccccagggccgtacgcaccctcgccgccgcgttcgccgactaccccgccacgcgccacaccgtcgatccggaccgccacatcgagcgggtcaccgagctgcaagaactcttcctcacgcgcgtcgggctcgacatcggcaaggtgtgggtcgcggacgacggcgccgcggtggcggtctggaccacgccggagagcgtcgaagcgggggcggtgttcgccgagatcggcccgcgcatggccgagttgagcggttcccggctggccgcgcagcaacagatggaaggcctcctggcgccgcaccggcccaaggagcccgcgtggttcctggccaccgtcggcgtctcgcccgaccaccagggcaagggtctgggcagcgccgtcgtgctccccggagtggaggcggccgagcgcgccggggtgcccgccttcctggagacctccgcgccccgcaacctccccttctacgagcggctcggcttcaccgtcaccgccgacgtcgaggtgcccgaaggaccgcgcacctggtgcatgacccgcaagcccggtgcctga

SEQ ID NO: 35230 - DNA, 2607 bp, synthetic construct
  source 1..2607: mol_type = other DNA
atggccttaccagtgaccgccttgctcctgccgctggccttgctgctccacgccgccaggccgctcgaggaggacctgaagaacgtgttcccacctgaggtggccgtgttcgagcctagcaaggccgagatcgcccacacccagaaagccaccctcgtgtgcctggctaccggcttctaccccgaccatgtggaactgtcttggtgggtcaacggcaaagaggtgcacagcggcgtgtgtaccgacccccagccactgaaagaacagcccgccctgaacgacagccggtactgcctgagcagcagactgagagtgtccgccaccttctggcagaacccccggaaccacttcagatgccaggtgcagttctacggcctgagcgagaacgacgagtggacccaggacagagccaagcccgtgacccagatcgtgtctgccgaagcctggggcagagccgattgcggcatcaccagcgccagctaccaccagggcgtgctgagcgccaccatcctgtacgagatcctgctgggcaaggccaccctgtacgccgtgctggtgtctgccctggtgctgatggctatggtcaagcggaaggacagccggggaagggccaagcgatctggatctggagcaacaaacttctcactactcaaacaagcaggtgacgtggaggagaatcccgggcctactagcatggccttaccagtgaccgccttgctcctgccgctggccttgctgctccacgccgccaggccggacatcgtgatgacccagagccctgccaccctgtccgtgtctccaggcgaaagagccaccctgagctgcagagcttcccagagcgtgtccaacgacgtcgtgtggtatcagcagaagcccggccaggcccccagactgctgatctactacgccagcaacagatacaccggcatccccgccagattcagcggctctggcagcggcaccgagttcaccctgacaatcagcagcctccagagcgaggacttcgccgtgtactactgtcagcaggactacaccagcccctggaccttcggccagggcaccaagctggaaatcaagagaggcggaggcggaagtggaggcggaggatctggcggcggaggctctgaggtgcaactggtgcagagcggagccgaagtgaagaaacctggggccagcgtgcgggtgtcctgcaaggccagcggctacacctttaccaactacggcatgaactgggtgcgccaggctcctggacagggcctggaatggatgggctggatcaacacctacaccggcgagcccacctacgccgacgacttcaagggcagagtgaccatgaccaccgacaccagcacctccaccgcctacatggaactgcggagcctgagaagcgacgacaccgccgtgtattattgcgcccggatcggcgacagcagccccagcgattattggggccagggaaccctcgtgaccgtgtcctctacgcgtatccagaaccctgatcctgccgtgtaccagctgcgggatagcaagagcagcgacaagagcgtgtgtctgttcaccgacttcgacagccagaccaacgtgtcccagagcaaggactccgacgtgtacatcaccgataagtgcgtgctggacatgcggagcatggacttcaagagcaactccgccgtggcctggtccaacaagtccgatttcgcctgcgccaacgccttcaacaacagcattatccccgaggacacattcttcccaagcagcgacgtgccctgcgacgtgaagctggtggaaaagagcttcgagacagacaccaacctgaacttccagaacctgagcgtgatcggcttcagaatcctgctgctgaaagtggccggctttaacctgctgatgaccctgcggctgtggtccagccgcgccaagagaagcggatctggcgtgaagcagaccctgaatttcgacctgctgaagctggctggcgacgtggaatccaacccaggcccttctagaggccatatgaccgagtacaagcccacggtgcgcctcgccacccgcgacgacgtccccagggccgtacgcaccctcgccgccgcgttcgccgactaccccgccacgcgccacaccgtcgatccggaccgccacatcgagcgggtcaccgagctgcaagaactcttcctcacgcgcgtcgggctcgacatcggcaaggtgtgggtcgcggacgacggcgccgcggtggcggtctggaccacgccggagagcgtcgaagcgggggcggtgttcgccgagatcggcccgcgcatggccgagttgagcggttcccggctggccgcgcagcaacagatggaaggcctcctggcgccgcaccggcccaaggagcccgcgtggttcctggccaccgtcggcgtctcgcccgaccaccagggcaagggtctgggcagcgccgtcgtgctccccggagtggaggcggccgagcgcgccggggtgcccgccttcctggagacctccgcgccccgcaacctccccttctacgagcggctcggcttcaccgtcaccgccgacgtcgaggtgcccgaaggaccgcgcacctggtgcatgacccgcaagcccggtgcctga

SEQ ID NO: 35231 - DNA, 2607 bp, synthetic construct
  source 1..2607: mol_type = other DNA
atggccttaccagtgaccgccttgctcctgccgctggccttgctgctccacgccgccaggccgctcgagatccagaaccctgatcctgccgtgtaccagctgcgggatagcaagagcagcgacaagagcgtgtgtctgttcaccgacttcgacagccagaccaacgtgtcccagagcaaggactccgacgtgtacatcaccgataagtgcgtgctggacatgcggagcatggacttcaagagcaactccgccgtggcctggtccaacaagtccgatttcgcctgcgccaacgccttcaacaacagcattatccccgaggacacattcttcccaagcagcgacgtgccctgcgacgtgaagctggtggaaaagagcttcgagacagacaccaacctgaacttccagaacctgagcgtgatcggcttcagaatcctgctgctgaaagtggccggctttaacctgctgatgaccctgcggctgtggtccagcagggccaagcgatctggatctggagcaacaaacttctcactactcaaacaagcaggtgacgtggaggagaatcccgggcctactagcatggccttaccagtgaccgccttgctcctgccgctggccttgctgctccacgccgccaggccggacatcgtgatgacccagagccctgccaccctgtccgtgtctccaggcgaaagagccaccctgagctgcagagcttcccagagcgtgtccaacgacgtcgtgtggtatcagcagaagcccggccaggcccccagactgctgatctactacgccagcaacagatacaccggcatccccgccagattcagcggctctggcagcggcaccgagttcaccctgacaatcagcagcctccagagcgaggacttcgccgtgtactactgtcagcaggactacaccagcccctggaccttcggccagggcaccaagctggaaatcaagagaggcggaggcggaagtggaggcggaggatctggcggcggaggctctgaggtgcaactggtgcagagcggagccgaagtgaagaaacctggggccagcgtgcgggtgtcctgcaaggccagcggctacacctttaccaactacggcatgaactgggtgcgccaggctcctggacagggcctggaatggatgggctggatcaacacctacaccggcgagcccacctacgccgacgacttcaagggcagagtgaccatgaccaccgacaccagcacctccaccgcctacatggaactgcggagcctgagaagcgacgacaccgccgtgtattattgcgcccggatcggcgacagcagccccagcgattattggggccagggaaccctcgtgaccgtgtcctctacgcgtgaggacctgaagaacgtgttcccacctgaggtggccgtgttcgagcctagcaaggccgagatcgcccacacccagaaagccaccctcgtgtgcctggctaccggcttctaccccgaccatgtggaactgtcttggtgggtcaacggcaaagaggtgcacagcggcgtgtgtaccgacccccagccactgaaagaacagcccgccctgaacgacagccggtactgcctgagcagcagactgagagtgtccgccaccttctggcagaacccccggaaccacttcagatgccaggtgcagttctacggcctgagcgagaacgacgagtggacccaggacagagccaagcccgtgacccagatcgtgtctgccgaagcctggggcagagccgattgcggcatcaccagcgccagctaccaccagggcgtgctgagcgccaccatcctgtacgagatcctgctgggcaaggccaccctgtacgccgtgctggtgtctgccctggtgctgatggctatggtcaagcggaaggacagccggggacgcgccaagagaagcggatctggcgtgaagcagaccctgaatttcgacctgctgaagctggctggcgacgtggaatccaacccaggcccttctagaggccatatgaccgagtacaagcccacggtgcgcctcgccacccgcgacgacgtccccagggccgtacgcaccctcgccgccgcgttcgccgactaccccgccacgcgccacaccgtcgatccggaccgccacatcgagcgggtcaccgagctgcaagaactcttcctcacgcgcgtcgggctcgacatcggcaaggtgtgggtcgcggacgacggcgccgcggtggcggtctggaccacgccggagagcgtcgaagcgggggcggtgttcgccgagatcggcccgcgcatggccgagttgagcggttcccggctggccgcgcagcaacagatggaaggcctcctggcgccgcaccggcccaaggagcccgcgtggttcctggccaccgtcggcgtctcgcccgaccaccagggcaagggtctgggcagcgccgtcgtgctccccggagtggaggcggccgagcgcgccggggtgcccgccttcctggagacctccgcgccccgcaacctccccttctacgagcggctcggcttcaccgtcaccgccgacgtcgaggtgcccgaaggaccgcgcacctggtgcatgacccgcaagcccggtgcctga

SEQ ID NO: 35232 - DNA, 2286 bp, synthetic construct
  source 1..2286: mol_type = other DNA
atggccttaccagtgaccgccttgctcctgccgctggccttgctgctccacgccgccaggccgctcgagcagagttttgggttgttggaccctaaattgtgctatctgttggacggaatcctgttcatttacggagtgatcctgaccgcattgttcctgcgggttaagttttccagatccgcagacgcacccgcttaccaacaagggcagaaccaactctacaatgaacttaatttggggcggagggaagagtacgacgttctggacaaaaggaggggacgagatcccgagatgggcggaaagcctcagcgaaggaagaatccgcaagaggggctttataacgaactccagaaagataaaatggcagaagcctatagtgagattgggatgaagggagaaaggaggaggggtaaaggtcacgatgggttgtaccaaggattgagcacagccactaaagatacctatgatgcgctccacatgcaggccctgccgccaagaagggccaagcgatctggatctggagcaacaaacttctcactactcaaacaagcaggtgacgtggaggagaatcccgggcctactagcatggccttaccagtgaccgccttgctcctgccgctggccttgctgctccacgccgccaggccggacatcgtgatgacccagagccctgccaccctgtccgtgtctccaggcgaaagagccaccctgagctgcagagcttcccagagcgtgtccaacgacgtcgtgtggtatcagcagaagcccggccaggcccccagactgctgatctactacgccagcaacagatacaccggcatccccgccagattcagcggctctggcagcggcaccgagttcaccctgacaatcagcagcctccagagcgaggacttcgccgtgtactactgtcagcaggactacaccagcccctggaccttcggccagggcaccaagctggaaatcaagagaggcggaggcggaagtggaggcggaggatctggcggcggaggctctgaggtgcaactggtgcagagcggagccgaagtgaagaaacctggggccagcgtgcgggtgtcctgcaaggccagcggctacacctttaccaactacggcatgaactgggtgcgccaggctcctggacagggcctggaatggatgggctggatcaacacctacaccggcgagcccacctacgccgacgacttcaagggcagagtgaccatgaccaccgacaccagcacctccaccgcctacatggaactgcggagcctgagaagcgacgacaccgccgtgtattattgcgcccggatcggcgacagcagccccagcgattattggggccagggaaccctcgtgaccgtgtcctctacgcgtgagctgggagagcctcagctgtgctatatcctggacgccatcctgtttctgtacggcatcgtgctgaccctgctgtactgccggctgaagatccaagtgcggaaggccgccatcaccagctacgagaaatccgacggcgtgtacaccggcctgagcaccagaaatcaagagacatacgagacactgaagcacgaaaagcctccacaacgcgccaagagaagcggatctggcgtgaagcagaccctgaatttcgacctgctgaagctggctggcgacgtggaatccaacccaggcccttctagaggccatatgaccgagtacaagcccacggtgcgcctcgccacccgcgacgacgtccccagggccgtacgcaccctcgccgccgcgttcgccgactaccccgccacgcgccacaccgtcgatccggaccgccacatcgagcgggtcaccgagctgcaagaactcttcctcacgcgcgtcgggctcgacatcggcaaggtgtgggtcgcggacgacggcgccgcggtggcggtctggaccacgccggagagcgtcgaagcgggggcggtgttcgccgagatcggcccgcgcatggccgagttgagcggttcccggctggccgcgcagcaacagatggaaggcctcctggcgccgcaccggcccaaggagcccgcgtggttcctggccaccgtcggcgtctcgcccgaccaccagggcaagggtctgggcagcgccgtcgtgctccccggagtggaggcggccgagcgcgccggggtgcccgccttcctggagacctccgcgccccgcaacctccccttctacgagcggctcggcttcaccgtcaccgccgacgtcgaggtgcccgaaggaccgcgcacctggtgcatgacccgcaagcccggtgcctga

SEQ ID NO: 35233 - DNA, 2919 bp, synthetic construct; identical to SEQ ID NO: 35224
  source 1..2919: mol_type = other DNA

SEQ ID NO: 35234 - DNA, 2919 bp, synthetic construct; identical to SEQ ID NO: 35225
  source 1..2919: mol_type = other DNA

SEQ ID NO: 35235 - DNA, 2916 bp, synthetic construct
  source 1..2916: mol_type = other DNA
atggccttaccagtgaccgccttgctcctgccgctggccttgctgctccacgccgccaggccgctcgaggaggaggacctgaagaacgtgttcccacctgaggtggccgtgttcgagcctagcgaggccgagatcagccacacccagaaagccaccctcgtgtgcctggctaccggcttctaccccgaccatgtggaactgtcttggtgggtcaacggcaaagaggtgcacagcggcgtgtgtaccgacccccagccactgaaagaacagcccgccctgaacgacagccggtactgcctgagcagcagactgagagtgtccgccaccttctggcagaacccccggaaccacttcagatgccaggtgcagttctacggcctgagcgagaacgacgagtggacccaggacagagccaagcccgtgacccagatcgtgtctgccgaagcctggggcagagccgatgatgtgattaagatccactggcaggaaaagaagtccaacaccatcctgggcagccaggaaggcaacaccatgaagaccaacgacacctacatgaagttcagctggctgaccgtgcccgagaagtccctggacaaagaacacagatgcatcgtgcggcacgaaaacaacaagaacggcgtggaccaggaaatcatcttcccacccatcaagaccgatgtgattacaatggaccccaaggacaactgctccaaggacgccaacgataccctgctgctccagctgaccaacaccagcgcctactacatgtacttgttgctgctgctgaagtccgtggtgtacttcgccatcatcacatgctgcctgctgcggagaaccgccttctgctgcaacggcgagaagtctagggccaagcgatctggatctggagcaacaaacttctcactactcaaacaagcaggtgacgtggaggagaatcccgggcctactagcatggccttaccagtgaccgccttgctcctgccgctggccttgctgctccacgccgccaggccggacatcgtgatgacccagagccctgccaccctgtccgtgtctccaggcgaaagagccaccctgagctgcagagcttcccagagcgtgtccaacgacgtcgtgtggtatcagcagaagcccggccaggcccccagactgctgatctactacgccagcaacagatacaccggcatccccgccagattcagcggctctggcagcggcaccgagttcaccctgacaatcagcagcctccagagcgaggacttcgccgtgtactactgtcagcaggactacaccagcccctggaccttcggccagggcaccaagctggaaatcaagagaggcggaggcggaagtggaggcggaggatctggcggcggaggctctgaggtgcaactggtgcagagcggagccgaagtgaagaaacctggggccagcgtgcgggtgtcctgcaaggccagcggctacacctttaccaactacggcatgaactgggtgcgccaggctcctggacagggcctggaatggatgggctggatcaacacctacaccggcgagcccacctacgccgacgacttcaagggcagagtgaccatgaccaccgacaccagcacctccaccgcctacatggaactgcggagcctgagaagcgacgacaccgccgtgtattattgcgcccggatcggcgacagcagccccagcgattattggggccagggaaccctcgtgaccgtgtcctctacgcgtatccagaaccctgatcctgccgtgtaccagctgcgggatagcaagagcagcgacaagagcgtgtgtctgttcaccgacttcgacagccagaccaacgtgtcccagagcaaggactccgacgtgtacatcaccgataagtgcgtgctggacatgcggagcatggacttcaagagcaactccgccgtggcctggtccaacaagtccgatttcgcctgcgccaacgccttcaacaacagcattatccccgaggacacattcttcccaagccccgagagcagcgactccaccgaccacgtgaagcccaaagagacagagaacaccaagcagcccagcaagagctgccacaagcccaaggccatcgtgcacaccgagaaagtgaacatgatgagcctgaccgtgctgggcctgcggatgctgttcgccaaaaccgtggccgtgaacttcctgctgaccgccaagctgttcttcctccgcgccaagagaagcggatctggcgtgaagcagaccctgaatttcgacctgctgaagctggctggcgacgtggaatccaacccaggcccttctagaggccatatgaccgagtacaagcccacggtgcgcctcgccacccgcgacgacgtccccagggccgtacgcaccctcgccgccgcgttcgccgactaccccgccacgcgccacaccgtcgatccggaccgccacatcgagcgggtcaccgagctgcaagaactcttcctcacgcgcgtcgggctcgacatcggcaaggtgtgggtcgcggacgacggcgccgcggtggcggtctggaccacgccggagagcgtcgaagcgggggcggtgttcgccgagatcggcccgcgcatggccgagttgagcggttcccggctggccgcgcagcaacagatggaaggcctcctggcgccgcaccggcccaaggagcccgcgtggttcctggccaccgtcggcgtctcgcccgaccaccagggcaagggtctgggcagcgccgtcgtgctccccggagtggaggcggccgagcgcgccggggtgcccgccttcctggagacctccgcgccccgcaacctccccttctacgagcggctcggcttcaccgtcaccgccgacgtcgaggtgcccgaaggaccgcgcacctggtgcatgacccgcaagcccggtgcctga

SEQ ID NO: 35236 - DNA, 2916 bp, synthetic construct
  source 1..2916: mol_type = other DNA
atggccttaccagtgaccgccttgctcctgccgctggccttgctgctccacgccgccaggccgctcgagatccagaaccctgatcctgccgtgtaccagctgcgggatagcaagagcagcgacaagagcgtgtgtctgttcaccgacttcgacagccagaccaacgtgtcccagagcaaggactccgacgtgtacatcaccgataagtgcgtgctggacatgcggagcatggacttcaagagcaactccgccgtggcctggtccaacaagtccgatttcgcctgcgccaacgccttcaacaacagcattatccccgaggacacattcttcccaagccccgagagcagcgactccaccgaccacgtgaagcccaaagagacagagaacaccaagcagcccagcaagagctgccacaagcccaaggccatcgtgcacaccgagaaagtgaacatgatgagcctgaccgtgctgggcctgcggatgctgttcgccaaaaccgtggccgtgaacttcctgctgaccgccaagctgttcttcctcagggccaagcgatctggatctggagcaacaaacttctcactactcaaacaagcaggtgacgtggaggagaatcccgggcctactagcatggccttaccagtgaccgccttgctcctgccgctggccttgctgctccacgccgccaggccggacatcgtgatgacccagagccctgccaccctgtccgtgtctccaggcgaaagagccaccctgagctgcagagcttcccagagcgtgtccaacgacgtcgtgtggtatcagcagaagcccggccaggcccccagactgctgatctactacgccagcaacagatacaccggcatccccgccagattcagcggctctggcagcggcaccgagttcaccctgacaatcagcagcctccagagcgaggacttcgccgtgtactactgtcagcaggactacaccagcccctggaccttcggccagggcaccaagctggaaatcaagagaggcggaggcggaagtggaggcggaggatctggcggcggaggctctgaggtgcaactggtgcagagcggagccgaagtgaagaaacctggggccagcgtgcgggtgtcctgcaaggccagcggctacacctttaccaactacggcatgaactgggtgcgccaggctcctggacagggcctggaatggatgggctggatcaacacctacaccggcgagcccacctacgccgacgacttcaagggcagagtgaccatgaccaccgacaccagcacctccaccgcctacatggaactgcggagcctgagaagcgacgacaccgccgtgtattattgcgcccggatcggcgacagcagccccagcgattattggggccagggaaccctcgtgaccgtgtcctctacgcgtgaggaggacctgaagaacgtgttcccacctgaggtggccgtgttcgagcctagcgaggccgagatcagccacacccagaaagccaccctcgtgtgcctggctaccggcttctaccccgaccatgtggaactgtcttggtgggtcaacggcaaagaggtgcacagcggcgtgtgtaccgacccccagccactgaaagaacagcccgccctgaacgacagccggtactgcctgagcagcagactgagagtgtccgccaccttctggcagaacccccggaaccacttcagatgccaggtgcagttctacggcctgagcgagaacgacgagtggacccaggacagagccaagcccgtgacccagatcgtgtctgccgaagcctggggcagagccgatgatgtgattaagatccactggcaggaaaagaagtccaacaccatcctgggcagccaggaaggcaacaccatgaagaccaacgacacctacatgaagttcagctggctgaccgtgcccgagaagtccctggacaaagaacacagatgcatcgtgcggcacgaaaacaacaagaacggcgtggaccaggaaatcatcttcccacccatcaagaccgatgtgattacaatggaccccaaggacaactgctccaaggacgccaacgataccctgctgctccagctgaccaacaccagcgcctactacatgtacttgttgctgctgctgaagtccgtggtgtacttcgccatcatcacatgctgcctgctgcggagaaccgccttctgctgcaacggcgagaagtctcgcgccaagagaagcggatctggcgtgaagcagaccctgaatttcgacctgctgaagctggctggcgacgtggaatccaacccaggcccttctagaggccatatgaccgagtacaagcccacggtgcgcctcgccacccgcgacgacgtccccagggccgtacgcaccctcgccgccgcgttcgccgactaccccgccacgcgccacaccgtcgatccggaccgccacatcgagcgggtcaccgagctgcaagaactcttcctcacgcgcgtcgggctcgacatcggcaaggtgtgggtcgcggacgacggcgccgcggtggcggtctggaccacgccggagagcgtcgaagcgggggcggtgttcgccgagatcggcccgcgcatggccgagttgagcggttcccggctggccgcgcagcaacagatggaaggcctcctggcgccgcaccggcccaaggagcccgcgtggttcctggccaccgtcggcgtctcgcccgaccaccagggcaagggtctgggcagcgccgtcgtgctccccggagtggaggcggccgagcgcgccggggtgcccgccttcctggagacctccgcgccccgcaacctccccttctacgagcggctcggcttcaccgtcaccgccgacgtcgaggtgcccgaaggaccgcgcacctggtgcatgacccgcaagcccggtgcctga

SEQ ID NO: 35237 - DNA, 2607 bp, synthetic construct
  source 1..2607: mol_type = other DNA
atggccttaccagtgaccgccttgctcctgccgctggccttgctgctccacgccgccaggccgctcgaggaggacctgaagaacgtgttcccacctgaggtggccgtgttcgagcctagcgaggccgagatcagccacacccagaaagccaccctcgtgtgcctggctaccggcttctaccccgaccatgtggaactgtcttggtgggtcaacggcaaagaggtgcacagcggcgtgtctaccgacccccagccactgaaagaacagcccgccctgaacgacagccggtactgcctgagcagcagactgagagtgtccgccaccttctggcagaacccccggaaccacttcagatgccaggtgcagttctacggcctgagcgagaacgacgagtggacccaggacagagccaagcccgtgacccagatcgtgtctgccgaagcctggggcagagccgattgcggctttaccagcgagagctaccagcagggcgtgctgagcgccaccaacctgagcgtgatcggcttcagaatcctgctgctgaaagtggccggctttaacctgctgatgaccctgcggctgtggtccagcagggccaagcgatctggatctggagcaacaaacttctcactactcaaacaagcaggtgacgtggaggagaatcccgggcctactagcatggccttaccagtgaccgccttgctcctgccgctggccttgctgctccacgccgccaggccggacatcgtgatgacccagagccctgccaccctgtccgtgtctccaggcgaaagagccaccctgagctgcagagcttcccagagcgtgtccaacgacgtcgtgtggtatcagcagaagcccggccaggcccccagactgctgatctactacgccagcaacagatacaccggcatccccgccagattcagcggctctggcagcggcaccgagttcaccctgacaatcagcagcctccagagcgaggacttcgccgtgtactactgtcagcaggactacaccagcccctggaccttcggccagggcaccaagctggaaatcaagagaggcggaggcggaagtggaggcggaggatctggcggcggaggctctgaggtgcaactggtgcagagcggagccgaagtgaagaaacctggggccagcgtgcgggtgtcctgcaaggccagcggctacacctttaccaactacggcatgaactgggtgcgccaggctcctggacagggcctggaatggatgggctggatcaacacctacaccggcgagcccacctacgccgacgacttcaagggcagagtgaccatgaccaccgacaccagcacctccaccgcctacatggaactgcggagcctgagaagcgacgacaccgccgtgtattattgcgcccggatcggcgacagcagccccagcgattattggggccagggaaccctcgtgaccgtgtcctctacgcgtatccagaaccctgatcctgccgtgtaccagctgcgggatagcaagagcagcgacaagagcgtgtgtctgttcaccgacttcgacagccagaccaacgtgtcccagagcaaggactccgacgtgtacatcaccgataagaccgtgctggacatgcggagcatggacttcaagagcaactccgccgtggcctggtccaacaagtccgatttcgcctgcgccaacgccttcaacaacagcattatccccgaggacacattcttcccaagccccgagagcagctgcgacgtgaagctggtggaaaagagcttcgagacagacaccaacctgaacttccagatcctgtacgagatcctgctgggcaaggccaccctgtacgccgtgctggtgtctgccctggtgctgatggctatggtcaagcggaaggacagccggggacgcgccaagagaagcggatctggcgtgaagcagaccctgaatttcgacctgctgaagctggctggcgacgtggaatccaacccaggcccttctagaggccatatgaccgagtacaagcccacggtgcgcctcgccacccgcgacgacgtccccagggccgtacgcaccctcgccgccgcgttcgccgactaccccgccacgcgccacaccgtcgatccggaccgccacatcgagcgggtcaccgagctgcaagaactcttcctcacgcgcgtcgggctcgacatcggcaaggtgtgggtcgcggacgacggcgccgcggtggcggtctggaccacgccggagagcgtcgaagcgggggcggtgttcgccgagatcggcccgcgcatggccgagttgagcggttcccggctggccgcgcagcaacagatggaaggcctcctggcgccgcaccggcccaaggagcccgcgtggttcctggccaccgtcggcgtctcgcccgaccaccagggcaagggtctgggcagcgccgtcgtgctccccggagtggaggcggccgagcgcgccggggtgcccgccttcctggagacctccgcgccccgcaacctccccttctacgagcggctcggcttcaccgtcaccgccgacgtcgaggtgcccgaaggaccgcgcacctggtgcatgacccgcaagcccggtgcctga

SEQ ID NO: 35238 - DNA, 2607 bp, synthetic construct
  source 1..2607: mol_type = other DNA
atggccttaccagtgaccgccttgctcctgccgctggccttgctgctccacgccgccaggccgctcgagatccagaaccctgatcctgccgtgtaccagctgcgggatagcaagagcagcgacaagagcgtgtgtctgttcaccgacttcgacagccagaccaacgtgtcccagagcaaggactccgacgtgtacatcaccgataagaccgtgctggacatgcggagcatggacttcaagagcaactccgccgtggcctggtccaacaagtccgatttcgcctgcgccaacgccttcaacaacagcattatccccgaggacacattcttcccaagccccgagagcagctgcgacgtgaagctggtggaaaagagcttcgagacagacaccaacctgaacttccagatcctgtacgagatcctgctgggcaaggccaccctgtacgccgtgctggtgtctgccctggtgctgatggctatggtcaagcggaaggacagccggggaagggccaagcgatctggatctggagcaacaaacttctcactactcaaacaagcaggtgacgtggaggagaatcccgggcctactagcatggccttaccagtgaccgccttgctcctgccgctggccttgctgctccacgccgccaggccggacatcgtgatgacccagagccctgccaccctgtccgtgtctccaggcgaaagagccaccctgagctgcagagcttcccagagcgtgtccaacgacgtcgtgtggtatcagcagaagcccggccaggcccccagactgctgatctactacgccagcaacagatacaccggcatccccgccagattcagcggctctggcagcggcaccgagttcaccctgacaatcagcagcctccagagcgaggacttcgccgtgtactactgtcagcaggactacaccagcccctggaccttcggccagggcaccaagctggaaatcaagagaggcggaggcggaagtggaggcggaggatctggcggcggaggctctgaggtgcaactggtgcagagcggagccgaagtgaagaaacctggggccagcgtgcgggtgtcctgcaaggccagcggctacacctttaccaactacggcatgaactgggtgcgccaggctcctggacagggcctggaatggatgggctggatcaacacctacaccggcgagcccacctacgccgacgacttcaagggcagagtgaccatgaccaccgacaccagcacctccaccgcctacatggaactgcggagcctgagaagcgacgacaccgccgtgtattattgcgcccggatcggcgacagcagccccagcgattattggggccagggaaccctcgtgaccgtgtcctctacgcgtgaggacctgaagaacgtgttcccacctgaggtggccgtgttcgagcctagcgaggccgagatcagccacacccagaaagccaccctcgtgtgcctggctaccggcttctaccccgaccatgtggaactgtcttggtgggtcaacggcaaagaggtgcacagcggcgtgtctaccgacccccagccactgaaagaacagcccgccctgaacgacagccggtactgcctgagcagcagactgagagtgtccgccaccttctggcagaacccccggaaccacttcagatgccaggtgcagttctacggcctgagcgagaacgacgagtggacccaggacagagccaagcccgtgacccagatcgtgtctgccgaagcctggggcagagccgattgcggctttaccagcgagagctaccagcagggcgtgctgagcgccaccaacctgagcgtgatcggcttcagaatcctgctgctgaaagtggccggctttaacctgctgatgaccctgcggctgtggtccagccgcgccaagagaagcggatctggcgtgaagcagaccctgaatttcgacctgctgaagctggctggcgacgtggaatccaacccaggcccttctagaggccatatgaccgagtacaagcccacggtgcgcctcgccacccgcgacgacgtccccagggccgtacgcaccctcgccgccgcgttcgccgactaccccgccacgcgccacaccgtcgatccggaccgccacatcgagcgggtcaccgagctgcaagaactcttcctcacgcgcgtcgggctcgacatcggcaaggtgtgggtcgcggacgacggcgccgcggtggcggtctggaccacgccggagagcgtcgaagcgggggcggtgttcgccgagatcggcccgcgcatggccgagttgagcggttcccggctggccgcgcagcaacagatggaaggcctcctggcgccgcaccggcccaaggagcccgcgtggttcctggccaccgtcggcgtctcgcccgaccaccagggcaagggtctgggcagcgccgtcgtgctccccggagtggaggcggccgagcgcgccggggtgcccgccttcctggagacctccgcgccccgcaacctccccttctacgagcggctcggcttcaccgtcaccgccgacgtcgaggtgcccgaaggaccgcgcacctggtgcatgacccgcaagcccggtgcctga

SEQ ID NO: 35239 - DNA, 2607 bp, synthetic construct
  source 1..2607: mol_type = other DNA
atggccttaccagtgaccgccttgctcctgccgctggccttgctgctccacgccgccaggccgctcgaggaggacctgaagaacgtgttcccacctgaggtggccgtgttcgagcctagcgaggccgagatcagccacacccagaaagccaccctcgtgtgcctggctaccggcttctaccccgaccatgtggaactgtcttggtgggtcaacggcaaagaggtgcacagcggcgtgtgtaccgacccccagccactgaaagaacagcccgccctgaacgacagccggtactgcctgagcagcagactgagagtgtccgccaccttctggcagaacccccggaaccacttcagatgccaggtgcagttctacggcctgagcgagaacgacgagtggacccaggacagagccaagcccgtgacccagatcgtgtctgccgaagcctggggcagagccgattgcgacgtgaagctggtggaaaagagcttcgagacagacaccaacctgaacttccagaacctgagcgtgatcggcttcagaatcctgctgctgaaagtggccggctttaacctgctgatgaccctgcggctgtggtccagcagggccaagcgatctggatctggagcaacaaacttctcactactcaaacaagcaggtgacgtggaggagaatcccgggcctactagcatggccttaccagtgaccgccttgctcctgccgctggccttgctgctccacgccgccaggccggacatcgtgatgacccagagccctgccaccctgtccgtgtctccaggcgaaagagccaccctgagctgcagagcttcccagagcgtgtccaacgacgtcgtgtggtatcagcagaagcccggccaggcccccagactgctgatctactacgccagcaacagatacaccggcatccccgccagattcagcggctctggcagcggcaccgagttcaccctgacaatcagcagcctccagagcgaggacttcgccgtgtactactgtcagcaggactacaccagcccctggaccttcggccagggcaccaagctggaaatcaagagaggcggaggcggaagtggaggcggaggatctggcggcggaggctctgaggtgcaactggtgcagagcggagccgaagtgaagaaacctggggccagcgtgcgggtgtcctgcaaggccagcggctacacctttaccaactacggcatgaactgggtgcgccaggctcctggacagggcctggaatggatgggctggatcaacacctacaccggcgagcccacctacgccgacgacttcaagggcagagtgaccatgaccaccgacaccagcacctccaccgcctacatggaactgcggagcctgagaagcgacgacaccgccgtgtattattgcgcccggatcggcgacagcagccccagcgattattggggccagggaaccctcgtgaccgtgtcctctacgcgtatccagaaccctgatcctgccgtgtaccagctgcgggatagcaagagcagcgacaagagcgtgtgtctgttcaccgacttcgacagccagaccaacgtgtcccagagcaaggactccgacgtgtacatcaccgataagtgcgtgctggacatgcggagcatggacttcaagagcaactccgccgtggcctggtccaacaagtccgatttcgcctgcgccaacgccttcaacaacagcattatccccgaggacacattcttcccaagccccgagagcagctgcggctttaccagcgagagctaccagcagggcgtgctgagcgccaccatcctgtacgagatcctgctgggcaaggccaccctgtacgccgtgctggtgtctgccctggtgctgatggctatggtcaagcggaaggacagccggggacgcgccaagagaagcggatctggcgtgaagcagaccctgaatttcgacctgctgaagctggctggcgacgtggaatccaacccaggcccttctagaggccatatgaccgagtacaagcccacggtgcgcctcgccacccgcgacgacgtccccagggccgtacgcaccctcgccgccgcgttcgccgactaccccgccacgcgccacaccgtcgatccggaccgccacatcgagcgggtcaccgagctgcaagaactcttcctcacgcgcgtcgggctcgacatcggcaaggtgtgggtcgcggacgacggcgccgcggtggcggtctggaccacgccggagagcgtcgaagcgggggcggtgttcgccgagatcggcccgcgcatggccgagttgagcggttcccggctggccgcgcagcaacagatggaaggcctcctggcgccgcaccggcccaaggagcccgcgtggttcctggccaccgtcggcgtctcgcccgaccaccagggcaagggtctgggcagcgccgtcgtgctccccggagtggaggcggccgagcgcgccggggtgcccgccttcctggagacctccgcgccccgcaacctccccttctacgagcggctcggcttcaccgtcaccgccgacgtcgaggtgcccgaaggaccgcgcacctggtgcatgacccgcaagcccggtgcctga

SEQ ID NO: 35240 - DNA, 2607 bp, synthetic construct
  source 1..2607: mol_type = other DNA
atggccttaccagtgaccgccttgctcctgccgctggccttgctgctccacgccgccaggccgctcgaggaggacctgaagaacgtgttcccacctgaggtggccgtgttcgagcctagcgaggccgagatcagccacacccagaaagccaccctcgtgtgcctggctaccggcttctaccccgaccatgtggaactgtcttggtgggtcaacggcaaagaggtgcacagcggcgtgtctaccgacccccagccactgaaagaacagcccgccctgaacgacagccggtactgcctgagcagcagactgagagtgtccgccaccttctggcagaacccccggaaccacttcagatgccaggtgcagttctacggcctgagcgagaacgacgagtggacccaggacagagccaagcccgtgacccagatcgtgtctgccgaagcctggggcagagccgattgcgacgtgaagctggtggaaaagagcttcgagacagacaccaacctgaacttccagaacctgagcgtgatcggcttcagaatcctgctgctgaaagtggccggctttaacctgctgatgaccctgcggctgtggtccagcagggccaagcgatctggatctggagcaacaaacttctcactactcaaacaagcaggtgacgtggaggagaatcccgggcctactagcatggccttaccagtgaccgccttgctcctgccgctggccttgctgctccacgccgccaggccggacatcgtgatgacccagagccctgccaccctgtccgtgtctccaggcgaaagagccaccctgagctgcagagcttcccagagcgtgtccaacgacgtcgtgtggtatcagcagaagcccggccaggcccccagactgctgatctactacgccagcaacagatacaccggcatccccgccagattcagcggctctggcagcggcaccgagttcaccctgacaatcagcagcctccagagcgaggacttcgccgtgtactactgtcagcaggactacaccagcccctggaccttcggccagggcaccaagctggaaatcaagagaggcggaggcggaagtggaggcggaggatctggcggcggaggctctgaggtgcaactggtgcagagcggagccgaagtgaagaaacctggggccagcgtgcgggtgtcctgcaaggccagcggctacacctttaccaactacggcatgaactgggtgcgccaggctcctggacagggcctggaatggatgggctggatcaacacctacaccggcgagcccacctacgccgacgacttcaagggcagagtgaccatgaccaccgacaccagcacctccaccgcctacatggaactgcggagcctgagaagcgacgacaccgccgtgtattattgcgcccggatcggcgacagcagccccagcgattattggggccagggaaccctcgtgaccgtgtcctctacgcgtatccagaaccctgatcctgccgtgtaccagctgcgggatagcaagagcagcgacaagagcgtgtgtctgttcaccgacttcgacagccagaccaacgtgtcccagagcaaggactccgacgtgtacatcaccgataagaccgtgctggacatgcggagcatggacttcaagagcaactccgccgtggcctggtccaacaagtccgatttcgcctgcgccaacgccttcaacaacagcattatccccgaggacacattcttcccaagccccgagagcagctgcggctttaccagcgagagctaccagcagggcgtgctgagcgccaccatcctgtacgagatcctgctgggcaaggccaccctgtacgccgtgctggtgtctgccctggtgctgatggctatggtcaagcggaaggacagccggggacgcgccaagagaagcggatctggcgtgaagcagaccctgaatttcgacctgctgaagctggctggcgacgtggaatccaacccaggcccttctagaggccatatgaccgagtacaagcccacggtgcgcctcgccacccgcgacgacgtccccagggccgtacgcaccctcgccgccgcgttcgccgactaccccgccacgcgccacaccgtcgatccggaccgccacatcgagcgggtcaccgagctgcaagaactcttcctcacgcgcgtcgggctcgacatcggcaaggtgtgggtcgcggacgacggcgccgcggtggcggtctggaccacgccggagagcgtcgaagcgggggcggtgttcgccgagatcggcccgcgcatggccgagttgagcggttcccggctggccgcgcagcaacagatggaaggcctcctggcgccgcaccggcccaaggagcccgcgtggttcctggccaccgtcggcgtctcgcccgaccaccagggcaagggtctgggcagcgccgtcgtgctccccggagtggaggcggccgagcgcgccggggtgcccgccttcctggagacctccgcgccccgcaacctccccttctacgagcggctcggcttcaccgtcaccgccgacgtcgaggtgcccgaaggaccgcgcacctggtgcatgacccgcaagcccggtgcctga

SEQ ID NO: 35241 - DNA, 2916 bp, synthetic construct
  source 1..2916: mol_type = other DNA
atggccttaccagtgaccgccttgctcctgccgctggccttgctgctccacgccgccaggccgctcgaggaggaggacctgaagaacgtgttcccacctgaggtggccgtgttcgagcctagcgaggccgagatcagccacacccagaaagccaccctcgtgtgcctggctaccggcttctaccccgaccatgtggaactgtcttggtgggtcaacggcaaagaggtgcacagcggcgtgtctaccgacccccagccactgaaagaacagcccgccctgaacgacagccggtactgcctgagcagcagactgagagtgtccgccaccttctggcagaacccccggaaccacttcagatgccaggtgcagttctacggcctgagcgagaacgacgagtggacccaggacagagccaagcccgtgacccagatcgtgtctgccgaagcctggggcagagccgatgatgtgattaagatccactggcaggaaaagaagtccaacaccatcctgggcagccaggaaggcaacaccatgaagaccaacgacacctacatgaagttcagctggctgaccgtgcccgagaagtccctggacaaagaacacagatgcatcgtgcggcacgaaaacaacaagaacggcgtggaccaggaaatcatcttcccacccatcaagaccgatgtgattacaatggaccccaaggacaactgctccaaggacgccaacgataccctgctgctccagctgaccaacaccagcgcctactacatgtacttgttgctgctgctgaagtccgtggtgtacttcgccatcatcacatgctgcctgctgcggagaaccgccttctgctgcaacggcgagaagtctagggccaagcgatctggatctggagcaacaaacttctcactactcaaacaagcaggtgacgtggaggagaatcccgggcctactagcatggccttaccagtgaccgccttgctcctgccgctggccttgctgctccacgccgccaggccggacatcgtgatgacccagagccctgccaccctgtccgtgtctccaggcgaaagagccaccctgagctgcagagcttcccagagcgtgtccaacgacgtcgtgtggtatcagcagaagcccggccaggcccccagactgctgatctactacgccagcaacagatacaccggcatccccgccagattcagcggctctggcagcggcaccgagttcaccctgacaatcagcagcctccagagcgaggacttcgccgtgtactactgtcagcaggactacaccagcccctggaccttcggccagggcaccaagctggaaatcaagagaggcggaggcggaagtggaggcggaggatctggcggcggaggctctgaggtgcaactggtgcagagcggagccgaagtgaagaaacctggggccagcgtgcgggtgtcctgcaaggccagcggctacacctttaccaactacggcatgaactgggtgcgccaggctcctggacagggcctggaatggatgggctggatcaacacctacaccggcgagcccacctacgccgacgacttcaagggcagagtgaccatgaccaccgacaccagcacctccaccgcctacatggaactgcggagcctgagaagcgacgacaccgccgtgtattattgcgcccggatcggcgacagcagccccagcgattattggggccagggaaccctcgtgaccgtgtcctctacgcgtatccagaaccctgatcctgccgtgtaccagctgcgggatagcaagagcagcgacaagagcgtgtgtctgttcaccgacttcgacagccagaccaacgtgtcccagagcaaggactccgacgtgtacatcaccgataagaccgtgctggacatgcggagcatggacttcaagagcaactccgccgtggcctggtccaacaagtccgatttcgcctgcgccaacgccttcaacaacagcattatccccgaggacacattcttcccaagccccgagagcagcgactccaccgaccacgtgaagcccaaagagacagagaacaccaagcagcccagcaagagctgccacaagcccaaggccatcgtgcacaccgagaaagtgaacatgatgagcctgaccgtgctgggcctgcggatgctgttcgccaaaaccgtggccgtgaacttcctgctgaccgccaagctgttcttcctccgcgccaagagaagcggatctggcgtgaagcagaccctgaatttcgacctgctgaagctggctggcgacgtggaatccaacccaggcccttctagaggccatatgaccgagtacaagcccacggtgcgcctcgccacccgcgacgacgtccccagggccgtacgcaccctcgccgccgcgttcgccgactaccccgccacgcgccacaccgtcgatccggaccgccacatcgagcgggtcaccgagctgcaagaactcttcctcacgcgcgtcgggctcgacatcggcaaggtgtgggtcgcggacgacggcgccgcggtggcggtctggaccacgccggagagcgtcgaagcgggggcggtgttcgccgagatcggcccgcgcatggccgagttgagcggttcccggctggccgcgcagcaacagatggaaggcctcctggcgccgcaccggcccaaggagcccgcgtggttcctggccaccgtcggcgtctcgcccgaccaccagggcaagggtctgggcagcgccgtcgtgctccccggagtggaggcggccgagcgcgccggggtgcccgccttcctggagacctccgcgccccgcaacctccccttctacgagcggctcggcttcaccgtcaccgccgacgtcgaggtgcccgaaggaccgcgcacctggtgcatgacccgcaagcccggtgcctga

SEQ ID NO: 35242 - DNA, 2607 bp, synthetic construct
  source 1..2607: mol_type = other DNA
atggccttaccagtgaccgccttgctcctgccgctggccttgctgctccacgccgccaggccgctcgaggaggacctgaagaacgtgttcccacctgaggtggccgtgttcgagcctagcgaggccgagatcagccacacccagaaagccaccctcgtgtgcctggctaccggcttctaccccgaccatgtggaactgtcttggtgggtcaacggcaaagaggtgcacagcggcgtgtgtaccgacccccagccactgaaagaacagcccgccctgaacgacagccggtactgcctgagcagcagactgagagtgtccgccaccttctggcagaacccccggaaccacttcagatgccaggtgcagttctacggcctgagcgagaacgacgagtggacccaggacagagccaagcccgtgacccagatcgtgtctgccgaagcctggggcagagccgattgcggctttaccagcgagagctaccagcagggcgtgctgagcgccaccaacctgagcgtgatcggcttcagaatcctgctgctgaaagtggccggctttaacctgctgatgaccctgcggctgtggtccagcagggccaagcgatctggatctggagcaacaaacttctcactactcaaacaagcaggtgacgtggaggagaatcccgggcctactagcatggccttaccagtgaccgccttgctcctgccgctggccttgctgctccacgccgccaggccggacatcgtgatgacccagagccctgccaccctgtccgtgtctccaggcgaaagagccaccctgagctgcagagcttcccagagcgtgtccaacgacgtcgtgtggtatcagcagaagcccggccaggcccccagactgctgatctactacgccagcaacagatacaccggcatccccgccagattcagcggctctggcagcggcaccgagttcaccctgacaatcagcagcctccagagcgaggacttcgccgtgtactactgtcagcaggactacaccagcccctggaccttcggccagggcaccaagctggaaatcaagagaggcggaggcggaagtggaggcggaggatctggcggcggaggctctgaggtgcaactggtgcagagcggagccgaagtgaagaaacctggggccagcgtgcgggtgtcctgcaaggccagcggctacacctttaccaactacggcatgaactgggtgcgccaggctcctggacagggcctggaatggatgggctggatcaacacctacaccggcgagcccacctacgccgacgacttcaagggcagagtgaccatgaccaccgacaccagcacctccaccgcctacatggaactgcggagcctgagaagcgacgacaccgccgtgtattattgcgcccggatcggcgacagcagccccagcgattattggggccagggaaccctcgtgaccgtgtcctctacgcgtatccagaaccctgatcctgccgtgtaccagctgcgggatagcaagagcagcgacaagagcgtgtgtctgttcaccgacttcgacagccagaccaacgtgtcccagagcaaggactccgacgtgtacatcaccgataagtgcgtgctggacatgcggagcatggacttcaagagcaactccgccgtggcctggtccaacaagtccgatttcgcctgcgccaacgccttcaacaacagcattatccccgaggacacattcttcccaagccccgagagcagctgcgacgtgaagctggtggaaaagagcttcgagacagacaccaacctgaacttccagatcctgtacgagatcctgctgggcaaggccaccctgtacgccgtgctggtgtctgccctggtgctgatggctatggtcaagcggaaggacagccggggacgcgccaagagaagcggatctggcgtgaagcagaccctgaatttcgacctgctgaagctggctggcgacgtggaatccaacccaggcccttctagaggccatatgaccgagtacaagcccacggtgcgcctcgccacccgcgacgacgtccccagggccgtacgcaccctcgccgccgcgttcgccgactaccccgccacgcgccacaccgtcgatccggaccgccacatcgagcgggtcaccgagctgcaagaactcttcctcacgcgcgtcgggctcgacatcggcaaggtgtgggtcgcggacgacggcgccgcggtggcggtctggaccacgccggagagcgtcgaagcgggggcggtgttcgccgagatcggcccgcgcatggccgagttgagcggttcccggctggccgcgcagcaacagatggaaggcctcctggcgccgcaccggcccaaggagcccgcgtggttcctggccaccgtcggcgtctcgcccgaccaccagggcaagggtctgggcagcgccgtcgtgctccccggagtggaggcggccgagcgcgccggggtgcccgccttcctggagacctccgcgccccgcaacctccccttctacgagcggctcggcttcaccgtcaccgccgacgtcgaggtgcccgaaggaccgcgcacctggtgcatgacccgcaagcccggtgcctga

SEQ ID NO: 35243 - DNA, 2694 bp, synthetic construct
  source 1..2694: mol_type = other DNA
atggccttaccagtgaccgccttgctcctgccgctggccttgctgctccacgccgccaggccgctcgaggaggaggacctgaagaacgtgttcccacctgaggtggccgtgttcgagcctagcgaggccgagatcagccacacccagaaagccaccctcgtgtgcctggctaccggcttctaccccgaccatgtggaactgtcttggtgggtcaacggcaaagaggtgcacagcggcgtgtgtaccgacccccagccactgaaagaacagcccgccctgaacgacagccggtactgcctgagcagcagactgagagtgtccgccaccttctggcagaacccccggaaccacttcagatgccaggtgcagttctacggcctgagcgagaacgacgagtggacccaggacagagccaagcccgtgacccagatcgtgtctgccgaagcctggggcagagccgattgcggctttaccagcgagagctaccagcagggcgtgctgagcgccaccaacctgagcgtgatcggcttcagaatcctgctgctgaaagtggccggctttaacctgctgatgaccctgcggctgtggtccagcagggccaagcgatctggatctggagcaacaaacttctcactactcaaacaagcaggtgacgtggaggagaatcccgggcctactagcatggccttaccagtgaccgccttgctcctgccgctggccttgctgctccacgccgccaggccggacatcgtgatgacccagagccctgccaccctgtccgtgtctccaggcgaaagagccaccctgagctgcagagcttcccagagcgtgtccaacgacgtcgtgtggtatcagcagaagcccggccaggcccccagactgctgatctactacgccagcaacagatacaccggcatccccgccagattcagcggctctggcagcggcaccgagttcaccctgacaatcagcagcctccagagcgaggacttcgccgtgtactactgtcagcaggactacaccagcccctggaccttcggccagggcaccaagctggaaatcaagagaggcggaggcggaagtggaggcggaggatctggcggcggaggctctgaggtgcaactggtgcagagcggagccgaagtgaagaaacctggggccagcgtgcgggtgtcctgcaaggccagcggctacacctttaccaactacggcatgaactgggtgcgccaggctcctggacagggcctggaatggatgggctggatcaacacctacaccggcgagcccacctacgccgacgacttcaagggcagagtgaccatgaccaccgacaccagcacctccaccgcctacatggaactgcggagcctgagaagcgacgacaccgccgtgtattattgcgcccggatcggcgacagcagccccagcgattattggggccagggaaccctcgtgaccgtgtcctctacgcgtggacagcctaaggccaatcctaccgtgacactgttccctccaagcagcgaagaactccaggccaacaaggccacacttgtgtgcctgatctccgacttctaccctggggctgtgacagtggcttggaaggccgatggatctcctgtgaaagccggcgtggaaaccaccaagccatccaagcagagcaacaacaaatacgccgccagctcctacctgagcctgacacctgagcagtggaagtcccacagatcctacagctgccaagtgacccacgaaggcagcaccgtggaaaagacagtggcccctacagagtgcagccccatcaagaccgatgtgattacaatggaccccaaggacaactgctccaaggacgccaacgataccctgctgctccagctgaccaacaccagcgcctactacatgtacttgttgctgctgctgaagtccgtggtgtacttcgccatcatcacatgctgcctgctgcggagaaccgccttctgctgcaacggcgagaagtctcgcgccaagagaagcggatctggcgtgaagcagaccctgaatttcgacctgctgaagctggctggcgacgtggaatccaacccaggcccttctagaggccatatgaccgagtacaagcccacggtgcgcctcgccacccgcgacgacgtccccagggccgtacgcaccctcgccgccgcgttcgccgactaccccgccacgcgccacaccgtcgatccggaccgccacatcgagcgggtcaccgagctgcaagaactcttcctcacgcgcgtcgggctcgacatcggcaaggtgtgggtcgcggacgacggcgccgcggtggcggtctggaccacgccggagagcgtcgaagcgggggcggtgttcgccgagatcggcccgcgcatggccgagttgagcggttcccggctggccgcgcagcaacagatggaaggcctcctggcgccgcaccggcccaaggagcccgcgtggttcctggccaccgtcggcgtctcgcccgaccaccagggcaagggtctgggcagcgccgtcgtgctccccggagtggaggcggccgagcgcgccggggtgcccgccttcctggagacctccgcgccccgcaacctccccttctacgagcggctcggcttcaccgtcaccgccgacgtcgaggtgcccgaaggaccgcgcacctggtgcatgacccgcaagcccggtgcctga

SEQ ID NO: 35244 - DNA, 2694 bp, synthetic construct
  source 1..2694: mol_type = other DNA
atggccttaccagtgaccgccttgctcctgccgctggccttgctgctccacgccgccaggccgctcgagggacagcctaaggccaatcctaccgtgacactgttccctccaagcagcgaagaactccaggccaacaaggccacacttgtgtgcctgatctccgacttctaccctggggctgtgacagtggcttggaaggccgatggatctcctgtgaaagccggcgtggaaaccaccaagccatccaagcagagcaacaacaaatacgccgccagctcctacctgagcctgacacctgagcagtggaagtcccacagatcctacagctgccaagtgacccacgaaggcagcaccgtggaaaagacagtggcccctacagagtgcagccccatcaagaccgatgtgattacaatggaccccaaggacaactgctccaaggacgccaacgataccctgctgctccagctgaccaacaccagcgcctactacatgtacttgttgctgctgctgaagtccgtggtgtacttcgccatcatcacatgctgcctgctgcggagaaccgccttctgctgcaacggcgagaagtctagggccaagcgatctggatctggagcaacaaacttctcactactcaaacaagcaggtgacgtggaggagaatcccgggcctactagcatggccttaccagtgaccgccttgctcctgccgctggccttgctgctccacgccgccaggccggacatcgtgatgacccagagccctgccaccctgtccgtgtctccaggcgaaagagccaccctgagctgcagagcttcccagagcgtgtccaacgacgtcgtgtggtatcagcagaagcccggccaggcccccagactgctgatctactacgccagcaacagatacaccggcatccccgccagattcagcggctctggcagcggcaccgagttcaccctgacaatcagcagcctccagagcgaggacttcgccgtgtactactgtcagcaggactacaccagcccctggaccttcggccagggcaccaagctggaaatcaagagaggcggaggcggaagtggaggcggaggatctggcggcggaggctctgaggtgcaactggtgcagagcggagccgaagtgaagaaacctggggccagcgtgcgggtgtcctgcaaggccagcggctacacctttaccaactacggcatgaactgggtgcgccaggctcctggacagggcctggaatggatgggctggatcaacacctacaccggcgagcccacctacgccgacgacttcaagggcagagtgaccatgaccaccgacaccagcacctccaccgcctacatggaactgcggagcctgagaagcgacgacaccgccgtgtattattgcgcccggatcggcgacagcagccccagcgattattggggccagggaaccctcgtgaccgtgtcctctacgcgtgaggaggacctgaagaacgtgttcccacctgaggtggccgtgttcgagcctagcgaggccgagatcagccacacccagaaagccaccctcgtgtgcctggctaccggcttctaccccgaccatgtggaactgtcttggtgggtcaacggcaaagaggtgcacagcggcgtgtgtaccgacccccagccactgaaagaacagcccgccctgaacgacagccggtactgcctgagcagcagactgagagtgtccgccaccttctggcagaacccccggaaccacttcagatgccaggtgcagttctacggcctgagcgagaacgacgagtggacccaggacagagccaagcccgtgacccagatcgtgtctgccgaagcctggggcagagccgattgcggctttaccagcgagagctaccagcagggcgtgctgagcgccaccaacctgagcgtgatcggcttcagaatcctgctgctgaaagtggccggctttaacctgctgatgaccctgcggctgtggtccagccgcgccaagagaagcggatctggcgtgaagcagaccctgaatttcgacctgctgaagctggctggcgacgtggaatccaacccaggcccttctagaggccatatgaccgagtacaagcccacggtgcgcctcgccacccgcgacgacgtccccagggccgtacgcaccctcgccgccgcgttcgccgactaccccgccacgcgccacaccgtcgatccggaccgccacatcgagcgggtcaccgagctgcaagaactcttcctcacgcgcgtcgggctcgacatcggcaaggtgtgggtcgcggacgacggcgccgcggtggcggtctggaccacgccggagagcgtcgaagcgggggcggtgttcgccgagatcggcccgcgcatggccgagttgagcggttcccggctggccgcgcagcaacagatggaaggcctcctggcgccgcaccggcccaaggagcccgcgtggttcctggccaccgtcggcgtctcgcccgaccaccagggcaagggtctgggcagcgccgtcgtgctccccggagtggaggcggccgagcgcgccggggtgcccgccttcctggagacctccgcgccccgcaacctccccttctacgagcggctcggcttcaccgtcaccgccgacgtcgaggtgcccgaaggaccgcgcacctggtgcatgacccgcaagcccggtgcctga

SEQ ID NO: 35245 - DNA, 2685 bp, synthetic construct
  source 1..2685: mol_type = other DNA
atggccttaccagtgaccgccttgctcctgccgctggccttgctgctccacgccgccaggccgctcgaggaggcctctacaaagggaccctccgtgtttcctctggctcccagcagcaagtctacaagcggaggaacagccgctctgggctgcctggtcaaggattactttcccgagcctgtgaccgtgtcctggaatagcggagcactgacaagcggcgtgcacacctttccagccgtgctgcaaagcagcggcctgtactctctgagcagcgtggtcacagtgcctagctctagcctgggcacccagacctacatctgcaatgtgaaccacaagcctagcaacaccaaggtggacaagagagtggaacccaagagctgtcccatcaagaccgatgtgattacaatggaccccaaggacaactgctccaaggacgccaacgataccctgctgctccagctgaccaacaccagcgcctactacatgtacttgttgctgctgctgaagtccgtggtgtacttcgccatcatcacatgctgcctgctgcggagaaccgccttctgctgcaacggcgagaagtctagggccaagcgatctggatctggagcaacaaacttctcactactcaaacaagcaggtgacgtggaggagaatcccgggcctactagcatggccttaccagtgaccgccttgctcctgccgctggccttgctgctccacgccgccaggccggacatcgtgatgacccagagccctgccaccctgtccgtgtctccaggcgaaagagccaccctgagctgcagagcttcccagagcgtgtccaacgacgtcgtgtggtatcagcagaagcccggccaggcccccagactgctgatctactacgccagcaacagatacaccggcatccccgccagattcagcggctctggcagcggcaccgagttcaccctgacaatcagcagcctccagagcgaggacttcgccgtgtactactgtcagcaggactacaccagcccctggaccttcggccagggcaccaagctggaaatcaagagaggcggaggcggaagtggaggcggaggatctggcggcggaggctctgaggtgcaactggtgcagagcggagccgaagtgaagaaacctggggccagcgtgcgggtgtcctgcaaggccagcggctacacctttaccaactacggcatgaactgggtgcgccaggctcctggacagggcctggaatggatgggctggatcaacacctacaccggcgagcccacctacgccgacgacttcaagggcagagtgaccatgaccaccgacaccagcacctccaccgcctacatggaactgcggagcctgagaagcgacgacaccgccgtgtattattgcgcccggatcggcgacagcagccccagcgattattggggccagggaaccctcgtgaccgtgtcctctacgcgtggacagcctaaggccaatcctaccgtgacactgttccctccaagcagcgaagaactccaggccaacaaggccacacttgtgtgcctgatctccgacttctaccctggggctgtgacagtggcttggaaggccgatggatctcctgtgaaagccggcgtggaaaccaccaagccatccaagcagagcaacaacaaatacgccgccagctcctacctgagcctgacacctgagcagtggaagtcccacagatcctacagctgccaagtgacccacgaaggcagcaccgtggaaaagacagtggcccctacagagtgcagcgaagtgaaaaccgactccaccgaccacgtgaagcccaaagagacagagaacaccaagcagcccagcaagagctgccacaagcccaaggccatcgtgcacaccgagaaagtgaacatgatgagcctgaccgtgctgggcctgcggatgctgttcgccaaaaccgtggccgtgaacttcctgctgaccgccaagctgttcttcctccgcgccaagagaagcggatctggcgtgaagcagaccctgaatttcgacctgctgaagctggctggcgacgtggaatccaacccaggcccttctagaggccatatgaccgagtacaagcccacggtgcgcctcgccacccgcgacgacgtccccagggccgtacgcaccctcgccgccgcgttcgccgactaccccgccacgcgccacaccgtcgatccggaccgccacatcgagcgggtcaccgagctgcaagaactcttcctcacgcgcgtcgggctcgacatcggcaaggtgtgggtcgcggacgacggcgccgcggtggcggtctggaccacgccggagagcgtcgaagcgggggcggtgttcgccgagatcggcccgcgcatggccgagttgagcggttcccggctggccgcgcagcaacagatggaaggcctcctggcgccgcaccggcccaaggagcccgcgtggttcctggccaccgtcggcgtctcgcccgaccaccagggcaagggtctgggcagcgccgtcgtgctccccggagtggaggcggccgagcgcgccggggtgcccgccttcctggagacctccgcgccccgcaacctccccttctacgagcggctcggcttcaccgtcaccgccgacgtcgaggtgcccgaaggaccgcgcacctggtgcatgacccgcaagcccggtgcctga

SEQ ID NO: 35246 - DNA, 2619 bp, synthetic construct
  source 1..2619: mol_type = other DNA
atggccttaccagtgaccgccttgctcctgccgctggccttgctgctccacgccgccaggccgctcgaggaggcctctacaaagggaccctccgtgtttcctctggctcccagcagcaagtctacaagcggaggaacagccgctctgggctgcctggtcaaggattactttcccgagcctgtgaccgtgtcctggaatagcggagcactgacaagcggcgtgcacacctttccagccgtgctgcaaagcagcggcctgtactctctgagcagcgtggtcacagtgcctagctctagcctgggcacccagacctacatctgcaatgtgaaccacaagcctagcaacaccaaggtggacaagagagtggaacccaagagctgtggcagagccgattgcggctttaccagcgagagctaccagcagggcgtgctgagcgccaccatcctgtacgagatcctgctgggcaaggccaccctgtacgccgtgctggtgtctgccctggtgctgatggctatggtcaagcggaaggacagccggggaagggccaagcgatctggatctggagcaacaaacttctcactactcaaacaagcaggtgacgtggaggagaatcccgggcctactagcatggccttaccagtgaccgccttgctcctgccgctggccttgctgctccacgccgccaggccggacatcgtgatgacccagagccctgccaccctgtccgtgtctccaggcgaaagagccaccctgagctgcagagcttcccagagcgtgtccaacgacgtcgtgtggtatcagcagaagcccggccaggcccccagactgctgatctactacgccagcaacagatacaccggcatccccgccagattcagcggctctggcagcggcaccgagttcaccctgacaatcagcagcctccagagcgaggacttcgccgtgtactactgtcagcaggactacaccagcccctggaccttcggccagggcaccaagctggaaatcaagagaggcggaggcggaagtggaggcggaggatctggcggcggaggctctgaggtgcaactggtgcagagcggagccgaagtgaagaaacctggggccagcgtgcgggtgtcctgcaaggccagcggctacacctttaccaactacggcatgaactgggtgcgccaggctcctggacagggcctggaatggatgggctggatcaacacctacaccggcgagcccacctacgccgacgacttcaagggcagagtgaccatgaccaccgacaccagcacctccaccgcctacatggaactgcggagcctgagaagcgacgacaccgccgtgtattattgcgcccggatcggcgacagcagccccagcgattattggggccagggaaccctcgtgaccgtgtcctctacgcgtggacagcctaaggccaatcctaccgtgacactgttccctccaagcagcgaagaactccaggccaacaaggccacacttgtgtgcctgatctccgacttctaccctggggctgtgacagtggcttggaaggccgatggatctcctgtgaaagccggcgtggaaaccaccaagccatccaagcagagcaacaacaaatacgccgccagctcctacctgagcctgacacctgagcagtggaagtcccacagatcctacagctgccaagtgacccacgaaggcagcaccgtggaaaagacagtggcccctacagagtgcagcatccccgaggacacattcttcccaagccccgagagcagctgcgacgtgaagctggtggaaaagagcttcgagacagacaccaacctgaacttccagaacctgagcgtgatcggcttcagaatcctgctgctgaaagtggccggctttaacctgctgatgaccctgcggctgtggtccagccgcgccaagagaagcggatctggcgtgaagcagaccctgaatttcgacctgctgaagctggctggcgacgtggaatccaacccaggcccttctagaggccatatgaccgagtacaagcccacggtgcgcctcgccacccgcgacgacgtccccagggccgtacgcaccctcgccgccgcgttcgccgactaccccgccacgcgccacaccgtcgatccggaccgccacatcgagcgggtcaccgagctgcaagaactcttcctcacgcgcgtcgggctcgacatcggcaaggtgtgggtcgcggacgacggcgccgcggtggcggtctggaccacgccggagagcgtcgaagcgggggcggtgttcgccgagatcggcccgcgcatggccgagttgagcggttcccggctggccgcgcagcaacagatggaaggcctcctggcgccgcaccggcccaaggagcccgcgtggttcctggccaccgtcggcgtctcgcccgaccaccagggcaagggtctgggcagcgccgtcgtgctccccggagtggaggcggccgagcgcgccggggtgcccgccttcctggagacctccgcgccccgcaacctccccttctacgagcggctcggcttcaccgtcaccgccgacgtcgaggtgcccgaaggaccgcgcacctggtgcatgacccgcaagcccggtgcctga

SEQ ID NO: 35247 - DNA, 2619 bp, synthetic construct
  source 1..2619: mol_type = other DNA
atggccttaccagtgaccgccttgctcctgccgctggccttgctgctccacgccgccaggccgctcgaggaggcctctacaaagggaccctccgtgtttcctctggctcccagcagcaagtctacaagcggaggaacagccgctctgggctgcctggtcaaggattactttcccgagcctgtgaccgtgtcctggaatagcggagcactgacaagcggcgtgcacacctttccagccgtgctgcaaagcagcggcctgtactctctgagcagcgtggtcacagtgcctagctctagcctgggcacccagacctacatctgcaatgtgaaccacaagcctagcaacaccaaggtggacaagagagtggaacccaagagctgtatccccgaggacacattcttcccaagccccgagagcagctgcgacgtgaagctggtggaaaagagcttcgagacagacaccaacctgaacttccagaacctgagcgtgatcggcttcagaatcctgctgctgaaagtggccggctttaacctgctgatgaccctgcggctgtggtccagcagggccaagcgatctggatctggagcaacaaacttctcactactcaaacaagcaggtgacgtggaggagaatcccgggcctactagcatggccttaccagtgaccgccttgctcctgccgctggccttgctgctccacgccgccaggccggacatcgtgatgacccagagccctgccaccctgtccgtgtctccaggcgaaagagccaccctgagctgcagagcttcccagagcgtgtccaacgacgtcgtgtggtatcagcagaagcccggccaggcccccagactgctgatctactacgccagcaacagatacaccggcatccccgccagattcagcggctctggcagcggcaccgagttcaccctgacaatcagcagcctccagagcgaggacttcgccgtgtactactgtcagcaggactacaccagcccctggaccttcggccagggcaccaagctggaaatcaagagaggcggaggcggaagtggaggcggaggatctggcggcggaggctctgaggtgcaactggtgcagagcggagccgaagtgaagaaacctggggccagcgtgcgggtgtcctgcaaggccagcggctacacctttaccaactacggcatgaactgggtgcgccaggctcctggacagggcctggaatggatgggctggatcaacacctacaccggcgagcccacctacgccgacgacttcaagggcagagtgaccatgaccaccgacaccagcacctccaccgcctacatggaactgcggagcctgagaagcgacgacaccgccgtgtattattgcgcccggatcggcgacagcagccccagcgattattggggccagggaaccctcgtgaccgtgtcctctacgcgtggacagcctaaggccaatcctaccgtgacactgttccctccaagcagcgaagaactccaggccaacaaggccacacttgtgtgcctgatctccgacttctaccctggggctgtgacagtggcttggaaggccgatggatctcctgtgaaagccggcgtggaaaccaccaagccatccaagcagagcaacaacaaatacgccgccagctcctacctgagcctgacacctgagcagtggaagtcccacagatcctacagctgccaagtgacccacgaaggcagcaccgtggaaaagacagtggcccctacagagtgcagcggcagagccgattgcggctttaccagcgagagctaccagcagggcgtgctgagcgccaccatcctgtacgagatcctgctgggcaaggccaccctgtacgccgtgctggtgtctgccctggtgctgatggctatggtcaagcggaaggacagccggggacgcgccaagagaagcggatctggcgtgaagcagaccctgaatttcgacctgctgaagctggctggcgacgtggaatccaacccaggcccttctagaggccatatgaccgagtacaagcccacggtgcgcctcgccacccgcgacgacgtccccagggccgtacgcaccctcgccgccgcgttcgccgactaccccgccacgcgccacaccgtcgatccggaccgccacatcgagcgggtcaccgagctgcaagaactcttcctcacgcgcgtcgggctcgacatcggcaaggtgtgggtcgcggacgacggcgccgcggtggcggtctggaccacgccggagagcgtcgaagcgggggcggtgttcgccgagatcggcccgcgcatggccgagttgagcggttcccggctggccgcgcagcaacagatggaaggcctcctggcgccgcaccggcccaaggagcccgcgtggttcctggccaccgtcggcgtctcgcccgaccaccagggcaagggtctgggcagcgccgtcgtgctccccggagtggaggcggccgagcgcgccggggtgcccgccttcctggagacctccgcgccccgcaacctccccttctacgagcggctcggcttcaccgtcaccgccgacgtcgaggtgcccgaaggaccgcgcacctggtgcatgacccgcaagcccggtgcctga

SEQ ID NO: 35248 - DNA, 1857 bp, synthetic construct
  source 1..1857: mol_type = other DNA
atggccttaccagtgaccgccttgctcctgccgctggccttgctgctccacgccgccaggccggacatcgtgatgacccagagccctgccaccctgtccgtgtctccaggcgaaagagccaccctgagctgcagagcttcccagagcgtgtccaacgacgtcgtgtggtatcagcagaagcccggccaggcccccagactgctgatctactacgccagcaacagatacaccggcatccccgccagattcagcggctctggcagcggcaccgagttcaccctgacaatcagcagcctccagagcgaggacttcgccgtgtactactgtcagcaggactacaccagcccctggaccttcggccagggcaccaagctggaaatcaagagactcgaggacctgaagaacgtgttcccacctgaggtggccgtgttcgagcctagcgaggccgagatcagccacacccagaaagccaccctcgtgtgcctggctaccggcttctaccccgaccatgtggaactgtcttggtgggtcaacggcaaagaggtgcacagcggcgtgtgtaccgacccccagccactgaaagaacagcccgccctgaacgacagccggtactgcctgagcagcagactgagagtgtccgccaccttctggcagaacccccggaaccacttcagatgccaggtgcagttctacggcctgagcgagaacgacgagtggacccaggacagagccaagcccgtgacccagatcgtgtctgccgaagcctggggcagagccgatagcggctttaccagcgagagctaccagcagggcgtgctgagcgccaccatcctgtacgagatcctgctgggcaaggccaccctgtacgccgtgctggtgtctgccctggtgctgatggctatggtcaagcggaaggacagccggggaagggccaagcgatctggatctggagcaacaaacttctcactactcaaacaagcaggtgacgtggaggagaatcccgggcctactagtatggactggatttggcgcatccttttccttgtcggcgctgctaccggcgcgcattccttcgaagaggtgcaactggtgcagagcggagccgaagtgaagaaacctggggccagcgtgcgggtgtcctgcaaggccagcggctacacctttaccaactacggcatgaactgggtgcgccaggctcctggacagggcctggaatggatgggctggatcaacacctacaccggcgagcccacctacgccgacgacttcaagggcagagtgaccatgaccaccgacaccagcacctccaccgcctacatggaactgcggagcctgagaagcgacgacaccgccgtgtattattgcgcccggatcggcgacagcagccccagcgattattggggccagggaaccctcgtgaccgtgtcctctacgcgtatccagaaccctgatcctgccgtgtaccagctgcgggatagcaagagcagcgacaagagcgtgtgtctgttcaccgacttcgacagccagaccaacgtgtcccagagcaaggactccgacgtgtacatcaccgataagtgcgtgctggacatgcggagcatggacttcaagagcaactccgccgtggcctggtccaacaagtccgatttcgcctgcgccaacgccttcaacaacagcattatccccgaggacacattcttcccaagccccgagagcagcagcgacgtgaagctggtggaaaagagcttcgagacagacaccaacctgaacttccagaacctgagcgtgatcggcttcagaatcctgctgctgaaagtggccggctttaacctgctgatgaccctgcggctgtggtccagc

SEQ ID NO: 35249 - DNA, 2697 bp, synthetic construct
  source 1..2697: mol_type = other DNA
atggccttaccagtgaccgccttgctcctgccgctggccttgctgctccacgccgccaggccggaggttcagctgcttgagtctggcggaggactggttcaacctggcggaagcctgagactgtcttgtgccgcctctggcagaaccttcagcatgggctggtatagacaggcccctggcaagggcctcgaatttgtgtctgccatcacatacagcggcggcagcccttactacgccgattctgtgaagggcagattcaccatcagccgggacaacagcaagaacaccgtgtacctccagatgaacagcctgagagccgaggacaccgccgtgtactactgtgccgccaatccaacctacggcagcgactggaatgccgagaattggggccagggcacactggtcacagtgtctagtggtaccggcggaggcggatctggcggcggaggtagcggtggcggaggatctgaattcgacatcgtgatgacccagagccctgccaccctgtccgtgtctccaggcgaaagagccaccctgagctgcagagcttcccagagcgtgtccaacgacgtcgtgtggtatcagcagaagcccggccaggcccccagactgctgatctactacgccagcaacagatacaccggcatccccgccagattcagcggctctggcagcggcaccgagttcaccctgacaatcagcagcctccagagcgaggacttcgccgtgtactactgtcagcaggactacaccagcccctggaccttcggccagggcaccaagctggaaatcaagagactcgagatccagaaccctgatcctgccgtgtaccagctgcgggatagcaagagcagcgacaagagcgtgtgtctgttcaccgacttcgacagccagaccaacgtgtcccagagcaaggactccgacgtgtacatcaccgataagtgcgtgctggacatgcggagcatggacttcaagagcaactccgccgtggcctggtccaacaagtccgatttcgcctgcgccaacgccttcaacaacagcattatccccgaggacacattcttcccaagcagcgacgtgccctgcgacgtgaagctggtggaaaagagcttcgagacagacaccaacctgaacttccagaacctgagcgtgatcggcttcagaatcctgctgctgaaagtggccggctttaacctgctgatgaccctgcggctgtggtccagccgcgccaagagaagcggatctggcgtgaagcagaccctgaatttcgacctgctgaagctggctggcgacgtggaatccaacccaggccctactagtaccatggactggatttggcgcatccttttccttgtcggcgctgctaccggcacccattccgggcccgaagtgcaactggttgaatccggtggcggcctggtgcaacccggcggatctctcagacttagctgtgccgcctccggcagaaccttcacaatgggatggtacaggcaggctccagggaaagagagagagttcgtcgccgccatctctctgtctcccacactggcctactacgccgactctgtgaaaggccggttcaccatctccagagataatagcaagaacaccgtggtgctgcaaatgaactctctgagagccgaggatacagccctgtactattgtgccgctgaccggaagtccgtgatgagcatcagacccgattactggggacagggcacactggtcacagtgtctagtggatccggcggcggaggatctggcggaggcggatctgggggcggaggctctttcgaagaggtgcaactggtgcagagcggagccgaagtgaagaaacctggggccagcgtgcgggtgtcctgcaaggccagcggctacacctttaccaactacggcatgaactgggtgcgccaggctcctggacagggcctggaatggatgggctggatcaacacctacaccggcgagcccacctacgccgacgacttcaagggcagagtgaccatgaccaccgacaccagcacctccaccgcctacatggaactgcggagcctgagaagcgacgacaccgccgtgtattattgcgcccggatcggcgacagcagccccagcgattattggggccagggaaccctcgtgaccgtgtcctctacgcgtgaggacctgaagaacgtgttcccacctgaggtggccgtgttcgagcctagcaaggccgagatcgcccacacccagaaagccaccctcgtgtgcctggctaccggcttctaccccgaccatgtggaactgtcttggtgggtcaacggcaaagaggtgcacagcggcgtgtgtaccgacccccagccactgaaagaacagcccgccctgaacgacagccggtactgcctgagcagcagactgagagtgtccgccaccttctggcagaacccccggaaccacttcagatgccaggtgcagttctacggcctgagcgagaacgacgagtggacccaggacagagccaagcccgtgacccagatcgtgtctgccgaagcctggggcagagccgattgcggcatcaccagcgccagctaccaccagggcgtgctgagcgccaccatcctgtacgagatcctgctgggcaaggccaccctgtacgccgtgctggtgtctgccctggtgctgatggctatggtcaagcggaaggacagccggggataa

SEQ ID NO: 35250 - DNA, 2697 bp, synthetic construct
  source 1..2697: mol_type = other DNA
atggccttaccagtgaccgccttgctcctgccgctggccttgctgctccacgccgccaggccggaagtgcagctggttgaatctggcggaggactggttcaggctggcggatctctgagactgtcttgtgccgccagcggcagaacctttagcatgggctggtttagacaggcccctggcaaagagagagagttcgtcgccgccatcacatactctggcggcagcccttactacgccgactctgtgaagggcagattcaccatcagccgggacaacgccaagaacaccgtgtacctccagatgaacagcctgaagcctgaggacaccgccgtgtactactgcgccgccaatccaacatacggcagcgactggaacgccgagaattggggccagggaacccaagtgacagtgtctagcggtaccggcggaggcggatctggcggcggaggtagcggtggcggaggatctgaattcgacatcgtgatgacccagagccctgccaccctgtccgtgtctccaggcgaaagagccaccctgagctgcagagcttcccagagcgtgtccaacgacgtcgtgtggtatcagcagaagcccggccaggcccccagactgctgatctactacgccagcaacagatacaccggcatccccgccagattcagcggctctggcagcggcaccgagttcaccctgacaatcagcagcctccagagcgaggacttcgccgtgtactactgtcagcaggactacaccagcccctggaccttcggccagggcaccaagctggaaatcaagagactcgagatccagaaccctgatcctgccgtgtaccagctgcgggatagcaagagcagcgacaagagcgtgtgtctgttcaccgacttcgacagccagaccaacgtgtcccagagcaaggactccgacgtgtacatcaccgataagtgcgtgctggacatgcggagcatggacttcaagagcaactccgccgtggcctggtccaacaagtccgatttcgcctgcgccaacgccttcaacaacagcattatccccgaggacacattcttcccaagcagcgacgtgccctgcgacgtgaagctggtggaaaagagcttcgagacagacaccaacctgaacttccagaacctgagcgtgatcggcttcagaatcctgctgctgaaagtggccggctttaacctgctgatgaccctgcggctgtggtccagccgcgccaagagaagcggatctggcgtgaagcagaccctgaatttcgacctgctgaagctggctggcgacgtggaatccaacccaggccctactagtaccatggactggatttggcgcatccttttccttgtcggcgctgctaccggcgcccattccgggcccgaagtgcaactggttgaatccggtggcggcctggtgcaacccggcggatctctcagacttagctgtgccgcctccggcagaaccttcacaatgggatggtacaggcaggctccagggaaagagagagagttcgtcgccgccatctctctgtctcccacactggcctactacgccgactctgtgaaaggccggttcaccatctccagagataatagcaagaacaccgtggtgctgcaaatgaactctctgagagccgaggatacagccctgtactattgtgccgctgaccggaagtccgtgatgagcatcagacccgattactggggacagggcacactggtcacagtgtctagtggatccggcggcggaggatctggcggaggcggatctgggggcggaggctctttcgaagaggtgcaactggtgcagagcggagccgaagtgaagaaacctggggccagcgtgcgggtgtcctgcaaggccagcggctacacctttaccaactacggcatgaactgggtgcgccaggctcctggacagggcctggaatggatgggctggatcaacacctacaccggcgagcccacctacgccgacgacttcaagggcagagtgaccatgaccaccgacaccagcacctccaccgcctacatggaactgcggagcctgagaagcgacgacaccgccgtgtattattgcgcccggatcggcgacagcagccccagcgattattggggccagggaaccctcgtgaccgtgtcctctacgcgtgaggacctgaagaacgtgttcccacctgaggtggccgtgttcgagcctagcaaggccgagatcgcccacacccagaaagccaccctcgtgtgcctggctaccggcttctaccccgaccatgtggaactgtcttggtgggtcaacggcaaagaggtgcacagcggcgtgtgtaccgacccccagccactgaaagaacagcccgccctgaacgacagccggtactgcctgagcagcagactgagagtgtccgccaccttctggcagaacccccggaaccacttcagatgccaggtgcagttctacggcctgagcgagaacgacgagtggacccaggacagagccaagcccgtgacccagatcgtgtctgccgaagcctggggcagagccgattgcggcatcaccagcgccagctaccaccagggcgtgctgagcgccaccatcctgtacgagatcctgctgggcaaggccaccctgtacgccgtgctggtgtctgccctggtgctgatggctatggtcaagcggaaggacagccggggataa

SEQ ID NO: 35251 - DNA, 2688 bp, synthetic construct
  source 1..2688: mol_type = other DNA
atggccttaccagtgaccgccttgctcctgccgctggccttgctgctccacgccgccaggccggaagtgcagctggttgaatctggcggaggactggttcaggctggcggatctctgagactgtcttgtgccgccagcggcagaacctttagcatgggctggtttagacaggcccctggcaaagagagagagttcgtcgccgccatcacatactctggcggcagcccttactacgccgactctgtgaagggcagattcaccatcagccgggacaacgccaagaacaccgtgtacctccagatgaacagcctgaagcctgaggacaccgccgtgtactactgcgccgccaatccaacatacggcagcgactggaacgccgagaattggggccagggaacccaagtgacagtgtctagcggtaccggcggaggcggatctggcggcggaggtagcggtggcggaggatctgaattcgacatcgtgatgacccagagccctgccaccctgtccgtgtctccaggcgaaagagccaccctgagctgcagagcttcccagagcgtgtccaacgacgtcgtgtggtatcagcagaagcccggccaggcccccagactgctgatctactacgccagcaacagatacaccggcatccccgccagattcagcggctctggcagcggcaccgagttcaccctgacaatcagcagcctccagagcgaggacttcgccgtgtactactgtcagcaggactacaccagcccctggaccttcggccagggcaccaagctggaaatcaagagactcgaggacctgaagaacgtgttcccacctgaggtggccgtgttcgagcctagcgaggccgagatcagccacacccagaaagccaccctcgtgtgcctggctaccggcttctaccccgaccatgtggaactgtcttggtgggtcaacggcaaagaggtgcacagcggcgtgtgtaccgacccccagccactgaaagaacagcccgccctgaacgacagccggtactgcctgagcagcagactgagagtgtccgccaccttctggcagaacccccggaaccacttcagatgccaggtgcagttctacggcctgagcgagaacgacgagtggacccaggacagagccaagcccgtgacccagatcgtgtctgccgaagcctggggcagagccgattgcggctttaccagcgagagctaccagcagggcgtgctgagcgccaccatcctgtacgagatcctgctgggcaaggccaccctgtacgccgtgctggtgtctgccctggtgctgatggctatggtcaagcggaaggacagccggggaagggccaagcgatctggatctggagcaacaaacttctcactactcaaacaagcaggtgacgtggaggagaatcccgggcctactagtgccaccatggactggatttggcgcatccttttccttgtcggcgctgctaccggcgcccattccgggcccgaagtgcaactggttgaatccggtggcggcctggtgcaagcaggcggatctctcagacttagctgtgccgcctccggcagaaccttcacaatgggatggtttaggcaggctccagggaaagagagagagttcgtcgccgccatctctctgtctcccacactggcctactacgccgactctgtgaaaggccggttcaccatctccagagataatgccaagaacaccgtggtgctgcaaatgaactctctgaaacccgaggatacagccctgtactattgtgccgctgaccggaagtccgtgatgagcatcagacccgattactggggacagggcacacaagtcacagtgtcctctggatccggcggcggaggatctggcggaggcggatctgggggcggaggctctttcgaagaggtgcaactggtgcagagcggagccgaagtgaagaaacctggggccagcgtgcgggtgtcctgcaaggccagcggctacacctttaccaactacggcatgaactgggtgcgccaggctcctggacagggcctggaatggatgggctggatcaacacctacaccggcgagcccacctacgccgacgacttcaagggcagagtgaccatgaccaccgacaccagcacctccaccgcctacatggaactgcggagcctgagaagcgacgacaccgccgtgtattattgcgcccggatcggcgacagcagccccagcgattattggggccagggaaccctcgtgaccgtgtcctctacgcgtatccagaaccctgatcctgccgtgtaccagctgcgggatagcaagagcagcgacaagagcgtgtgtctgttcaccgacttcgacagccagaccaacgtgtcccagagcaaggactccgacgtgtacatcaccgataagtgcgtgctggacatgcggagcatggacttcaagagcaactccgccgtggcctggtccaacaagtccgatttcgcctgcgccaacgccttcaacaacagcattatccccgaggacacattcttcccaagccccgagagcagctgcgacgtgaagctggtggaaaagagcttcgagacagacaccaacctgaacttccagaacctgagcgtgatcggcttcagaatcctgctgctgaaagtggccggctttaacctgctgatgaccctgcggctgtggtccagctaa

SEQ ID NO: 35252 - DNA, 2301 bp, synthetic construct
  source 1..2301: mol_type = other DNA
atggccttaccagtgaccgccttgctcctgccgctggccttgctgctccacgccgccaggccggaagtgcagctggttgaatctggcggaggactggttcagcctggcggatctctgagactgagctgtgaagccagcggcttcgccagcgacgattacatcatcggctggttcagacaggcccctggcaaagagagagagggcgtcagctgcatcagctctaagtacgccaacaccgtgtacaccgacagcgtgaagggcagattcagactgagcagaggcaccgccaagaataccgtgtacctccagatgagcgccctgaagcctgaggataccgccgtgtactactgcgctatggacagccgcagagtgacatgccctgagatcagcaccatgcaccggaacttcgattcttggggccagggcacactggtcacagtgtcatctggtaccggcggaggcggatctggcggcggaggtagcggtggcggaggatctgaattcgacatcgtgatgacccagagccctgccaccctgtccgtgtctccaggcgaaagagccaccctgagctgcagagcttcccagagcgtgtccaacgacgtcgtgtggtatcagcagaagcccggccaggcccccagactgctgatctactacgccagcaacagatacaccggcatccccgccagattcagcggctctggcagcggcaccgagttcaccctgacaatcagcagcctccagagcgaggacttcgccgtgtactactgtcagcaggactacaccagcccctggaccttcggccagggcaccaagctggaaatcaagagactcgaggacctgaagaacgtgttcccacctgaggtggccgtgttcgagcctagcaaggccgagatcgcccacacccagaaagccaccctcgtgtgcctggctaccggcttctaccccgaccatgtggaactgtcttggtgggtcaacggcaaagaggtgcacagcggcgtgtgtaccgacccccagccactgaaagaacagcccgccctgaacgacagccggtactgcctgagcagcagactgagagtgtccgccaccttctggcagaacccccggaaccacttcagatgccaggtgcagttctacggcctgagcgagaacgacgagtggacccaggacagagccaagcccgtgacccagatcgtgtctgccgaagcctggggcagagccgattgcggcatcaccagcgccagctaccaccagggcgtgctgagcgccaccatcctgtacgagatcctgctgggcaaggccaccctgtacgccgtgctggtgtctgccctggtgctgatggctatggtcaagcggaaggacagccggggaagggccaagcgatctggatctggagcaacaaacttctcactactcaaacaagcaggtgacgtggaggagaatcccgggcctactagtatggactggatttggcgcatccttttccttgtcggcgctgctaccggcgcgcattccttcgaagaggtgcaactggtgcagagcggagccgaagtgaagaaacctggggccagcgtgcgggtgtcctgcaaggccagcggctacacctttaccaactacggcatgaactgggtgcgccaggctcctggacagggcctggaatggatgggctggatcaacacctacaccggcgagcccacctacgccgacgacttcaagggcagagtgaccatgaccaccgacaccagcacctccaccgcctacatggaactgcggagcctgagaagcgacgacaccgccgtgtattattgcgcccggatcggcgacagcagccccagcgattattggggccagggaaccctcgtgaccgtgtcctctacgcgtatccagaaccctgatcctgccgtgtaccagctgcgggatagcaagagcagcgacaagagcgtgtgtctgttcaccgacttcgacagccagaccaacgtgtcccagagcaaggactccgacgtgtacatcaccgataagtgcgtgctggacatgcggagcatggacttcaagagcaactccgccgtggcctggtccaacaagtccgatttcgcctgcgccaacgccttcaacaacagcattatccccgaggacacattcttcccaagcagcgacgtgccctgcgacgtgaagctggtggaaaagagcttcgagacagacaccaacctgaacttccagaacctgagcgtgatcggcttcagaatcctgctgctgaaagtggccggctttaacctgctgatgaccctgcggctgtggtccagctaa

SEQ ID NO: 35253 - DNA, 2274 bp, synthetic construct
  source 1..2274: mol_type = other DNA
atggccttaccagtgaccgccttgctcctgccgctggccttgctgctccacgccgccaggccggacatcgtgatgacccagagccctgccaccctgtccgtgtctccaggcgaaagagccaccctgagctgcagagcttcccagagcgtgtccaacgacgtcgtgtggtatcagcagaagcccggccaggcccccagactgctgatctactacgccagcaacagatacaccggcatccccgccagattcagcggctctggcagcggcaccgagttcaccctgacaatcagcagcctccagagcgaggacttcgccgtgtactactgtcagcaggactacaccagcccctggaccttcggccagggcaccaagctggaaatcaagagactcgaggacctgaagaacgtgttcccacctgaggtggccgtgttcgagcctagcgaggccgagatcagccacacccagaaagccaccctcgtgtgcctggctaccggcttctaccccgaccatgtggaactgtcttggtgggtcaacggcaaagaggtgcacagcggcgtgtgtaccgacccccagccactgaaagaacagcccgccctgaacgacagccggtactgcctgagcagcagactgagagtgtccgccaccttctggcagaacccccggaaccacttcagatgccaggtgcagttctacggcctgagcgagaacgacgagtggacccaggacagagccaagcccgtgacccagatcgtgtctgccgaagcctggggcagagccgattgcggctttaccagcgagagctaccagcagggcgtgctgagcgccaccatcctgtacgagatcctgctgggcaaggccaccctgtacgccgtgctggtgtctgccctggtgctgatggctatggtcaagcggaaggacagccggggaagggccaagcgatctggatctggagcaacaaacttctcactactcaaacaagcaggtgacgtggaggagaatcccgggcctactagtaccatggactggatttggcgcatccttttccttgtcggcgctgctaccggcgcccattccgggcccgaagtgcaactggttgaatccggtggcggcctggtgcaacccggcggatctctcagacttagctgtgccgcctccggcagaaccttcacaatgggatggtacaggcaggctccagggaaagagagagagttcgtcgccgccatctctctgtctcccacactggcctactacgccgactctgtgaaaggccggttcaccatctccagagataatagcaagaacaccgtggtgctgcaaatgaactctctgagagccgaggatacagccctgtactattgtgccgctgaccggaagtccgtgatgagcatcagacccgattactggggacagggcacactggtcacagtgtctagtggatccggcggcggaggatctggcggaggcggatctgggggcggaggctctttcgaagaggtgcaactggtgcagagcggagccgaagtgaagaaacctggggccagcgtgcgggtgtcctgcaaggccagcggctacacctttaccaactacggcatgaactgggtgcgccaggctcctggacagggcctggaatggatgggctggatcaacacctacaccggcgagcccacctacgccgacgacttcaagggcagagtgaccatgaccaccgacaccagcacctccaccgcctacatggaactgcggagcctgagaagcgacgacaccgccgtgtattattgcgcccggatcggcgacagcagccccagcgattattggggccagggaaccctcgtgaccgtgtcctctacgcgtatccagaaccctgatcctgccgtgtaccagctgcgggatagcaagagcagcgacaagagcgtgtgtctgttcaccgacttcgacagccagaccaacgtgtcccagagcaaggactccgacgtgtacatcaccgataagtgcgtgctggacatgcggagcatggacttcaagagcaactccgccgtggcctggtccaacaagtccgatttcgcctgcgccaacgccttcaacaacagcattatccccgaggacacattcttcccaagccccgagagcagctgcgacgtgaagctggtggaaaagagcttcgagacagacaccaacctgaacttccagaacctgagcgtgatcggcttcagaatcctgctgctgaaagtggccggctttaacctgctgatgaccctgcggctgtggtccagctaa

SEQ ID NO: 35254 - DNA, 2292 bp, synthetic construct
  source 1..2292: mol_type = other DNA
atggccttaccagtgaccgccttgctcctgccgctggccttgctgctccacgccgccaggccggacatcgtgatgacccagagccctgccaccctgtccgtgtctccaggcgaaagagccaccctgagctgcagagcttcccagagcgtgtccaacgacgtcgtgtggtatcagcagaagcccggccaggcccccagactgctgatctactacgccagcaacagatacaccggcatccccgccagattcagcggctctggcagcggcaccgagttcaccctgacaatcagcagcctccagagcgaggacttcgccgtgtactactgtcagcaggactacaccagcccctggaccttcggccagggcaccaagctggaaatcaagagactcgaggacctgaagaacgtgttcccacctgaggtggccgtgttcgagcctagcgaggccgagatcagccacacccagaaagccaccctcgtgtgcctggctaccggcttctaccccgaccatgtggaactgtcttggtgggtcaacggcaaagaggtgcacagcggcgtgtgtaccgacccccagccactgaaagaacagcccgccctgaacgacagccggtactgcctgagcagcagactgagagtgtccgccaccttctggcagaacccccggaaccacttcagatgccaggtgcagttctacggcctgagcgagaacgacgagtggacccaggacagagccaagcccgtgacccagatcgtgtctgccgaagcctggggcagagccgattgcggctttaccagcgagagctaccagcagggcgtgctgagcgccaccatcctgtacgagatcctgctgggcaaggccaccctgtacgccgtgctggtgtctgccctggtgctgatggctatggtcaagcggaaggacagccggggaagggccaagcgatctggatctggagcaacaaacttctcactactcaaacaagcaggtgacgtggaggagaatcccgggcctactagtaccatggactggatttggcgcatccttttccttgtcggcgctgctaccggcgcccattccgggccccaggtgcagctggttgaatctggcggaggactggttcagcctggcggatctctgagactgtcttgtgccgccagcggcaacatcaacagcagaaactgcatgggctggttcagacaggcccctggcaagggaagagaaggcgtggcagctatcggccaagtgaccggcagaacctactacgtggacagcgtgaagggcagattcaccatcagcctggacaacagcaagaacaccctgtacctccagatgaacagcctgagagccgaggacaccgccgtgtactattgtgctgctgcccctggctgtctgctgtctgcacttagaagcgccgactacagaaactggggccagggcacactggtcaccgtttcttctggatccggcggcggaggatctggcggaggcggatctgggggcggaggctctttcgaagaggtgcaactggtgcagagcggagccgaagtgaagaaacctggggccagcgtgcgggtgtcctgcaaggccagcggctacacctttaccaactacggcatgaactgggtgcgccaggctcctggacagggcctggaatggatgggctggatcaacacctacaccggcgagcccacctacgccgacgacttcaagggcagagtgaccatgaccaccgacaccagcacctccaccgcctacatggaactgcggagcctgagaagcgacgacaccgccgtgtattattgcgcccggatcggcgacagcagccccagcgattattggggccagggaaccctcgtgaccgtgtcctctacgcgtatccagaaccctgatcctgccgtgtaccagctgcgggatagcaagagcagcgacaagagcgtgtgtctgttcaccgacttcgacagccagaccaacgtgtcccagagcaaggactccgacgtgtacatcaccgataagtgcgtgctggacatgcggagcatggacttcaagagcaactccgccgtggcctggtccaacaagtccgatttcgcctgcgccaacgccttcaacaacagcattatccccgaggacacattcttcccaagccccgagagcagctgcgacgtgaagctggtggaaaagagcttcgagacagacaccaacctgaacttccagaacctgagcgtgatcggcttcagaatcctgctgctgaaagtggccggctttaacctgctgatgaccctgcggctgtggtccagc

SEQ ID NO: 35255 - DNA, 2295 bp, synthetic construct
  source 1..2295: mol_type = other DNA
atggccttaccagtgaccgccttgctcctgccgctggccttgctgctccacgccgccaggccggacatcgtgatgacccagagccctgccaccctgtccgtgtctccaggcgaaagagccaccctgagctgcagagcttcccagagcgtgtccaacgacgtcgtgtggtatcagcagaagcccggccaggcccccagactgctgatctactacgccagcaacagatacaccggcatccccgccagattcagcggctctggcagcggcaccgagttcaccctgacaatcagcagcctccagagcgaggacttcgccgtgtactactgtcagcaggactacaccagcccctggaccttcggccagggcaccaagctggaaatcaagagactcgaggacctgaagaacgtgttcccacctgaggtggccgtgttcgagcctagcgaggccgagatcagccacacccagaaagccaccctcgtgtgcctggctaccggcttctaccccgaccatgtggaactgtcttggtgggtcaacggcaaagaggtgcacagcggcgtgtgtaccgacccccagccactgaaagaacagcccgccctgaacgacagccggtactgcctgagcagcagactgagagtgtccgccaccttctggcagaacccccggaaccacttcagatgccaggtgcagttctacggcctgagcgagaacgacgagtggacccaggacagagccaagcccgtgacccagatcgtgtctgccgaagcctggggcagagccgattgcggctttaccagcgagagctaccagcagggcgtgctgagcgccaccatcctgtacgagatcctgctgggcaaggccaccctgtacgccgtgctggtgtctgccctggtgctgatggctatggtcaagcggaaggacagccggggaagggccaagcgatctggatctggagcaacaaacttctcactactcaaacaagcaggtgacgtggaggagaatcccgggcctactagtaccatggactggatttggcgcatccttttccttgtcggcgctgctaccggcgcccattccgggccccaggtgcagctggttgaatctggcggaggatctgttcaggctggcggctctctgagactgtcttgtggcgcttccggcaacatcagcagcagaaactgcatgggctggttcagacaggcccctggcaaagagagagaaggcgttgccgccatcggacaagtgaccggcagatcctactacgtggacagcgtgaagggcagattcaccatcagcctggacaacgccaagaacaccctgtacctccagatgaacacactgaagcccgaggacaccgccatgtactactgtgctgctgcccctggctgtctgctgtctgcacttagaagcgccgactacagaaactggggccagggaacccaagtgacagtgtctagtggatccggcggcggaggatctggcggaggcggatctgggggcggaggctctttcgaagaggtgcaactggtgcagagcggagccgaagtgaagaaacctggggccagcgtgcgggtgtcctgcaaggccagcggctacacctttaccaactacggcatgaactgggtgcgccaggctcctggacagggcctggaatggatgggctggatcaacacctacaccggcgagcccacctacgccgacgacttcaagggcagagtgaccatgaccaccgacaccagcacctccaccgcctacatggaactgcggagcctgagaagcgacgacaccgccgtgtattattgcgcccggatcggcgacagcagccccagcgattattggggccagggaaccctcgtgaccgtgtcctctacgcgtatccagaaccctgatcctgccgtgtaccagctgcgggatagcaagagcagcgacaagagcgtgtgtctgttcaccgacttcgacagccagaccaacgtgtcccagagcaaggactccgacgtgtacatcaccgataagtgcgtgctggacatgcggagcatggacttcaagagcaactccgccgtggcctggtccaacaagtccgatttcgcctgcgccaacgccttcaacaacagcattatccccgaggacacattcttcccaagccccgagagcagctgcgacgtgaagctggtggaaaagagcttcgagacagacaccaacctgaacttccagaacctgagcgtgatcggcttcagaatcctgctgctgaaagtggccggctttaacctgctgatgaccctgcggctgtggtccagctaa

SEQ ID NO: 35256 - DNA, 2718 bp, synthetic construct
  source 1..2718: mol_type = other DNA
atggccttaccagtgaccgccttgctcctgccgctggccttgctgctccacgccgccaggccggaagtgcagctggttgaatctggcggaggactggttcaggctggcggatctctgagactgtcttgtgccgccagcggcagaacctttagcatgggctggtttagacaggcccctggcaaagagagagagttcgtcgccgccatcacatactctggcggcagcccttactacgccgactctgtgaagggcagattcaccatcagccgggacaacgccaagaacaccgtgtacctccagatgaacagcctgaagcctgaggacaccgccgtgtactactgcgccgccaatccaacatacggcagcgactggaacgccgagaattggggccagggaacccaagtgacagtgtctagcggtaccggcggaggcggatctggcggcggaggtagcggtggcggaggatctgaattcgacatcgtgatgacccagagccctgccaccctgtccgtgtctccaggcgaaagagccaccctgagctgcagagcttcccagagcgtgtccaacgacgtcgtgtggtatcagcagaagcccggccaggcccccagactgctgatctactacgccagcaacagatacaccggcatccccgccagattcagcggctctggcagcggcaccgagttcaccctgacaatcagcagcctccagagcgaggacttcgccgtgtactactgtcagcaggactacaccagcccctggaccttcggccagggcaccaagctggaaatcaagagactcgagatccagaaccctgatcctgccgtgtaccagctgcgggatagcaagagcagcgacaagagcgtgtgtctgttcaccgacttcgacagccagaccaacgtgtcccagagcaaggactccgacgtgtacatcaccgataagtgcgtgctggacatgcggagcatggacttcaagagcaactccgccgtggcctggtccaacaagtccgatttcgcctgcgccaacgccttcaacaacagcattatccccgaggacacattcttcccaagcagcgacgtgccctgcgacgtgaagctggtggaaaagagcttcgagacagacaccaacctgaacttccagaacctgagcgtgatcggcttcagaatcctgctgctgaaagtggccggctttaacctgctgatgaccctgcggctgtggtccagccgcgccaagagaagcggatctggcgtgaagcagaccctgaatttcgacctgctgaagctggctggcgacgtggaatccaacccaggccctactagtaccatggactggatttggcgcatccttttccttgtcggcgctgctaccggcgcccattccgggccccaggtgcagctggttgaatctggcggaggatctgttcaggctggcggctctctgagactgtcttgtggcgcttccggcaacatcagcagcagaaactgcatgggctggttcagacaggcccctggcaaagagagagaaggcgttgccgccatcggacaagtgaccggcagatcctactacgtggacagcgtgaagggcagattcaccatcagcctggacaacgccaagaacaccctgtacctccagatgaacacactgaagcccgaggacaccgccatgtactactgtgctgctgcccctggctgtctgctgtctgcacttagaagcgccgactacagaaactggggccagggaacccaagtgacagtgtctagtggatccggcggcggaggatctggcggaggcggatctgggggcggaggctctttcgaagaggtgcaactggtgcagagcggagccgaagtgaagaaacctggggccagcgtgcgggtgtcctgcaaggccagcggctacacctttaccaactacggcatgaactgggtgcgccaggctcctggacagggcctggaatggatgggctggatcaacacctacaccggcgagcccacctacgccgacgacttcaagggcagagtgaccatgaccaccgacaccagcacctccaccgcctacatggaactgcggagcctgagaagcgacgacaccgccgtgtattattgcgcccggatcggcgacagcagccccagcgattattggggccagggaaccctcgtgaccgtgtcctctacgcgtgaggacctgaagaacgtgttcccacctgaggtggccgtgttcgagcctagcaaggccgagatcgcccacacccagaaagccaccctcgtgtgcctggctaccggcttctaccccgaccatgtggaactgtcttggtgggtcaacggcaaagaggtgcacagcggcgtgtgtaccgacccccagccactgaaagaacagcccgccctgaacgacagccggtactgcctgagcagcagactgagagtgtccgccaccttctggcagaacccccggaaccacttcagatgccaggtgcagttctacggcctgagcgagaacgacgagtggacccaggacagagccaagcccgtgacccagatcgtgtctgccgaagcctggggcagagccgattgcggcatcaccagcgccagctaccaccagggcgtgctgagcgccaccatcctgtacgagatcctgctgggcaaggccaccctgtacgccgtgctggtgtctgccctggtgctgatggctatggtcaagcggaaggacagccggggataa

SEQ ID NO: 35257 - DNA, 2709 bp, synthetic construct
  source 1..2709: mol_type = other DNA
atggccttaccagtgaccgccttgctcctgccgctggccttgctgctccacgccgccaggccgcaggtgcagctggttgaatctggcggaggatctgttcaggctggcggctctctgagactgtcttgtggcgcttccggcaacatcagcagcagaaactgcatgggctggttcagacaggcccctggcaaagagagagaaggcgttgccgccatcggacaagtgaccggcagatcctactacgtggacagcgtgaagggcagattcaccatcagcctggacaacgccaagaacaccctgtacctccagatgaacacactgaagcccgaggacaccgccatgtactactgtgctgctgcccctggctgtctgctgtctgcacttagaagcgccgactacagaaactggggccagggaacccaagtgacagtgtctagtggtaccggcggaggcggatctggcggcggaggtagcggtggcggaggatctgaattcgacatcgtgatgacccagagccctgccaccctgtccgtgtctccaggcgaaagagccaccctgagctgcagagcttcccagagcgtgtccaacgacgtcgtgtggtatcagcagaagcccggccaggcccccagactgctgatctactacgccagcaacagatacaccggcatccccgccagattcagcggctctggcagcggcaccgagttcaccctgacaatcagcagcctccagagcgaggacttcgccgtgtactactgtcagcaggactacaccagcccctggaccttcggccagggcaccaagctggaaatcaagagactcgaggacctgaagaacgtgttcccacctgaggtggccgtgttcgagcctagcgaggccgagatcagccacacccagaaagccaccctcgtgtgcctggctaccggcttctaccccgaccatgtggaactgtcttggtgggtcaacggcaaagaggtgcacagcggcgtgtgtaccgacccccagccactgaaagaacagcccgccctgaacgacagccggtactgcctgagcagcagactgagagtgtccgccaccttctggcagaacccccggaaccacttcagatgccaggtgcagttctacggcctgagcgagaacgacgagtggacccaggacagagccaagcccgtgacccagatcgtgtctgccgaagcctggggcagagccgattgcggctttaccagcgagagctaccagcagggcgtgctgagcgccaccatcctgtacgagatcctgctgggcaaggccaccctgtacgccgtgctggtgtctgccctggtgctgatggctatggtcaagcggaaggacagccggggaagggccaagcgatctggatctggagcaacaaacttctcactactcaaacaagcaggtgacgtggaggagaatcccgggcctactagtgccaccatggactggatttggcgcatccttttccttgtcggcgctgctaccggcgcccattccgggcccgaagtgcaactggttgaatccggtggcggcctggtgcaagcaggcggatctctcagacttagctgtgccgcctccggcagaaccttcacaatgggatggtttaggcaggctccagggaaagagagagagttcgtcgccgccatctctctgtctcccacactggcctactacgccgactctgtgaaaggccggttcaccatctccagagataatgccaagaacaccgtggtgctgcaaatgaactctctgaaacccgaggatacagccctgtactattgtgccgctgaccggaagtccgtgatgagcatcagacccgattactggggacagggcacacaagtcacagtgtcctctggatccggcggcggaggatctggcggaggcggatctgggggcggaggctctttcgaagaggtgcaactggtgcagagcggagccgaagtgaagaaacctggggccagcgtgcgggtgtcctgcaaggccagcggctacacctttaccaactacggcatgaactgggtgcgccaggctcctggacagggcctggaatggatgggctggatcaacacctacaccggcgagcccacctacgccgacgacttcaagggcagagtgaccatgaccaccgacaccagcacctccaccgcctacatggaactgcggagcctgagaagcgacgacaccgccgtgtattattgcgcccggatcggcgacagcagccccagcgattattggggccagggaaccctcgtgaccgtgtcctctacgcgtatccagaaccctgatcctgccgtgtaccagctgcgggatagcaagagcagcgacaagagcgtgtgtctgttcaccgacttcgacagccagaccaacgtgtcccagagcaaggactccgacgtgtacatcaccgataagtgcgtgctggacatgcggagcatggacttcaagagcaactccgccgtggcctggtccaacaagtccgatttcgcctgcgccaacgccttcaacaacagcattatccccgaggacacattcttcccaagccccgagagcagctgcgacgtgaagctggtggaaaagagcttcgagacagacaccaacctgaacttccagaacctgagcgtgatcggcttcagaatcctgctgctgaaagtggccggctttaacctgctgatgaccctgcggctgtggtccagctaa

SEQ ID NO: 35258 - DNA, 2298 bp, synthetic construct
  source 1..2298: mol_type = other DNA
atggccttaccagtgaccgccttgctcctgccgctggccttgctgctccacgccgccaggccgcaggtgcagctggttgaatctggcggaggatctgttcaggctggcggctctctgagactgtcttgtggcgcttccggcaacatcagcagcagaaactgcatgggctggttcagacaggcccctggcaaagagagagaaggcgttgccgccatcggacaagtgaccggcagatcctactacgtggacagcgtgaagggcagattcaccatcagcctggacaacgccaagaacaccctgtacctccagatgaacacactgaagcccgaggacaccgccatgtactactgtgctgctgcccctggctgtctgctgtctgcacttagaagcgccgactacagaaactggggccagggaacccaagtgacagtgtctagtggtaccggcggaggcggatctggcggcggaggtagcggtggcggaggatctgaattcgacatcgtgatgacccagagccctgccaccctgtccgtgtctccaggcgaaagagccaccctgagctgcagagcttcccagagcgtgtccaacgacgtcgtgtggtatcagcagaagcccggccaggcccccagactgctgatctactacgccagcaacagatacaccggcatccccgccagattcagcggctctggcagcggcaccgagttcaccctgacaatcagcagcctccagagcgaggacttcgccgtgtactactgtcagcaggactacaccagcccctggaccttcggccagggcaccaagctggaaatcaagagactcgaggacctgaagaacgtgttcccacctgaggtggccgtgttcgagcctagcgaggccgagatcagccacacccagaaagccaccctcgtgtgcctggctaccggcttctaccccgaccatgtggaactgtcttggtgggtcaacggcaaagaggtgcacagcggcgtgtgtaccgacccccagccactgaaagaacagcccgccctgaacgacagccggtactgcctgagcagcagactgagagtgtccgccaccttctggcagaacccccggaaccacttcagatgccaggtgcagttctacggcctgagcgagaacgacgagtggacccaggacagagccaagcccgtgacccagatcgtgtctgccgaagcctggggcagagccgattgcggctttaccagcgagagctaccagcagggcgtgctgagcgccaccatcctgtacgagatcctgctgggcaaggccaccctgtacgccgtgctggtgtctgccctggtgctgatggctatggtcaagcggaaggacagccggggaagggccaagcgatctggatctggagcaacaaacttctcactactcaaacaagcaggtgacgtggaggagaatcccgggcctactagtgccaccatggactggatttggcgcatccttttccttgtcggcgctgctaccggcgcccattccttcgaagaggtgcaactggtgcagagcggagccgaagtgaagaaacctggggccagcgtgcgggtgtcctgcaaggccagcggctacacctttaccaactacggcatgaactgggtgcgccaggctcctggacagggcctggaatggatgggctggatcaacacctacaccggcgagcccacctacgccgacgacttcaagggcagagtgaccatgaccaccgacaccagcacctccaccgcctacatggaactgcggagcctgagaagcgacgacaccgccgtgtattattgcgcccggatcggcgacagcagccccagcgattattggggccagggaaccctcgtgaccgtgtcctctacgcgtatccagaaccctgatcctgccgtgtaccagctgcgggatagcaagagcagcgacaagagcgtgtgtctgttcaccgacttcgacagccagaccaacgtgtcccagagcaaggactccgacgtgtacatcaccgataagtgcgtgctggacatgcggagcatggacttcaagagcaactccgccgtggcctggtccaacaagtccgatttcgcctgcgccaacgccttcaacaacagcattatccccgaggacacattcttcccaagccccgagagcagctgcgacgtgaagctggtggaaaagagcttcgagacagacaccaacctgaacttccagaacctgagcgtgatcggcttcagaatcctgctgctgaaagtggccggctttaacctgctgatgaccctgcggctgtggtccagctaa

SEQ ID NO: 35259 - DNA, 2298 bp, synthetic construct
  source 1..2298: mol_type = other DNA
atggccttaccagtgaccgccttgctcctgccgctggccttgctgctccacgccgccaggccgcaagttcagctggtggaaagcggtggtggcgttgtgcaacctggtggaagtctgaggctgagctgtgccgcttctggcctgagctttagcacctacactgtggcctggttcaggcaggctcccggaaagggtcttgaaggcgtggccgccattccttacaccagccagcacatggtgtacacagacagcgtcagaggccggttcaccatcagcagagacaactccaagaatacgctctatctccagatgaactctctgcgcgccgaagatacagccgtgtattactgcgccaccgacagacggcctggcacctctatgctggctatcaacggctacaacagatggggacagggaaccaccgtgaccgtgtcatctggtaccggcggaggcggatctggcggcggaggtagcggtggcggaggatctgaattcgacatcgtgatgacccagagccctgccaccctgtccgtgtctccaggcgaaagagccaccctgagctgcagagcttcccagagcgtgtccaacgacgtcgtgtggtatcagcagaagcccggccaggcccccagactgctgatctactacgccagcaacagatacaccggcatccccgccagattcagcggctctggcagcggcaccgagttcaccctgacaatcagcagcctccagagcgaggacttcgccgtgtactactgtcagcaggactacaccagcccctggaccttcggccagggcaccaagctggaaatcaagagactcgaggacctgaagaacgtgttcccacctgaggtggccgtgttcgagcctagcgaggccgagatcagccacacccagaaagccaccctcgtgtgcctggctaccggcttctaccccgaccatgtggaactgtcttggtgggtcaacggcaaagaggtgcacagcggcgtgtgtaccgacccccagccactgaaagaacagcccgccctgaacgacagccggtactgcctgagcagcagactgagagtgtccgccaccttctggcagaacccccggaaccacttcagatgccaggtgcagttctacggcctgagcgagaacgacgagtggacccaggacagagccaagcccgtgacccagatcgtgtctgccgaagcctggggcagagccgattgcggctttaccagcgagagctaccagcagggcgtgctgagcgccaccatcctgtacgagatcctgctgggcaaggccaccctgtacgccgtgctggtgtctgccctggtgctgatggctatggtcaagcggaaggacagccggggaagggccaagcgatctggatctggagcaacaaacttctcactactcaaacaagcaggtgacgtggaggagaatcccgggcctactagtgccaccatggactggatttggcgcatccttttccttgtcggcgctgctaccggcgcccattccttcgaagaggtgcaactggtgcagagcggagccgaagtgaagaaacctggggccagcgtgcgggtgtcctgcaaggccagcggctacacctttaccaactacggcatgaactgggtgcgccaggctcctggacagggcctggaatggatgggctggatcaacacctacaccggcgagcccacctacgccgacgacttcaagggcagagtgaccatgaccaccgacaccagcacctccaccgcctacatggaactgcggagcctgagaagcgacgacaccgccgtgtattattgcgcccggatcggcgacagcagccccagcgattattggggccagggaaccctcgtgaccgtgtcctctacgcgtatccagaaccctgatcctgccgtgtaccagctgcgggatagcaagagcagcgacaagagcgtgtgtctgttcaccgacttcgacagccagaccaacgtgtcccagagcaaggactccgacgtgtacatcaccgataagtgcgtgctggacatgcggagcatggacttcaagagcaactccgccgtggcctggtccaacaagtccgatttcgcctgcgccaacgccttcaacaacagcattatccccgaggacacattcttcccaagccccgagagcagctgcgacgtgaagctggtggaaaagagcttcgagacagacaccaacctgaacttccagaacctgagcgtgatcggcttcagaatcctgctgctgaaagtggccggctttaacctgctgatgaccctgcggctgtggtccagctaa

SEQ ID NO: 35260 - DNA, 2295 bp, synthetic construct
  source 1..2295: mol_type = other DNA
atggccttaccagtgaccgccttgctcctgccgctggccttgctgctccacgccgccaggccggacatcgtgatgacccagagccctgccaccctgtccgtgtctccaggcgaaagagccaccctgagctgcagagcttcccagagcgtgtccaacgacgtcgtgtggtatcagcagaagcccggccaggcccccagactgctgatctactacgccagcaacagatacaccggcatccccgccagattcagcggctctggcagcggcaccgagttcaccctgacaatcagcagcctccagagcgaggacttcgccgtgtactactgtcagcaggactacaccagcccctggaccttcggccagggcaccaagctggaaatcaagagactcgaggacctgaagaacgtgttcccacctgaggtggccgtgttcgagcctagcgaggccgagatcagccacacccagaaagccaccctcgtgtgcctggctaccggcttctaccccgaccatgtggaactgtcttggtgggtcaacggcaaagaggtgcacagcggcgtgtgtaccgacccccagccactgaaagaacagcccgccctgaacgacagccggtactgcctgagcagcagactgagagtgtccgccaccttctggcagaacccccggaaccacttcagatgccaggtgcagttctacggcctgagcgagaacgacgagtggacccaggacagagccaagcccgtgacccagatcgtgtctgccgaagcctggggcagagccgattgcggctttaccagcgagagctaccagcagggcgtgctgagcgccaccatcctgtacgagatcctgctgggcaaggccaccctgtacgccgtgctggtgtctgccctggtgctgatggctatggtcaagcggaaggacagccggggaagggccaagcgatctggatctggagcaacaaacttctcactactcaaacaagcaggtgacgtggaggagaatcccgggcctactagtaccatggactggatttggcgcatccttttccttgtcggcgctgctaccggcgcccattccgggccccaagttcagctggtggaaagcggtggtggcgttgtgcaacctggtggaagtctgaggctgagctgtgccgcttctggcctgagctttagcacctacactgtggcctggttcaggcaggctcccggaaagggtcttgaaggcgtggccgccattccttacaccagccagcacatggtgtacacagacagcgtcagaggccggttcaccatcagcagagacaactccaagaatacgctctatctccagatgaactctctgcgcgccgaagatacagccgtgtattactgcgccaccgacagacggcctggcacctctatgctggctatcaacggctacaacagatggggacagggaaccaccgtgaccgtgtcatctggatccggcggcggaggatctggcggaggcggatctgggggcggaggctctttcgaagaggtgcaactggtgcagagcggagccgaagtgaagaaacctggggccagcgtgcgggtgtcctgcaaggccagcggctacacctttaccaactacggcatgaactgggtgcgccaggctcctggacagggcctggaatggatgggctggatcaacacctacaccggcgagcccacctacgccgacgacttcaagggcagagtgaccatgaccaccgacaccagcacctccaccgcctacatggaactgcggagcctgagaagcgacgacaccgccgtgtattattgcgcccggatcggcgacagcagccccagcgattattggggccagggaaccctcgtgaccgtgtcctctacgcgtatccagaaccctgatcctgccgtgtaccagctgcgggatagcaagagcagcgacaagagcgtgtgtctgttcaccgacttcgacagccagaccaacgtgtcccagagcaaggactccgacgtgtacatcaccgataagtgcgtgctggacatgcggagcatggacttcaagagcaactccgccgtggcctggtccaacaagtccgatttcgcctgcgccaacgccttcaacaacagcattatccccgaggacacattcttcccaagccccgagagcagctgcgacgtgaagctggtggaaaagagcttcgagacagacaccaacctgaacttccagaacctgagcgtgatcggcttcagaatcctgctgctgaaagtggccggctttaacctgctgatgaccctgcggctgtggtccagctaa

SEQ ID NO: 35261 - DNA, 2301 bp, synthetic construct
  source 1..2301: mol_type = other DNA
atggccttaccagtgaccgccttgctcctgccgctggccttgctgctccacgccgccaggccggacatcgtgatgacccagagccctgccaccctgtccgtgtctccaggcgaaagagccaccctgagctgcagagcttcccagagcgtgtccaacgacgtcgtgtggtatcagcagaagcccggccaggcccccagactgctgatctactacgccagcaacagatacaccggcatccccgccagattcagcggctctggcagcggcaccgagttcaccctgacaatcagcagcctccagagcgaggacttcgccgtgtactactgtcagcaggactacaccagcccctggaccttcggccagggcaccaagctggaaatcaagagactcgaggacctgaagaacgtgttcccacctgaggtggccgtgttcgagcctagcgaggccgagatcagccacacccagaaagccaccctcgtgtgcctggctaccggcttctaccccgaccatgtggaactgtcttggtgggtcaacggcaaagaggtgcacagcggcgtgtgtaccgacccccagccactgaaagaacagcccgccctgaacgacagccggtactgcctgagcagcagactgagagtgtccgccaccttctggcagaacccccggaaccacttcagatgccaggtgcagttctacggcctgagcgagaacgacgagtggacccaggacagagccaagcccgtgacccagatcgtgtctgccgaagcctggggcagagccgattgcggctttaccagcgagagctaccagcagggcgtgctgagcgccaccatcctgtacgagatcctgctgggcaaggccaccctgtacgccgtgctggtgtctgccctggtgctgatggctatggtcaagcggaaggacagccggggaagggccaagcgatctggatctggagcaacaaacttctcactactcaaacaagcaggtgacgtggaggagaatcccgggcctactagtaccatggactggatttggcgcatccttttccttgtcggcgctgctaccggcgcccattccgggcccgaggtgcagctggttgaatctggcggaggatctgttcaggctggcggctctctgagactgtcttgtgccgccagcggctacacctacagcatcaactgcatgggctggttcagacaggcccctggcaaagagagagaaggcgttgccgccatctctaccggcggaggcagaaccgattaccgggattctgtgaagggcagattcaccatcagccaggacaacgccaagaacaccgtgtacctccagatgaacagcctgaagcctgaggacaccgccatgtactactgtgccggcaagaccacctatcctggctacggatgtggcctgggcagaagcgcctacaattattggggccagggcacccaagtgaccgtgtcatctggatccggcggcggaggatctggcggaggcggatctgggggcggaggctctttcgaagaggtgcaactggtgcagagcggagccgaagtgaagaaacctggggccagcgtgcgggtgtcctgcaaggccagcggctacacctttaccaactacggcatgaactgggtgcgccaggctcctggacagggcctggaatggatgggctggatcaacacctacaccggcgagcccacctacgccgacgacttcaagggcagagtgaccatgaccaccgacaccagcacctccaccgcctacatggaactgcggagcctgagaagcgacgacaccgccgtgtattattgcgcccggatcggcgacagcagccccagcgattattggggccagggaaccctcgtgaccgtgtcctctacgcgtatccagaaccctgatcctgccgtgtaccagctgcgggatagcaagagcagcgacaagagcgtgtgtctgttcaccgacttcgacagccagaccaacgtgtcccagagcaaggactccgacgtgtacatcaccgataagtgcgtgctggacatgcggagcatggacttcaagagcaactccgccgtggcctggtccaacaagtccgatttcgcctgcgccaacgccttcaacaacagcattatccccgaggacacattcttcccaagccccgagagcagctgcgacgtgaagctggtggaaaagagcttcgagacagacaccaacctgaacttccagaacctgagcgtgatcggcttcagaatcctgctgctgaaagtggccggctttaacctgctgatgaccctgcggctgtggtccagctaa

SEQ ID NO: 35262 - DNA, 1857 bp, synthetic construct
  source 1..1857: mol_type = other DNA
atggccttaccagtgaccgccttgctcctgccgctggccttgctgctccacgccgccaggccggacatcgtgatgacccagagccctgccaccctgtccgtgtctccaggcgaaagagccaccctgagctgcagagcttcccagagcgtgtccaacgacgtcgtgtggtatcagcagaagcccggccaggcccccagactgctgatctactacgccagcaacagatacaccggcatccccgccagattcagcggctctggcagcggcaccgagttcaccctgacaatcagcagcctccagagcgaggacttcgccgtgtactactgtcagcaggactacaccagcccctggaccttcggccagggcaccaagctggaaatcaagagactcgaggacctgaagcacgtgttcccacctgaggtggccgtgttcgagcctagcgacgccgagatctggcacacccagaaagccaccctcgtgtgcctggctaccggcttctaccccgaccatgtggaactgtcttggtgggtcaacggcaaagaggtgcacagcggcgtgtctaccgacccccagccactgaaagaacagcccgccctgaacgacagccggtactgcctgagcagcagactgagagtgtccgccaccttctggcagaacccccggaaccacttcagatgccaggtgcagttctacggcctgagcgagaacgacgagtggacccaggacagagccaagcccgtgacccagatcgtgtctgccgaagcctggggcagagccgattgcggctttaccagcgagagctaccagcagggcgtgctgagcgccaccatcctgtacgagatcctgctgggcaaggccaccctgtacgccgtgctggtgtctgccctggtgctgatggctatggtcaagcggaaggacagccggggaagggccaagcgatctggatctggagcaacaaacttctcactactcaaacaagcaggtgacgtggaggagaatcccgggcctactagtatggactggatttggcgcatccttttccttgtcggcgctgctaccggcgcgcattccttcgaagaggtgcaactggtgcagagcggagccgaagtgaagaaacctggggccagcgtgcgggtgtcctgcaaggccagcggctacacctttaccaactacggcatgaactgggtgcgccaggctcctggacagggcctggaatggatgggctggatcaacacctacaccggcgagcccacctacgccgacgacttcaagggcagagtgaccatgaccaccgacaccagcacctccaccgcctacatggaactgcggagcctgagaagcgacgacaccgccgtgtattattgcgcccggatcggcgacagcagccccagcgattattggggccagggaaccctcgtgaccgtgtcctctacgcgtatccagaaccctgatcctgccgtgtaccagctgcgggatagcaagagcagcgacaagagcgtgtgtctgttcaccgacttcgacagccagaccaacgtgtcccagagcaaggactccgacgtgtacatcaccgataagaccgtgctggacatgcggagcatggacttcaagagcaactccgccgtggcctggtccagcaagtccgatttcgcctgcgccaacgccttcaacaacagcattatccccgaggacacattcttcccaagccccgagatggcctgcgacgtgaagctggtggaaaagagcttcgagacagacaccaacctgaacttccagaacctgctcgtgatctggctgagaatcctgctgctgaaagtggccggctttaacctgctgatgaccctgcggctgtggtccagc

SEQ ID NO: 35263 - DNA, 1857 bp, synthetic construct
  source 1..1857: mol_type = other DNA
atggccttaccagtgaccgccttgctcctgccgctggccttgctgctccacgccgccaggccggacatcgtgatgacccagagccctgccaccctgtccgtgtctccaggcgaaagagccaccctgagctgcagagcttcccagagcgtgtccaacgacgtcgtgtggtatcagcagaagcccggccaggcccccagactgctgatctactacgccagcaacagatacaccggcatccccgccagattcagcggctctggcagcggcaccgagttcaccctgacaatcagcagcctccagagcgaggacttcgccgtgtactactgtcagcaggactacaccagcccctggaccttcggccagggcaccaagctggaaatcaagagactcgaggacctgaagcacgtgttcccacctgaggtggccgtgttcgagcctagcgacgccgagatctggcacacccagaaagccaccctcgtgtgcctggctaccggcttctaccccgaccatgtggaactgtcttggtgggtcaacggcaaagaggtgcacagcggcgtgtctaccgacccccagccactgaaagaacagcccgccctgaacgacagccggtactgcctgagcagcagactgagagtgtccgccaccttctggcagaacccccggaaccacttcagatgccaggtgcagttctacggcctgagcgagaacgacgagtggacccaggacagagccaagcccgtgacccagatcgtgtctgccgaagcctggggcagagccgattgcggctttaccagcgagagctaccagcagggcgtgctgagcgccaccatcctgtacgagatcctgctgggcaaggccaccctgtacgccgtgctggtgtctgccctggtgctgatggctatggtcaagcggaaggacagccggggaagggccaagcgatctggatctggagcaacaaacttctcactactcaaacaagcaggtgacgtggaggagaatcccgggcctactagtatggactggatttggcgcatccttttccttgtcggcgctgctaccggcgcgcattccttcgaagaggtgcaactggtgcagagcggagccgaagtgaagaaacctggggccagcgtgcgggtgtcctgcaaggccagcggctacacctttaccaactacggcatgaactgggtgcgccaggctcctggacagggcctggaatggatgggctggatcaacacctacaccggcgagcccacctacgccgacgacttcaagggcagagtgaccatgaccaccgacaccagcacctccaccgcctacatggaactgcggagcctgagaagcgacgacaccgccgtgtattattgcgcccggatcggcgacagcagccccagcgattattggggccagggaaccctcgtgaccgtgtcctctacgcgtatccagaaccctgatcctgccgtgtaccagctgcgggatagcaagagcagcgacaagagcgtgtgtctgttcaccgacttcgacagccagaccaacgtgtcccagagcaaggactccgacgtgtacatcaccgataagaccgtgctggacatgcggagcatggacttcaagagcaactccgccgtggcctggtccaccaagtccgatttcgcctgcgccaacgccttcaacaacagcattatccccgaggacacattcttcccaagccccgaggtggtgtgcgacgtgaagctggtggaaaagagcttcgagacagacaccaacctgaacttccagaacctggtggtgatcggcgccagaatcctgctgctgaaagtggccggctttaacctgctgatgaccctgcggctgtggtccagc

SEQ ID NO: 35264 - DNA, 1857 bp, synthetic construct
  source 1..1857: mol_type = other DNA
atggccttaccagtgaccgccttgctcctgccgctggccttgctgctccacgccgccaggccggacatcgtgatgacccagagccctgccaccctgtccgtgtctccaggcgaaagagccaccctgagctgcagagcttcccagagcgtgtccaacgacgtcgtgtggtatcagcagaagcccggccaggcccccagactgctgatctactacgccagcaacagatacaccggcatccccgccagattcagcggctctggcagcggcaccgagttcaccctgacaatcagcagcctccagagcgaggacttcgccgtgtactactgtcagcaggactacaccagcccctggaccttcggccagggcaccaagctggaaatcaagagactcgaggacctgaagaacgtgttcccacctgaggtggccgtgttcgagcctagcaaggccgagatcagcagaacccagaaagccaccctcgtgtgcctggctaccggcttctaccctcctcatgtggaactgtcttggtgggtcaacggcaaagaggtgcacgacggcgtgtgtaccgacccccagccactgaaagaacagcccgccctgaacgacagccggtactgcctgagcagcagactgagagtgtccgccaccttctggcagaacccccggaaccacttcagatgccaggtgcagttctacggcctgagcgagaacgacgagtggacccaggacagagccaagcccgtgacccagatcgtgtctgccgaagcctggggcagagccgattgcggctttaccagcgagagctaccagcagggcgtgctgagcgccaccatcctgtacgagatcctgctgggcaaggccaccctgtacgccgtgctggtgtctgccctggtgctgatggctatggtcaagcggaaggacagccggggaagggccaagcgatctggatctggagcaacaaacttctcactactcaaacaagcaggtgacgtggaggagaatcccgggcctactagtatggactggatttggcgcatccttttccttgtcggcgctgctaccggcgcgcattccttcgaagaggtgcaactggtgcagagcggagccgaagtgaagaaacctggggccagcgtgcgggtgtcctgcaaggccagcggctacacctttaccaactacggcatgaactgggtgcgccaggctcctggacagggcctggaatggatgggctggatcaacacctacaccggcgagcccacctacgccgacgacttcaagggcagagtgaccatgaccaccgacaccagcacctccaccgcctacatggaactgcggagcctgagaagcgacgacaccgccgtgtattattgcgcccggatcggcgacagcagccccagcgattattggggccagggaaccctcgtgaccgtgtcctctacgcgtatccagaaccctgatcctgccgtgtaccagctgcgggatagcaagagcagcgacaagttcgtgtgtctgttcaccgacttcgacagccagatcaacgtgtcccagagcaaggactccgacgtgtacatcaccgataagtgcgtgctggacatgcggagcatggacttcaagagcaactccgccgtggcctggtccaacaagtccgatttcacctgcgccaacgccttcaacaacagcattatccccgaggacacattcttcccaagccccgagagcagctgcgacgtgaagctggtggaaaagagcttcgagacagacaccaacctgaacttccagaacctgagcgtgatcggcttcagaatcctgctgctgaaagtggccggctttaacctgctgatgaccctgcggctgtggtccagc

SEQ ID NO: 35265 - DNA, 2283 bp, synthetic construct
  source 1..2283: mol_type = other DNA
atggccttaccagtgaccgccttgctcctgccgctggccttgctgctccacgccgccaggccggacatcgtgatgacccagagccctgccaccctgtccgtgtctccaggcgaaagagccaccctgagctgcagagcttcccagagcgtgtccaacgacgtcgtgtggtatcagcagaagcccggccaggcccccagactgctgatctactacgccagcaacagatacaccggcatccccgccagattcagcggctctggcagcggcaccgagttcaccctgacaatcagcagcctccagagcgaggacttcgccgtgtactactgtcagcaggactacaccagcccctggaccttcggccagggcaccaagctggaaatcaagagactcgaggacctgaagaacgtgttcccacctgaggtggccgtgttcgagcctagcgaggccgagatcagccacacccagaaagccaccctcgtgtgcctggctaccggcttctaccccgaccatgtggaactgtcttggtgggtcaacggcaaagaggtgcacagcggcgtgtgtaccgacccccagccactgaaagaacagcccgccctgaacgacagccggtactgcctgagcagcagactgagagtgtccgccaccttctggcagaacccccggaaccacttcagatgccaggtgcagttctacggcctgagcgagaacgacgagtggacccaggacagagccaagcccgtgacccagatcgtgtctgccgaagcctggggcagagccgattgcggctttaccagcgagagctaccagcagggcgtgctgagcgccaccatcctgtacgagatcctgctgggcaaggccaccctgtacgccgtgctggtgtctgccctggtgctgatggctatggtcaagcggaaggacagccggggaagggccaagcgatctggatctggagcaacaaacttctcactactcaaacaagcaggtgacgtggaggagaatcccgggcctactagtaccatggactggatttggcgcatccttttccttgtcggcgctgctaccggcgcccattccgggccccaggtgcagctccaagaaagcggacccggactggttaagccctctcagaccctgtctctgacctgcacagttagcggagccagcattaccacaggcgagtattattggaattggtttcggcagccaccaggcaaggggcttgagtggatgggtgctattgctgcctctggcagcaccacctactctcccagctttgagagcagaacctccatcagccgggacacctccaaaaaccagttctctctgaagctgtcctccgtgaccgctgctgacaccgccgtctattattgtggccggtctttcggcgtggcagctgtgaccacaggacagaacagaggccagggaacacttgtgaccgtgtcctctggatccggcggcggaggatctggcggaggcggatctgggggcggaggctctttcgaagaggtgcaactggtgcagagcggagccgaagtgaagaaacctggggccagcgtgcgggtgtcctgcaaggccagcggctacacctttaccaactacggcatgaactgggtgcgccaggctcctggacagggcctggaatggatgggctggatcaacacctacaccggcgagcccacctacgccgacgacttcaagggcagagtgaccatgaccaccgacaccagcacctccaccgcctacatggaactgcggagcctgagaagcgacgacaccgccgtgtattattgcgcccggatcggcgacagcagccccagcgattattggggccagggaaccctcgtgaccgtgtcctctacgcgtatccagaaccctgatcctgccgtgtaccagctgcgggatagcaagagcagcgacaagagcgtgtgtctgttcaccgacttcgacagccagaccaacgtgtcccagagcaaggactccgacgtgtacatcaccgataagtgcgtgctggacatgcggagcatggacttcaagagcaactccgccgtggcctggtccaacaagtccgatttcgcctgcgccaacgccttcaacaacagcattatccccgaggacacattcttcccaagccccgagagcagctgcgacgtgaagctggtggaaaagagcttcgagacagacaccaacctgaacttccagaacctgagcgtgatcggcttcagaatcctgctgctgaaagtggccggctttaacctgctgatgaccctgcggctgtggtccagc

SEQ ID NO: 35266 - DNA, 2706 bp, synthetic construct
  source 1..2706: mol_type = other DNA
atggccttaccagtgaccgccttgctcctgccgctggccttgctgctccacgccgccaggccgcaggttcagctgcaagagtctggccctggcctggtcaagcctagccaaacactgagcctgacctgtaccgtgtctggcggctctatcaccaccggcgagttctactggaactggttcagacagcctcctggcaaaggactggaatggatgggagccattgccgccagcggcagcacaacatacagccctagcttcgagagccggaccagcatcagcagagacaccagcaagaatcagttcagcctgaagctgagcagcgtgacagccgccgatacagccgtgtattactgcggcagatcctttggagtggccgccgtgacaaccggccagaatagaggacagggcaccctggtcacagtgtctagcggtaccggcggaggcggatctggcggcggaggtagcggtggcggaggatctgaattcgacatcgtgatgacccagagccctgccaccctgtccgtgtctccaggcgaaagagccaccctgagctgcagagcttcccagagcgtgtccaacgacgtcgtgtggtatcagcagaagcccggccaggcccccagactgctgatctactacgccagcaacagatacaccggcatccccgccagattcagcggctctggcagcggcaccgagttcaccctgacaatcagcagcctccagagcgaggacttcgccgtgtactactgtcagcaggactacaccagcccctggaccttcggccagggcaccaagctggaaatcaagagactcgagatccagaaccctgatcctgccgtgtaccagctgcgggatagcaagagcagcgacaagagcgtgtgtctgttcaccgacttcgacagccagaccaacgtgtcccagagcaaggactccgacgtgtacatcaccgataagtgcgtgctggacatgcggagcatggacttcaagagcaactccgccgtggcctggtccaacaagtccgatttcgcctgcgccaacgccttcaacaacagcattatccccgaggacacattcttcccaagcagcgacgtgccctgcgacgtgaagctggtggaaaagagcttcgagacagacaccaacctgaacttccagaacctgagcgtgatcggcttcagaatcctgctgctgaaagtggccggctttaacctgctgatgaccctgcggctgtggtccagccgcgccaagagaagcggatctggcgtgaagcagaccctgaatttcgacctgctgaagctggctggcgacgtggaatccaacccaggccctactagtaccatggactggatttggcgcatccttttccttgtcggcgctgctaccggcgcccattccgggcccgaagtgcaactggttgaatccggtggcggcctggtgcaacccggcggatctctcagacttagctgtgccgcctccggcagaaccttcacaatgggatggtacaggcaggctccagggaaagagagagagttcgtcgccgccatctctctgtctcccacactggcctactacgccgactctgtgaaaggccggttcaccatctccagagataatagcaagaacaccgtggtgctgcaaatgaactctctgagagccgaggatacagccctgtactattgtgccgctgaccggaagtccgtgatgagcatcagacccgattactggggacagggcacactggtcacagtgtctagtggatccggcggcggaggatctggcggaggcggatctgggggcggaggctctttcgaagaggtgcaactggtgcagagcggagccgaagtgaagaaacctggggccagcgtgcgggtgtcctgcaaggccagcggctacacctttaccaactacggcatgaactgggtgcgccaggctcctggacagggcctggaatggatgggctggatcaacacctacaccggcgagcccacctacgccgacgacttcaagggcagagtgaccatgaccaccgacaccagcacctccaccgcctacatggaactgcggagcctgagaagcgacgacaccgccgtgtattattgcgcccggatcggcgacagcagccccagcgattattggggccagggaaccctcgtgaccgtgtcctctacgcgtgaggacctgaagaacgtgttcccacctgaggtggccgtgttcgagcctagcaaggccgagatcgcccacacccagaaagccaccctcgtgtgcctggctaccggcttctaccccgaccatgtggaactgtcttggtgggtcaacggcaaagaggtgcacagcggcgtgtgtaccgacccccagccactgaaagaacagcccgccctgaacgacagccggtactgcctgagcagcagactgagagtgtccgccaccttctggcagaacccccggaaccacttcagatgccaggtgcagttctacggcctgagcgagaacgacgagtggacccaggacagagccaagcccgtgacccagatcgtgtctgccgaagcctggggcagagccgattgcggcatcaccagcgccagctaccaccagggcgtgctgagcgccaccatcctgtacgagatcctgctgggcaaggccaccctgtacgccgtgctggtgtctgccctggtgctgatggctatggtcaagcggaaggacagccgggga

SEQ ID NO: 35267 - DNA, 2295 bp, synthetic construct
  source 1..2295: mol_type = other DNA
atggccttaccagtgaccgccttgctcctgccgctggccttgctgctccacgccgccaggccgcaggttcagctgcaagagtctggccctggcctggtcaagcctagccaaacactgagcctgacctgtaccgtgtctggcggctctatcaccaccggcgagttctactggaactggttcagacagcctcctggcaaaggactggaatggatgggagccattgccgccagcggcagcacaacatacagccctagcttcgagagccggaccagcatcagcagagacaccagcaagaatcagttcagcctgaagctgagcagcgtgacagccgccgatacagccgtgtattactgcggcagatcctttggagtggccgccgtgacaaccggccagaatagaggacagggcaccctggtcacagtgtctagcggtaccggcggaggcggatctggcggcggaggtagcggtggcggaggatctgaattcgacatcgtgatgacccagagccctgccaccctgtccgtgtctccaggcgaaagagccaccctgagctgcagagcttcccagagcgtgtccaacgacgtcgtgtggtatcagcagaagcccggccaggcccccagactgctgatctactacgccagcaacagatacaccggcatccccgccagattcagcggctctggcagcggcaccgagttcaccctgacaatcagcagcctccagagcgaggacttcgccgtgtactactgtcagcaggactacaccagcccctggaccttcggccagggcaccaagctggaaatcaagagactcgagatccagaaccctgatcctgccgtgtaccagctgcgggatagcaagagcagcgacaagagcgtgtgtctgttcaccgacttcgacagccagaccaacgtgtcccagagcaaggactccgacgtgtacatcaccgataagtgcgtgctggacatgcggagcatggacttcaagagcaactccgccgtggcctggtccaacaagtccgatttcgcctgcgccaacgccttcaacaacagcattatccccgaggacacattcttcccaagcagcgacgtgccctgcgacgtgaagctggtggaaaagagcttcgagacagacaccaacctgaacttccagaacctgagcgtgatcggcttcagaatcctgctgctgaaagtggccggctttaacctgctgatgaccctgcggctgtggtccagccgcgccaagagaagcggatctggcgtgaagcagaccctgaatttcgacctgctgaagctggctggcgacgtggaatccaacccaggccctactagtaccatggactggatttggcgcatccttttccttgtcggcgctgctaccggcgcccattccttcgaagaggtgcaactggtgcagagcggagccgaagtgaagaaacctggggccagcgtgcgggtgtcctgcaaggccagcggctacacctttaccaactacggcatgaactgggtgcgccaggctcctggacagggcctggaatggatgggctggatcaacacctacaccggcgagcccacctacgccgacgacttcaagggcagagtgaccatgaccaccgacaccagcacctccaccgcctacatggaactgcggagcctgagaagcgacgacaccgccgtgtattattgcgcccggatcggcgacagcagccccagcgattattggggccagggaaccctcgtgaccgtgtcctctacgcgtgaggacctgaagaacgtgttcccacctgaggtggccgtgttcgagcctagcaaggccgagatcgcccacacccagaaagccaccctcgtgtgcctggctaccggcttctaccccgaccatgtggaactgtcttggtgggtcaacggcaaagaggtgcacagcggcgtgtgtaccgacccccagccactgaaagaacagcccgccctgaacgacagccggtactgcctgagcagcagactgagagtgtccgccaccttctggcagaacccccggaaccacttcagatgccaggtgcagttctacggcctgagcgagaacgacgagtggacccaggacagagccaagcccgtgacccagatcgtgtctgccgaagcctggggcagagccgattgcggcatcaccagcgccagctaccaccagggcgtgctgagcgccaccatcctgtacgagatcctgctgggcaaggccaccctgtacgccgtgctggtgtctgccctggtgctgatggctatggtcaagcggaaggacagccgggga

SEQ ID NO: 35268 - DNA, 2694 bp, synthetic construct
  source 1..2694: mol_type = other DNA
atggccttaccagtgaccgccttgctcctgccgctggccttgctgctccacgccgccaggccggaagtgcagctggttgaatctggcggaggactggttcaggctggcggatctctgagactgtcttgtgccgccagcggcagaacctttagcatgggctggtttagacaggcccctggcaaagagagagagttcgtcgccgccatcacatactctggcggcagcccttactacgccgactctgtgaagggcagattcaccatcagccgggacaacgccaagaacaccgtgtacctccagatgaacagcctgaagcctgaggacaccgccgtgtactactgcgccgccaatccaacatacggcagcgactggaacgccgagaattggggccagggaacccaagtgacagtgtctagcggtaccggcggaggcggatctggcggcggaggtagcggtggcggaggatctgaattcgacatcgtgatgacccagagccctgccaccctgtccgtgtctccaggcgaaagagccaccctgagctgcagagcttcccagagcgtgtccaacgacgtcgtgtggtatcagcagaagcccggccaggcccccagactgctgatctactacgccagcaacagatacaccggcatccccgccagattcagcggctctggcagcggcaccgagttcaccctgacaatcagcagcctccagagcgaggacttcgccgtgtactactgtcagcaggactacaccagcccctggaccttcggccagggcaccaagctggaaatcaagagactcgaggacctgaagaacgtgttcccacctgaggtggccgtgttcgagcctagcgaggccgagatcagccacacccagaaagccaccctcgtgtgcctggctaccggcttctaccccgaccatgtggaactgtcttggtgggtcaacggcaaagaggtgcacagcggcgtgtgtaccgacccccagccactgaaagaacagcccgccctgaacgacagccggtactgcctgagcagcagactgagagtgtccgccaccttctggcagaacccccggaaccacttcagatgccaggtgcagttctacggcctgagcgagaacgacgagtggacccaggacagagccaagcccgtgacccagatcgtgtctgccgaagcctggggcagagccgattgcggctttaccagcgagagctaccagcagggcgtgctgagcgccaccatcctgtacgagatcctgctgggcaaggccaccctgtacgccgtgctggtgtctgccctggtgctgatggctatggtcaagcggaaggacagccggggaagggccaagcgatctggatctggagcaacaaacttctcactactcaaacaagcaggtgacgtggaggagaatcccgggcctactagtaccatggactggatttggcgcatccttttccttgtcggcgctgctaccggcgcccattccgggccccaggtgcagctccaagaaagcggacccggactggttaagccctctcagaccctgtctctgacctgcacagttagcggagccagcattaccacaggcgagtattattggaattggtttcggcagccaccaggcaaggggcttgagtggatgggtgctattgctgcctctggcagcaccacctactctcccagctttgagagcagaacctccatcagccgggacacctccaaaaaccagttctctctgaagctgtcctccgtgaccgctgctgacaccgccgtctattattgtggccggtctttcggcgtggcagctgtgaccacaggacagaacagaggccagggaacacttgtgaccgtgtcctctggatccggcggcggaggatctggcggaggcggatctgggggcggaggctctttcgaagaggtgcaactggtgcagagcggagccgaagtgaagaaacctggggccagcgtgcgggtgtcctgcaaggccagcggctacacctttaccaactacggcatgaactgggtgcgccaggctcctggacagggcctggaatggatgggctggatcaacacctacaccggcgagcccacctacgccgacgacttcaagggcagagtgaccatgaccaccgacaccagcacctccaccgcctacatggaactgcggagcctgagaagcgacgacaccgccgtgtattattgcgcccggatcggcgacagcagccccagcgattattggggccagggaaccctcgtgaccgtgtcctctacgcgtatccagaaccctgatcctgccgtgtaccagctgcgggatagcaagagcagcgacaagagcgtgtgtctgttcaccgacttcgacagccagaccaacgtgtcccagagcaaggactccgacgtgtacatcaccgataagtgcgtgctggacatgcggagcatggacttcaagagcaactccgccgtggcctggtccaacaagtccgatttcgcctgcgccaacgccttcaacaacagcattatccccgaggacacattcttcccaagccccgagagcagctgcgacgtgaagctggtggaaaagagcttcgagacagacaccaacctgaacttccagaacctgagcgtgatcggcttcagaatcctgctgctgaaagtggccggctttaacctgctgatgaccctgcggctgtggtccagc

SEQ ID NO: 35269 - DNA, 2715 bp, synthetic construct
  source 1..2715: mol_type = other DNA
atggccttaccagtgaccgccttgctcctgccgctggccttgctgctccacgccgccaggccggaagtgcagctggttgaatctggcggaggactggttcaggctggcggatctctgagactgtcttgtgccgccagcggcagaacctttagcatgggctggtttagacaggcccctggcaaagagagagagttcgtcgccgccatcacatactctggcggcagcccttactacgccgactctgtgaagggcagattcaccatcagccgggacaacgccaagaacaccgtgtacctccagatgaacagcctgaagcctgaggacaccgccgtgtactactgcgccgccaatccaacatacggcagcgactggaacgccgagaattggggccagggaacccaagtgacagtgtctagcggtaccggcggaggcggatctggcggcggaggtagcggtggcggaggatctgaattcgacatcgtgatgacccagagccctgccaccctgtccgtgtctccaggcgaaagagccaccctgagctgcagagcttcccagagcgtgtccaacgacgtcgtgtggtatcagcagaagcccggccaggcccccagactgctgatctactacgccagcaacagatacaccggcatccccgccagattcagcggctctggcagcggcaccgagttcaccctgacaatcagcagcctccagagcgaggacttcgccgtgtactactgtcagcaggactacaccagcccctggaccttcggccagggcaccaagctggaaatcaagagactcgagatccagaaccctgatcctgccgtgtaccagctgcgggatagcaagagcagcgacaagagcgtgtgtctgttcaccgacttcgacagccagaccaacgtgtcccagagcaaggactccgacgtgtacatcaccgataagtgcgtgctggacatgcggagcatggacttcaagagcaactccgccgtggcctggtccaacaagtccgatttcgcctgcgccaacgccttcaacaacagcattatccccgaggacacattcttcccaagcagcgacgtgccctgcgacgtgaagctggtggaaaagagcttcgagacagacaccaacctgaacttccagaacctgagcgtgatcggcttcagaatcctgctgctgaaagtggccggctttaacctgctgatgaccctgcggctgtggtccagccgcgccaagagaagcggatctggcgtgaagcagaccctgaatttcgacctgctgaagctggctggcgacgtggaatccaacccaggccctactagtaccatggactggatttggcgcatccttttccttgtcggcgctgctaccggcgcccattccgggccccaggtgcagctggttgaatctggcggaggactggttcagcctggcggatctctgagactgtcttgtgccgccagcggcaacatcaacagcagaaactgcatgggctggttcagacaggcccctggcaagggaagagaaggcgtggcagctatcggccaagtgaccggcagaacctactacgtggacagcgtgaagggcagattcaccatcagcctggacaacagcaagaacaccctgtacctccagatgaacagcctgagagccgaggacaccgccgtgtactattgtgctgctgcccctggctgtctgctgtctgcacttagaagcgccgactacagaaactggggccagggcacactggtcaccgtttcttctggatccggcggcggaggatctggcggaggcggatctgggggcggaggctctttcgaagaggtgcaactggtgcagagcggagccgaagtgaagaaacctggggccagcgtgcgggtgtcctgcaaggccagcggctacacctttaccaactacggcatgaactgggtgcgccaggctcctggacagggcctggaatggatgggctggatcaacacctacaccggcgagcccacctacgccgacgacttcaagggcagagtgaccatgaccaccgacaccagcacctccaccgcctacatggaactgcggagcctgagaagcgacgacaccgccgtgtattattgcgcccggatcggcgacagcagccccagcgattattggggccagggaaccctcgtgaccgtgtcctctacgcgtgaggacctgaagaacgtgttcccacctgaggtggccgtgttcgagcctagcaaggccgagatcgcccacacccagaaagccaccctcgtgtgcctggctaccggcttctaccccgaccatgtggaactgtcttggtgggtcaacggcaaagaggtgcacagcggcgtgtgtaccgacccccagccactgaaagaacagcccgccctgaacgacagccggtactgcctgagcagcagactgagagtgtccgccaccttctggcagaacccccggaaccacttcagatgccaggtgcagttctacggcctgagcgagaacgacgagtggacccaggacagagccaagcccgtgacccagatcgtgtctgccgaagcctggggcagagccgattgcggcatcaccagcgccagctaccaccagggcgtgctgagcgccaccatcctgtacgagatcctgctgggcaaggccaccctgtacgccgtgctggtgtctgccctggtgctgatggctatggtcaagcggaaggacagccgggga

SEQ ID NO: 35270 - DNA, 2703 bp, synthetic construct
  source 1..2703: mol_type = other DNA
atggccttaccagtgaccgccttgctcctgccgctggccttgctgctccacgccgccaggccggaagtgcagctggttgaatctggcggaggactggttcaggctggcggatctctgagactgtcttgtgccgccagcggcagaacctttagcatgggctggtttagacaggcccctggcaaagagagagagttcgtcgccgccatcacatactctggcggcagcccttactacgccgactctgtgaagggcagattcaccatcagccgggacaacgccaagaacaccgtgtacctccagatgaacagcctgaagcctgaggacaccgccgtgtactactgcgccgccaatccaacatacggcagcgactggaacgccgagaattggggccagggaacccaagtgacagtgtctagcggtaccggcggaggcggatctggcggcggaggtagcggtggcggaggatctgaattcgacatcgtgatgacccagagccctgccaccctgtccgtgtctccaggcgaaagagccaccctgagctgcagagcttcccagagcgtgtccaacgacgtcgtgtggtatcagcagaagcccggccaggcccccagactgctgatctactacgccagcaacagatacaccggcatccccgccagattcagcggctctggcagcggcaccgagttcaccctgacaatcagcagcctccagagcgaggacttcgccgtgtactactgtcagcaggactacaccagcccctggaccttcggccagggcaccaagctggaaatcaagagactcgaggacctgaagaacgtgttcccacctgaggtggccgtgttcgagcctagcgaggccgagatcagccacacccagaaagccaccctcgtgtgcctggctaccggcttctaccccgaccatgtggaactgtcttggtgggtcaacggcaaagaggtgcacagcggcgtgtgtaccgacccccagccactgaaagaacagcccgccctgaacgacagccggtactgcctgagcagcagactgagagtgtccgccaccttctggcagaacccccggaaccacttcagatgccaggtgcagttctacggcctgagcgagaacgacgagtggacccaggacagagccaagcccgtgacccagatcgtgtctgccgaagcctggggcagagccgattgcggctttaccagcgagagctaccagcagggcgtgctgagcgccaccatcctgtacgagatcctgctgggcaaggccaccctgtacgccgtgctggtgtctgccctggtgctgatggctatggtcaagcggaaggacagccggggaagggccaagcgatctggatctggagcaacaaacttctcactactcaaacaagcaggtgacgtggaggagaatcccgggcctactagtaccatggactggatttggcgcatccttttccttgtcggcgctgctaccggcgcccattccgggccccaggtgcagctggttgaatctggcggaggactggttcagcctggcggatctctgagactgtcttgtgccgccagcggcaacatcaacagcagaaactgcatgggctggttcagacaggcccctggcaagggaagagaaggcgtggcagctatcggccaagtgaccggcagaacctactacgtggacagcgtgaagggcagattcaccatcagcctggacaacagcaagaacaccctgtacctccagatgaacagcctgagagccgaggacaccgccgtgtactattgtgctgctgcccctggctgtctgctgtctgcacttagaagcgccgactacagaaactggggccagggcacactggtcaccgtttcttctggatccggcggcggaggatctggcggaggcggatctgggggcggaggctctttcgaagaggtgcaactggtgcagagcggagccgaagtgaagaaacctggggccagcgtgcgggtgtcctgcaaggccagcggctacacctttaccaactacggcatgaactgggtgcgccaggctcctggacagggcctggaatggatgggctggatcaacacctacaccggcgagcccacctacgccgacgacttcaagggcagagtgaccatgaccaccgacaccagcacctccaccgcctacatggaactgcggagcctgagaagcgacgacaccgccgtgtattattgcgcccggatcggcgacagcagccccagcgattattggggccagggaaccctcgtgaccgtgtcctctacgcgtatccagaaccctgatcctgccgtgtaccagctgcgggatagcaagagcagcgacaagagcgtgtgtctgttcaccgacttcgacagccagaccaacgtgtcccagagcaaggactccgacgtgtacatcaccgataagtgcgtgctggacatgcggagcatggacttcaagagcaactccgccgtggcctggtccaacaagtccgatttcgcctgcgccaacgccttcaacaacagcattatccccgaggacacattcttcccaagccccgagagcagctgcgacgtgaagctggtggaaaagagcttcgagacagacaccaacctgaacttccagaacctgagcgtgatcggcttcagaatcctgctgctgaaagtggccggctttaacctgctgatgaccctgcggctgtggtccagc

SEQ ID NO: 35271 - DNA, 2703 bp, synthetic construct
  source 1..2703: mol_type = other DNA
atggccttaccagtgaccgccttgctcctgccgctggccttgctgctccacgccgccaggccggaagtgcaactggttgaatccggtggcggcctggtgcaagcaggcggatctctcagacttagctgtgccgcctccggcagaaccttcacaatgggatggtttaggcaggctccagggaaagagagagagttcgtcgccgccatctctctgtctcccacactggcctactacgccgactctgtgaaaggccggttcaccatctccagagataatgccaagaacaccgtggtgctgcaaatgaactctctgaaacccgaggatacagccctgtactattgtgccgctgaccggaagtccgtgatgagcatcagacccgattactggggacagggcacacaagtcacagtgtcctctggtaccggcggaggcggatctggcggcggaggtagcggtggcggaggatctgaattcgacatcgtgatgacccagagccctgccaccctgtccgtgtctccaggcgaaagagccaccctgagctgcagagcttcccagagcgtgtccaacgacgtcgtgtggtatcagcagaagcccggccaggcccccagactgctgatctactacgccagcaacagatacaccggcatccccgccagattcagcggctctggcagcggcaccgagttcaccctgacaatcagcagcctccagagcgaggacttcgccgtgtactactgtcagcaggactacaccagcccctggaccttcggccagggcaccaagctggaaatcaagagactcgaggacctgaagaacgtgttcccacctgaggtggccgtgttcgagcctagcgaggccgagatcagccacacccagaaagccaccctcgtgtgcctggctaccggcttctaccccgaccatgtggaactgtcttggtgggtcaacggcaaagaggtgcacagcggcgtgtgtaccgacccccagccactgaaagaacagcccgccctgaacgacagccggtactgcctgagcagcagactgagagtgtccgccaccttctggcagaacccccggaaccacttcagatgccaggtgcagttctacggcctgagcgagaacgacgagtggacccaggacagagccaagcccgtgacccagatcgtgtctgccgaagcctggggcagagccgattgcggctttaccagcgagagctaccagcagggcgtgctgagcgccaccatcctgtacgagatcctgctgggcaaggccaccctgtacgccgtgctggtgtctgccctggtgctgatggctatggtcaagcggaaggacagccggggaagggccaagcgatctggatctggagcaacaaacttctcactactcaaacaagcaggtgacgtggaggagaatcccgggcctactagtaccatggactggatttggcgcatccttttccttgtcggcgctgctaccggcgcccattccgggccccaggtgcagctggttgaatctggcggaggactggttcagcctggcggatctctgagactgtcttgtgccgccagcggcaacatcaacagcagaaactgcatgggctggttcagacaggcccctggcaagggaagagaaggcgtggcagctatcggccaagtgaccggcagaacctactacgtggacagcgtgaagggcagattcaccatcagcctggacaacagcaagaacaccctgtacctccagatgaacagcctgagagccgaggacaccgccgtgtactattgtgctgctgcccctggctgtctgctgtctgcacttagaagcgccgactacagaaactggggccagggcacactggtcaccgtttcttctggatccggcggcggaggatctggcggaggcggatctgggggcggaggctctttcgaagaggtgcaactggtgcagagcggagccgaagtgaagaaacctggggccagcgtgcgggtgtcctgcaaggccagcggctacacctttaccaactacggcatgaactgggtgcgccaggctcctggacagggcctggaatggatgggctggatcaacacctacaccggcgagcccacctacgccgacgacttcaagggcagagtgaccatgaccaccgacaccagcacctccaccgcctacatggaactgcggagcctgagaagcgacgacaccgccgtgtattattgcgcccggatcggcgacagcagccccagcgattattggggccagggaaccctcgtgaccgtgtcctctacgcgtatccagaaccctgatcctgccgtgtaccagctgcgggatagcaagagcagcgacaagagcgtgtgtctgttcaccgacttcgacagccagaccaacgtgtcccagagcaaggactccgacgtgtacatcaccgataagtgcgtgctggacatgcggagcatggacttcaagagcaactccgccgtggcctggtccaacaagtccgatttcgcctgcgccaacgccttcaacaacagcattatccccgaggacacattcttcccaagccccgagagcagctgcgacgtgaagctggtggaaaagagcttcgagacagacaccaacctgaacttccagaacctgagcgtgatcggcttcagaatcctgctgctgaaagtggccggctttaacctgctgatgaccctgcggctgtggtccagc

SEQ ID NO: 35272 - DNA, 2715 bp, synthetic construct
  source 1..2715: mol_type = other DNA
atggccttaccagtgaccgccttgctcctgccgctggccttgctgctccacgccgccaggccgcaggttcagctgcaagagtctggccctggcctggtcaagcctagccaaacactgagcctgacctgtaccgtgtctggcggctctatcaccaccggcgagttctactggaactggttcagacagcctcctggcaaaggactggaatggatgggagccattgccgccagcggcagcacaacatacagccctagcttcgagagccggaccagcatcagcagagacaccagcaagaatcagttcagcctgaagctgagcagcgtgacagccgccgatacagccgtgtattactgcggcagatcctttggagtggccgccgtgacaaccggccagaatagaggacagggcaccctggtcacagtgtctagcggtaccggcggaggcggatctggcggcggaggtagcggtggcggaggatctgaattcgacatcgtgatgacccagagccctgccaccctgtccgtgtctccaggcgaaagagccaccctgagctgcagagcttcccagagcgtgtccaacgacgtcgtgtggtatcagcagaagcccggccaggcccccagactgctgatctactacgccagcaacagatacaccggcatccccgccagattcagcggctctggcagcggcaccgagttcaccctgacaatcagcagcctccagagcgaggacttcgccgtgtactactgtcagcaggactacaccagcccctggaccttcggccagggcaccaagctggaaatcaagagactcgaggacctgaagaacgtgttcccacctgaggtggccgtgttcgagcctagcgaggccgagatcagccacacccagaaagccaccctcgtgtgcctggctaccggcttctaccccgaccatgtggaactgtcttggtgggtcaacggcaaagaggtgcacagcggcgtgtgtaccgacccccagccactgaaagaacagcccgccctgaacgacagccggtactgcctgagcagcagactgagagtgtccgccaccttctggcagaacccccggaaccacttcagatgccaggtgcagttctacggcctgagcgagaacgacgagtggacccaggacagagccaagcccgtgacccagatcgtgtctgccgaagcctggggcagagccgattgcggctttaccagcgagagctaccagcagggcgtgctgagcgccaccatcctgtacgagatcctgctgggcaaggccaccctgtacgccgtgctggtgtctgccctggtgctgatggctatggtcaagcggaaggacagccggggaagggccaagcgatctggatctggagcaacaaacttctcactactcaaacaagcaggtgacgtggaggagaatcccgggcctactagtaccatggactggatttggcgcatccttttccttgtcggcgctgctaccggcgcccattccgggccccaggtgcagctggttgaatctggcggaggactggttcagcctggcggatctctgagactgtcttgtgccgccagcggcaacatcaacagcagaaactgcatgggctggttcagacaggcccctggcaagggaagagaaggcgtggcagctatcggccaagtgaccggcagaacctactacgtggacagcgtgaagggcagattcaccatcagcctggacaacagcaagaacaccctgtacctccagatgaacagcctgagagccgaggacaccgccgtgtactattgtgctgctgcccctggctgtctgctgtctgcacttagaagcgccgactacagaaactggggccagggcacactggtcaccgtttcttctggatccggcggcggaggatctggcggaggcggatctgggggcggaggctctttcgaagaggtgcaactggtgcagagcggagccgaagtgaagaaacctggggccagcgtgcgggtgtcctgcaaggccagcggctacacctttaccaactacggcatgaactgggtgcgccaggctcctggacagggcctggaatggatgggctggatcaacacctacaccggcgagcccacctacgccgacgacttcaagggcagagtgaccatgaccaccgacaccagcacctccaccgcctacatggaactgcggagcctgagaagcgacgacaccgccgtgtattattgcgcccggatcggcgacagcagccccagcgattattggggccagggaaccctcgtgaccgtgtcctctacgcgtatccagaaccctgatcctgccgtgtaccagctgcgggatagcaagagcagcgacaagagcgtgtgtctgttcaccgacttcgacagccagaccaacgtgtcccagagcaaggactccgacgtgtacatcaccgataagtgcgtgctggacatgcggagcatggacttcaagagcaactccgccgtggcctggtccaacaagtccgatttcgcctgcgccaacgccttcaacaacagcattatccccgaggacacattcttcccaagccccgagagcagctgcgacgtgaagctggtggaaaagagcttcgagacagacaccaacctgaacttccagaacctgagcgtgatcggcttcagaatcctgctgctgaaagtggccggctttaacctgctgatgaccctgcggctgtggtccagc

SEQ ID NO: 35273 - DNA, 1458 bp, synthetic construct
  source 1..1458: mol_type = other DNA
atggccttaccagtgaccgccttgctcctgccgctggccttgctgctccacgccgccaggccggacatccagatgacacagagccctagcagcctgtctgccagcgtgggagacagagtgaccatcacctgtagagccagccaggacgtgcggaacatcgtcgtgtggttccagcagaagcctggcaaggcccctaagctgctgatctacagcggcagctacagatacagcggcgtgcccagcagattttccggctctggctctggcaccgacttcaccctgacaatatccagcctccagcctgaggacttcgccacctactactgccagcagcactacagccctccatacacattcggccagggcaccaaggtggaaatcaagagaggcggaggcggaagtggaggcggaggatctggcggcggaggctctgaagttcagctggtggaatctggccctggcctggtcaagcctagcgagacactgagcctgacctgtaccgtgtccggcttcagcctgaccagatttggcgtgcactgggtccgacagccacctggcaaaggactggaatggctgggagtgatttggagaggcggcagcaccgattacaacgccgccttcatgagccggctgaccatcagcaaggacaacagcaagaaccaggtgtccctgaagctgagcagcgtgacagccgctgataccgccgtgtactactgctccaaccactactacggcagctccgactacgccctggataattggggccagggaaccctggtcaccgtgtcatctacgcgtaaaattgaagttatgtatcctcctccttacctagacaatgagaagagcaatggaaccattatccatgtgaaagggaaacacctttgtccaagtcccctatttcccggaccttctaagcccttttgggtgctggtggtggttgggggagtcctggcttgctatagcttgctagtaacagtggcctttattattttctgggtgaggagtaagaggagcaggctcctgcacagtgactacatgaacatgactccacgccgccccggacccacccgcaagcattaccagccctatgccccaccacgcgacttcgcagcctatcgctccagagtgaagttcagcaggagcgcagacgcccccgcgtaccagcagggccagaaccagctctataacgagctcaatctaggacgaagagaggagtacgatgttttggacaagagacgtggccgggaccctgagatggggggaaagccgagaaggaagaaccctcaggaaggcctgtacaatgaactgcagaaagataagatggcggaggcctacagtgagattgggatgaaaggcgagcgccggaggggcaaggggcacgatggcctttaccagggtctcagtacagccaccaaggacacctacgacgcccttcacatgcaggccctgccccctcgc

SEQ ID NO: 35274 - DNA, 1476 bp, synthetic construct
  source 1..1476: mol_type = other DNA
atggccttaccagtgaccgccttgctcctgccgctggccttgctgctccacgccgccaggccggacatccagatgacacagagccctagcagcctgtctgccagcgtgggagacagagtgaccatcacctgtagagccagccaggacgtgcggaacatcgtcgtgtggttccagcagaagcctggcaaggcccctaagctgctgatctacagcggcagctacagatacagcggcgtgcccagcagattttccggctctggctctggcaccgacttcaccctgacaatatccagcctccagcctgaggacttcgccacctactactgccagcagcactacagccctccatacacattcggccagggcaccaaggtggaaatcaagagaggcggaggcggaagtggaggcggaggatctggcggcggaggctctgaagttcagctggtggaatctggccctggcctggtcaagcctagcgagacactgagcctgacctgtaccgtgtccggcttcagcctgaccagatttggcgtgcactgggtccgacagccacctggcaaaggactggaatggctgggagtgatttggagaggcggcagcaccgattacaacgccgccttcatgagccggctgaccatcagcaaggacaacagcaagaaccaggtgtccctgaagctgagcagcgtgacagccgctgataccgccgtgtactactgctccaaccactactacggcagctccgactacgccctggataattggggccagggaaccctggtcaccgtgtcatctacgcgtgcgaagcccaccacgacgccagcgccgcgaccaccaacaccggcgcccaccatcgcgtcgcagcccctgtccctgcgcccagaggcgtgccggccagcggcggggggcgcagtgcacacgagggggctggacttcgcctgtgacatctacatctgggcgcccttggccgggacttgtggggtccttctcctgtcactggttatcaccctttactgcaaacggggcagaaagaaactcctgtatatattcaaacaaccatttatgagaccagtacaaactactcaagaggaagatggctgtagctgccgatttccagaagaagaagaaggaggatgtgaactgagagtgaagttcagcaggagcgcagacgcccccgcgtaccagcagggccagaaccagctctataacgagctgaatctaggacgaagagaggagtacgatgttttggacaagagacgtggccgggaccctgagatggggggaaagccgagaaggaagaaccctcaggaaggcctgtacaatgaactgcagaaagataagatggcggaggcctacagtgagattgggatgaaaggcgagcgccggaggggcaaggggcacgatggcctttaccagggtctcagtacagccaccaaggacacctacgacgcccttcacatgcaggccctgccccctcgc

SEQ ID NO: 35275 - DNA, 1476 bp, synthetic construct
  source 1..1476: mol_type = other DNA
atggccttaccagtgaccgccttgctcctgccgctggccttgctgctccacgccgccaggccggaagttcagctggtggaatctggccctggcctggtcaagcctagcgagacactgagcctgacctgtaccgtgtccggcttcagcctgaccagatttggcgtgcactgggtccgacagccacctggcaaaggactggaatggctgggagtgatttggagaggcggcagcaccgattacaacgccgccttcatgagccggctgaccatcagcaaggacaacagcaagaaccaggtgtccctgaagctgagcagcgtgacagccgctgataccgccgtgtactactgctccaaccactactacggcagctccgactacgccctggataattggggccagggaaccctggtcaccgtgtcatctggcggaggcggaagtggaggcggaggatctggcggcggaggctctgacatccagatgacacagagccctagcagcctgtctgccagcgtgggagacagagtgaccatcacctgtagagccagccaggacgtgcggaacatcgtcgtgtggttccagcagaagcctggcaaggcccctaagctgctgatctacagcggcagctacagatacagcggcgtgcccagcagattttccggctctggctctggcaccgacttcaccctgacaatatccagcctccagcctgaggacttcgccacctactactgccagcagcactacagccctccatacacattcggccagggcaccaaggtggaaatcaagagaacgcgtgcgaagcccaccacgacgccagcgccgcgaccaccaacaccggcgcccaccatcgcgtcgcagcccctgtccctgcgcccagaggcgtgccggccagcggcggggggcgcagtgcacacgagggggctggacttcgcctgtgacatctacatctgggcgcccttggccgggacttgtggggtccttctcctgtcactggttatcaccctttactgcaaacggggcagaaagaaactcctgtatatattcaaacaaccatttatgagaccagtacaaactactcaagaggaagatggctgtagctgccgatttccagaagaagaagaaggaggatgtgaactgagagtgaagttcagcaggagcgcagacgcccccgcgtaccagcagggccagaaccagctctataacgagctgaatctaggacgaagagaggagtacgatgttttggacaagagacgtggccgggaccctgagatggggggaaagccgagaaggaagaaccctcaggaaggcctgtacaatgaactgcagaaagataagatggcggaggcctacagtgagattgggatgaaaggcgagcgccggaggggcaaggggcacgatggcctttaccagggtctcagtacagccaccaaggacacctacgacgcccttcacatgcaggccctgccccctcgc

SEQ ID NO: 35276 - DNA, 1875 bp, synthetic construct
  source 1..1875: mol_type = other DNA
atggccttaccagtgaccgccttgctcctgccgctggccttgctgctccacgccgccaggccggacatccagatgacacagagccctagcagcctgtctgccagcgtgggagacagagtgaccatcacctgtagagccagccaggacgtgcggaacatcgtcgtgtggttccagcagaagcctggcaaggcccctaagctgctgatctacagcggcagctacagatacagcggcgtgcccagcagattttccggctctggctctggcaccgacttcaccctgacaatatccagcctccagcctgaggacttcgccacctactactgccagcagcactacagccctccatacacattcggccagggcaccaaggtggaaatcaagagactcgagatccagaaccctgatcctgccgtgtaccagctgcgggatagcaagagcagcgacaagagcgtgtgtctgttcaccgacttcgacagccagaccaacgtgtcccagagcaaggactccgacgtgtacatcaccgataagtgcgtgctggacatgcggagcatggacttcaagagcaactccgccgtggcctggtccaacaagtccgatttcgcctgcgccaacgccttcaacaacagcattatccccgaggacacattcttcccaagcagcgacgtgccctgcgacgtgaagctggtggaaaagagcttcgagacagacaccaacctgaacttccagaacctgagcgtgatcggcttcagaatcctgctgctgaaagtggccggctttaacctgctgatgaccctgcggctgtggtccagccgcgccaagagaagcggatctggcgtgaagcagaccctgaatttcgacctgctgaagctggctggcgacgtggaatccaacccaggccctactagtatggactggatttggcgcatccttttccttgtcggcgctgctaccggcgcgcattccttcgaagaagttcagctggtggaatctggccctggcctggtcaagcctagcgagacactgagcctgacctgtaccgtgtccggcttcagcctgaccagatttggcgtgcactgggtccgacagccacctggcaaaggactggaatggctgggagtgatttggagaggcggcagcaccgattacaacgccgccttcatgagccggctgaccatcagcaaggacaacagcaagaaccaggtgtccctgaagctgagcagcgtgacagccgctgataccgccgtgtactactgctccaaccactactacggcagctccgactacgccctggataattggggccagggaaccctggtcaccgtgtcatctacgcgtgaggacctgaagaacgtgttcccacctgaggtggccgtgttcgagcctagcaaggccgagatcgcccacacccagaaagccaccctcgtgtgcctggctaccggcttctaccccgaccatgtggaactgtcttggtgggtcaacggcaaagaggtgcacagcggcgtgtgtaccgacccccagccactgaaagaacagcccgccctgaacgacagccggtactgcctgagcagcagactgagagtgtccgccaccttctggcagaacccccggaaccacttcagatgccaggtgcagttctacggcctgagcgagaacgacgagtggacccaggacagagccaagcccgtgacccagatcgtgtctgccgaagcctggggcagagccgattgcggcatcaccagcgccagctaccaccagggcgtgctgagcgccaccatcctgtacgagatcctgctgggcaaggccaccctgtacgccgtgctggtgtctgccctggtgctgatggctatggtcaagcggaaggacagccgggga

SEQ ID NO: 35277 - DNA, 1863 bp, synthetic construct
  source 1..1863: mol_type = other DNA
atggccttaccagtgaccgccttgctcctgccgctggccttgctgctccacgccgccaggccggacatccagatgacacagagccctagcagcctgtctgccagcgtgggagacagagtgaccatcacctgtagagccagccaggacgtgcggaacatcgtcgtgtggttccagcagaagcctggcaaggcccctaagctgctgatctacagcggcagctacagatacagcggcgtgcccagcagattttccggctctggctctggcaccgacttcaccctgacaatatccagcctccagcctgaggacttcgccacctactactgccagcagcactacagccctccatacacattcggccagggcaccaaggtggaaatcaagagactcgaggacctgaagaacgtgttcccacctgaggtggccgtgttcgagcctagcaaggccgagatcgcccacacccagaaagccaccctcgtgtgcctggctaccggcttctaccccgaccatgtggaactgtcttggtgggtcaacggcaaagaggtgcacagcggcgtgtgtaccgacccccagccactgaaagaacagcccgccctgaacgacagccggtactgcctgagcagcagactgagagtgtccgccaccttctggcagaacccccggaaccacttcagatgccaggtgcagttctacggcctgagcgagaacgacgagtggacccaggacagagccaagcccgtgacccagatcgtgtctgccgaagcctggggcagagccgattgcggcatcaccagcgccagctaccaccagggcgtgctgagcgccaccatcctgtacgagatcctgctgggcaaggccaccctgtacgccgtgctggtgtctgccctggtgctgatggctatggtcaagcggaaggacagccggggaagggccaagcgatctggatctggagcaacaaacttctcactactcaaacaagcaggtgacgtggaggagaatcccgggcctactagtatggactggatttggcgcatccttttccttgtcggcgctgctaccggcgcgcattccttcgaagaagttcagctggtggaatctggccctggcctggtcaagcctagcgagacactgagcctgacctgtaccgtgtccggcttcagcctgaccagatttggcgtgcactgggtccgacagccacctggcaaaggactggaatggctgggagtgatttggagaggcggcagcaccgattacaacgccgccttcatgagccggctgaccatcagcaaggacaacagcaagaaccaggtgtccctgaagctgagcagcgtgacagccgctgataccgccgtgtactactgctccaaccactactacggcagctccgactacgccctggataattggggccagggaaccctggtcaccgtgtcatctacgcgtatccagaaccctgatcctgccgtgtaccagctgcgggatagcaagagcagcgacaagagcgtgtgtctgttcaccgacttcgacagccagaccaacgtgtcccagagcaaggactccgacgtgtacatcaccgataagtgcgtgctggacatgcggagcatggacttcaagagcaactccgccgtggcctggtccaacaagtccgatttcgcctgcgccaacgccttcaacaacagcattatccccgaggacacattcttcccaagcagcgacgtgccctgcgacgtgaagctggtggaaaagagcttcgagacagacaccaacctgaacttccagaacctgagcgtgatcggcttcagaatcctgctgctgaaagtggccggctttaacctgctgatgaccctgcggctgtggtccagc

SEQ ID NO: 35278 - DNA, 1863 bp, synthetic construct
  source 1..1863: mol_type = other DNA
atggccttaccagtgaccgccttgctcctgccgctggccttgctgctccacgccgccaggccggacatccagatgacacagagccctagcagcctgtctgccagcgtgggagacagagtgaccatcacctgtagagccagccaggacgtgcggaacatcgtcgtgtggttccagcagaagcctggcaaggcccctaagctgctgatctacagcggcagctacagatacagcggcgtgcccagcagattttccggctctggctctggcaccgacttcaccctgacaatatccagcctccagcctgaggacttcgccacctactactgccagcagcactacagccctccatacacattcggccagggcaccaaggtggaaatcaagagactcgaggacctgaagaacgtgttcccacctgaggtggccgtgttcgagcctagcgaggccgagatcagccacacccagaaagccaccctcgtgtgcctggctaccggcttctaccccgaccatgtggaactgtcttggtgggtcaacggcaaagaggtgcacagcggcgtgtgtaccgacccccagccactgaaagaacagcccgccctgaacgacagccggtactgcctgagcagcagactgagagtgtccgccaccttctggcagaacccccggaaccacttcagatgccaggtgcagttctacggcctgagcgagaacgacgagtggacccaggacagagccaagcccgtgacccagatcgtgtctgccgaagcctggggcagagccgattgcggctttaccagcgagagctaccagcagggcgtgctgagcgccaccatcctgtacgagatcctgctgggcaaggccaccctgtacgccgtgctggtgtctgccctggtgctgatggctatggtcaagcggaaggacagccggggaagggccaagcgatctggatctggagcaacaaacttctcactactcaaacaagcaggtgacgtggaggagaatcccgggcctactagtatggactggatttggcgcatccttttccttgtcggcgctgctaccggcgcgcattccttcgaagaagttcagctggtggaatctggccctggcctggtcaagcctagcgagacactgagcctgacctgtaccgtgtccggcttcagcctgaccagatttggcgtgcactgggtccgacagccacctggcaaaggactggaatggctgggagtgatttggagaggcggcagcaccgattacaacgccgccttcatgagccggctgaccatcagcaaggacaacagcaagaaccaggtgtccctgaagctgagcagcgtgacagccgctgataccgccgtgtactactgctccaaccactactacggcagctccgactacgccctggataattggggccagggaaccctggtcaccgtgtcatctacgcgtatccagaaccctgatcctgccgtgtaccagctgcgggatagcaagagcagcgacaagagcgtgtgtctgttcaccgacttcgacagccagaccaacgtgtcccagagcaaggactccgacgtgtacatcaccgataagtgcgtgctggacatgcggagcatggacttcaagagcaactccgccgtggcctggtccaacaagtccgatttcgcctgcgccaacgccttcaacaacagcattatccccgaggacacattcttcccaagccccgagagcagctgcgacgtgaagctggtggaaaagagcttcgagacagacaccaacctgaacttccagaacctgagcgtgatcggcttcagaatcctgctgctgaaagtggccggctttaacctgctgatgaccctgcggctgtggtccagc

SEQ ID NO: 35279 - DNA, 1875 bp, synthetic construct
  source 1..1875: mol_type = other DNA
atggccttaccagtgaccgccttgctcctgccgctggccttgctgctccacgccgccaggccggacatccagatgacacagagccctagcagcctgtctgccagcgtgggagacagagtgaccatcacctgtagagccagccaggacgtgcggaacatcgtcgtgtggttccagcagaagcctggcaaggcccctaagctgctgatctacagcggcagctacagatacagcggcgtgcccagcagattttccggctctggctctggcaccgacttcaccctgacaatatccagcctccagcctgaggacttcgccacctactactgccagcagcactacagccctccatacacattcggccagggcaccaaggtggaaatcaagagactcgagatccagaaccctgatcctgccgtgtaccagctgcgggatagcaagagcagcgacaagagcgtgtgtctgttcaccgacttcgacagccagaccaacgtgtcccagagcaaggactccgacgtgtacatcaccgataagtgcgtgctggacatgcggagcatggacttcaagagcaactccgccgtggcctggtccaacaagtccgatttcgcctgcgccaacgccttcaacaacagcattatccccgaggacacattcttcccaagccccgagagcagctgcgacgtgaagctggtggaaaagagcttcgagacagacaccaacctgaacttccagaacctgagcgtgatcggcttcagaatcctgctgctgaaagtggccggctttaacctgctgatgaccctgcggctgtggtccagccgcgccaagagaagcggatctggcgtgaagcagaccctgaatttcgacctgctgaagctggctggcgacgtggaatccaacccaggccctactagtatggactggatttggcgcatccttttccttgtcggcgctgctaccggcgcgcattccttcgaagaagttcagctggtggaatctggccctggcctggtcaagcctagcgagacactgagcctgacctgtaccgtgtccggcttcagcctgaccagatttggcgtgcactgggtccgacagccacctggcaaaggactggaatggctgggagtgatttggagaggcggcagcaccgattacaacgccgccttcatgagccggctgaccatcagcaaggacaacagcaagaaccaggtgtccctgaagctgagcagcgtgacagccgctgataccgccgtgtactactgctccaaccactactacggcagctccgactacgccctggataattggggccagggaaccctggtcaccgtgtcatctacgcgtgaggacctgaagaacgtgttcccacctgaggtggccgtgttcgagcctagcgaggccgagatcagccacacccagaaagccaccctcgtgtgcctggctaccggcttctaccccgaccatgtggaactgtcttggtgggtcaacggcaaagaggtgcacagcggcgtgtgtaccgacccccagccactgaaagaacagcccgccctgaacgacagccggtactgcctgagcagcagactgagagtgtccgccaccttctggcagaacccccggaaccacttcagatgccaggtgcagttctacggcctgagcgagaacgacgagtggacccaggacagagccaagcccgtgacccagatcgtgtctgccgaagcctggggcagagccgattgcggctttaccagcgagagctaccagcagggcgtgctgagcgccaccatcctgtacgagatcctgctgggcaaggccaccctgtacgccgtgctggtgtctgccctggtgctgatggctatggtcaagcggaaggacagccgggga

SEQ ID NO: 35280 - DNA, 1911 bp, synthetic construct
  source 1..1911: mol_type = other DNA
atggccttaccagtgaccgccttgctcctgccgctggccttgctgctccacgccgccaggccgctcgaggaggacctgaagaacgtgttcccacctgaggtggccgtgttcgagcctagcaaggccgagatcgcccacacccagaaagccaccctcgtgtgcctggctaccggcttctaccccgaccatgtggaactgtcttggtgggtcaacggcaaagaggtgcacagcggcgtgtgtaccgacccccagccactgaaagaacagcccgccctgaacgacagccggtactgcctgagcagcagactgagagtgtccgccaccttctggcagaacccccggaaccacttcagatgccaggtgcagttctacggcctgagcgagaacgacgagtggacccaggacagagccaagcccgtgacccagatcgtgtctgccgaagcctggggcagagccgattgcggcatcaccagcgccagctaccaccagggcgtgctgagcgccaccatcctgtacgagatcctgctgggcaaggccaccctgtacgccgtgctggtgtctgccctggtgctgatggctatggtcaagcggaaggacagccggggaagggccaagcgatctggatctggagcaacaaacttctcactactcaaacaagcaggtgacgtggaggagaatcccgggcctactagcatggccttaccagtgaccgccttgctcctgccgctggccttgctgctccacgccgccaggccggacatccagatgacacagagccctagcagcctgtctgccagcgtgggagacagagtgaccatcacctgtagagccagccaggacgtgcggaacatcgtcgtgtggttccagcagaagcctggcaaggcccctaagctgctgatctacagcggcagctacagatacagcggcgtgcccagcagattttccggctctggctctggcaccgacttcaccctgacaatatccagcctccagcctgaggacttcgccacctactactgccagcagcactacagccctccatacacattcggccagggcaccaaggtggaaatcaagagaggcggaggcggaagtggaggcggaggatctggcggcggaggctctgaagttcagctggtggaatctggccctggcctggtcaagcctagcgagacactgagcctgacctgtaccgtgtccggcttcagcctgaccagatttggcgtgcactgggtccgacagccacctggcaaaggactggaatggctgggagtgatttggagaggcggcagcaccgattacaacgccgccttcatgagccggctgaccatcagcaaggacaacagcaagaaccaggtgtccctgaagctgagcagcgtgacagccgctgataccgccgtgtactactgctccaaccactactacggcagctccgactacgccctggataattggggccagggaaccctggtcaccgtgtcatctacgcgtatccagaaccctgatcctgccgtgtaccagctgcgggatagcaagagcagcgacaagagcgtgtgtctgttcaccgacttcgacagccagaccaacgtgtcccagagcaaggactccgacgtgtacatcaccgataagtgcgtgctggacatgcggagcatggacttcaagagcaactccgccgtggcctggtccaacaagtccgatttcgcctgcgccaacgccttcaacaacagcattatccccgaggacacattcttcccaagcagcgacgtgccctgcgacgtgaagctggtggaaaagagcttcgagacagacaccaacctgaacttccagaacctgagcgtgatcggcttcagaatcctgctgctgaaagtggccggctttaacctgctgatgaccctgcggctgtggtccagc

SEQ ID NO: 35281 - DNA, 1932 bp, synthetic construct
  source 1..1932: mol_type = other DNA
atggccttaccagtgaccgccttgctcctgccgctggccttgctgctccacgccgccaggccgctcgagggctccggcgatcgccctgatcctgccgtgtaccagctgcgggatagcaagagcagcgacaagagcgtgtgtctgttcaccgacttcgacagccagaccaacgtgtcccagagcaaggactccgacgtgtacatcaccgataagtgcgtgctggacatgcggagcatggacttcaagagcaactccgccgtggcctggtccaacaagtccgatttcgcctgcgccaacgccttcaacaacagcattatccccgaggacacattcttcccaagccccgagagcagctgcgacgtgaagctggtggaaaagagcttcgagacagacaccaacctgaacttccagaacctgagcgtgatcggcttcagaatcctgctgctgaaagtggccggctttaacctgctgatgaccctgcggctgtggtccagctctagtcgcgccaagagaagcggatctggcgtgaagcagaccctgaatttcgacctgctgaagctggctggcgacgtggaatccaacccaggccccactagcatggccttaccagtgaccgccttgctcctgccgctggccttgctgctccacgccgccaggccggacatccagatgacacagagccctagcagcctgtctgccagcgtgggagacagagtgaccatcacctgtagagccagccaggacgtgcggaacatcgtcgtgtggttccagcagaagcctggcaaggcccctaagctgctgatctacagcggcagctacagatacagcggcgtgcccagcagattttccggctctggctctggcaccgacttcaccctgacaatatccagcctccagcctgaggacttcgccacctactactgccagcagcactacagccctccatacacattcggccagggcaccaaggtggaaatcaagagaggcggaggcggaagtggaggcggaggatctggcggcggaggctctgaagttcagctggtggaatctggccctggcctggtcaagcctagcgagacactgagcctgacctgtaccgtgtccggcttcagcctgaccagatttggcgtgcactgggtccgacagccacctggcaaaggactggaatggctgggagtgatttggagaggcggcagcaccgattacaacgccgccttcatgagccggctgaccatcagcaaggacaacagcaagaaccaggtgtccctgaagctgagcagcgtgacagccgctgataccgccgtgtactactgctccaaccactactacggcagctccgactacgccctggataattggggccagggaaccctggtcaccgtgtcatctacgcgtgaggacctgaagaacgtgttcccacctgaggtggccgtgttcgagcctagcgaggccgagatcagccacacccagaaagccaccctcgtgtgcctggctaccggcttctaccccgaccatgtggaactgtcttggtgggtcaacggcaaagaggtgcacagcggcgtgtgtaccgacccccagccactgaaagaacagcccgccctgaacgacagccggtactgcctgagcagcagactgagagtgtccgccaccttctggcagaacccccggaaccacttcagatgccaggtgcagttctacggcctgagcgagaacgacgagtggacccaggacagagccaagcccgtgacccagatcgtgtctgccgaagcctggggcagagccgattgcggctttaccagcgagagctaccagcagggcgtgctgagcgccaccatcctgtacgagatcctgctgggcaaggccaccctgtacgccgtgctggtgtctgccctggtgctgatggctatggtcaagcggaaggacagccgggga

SEQ ID NO: 35282 - DNA, 1863 bp, synthetic construct
  source 1..1863: mol_type = other DNA
atggccttaccagtgaccgccttgctcctgccgctggccttgctgctccacgccgccaggccggacatccagatgacacagagccctagcagcctgtctgccagcgtgggagacagagtgaccatcacctgtagagccagccaggacgtgcggaacatcgtcgtgtggttccagcagaagcctggcaaggcccctaagctgctgatctacagcggcagctacagatacagcggcgtgcccagcagattttccggctctggctctggcaccgacttcaccctgacaatatccagcctccagcctgaggacttcgccacctactactgccagcagcactacagccctccatacacattcggccagggcaccaaggtggaaatcaagagactcgaggacctgaagaacgtgttcccacctgaggtggccgtgttcgagcctagcgaggccgagatcagccacacccagaaagccaccctcgtgtgcctggctaccggcttctaccccgaccatgtggaactgtcttggtgggtcaacggcaaagaggtgcacagcggcgtgtctaccgacccccagccactgaaagaacagcccgccctgaacgacagccggtactgcctgagcagcagactgagagtgtccgccaccttctggcagaacccccggaaccacttcagatgccaggtgcagttctacggcctgagcgagaacgacgagtggacccaggacagagccaagcccgtgacccagatcgtgtctgccgaagcctggggcagagccgattgcggctttaccagcgagagctaccagcagggcgtgctgagcgccaccatcctgtacgagatcctgctgggcaaggccaccctgtacgccgtgctggtgtctgccctggtgctgatggctatggtcaagcggaaggacagccggggaagggccaagcgatctggatctggagcaacaaacttctcactactcaaacaagcaggtgacgtggaggagaatcccgggcctactagtatggactggatttggcgcatccttttccttgtcggcgctgctaccggcgcgcattccttcgaagaagttcagctggtggaatctggccctggcctggtcaagcctagcgagacactgagcctgacctgtaccgtgtccggcttcagcctgaccagatttggcgtgcactgggtccgacagccacctggcaaaggactggaatggctgggagtgatttggagaggcggcagcaccgattacaacgccgccttcatgagccggctgaccatcagcaaggacaacagcaagaaccaggtgtccctgaagctgagcagcgtgacagccgctgataccgccgtgtactactgctccaaccactactacggcagctccgactacgccctggataattggggccagggaaccctggtcaccgtgtcatctacgcgtatccagaaccctgatcctgccgtgtaccagctgcgggatagcaagagcagcgacaagagcgtgtgtctgttcaccgacttcgacagccagaccaacgtgtcccagagcaaggactccgacgtgtacatcaccgataagaccgtgctggacatgcggagcatggacttcaagagcaactccgccgtggcctggtccaacaagtccgatttcgcctgcgccaacgccttcaacaacagcattatccccgaggacacattcttcccaagccccgagagcagctgcgacgtgaagctggtggaaaagagcttcgagacagacaccaacctgaacttccagaacctgagcgtgatcggcttcagaatcctgctgctgaaagtggccggctttaacctgctgatgaccctgcggctgtggtccagc

SEQ ID NO: 35283 - DNA, 1887 bp, synthetic construct
  source 1..1887: mol_type = other DNA
atggccttaccagtgaccgccttgctcctgccgctggccttgctgctccacgccgccaggccggacatccagatgacacagagccctagcagcctgtctgccagcgtgggagacagagtgaccatcacctgtagagccagccaggacgtgcggaacatcgtcgtgtggttccagcagaagcctggcaaggcccctaagctgctgatctacagcggcagctacagatacagcggcgtgcccagcagattttccggctctggctctggcaccgacttcaccctgacaatatccagcctccagcctgaggacttcgccacctactactgccagcagcactacagccctccatacacattcggccagggcaccaaggtggaaatcaagagactcgaggacaagcagctggacgccgacgtgtcccccaagcctaccatcttcctgccctctatcgccgagacaaagctccagaaggccggcacctacctgtgcctgctggaaaagttcttcccagatgtgattaagatccactggcaggaaaagaagtccaacaccatcctgggcagccaggaaggcaacaccatgaagaccaacgacacctacatgaagttcagctggctgaccgtgcccgagaagtccctggacaaagaacacagatgcatcgtgcggcacgaaaacaacaagaacggcgtggaccaggaaatcatcttcccacccatcaagaccgatgtgattacaatggaccccaaggacaactgctccaaggacgccaacgataccctgctgctccagctgaccaacaccagcgcctactacatgtacttgttgctgctgctgaagtccgtggtgtacttcgccatcatcacatgctgcctgctgcggagaaccgccttctgctgcaacggcgagaagtctagggccaagcgatctggatctggagcaacaaacttctcactactcaaacaagcaggtgacgtggaggagaatcccgggcctactagtatggactggatttggcgcatccttttccttgtcggcgctgctaccggcgcgcattccttcgaagaagttcagctggtggaatctggccctggcctggtcaagcctagcgagacactgagcctgacctgtaccgtgtccggcttcagcctgaccagatttggcgtgcactgggtccgacagccacctggcaaaggactggaatggctgggagtgatttggagaggcggcagcaccgattacaacgccgccttcatgagccggctgaccatcagcaaggacaacagcaagaaccaggtgtccctgaagctgagcagcgtgacagccgctgataccgccgtgtactactgctccaaccactactacggcagctccgactacgccctggataattggggccagggaaccctggtcaccgtgtcatctacgcgtagccagcctcacaccaagcccagcgtgttcgtgatgaagaacggcaccaacgtggcctgcctcgtgaaagagttctaccccaaggacatcaggatcaacctggtgtccagcaagaagatcaccgagttcgaccccgccatcgtgatctcccccagcggcaagtacaacgccgtgaagctggggaagtacgaggacagcaacagcgtgacctgctccgtgcagcacgacaacaagaccgtgcacagcaccgactttgaagtgaaaaccgactccaccgaccacgtgaagcccaaagagacagagaacaccaagcagcccagcaagagctgccacaagcccaaggccatcgtgcacaccgagaaagtgaacatgatgagcctgaccgtgctgggcctgcggatgctgttcgccaaaaccgtggccgtgaacttcctgctgaccgccaagctgttcttcctc

SEQ ID NO: 35284 - DNA, 1887 bp, synthetic construct
  source 1..1887: mol_type = other DNA
atggccttaccagtgaccgccttgctcctgccgctggccttgctgctccacgccgccaggccggacatccagatgacacagagccctagcagcctgtctgccagcgtgggagacagagtgaccatcacctgtagagccagccaggacgtgcggaacatcgtcgtgtggttccagcagaagcctggcaaggcccctaagctgctgatctacagcggcagctacagatacagcggcgtgcccagcagattttccggctctggctctggcaccgacttcaccctgacaatatccagcctccagcctgaggacttcgccacctactactgccagcagcactacagccctccatacacattcggccagggcaccaaggtggaaatcaagagactcgagagccagcctcacaccaagcccagcgtgttcgtgatgaagaacggcaccaacgtggcctgcctcgtgaaagagttctaccccaaggacatcaggatcaacctggtgtccagcaagaagatcaccgagttcgaccccgccatcgtgatctcccccagcggcaagtacaacgccgtgaagctggggaagtacgaggacagcaacagcgtgacctgctccgtgcagcacgacaacaagaccgtgcacagcaccgactttgaagtgaaaaccgactccaccgaccacgtgaagcccaaagagacagagaacaccaagcagcccagcaagagctgccacaagcccaaggccatcgtgcacaccgagaaagtgaacatgatgagcctgaccgtgctgggcctgcggatgctgttcgccaaaaccgtggccgtgaacttcctgctgaccgccaagctgttcttcctcagggccaagcgatctggatctggagcaacaaacttctcactactcaaacaagcaggtgacgtggaggagaatcccgggcctactagtatggactggatttggcgcatccttttccttgtcggcgctgctaccggcgcgcattccttcgaagaagttcagctggtggaatctggccctggcctggtcaagcctagcgagacactgagcctgacctgtaccgtgtccggcttcagcctgaccagatttggcgtgcactgggtccgacagccacctggcaaaggactggaatggctgggagtgatttggagaggcggcagcaccgattacaacgccgccttcatgagccggctgaccatcagcaaggacaacagcaagaaccaggtgtccctgaagctgagcagcgtgacagccgctgataccgccgtgtactactgctccaaccactactacggcagctccgactacgccctggataattggggccagggaaccctggtcaccgtgtcatctacgcgtgacaagcagctggacgccgacgtgtcccccaagcctaccatcttcctgccctctatcgccgagacaaagctccagaaggccggcacctacctgtgcctgctggaaaagttcttcccagatgtgattaagatccactggcaggaaaagaagtccaacaccatcctgggcagccaggaaggcaacaccatgaagaccaacgacacctacatgaagttcagctggctgaccgtgcccgagaagtccctggacaaagaacacagatgcatcgtgcggcacgaaaacaacaagaacggcgtggaccaggaaatcatcttcccacccatcaagaccgatgtgattacaatggaccccaaggacaactgctccaaggacgccaacgataccctgctgctccagctgaccaacaccagcgcctactacatgtacttgttgctgctgctgaagtccgtggtgtacttcgccatcatcacatgctgcctgctgcggagaaccgccttctgctgcaacggcgagaagtct

SEQ ID NO: 35285 - DNA, 1932 bp, synthetic construct
  source 1..1932: mol_type = other DNA
atggccttaccagtgaccgccttgctcctgccgctggccttgctgctccacgccgccaggccgctcgaggacaagcagctggacgccgacgtgtcccccaagcctaccatcttcctgccctctatcgccgagacaaagctccagaaggccggcacctacctgtgcctgctggaaaagttcttcccagatgtgattaagatccactggcaggaaaagaagtccaacaccatcctgggcagccaggaaggcaacaccatgaagaccaacgacacctacatgaagttcagctggctgaccgtgcccgagaagtccctggacaaagaacacagatgcatcgtgcggcacgaaaacaacaagaacggcgtggaccaggaaatcatcttcccacccatcaagaccgatgtgattacaatggaccccaaggacaactgctccaaggacgccaacgataccctgctgctccagctgaccaacaccagcgcctactacatgtacttgttgctgctgctgaagtccgtggtgtacttcgccatcatcacatgctgcctgctgcggagaaccgccttctgctgcaacggcgagaagtctagggccaagcgatctggatctggagcaacaaacttctcactactcaaacaagcaggtgacgtggaggagaatcccgggcctactagcatggccttaccagtgaccgccttgctcctgccgctggccttgctgctccacgccgccaggccggacatccagatgacacagagccctagcagcctgtctgccagcgtgggagacagagtgaccatcacctgtagagccagccaggacgtgcggaacatcgtcgtgtggttccagcagaagcctggcaaggcccctaagctgctgatctacagcggcagctacagatacagcggcgtgcccagcagattttccggctctggctctggcaccgacttcaccctgacaatatccagcctccagcctgaggacttcgccacctactactgccagcagcactacagccctccatacacattcggccagggcaccaaggtggaaatcaagagaggcggaggcggaagtggaggcggaggatctggcggcggaggctctgaagttcagctggtggaatctggccctggcctggtcaagcctagcgagacactgagcctgacctgtaccgtgtccggcttcagcctgaccagatttggcgtgcactgggtccgacagccacctggcaaaggactggaatggctgggagtgatttggagaggcggcagcaccgattacaacgccgccttcatgagccggctgaccatcagcaaggacaacagcaagaaccaggtgtccctgaagctgagcagcgtgacagccgctgataccgccgtgtactactgctccaaccactactacggcagctccgactacgccctggataattggggccagggaaccctggtcaccgtgtcatctacgcgtagccagcctcacaccaagcccagcgtgttcgtgatgaagaacggcaccaacgtggcctgcctcgtgaaagagttctaccccaaggacatcaggatcaacctggtgtccagcaagaagatcaccgagttcgaccccgccatcgtgatctcccccagcggcaagtacaacgccgtgaagctggggaagtacgaggacagcaacagcgtgacctgctccgtgcagcacgacaacaagaccgtgcacagcaccgactttgaagtgaaaaccgactccaccgaccacgtgaagcccaaagagacagagaacaccaagcagcccagcaagagctgccacaagcccaaggccatcgtgcacaccgagaaagtgaacatgatgagcctgaccgtgctgggcctgcggatgctgttcgccaaaaccgtggccgtgaacttcctgctgaccgccaagctgttcttcctc

SEQ ID NO: 35286 - DNA, 2394 bp, synthetic construct
  source 1..2394: mol_type = other DNA
atggccttaccagtgaccgccttgctcctgccgctggccttgctgctccacgccgccaggccggacatccagatgacacagagccctagcagcctgtctgccagcgtgggagacagagtgaccatcacctgtagagccagccaggacgtgcggaacatcgtcgtgtggttccagcagaagcctggcaaggcccctaagctgctgatctacagcggcagctacagatacagcggcgtgcccagcagattttccggctctggctctggcaccgacttcaccctgacaatatccagcctccagcctgaggacttcgccacctactactgccagcagcactacagccctccatacacattcggccagggcaccaaggtggaaatcaagagaggacagcctaaggccaatcctaccgtgacactgttccctccaagcagcgaagaactccaggccaacaaggccacacttgtgtgcctgatctccgacttctaccctggggctgtgacagtggcttggaaggccgatggatctcctgtgaaagccggcgtggaaaccaccaagccatccaagcagagcaacaacaaatacgccgccagctcctacctgagcctgacacctgagcagtggaagtcccacagatcctacagctgccaagtgacccacgaaggcagcaccgtggaaaagacagtggcccctacagagtgcagcggatcccagagcttcggcctgctggaccccaagctgtgctacctgctggatggcatcctgttcatctacggcgtgatcctgaccgccctgttcctgagagtgaagttcagcagaagcgccgacgcccctgcctaccagcagggacagaaccaactgtacaacgagctgaacctgggcagacgggaagagtacgacgtgctggacaagcggagaggcagggaccctgagatgggcggaaagccccagcggagaaagaacccccaggaaggactgtataacgaactccagaaagacaagatggccgaagcctacagcgagatcggcatgaagggcgagcggagaagaggcaagggccacgatggcctgtaccagggcctgagcaccgccaccaaggacacctatgacgccctgcacatgcaggccctgcctccaagaagggccaagcgatctggatctggagcaacaaacttctcactactcaaacaagcaggtgacgtggaggagaatcccgggcctactagtatggactggatttggcgcatccttttccttgtcggcgctgctaccggcgcgcattccttcgaagaagttcagctggtggaatctggccctggcctggtcaagcctagcgagacactgagcctgacctgtaccgtgtccggcttcagcctgaccagatttggcgtgcactgggtccgacagccacctggcaaaggactggaatggctgggagtgatttggagaggcggcagcaccgattacaacgccgccttcatgagccggctgaccatcagcaaggacaacagcaagaaccaggtgtccctgaagctgagcagcgtgacagccgctgataccgccgtgtactactgctccaaccactactacggcagctccgactacgccctggataattggggccagggaaccctggtcaccgtgtcatctgcctctacaaagggaccctccgtgtttcctctggctcccagcagcaagtctacaagcggaggaacagccgctctgggctgcctggtcaaggattactttcccgagcctgtgaccgtgtcctggaatagcggagcactgacaagcggcgtgcacacctttccagccgtgctgcaaagcagcggcctgtactctctgagcagcgtggtcacagtgcctagctctagcctgggcacccagacctacatctgcaatgtgaaccacaagcctagcaacaccaaggtggacaagagagtggaacccaagagctgtggtacccagagttttgggttgttggaccctaaattgtgctatctgttggacggaatcctgttcatttacggagtgatcctgaccgcattgttcctgcgggttaagttttccagatccgcagacgcacccgcttaccaacaagggcagaaccaactctacaatgaacttaatttggggcggagggaagagtacgacgttctggacaaaaggaggggacgagatcccgagatgggcggaaagcctcagcgaaggaagaatccgcaagaggggctttataacgaactccagaaagataaaatggcagaagcctatagtgagattgggatgaagggagaaaggaggaggggtaaaggtcacgatgggttgtaccaaggattgagcacagccactaaagatacctatgatgcgctccacatgcaggccctgccgccaaga

SEQ ID NO: 35287 - DNA, 2451 bp, synthetic construct
  source 1..2451: mol_type = other DNA
atggccttaccagtgaccgccttgctcctgccgctggccttgctgctccacgccgccaggccggacatccagatgacacagagccctagcagcctgtctgccagcgtgggagacagagtgaccatcacctgtagagccagccaggacgtgcggaacatcgtcgtgtggttccagcagaagcctggcaaggcccctaagctgctgatctacagcggcagctacagatacagcggcgtgcccagcagattttccggctctggctctggcaccgacttcaccctgacaatatccagcctccagcctgaggacttcgccacctactactgccagcagcactacagccctccatacacattcggccagggcaccaaggtggaaatcaagagactcgaggacctgaagaacgtgttcccacctgaggtggccgtgttcgagcctagcgaggccgagatcagccacacccagaaagccaccctcgtgtgcctggctaccggcttctaccccgaccatgtggaactgtcttggtgggtcaacggcaaagaggtgcacagcggcgtgtctaccgacccccagccactgaaagaacagcccgccctgaacgacagccggtactgcctgagcagcagactgagagtgtccgccaccttctggcagaacccccggaaccacttcagatgccaggtgcagttctacggcctgagcgagaacgacgagtggacccaggacagagccaagcccgtgacccagatcgtgtctgccgaagcctggggcagagccgattgcggatcccagagcttcggcctgctggaccccaagctgtgctacctgctggatggcatcctgttcatctacggcgtgatcctgaccgccctgttcctgagagtgaagttcagcagaagcgccgacgcccctgcctaccagcagggacagaaccaactgtacaacgagctgaacctgggcagacgggaagagtacgacgtgctggacaagcggagaggcagggaccctgagatgggcggaaagccccagcggagaaagaacccccaggaaggactgtataacgaactccagaaagacaagatggccgaagcctacagcgagatcggcatgaagggcgagcggagaagaggcaagggccacgatggcctgtaccagggcctgagcaccgccaccaaggacacctatgacgccctgcacatgcaggccctgcctccaagaagggccaagcgatctggatctggagcaacaaacttctcactactcaaacaagcaggtgacgtggaggagaatcccgggcctactagtatggactggatttggcgcatccttttccttgtcggcgctgctaccggcgcgcattccttcgaagaagttcagctggtggaatctggccctggcctggtcaagcctagcgagacactgagcctgacctgtaccgtgtccggcttcagcctgaccagatttggcgtgcactgggtccgacagccacctggcaaaggactggaatggctgggagtgatttggagaggcggcagcaccgattacaacgccgccttcatgagccggctgaccatcagcaaggacaacagcaagaaccaggtgtccctgaagctgagcagcgtgacagccgctgataccgccgtgtactactgctccaaccactactacggcagctccgactacgccctggataattggggccagggaaccctggtcaccgtgtcatctacgcgtatccagaaccctgatcctgccgtgtaccagctgcgggatagcaagagcagcgacaagagcgtgtgtctgttcaccgacttcgacagccagaccaacgtgtcccagagcaaggactccgacgtgtacatcaccgataagaccgtgctggacatgcggagcatggacttcaagagcaactccgccgtggcctggtccaacaagtccgatttcgcctgcgccaacgccttcaacaacagcattatccccgaggacacattcttcccaagccccgagagcagctgcggtacccagagttttgggttgttggaccctaaattgtgctatctgttggacggaatcctgttcatttacggagtgatcctgaccgcattgttcctgcgggttaagttttccagatccgcagacgcacccgcttaccaacaagggcagaaccaactctacaatgaacttaatttggggcggagggaagagtacgacgttctggacaaaaggaggggacgagatcccgagatgggcggaaagcctcagcgaaggaagaatccgcaagaggggctttataacgaactccagaaagataaaatggcagaagcctatagtgagattgggatgaagggagaaaggaggaggggtaaaggtcacgatgggttgtaccaaggattgagcacagccactaaagatacctatgatgcgctccacatgcaggccctgccgccaaga

SEQ ID NO: 35288 - DNA, 2577 bp, synthetic construct
  source 1..2577: mol_type = other DNA
atggccttaccagtgaccgccttgctcctgccgctggccttgctgctccacgccgccaggccggacatccagatgacacagagccctagcagcctgtctgccagcgtgggagacagagtgaccatcacctgtagagccagccaggacgtgcggaacatcgtcgtgtggttccagcagaagcctggcaaggcccctaagctgctgatctacagcggcagctacagatacagcggcgtgcccagcagattttccggctctggctctggcaccgacttcaccctgacaatatccagcctccagcctgaggacttcgccacctactactgccagcagcactacagccctccatacacattcggccagggcaccaaggtggaaatcaagagactcgaggaggacctgaagaacgtgttcccacctgaggtggccgtgttcgagcctagcgaggccgagatcagccacacccagaaagccaccctcgtgtgcctggctaccggcttctaccccgaccatgtggaactgtcttggtgggtcaacggcaaagaggtgcacagcggcgtgtctaccgacccccagccactgaaagaacagcccgccctgaacgacagccggtactgcctgagcagcagactgagagtgtccgccaccttctggcagaacccccggaaccacttcagatgccaggtgcagttctacggcctgagcgagaacgacgagtggacccaggacagagccaagcccgtgacccagatcgtgtctgccgaagcctggggcagagccgattgcggatcccagagcttcggcctgctggaccccaagctgtgctacctgctggatggcatcctgttcatctacggcgtgatcctgaccgccctgttcctgagagtgaagttcagcagaagcgccgacgcccctgcctaccagcagggacagaaccaactgtacaacgagctgaacctgggcagacgggaagagtacgacgtgctggacaagcggagaggcagggaccctgagatgggcggaaagccccagcggagaaagaacccccaggaaggactgtataacgaactccagaaagacaagatggccgaagcctacagcgagatcggcatgaagggcgagcggagaagaggcaagggccacgatggcctgtaccagggcctgagcaccgccaccaaggacacctatgacgccctgcacatgcaggccctgcctccaagaagggccaagcgatctggatctggagcaacaaacttctcactactcaaacaagcaggtgacgtggaggagaatcccgggcctactagtatggactggatttggcgcatccttttccttgtcggcgctgctaccggcgcgcattccttcgaagaagttcagctggtggaatctggccctggcctggtcaagcctagcgagacactgagcctgacctgtaccgtgtccggcttcagcctgaccagatttggcgtgcactgggtccgacagccacctggcaaaggactggaatggctgggagtgatttggagaggcggcagcaccgattacaacgccgccttcatgagccggctgaccatcagcaaggacaacagcaagaaccaggtgtccctgaagctgagcagcgtgacagccgctgataccgccgtgtactactgctccaaccactactacggcagctccgactacgccctggataattggggccagggaaccctggtcaccgtgtcatctacgcgtatccagaaccctgatcctgccgtgtaccagctgcgggatagcaagagcagcgacaagagcgtgtgtctgttcaccgacttcgacagccagaccaacgtgtcccagagcaaggactccgacgtgtacatcaccgataagaccgtgctggacatgcggagcatggacttcaagagcaactccgccgtggcctggtccaacaagtccgatttcgcctgcgccaacgccttcaacaacagcattatccccgaggacacattcttcccaagccccgagagcagctgcggtacccagagttttgggttgttggaccctaaattgtgctatctgttggacggaatcctgttcatttacggagtgatcctgaccgcattgttcctgaggagcaagcggtcacggctgctccacagcgattacatgaatatgacaccacgaagaccgggtcctactcgcaaacactaccaaccctacgcacctccccgcgactttgcagcgtaccgatctcgggttaagttttccagatccgcagacgcacccgcttaccaacaagggcagaaccaactctacaatgaacttaatttggggcggagggaagagtacgacgttctggacaaaaggaggggacgagatcccgagatgggcggaaagcctcagcgaaggaagaatccgcaagaggggctttataacgaactccagaaagataaaatggcagaagcctatagtgagattgggatgaagggagaaaggaggaggggtaaaggtcacgatgggttgtaccaaggattgagcacagccactaaagatacctatgatgcgctccacatgcaggccctgccgccaaga

SEQ ID NO: 35289 - DNA, 2706 bp, synthetic construct
  source 1..2706: mol_type = other DNA
atggccttaccagtgaccgccttgctcctgccgctggccttgctgctccacgccgccaggccggacatccagatgacacagagccctagcagcctgtctgccagcgtgggagacagagtgaccatcacctgtagagccagccaggacgtgcggaacatcgtcgtgtggttccagcagaagcctggcaaggcccctaagctgctgatctacagcggcagctacagatacagcggcgtgcccagcagattttccggctctggctctggcaccgacttcaccctgacaatatccagcctccagcctgaggacttcgccacctactactgccagcagcactacagccctccatacacattcggccagggcaccaaggtggaaatcaagagactcgaggaggacctgaagaacgtgttcccacctgaggtggccgtgttcgagcctagcgaggccgagatcagccacacccagaaagccaccctcgtgtgcctggctaccggcttctaccccgaccatgtggaactgtcttggtgggtcaacggcaaagaggtgcacagcggcgtgtctaccgacccccagccactgaaagaacagcccgccctgaacgacagccggtactgcctgagcagcagactgagagtgtccgccaccttctggcagaacccccggaaccacttcagatgccaggtgcagttctacggcctgagcgagaacgacgagtggacccaggacagagccaagcccgtgacccagatcgtgtctgccgaagcctggggcagagccgattgcggatcccagagcttcggcctgctggaccccaagctgtgctacctgctggatggcatcctgttcatctacggcgtgatcctgaccgccctgttcctgaaacggggcagaaagaaactcctgtatatattcaaacaaccatttatgagaccagtacaaactactcaagaggaagatggctgtagctgccgatttccagaagaagaagaaggaggatgtgaactgagagtgaagttcagcagaagcgccgacgcccctgcctaccagcagggacagaaccaactgtacaacgagctgaacctgggcagacgggaagagtacgacgtgctggacaagcggagaggcagggaccctgagatgggcggaaagccccagcggagaaagaacccccaggaaggactgtataacgaactccagaaagacaagatggccgaagcctacagcgagatcggcatgaagggcgagcggagaagaggcaagggccacgatggcctgtaccagggcctgagcaccgccaccaaggacacctatgacgccctgcacatgcaggccctgcctccaagaagggccaagcgatctggatctggagcaacaaacttctcactactcaaacaagcaggtgacgtggaggagaatcccgggcctactagtatggactggatttggcgcatccttttccttgtcggcgctgctaccggcgcgcattccttcgaagaagttcagctggtggaatctggccctggcctggtcaagcctagcgagacactgagcctgacctgtaccgtgtccggcttcagcctgaccagatttggcgtgcactgggtccgacagccacctggcaaaggactggaatggctgggagtgatttggagaggcggcagcaccgattacaacgccgccttcatgagccggctgaccatcagcaaggacaacagcaagaaccaggtgtccctgaagctgagcagcgtgacagccgctgataccgccgtgtactactgctccaaccactactacggcagctccgactacgccctggataattggggccagggaaccctggtcaccgtgtcatctacgcgtatccagaaccctgatcctgccgtgtaccagctgcgggatagcaagagcagcgacaagagcgtgtgtctgttcaccgacttcgacagccagaccaacgtgtcccagagcaaggactccgacgtgtacatcaccgataagaccgtgctggacatgcggagcatggacttcaagagcaactccgccgtggcctggtccaacaagtccgatttcgcctgcgccaacgccttcaacaacagcattatccccgaggacacattcttcccaagccccgagagcagctgcggtacccagagttttgggttgttggaccctaaattgtgctatctgttggacggaatcctgttcatttacggagtgatcctgaccgcattgttcctgaagagaggccggaagaagctgctgtacatcttcaagcagcctttcatgcggcccgtgcagaccacccaggaagaggacggctgctcctgccggttccccgaggaagaagaaggcggctgcgagctgcgggttaagttttccagatccgcagacgcacccgcttaccaacaagggcagaaccaactctacaatgaacttaatttggggcggagggaagagtacgacgttctggacaaaaggaggggacgagatcccgagatgggcggaaagcctcagcgaaggaagaatccgcaagaggggctttataacgaactccagaaagataaaatggcagaagcctatagtgagattgggatgaagggagaaaggaggaggggtaaaggtcacgatgggttgtaccaaggattgagcacagccactaaagatacctatgatgcgctccacatgcaggccctgccgccaaga

SEQ ID NO: 35290 - DNA, 1767 bp, synthetic construct
  source 1..1767: mol_type = other DNA
atggccttaccagtgaccgccttgctcctgccgctggccttgctgctccacgccgccaggccggacatccagatgacacagagccctagcagcctgtctgccagcgtgggagacagagtgaccatcacctgtagagccagccaggacgtgcggaacatcgtcgtgtggttccagcagaagcctggcaaggcccctaagctgctgatctacagcggcagctacagatacagcggcgtgcccagcagattttccggctctggctctggcaccgacttcaccctgacaatatccagcctccagcctgaggacttcgccacctactactgccagcagcactacagccctccatacacattcggccagggcaccaaggtggaaatcaagagactcgagcagagcttcggcctgctggaccccaagctgtgctacctgctggatggcatcctgttcatctacggcgtgatcctgaccgccctgttcctgagagtgaagttcagcagaagcgccgacgcccctgcctaccagcagggacagaaccaactgtacaacgagctgaacctgggcagacgggaagagtacgacgtgctggacaagcggagaggcagggaccctgagatgggcggaaagccccagcggagaaagaacccccaggaaggactgtataacgaactccagaaagacaagatggccgaagcctacagcgagatcggcatgaagggcgagcggagaagaggcaagggccacgatggcctgtaccagggcctgagcaccgccaccaaggacacctatgacgccctgcacatgcaggccctgcctccaagaagggccaagcgatctggatctggagcaacaaacttctcactactcaaacaagcaggtgacgtggaggagaatcccgggcctactagtatggactggatttggcgcatccttttccttgtcggcgctgctaccggcgcgcattccttcgaagaagttcagctggtggaatctggccctggcctggtcaagcctagcgagacactgagcctgacctgtaccgtgtccggcttcagcctgaccagatttggcgtgcactgggtccgacagccacctggcaaaggactggaatggctgggagtgatttggagaggcggcagcaccgattacaacgccgccttcatgagccggctgaccatcagcaaggacaacagcaagaaccaggtgtccctgaagctgagcagcgtgacagccgctgataccgccgtgtactactgctccaaccactactacggcagctccgactacgccctggataattggggccagggaaccctggtcaccgtgtcatctacgcgtcagagttttgggttgttggaccctaaattgtgctatctgttggacggaatcctgttcatttacggagtgatcctgaccgcattgttcctgcgggttaagttttccagatccgcagacgcacccgcttaccaacaagggcagaaccaactctacaatgaacttaatttggggcggagggaagagtacgacgttctggacaaaaggaggggacgagatcccgagatgggcggaaagcctcagcgaaggaagaatccgcaagaggggctttataacgaactccagaaagataaaatggcagaagcctatagtgagattgggatgaagggagaaaggaggaggggtaaaggtcacgatgggttgtaccaaggattgagcacagccactaaagatacctatgatgcgctccacatgcaggccctgccgccaaga

SEQ ID NO: 35291 - DNA, 1941 bp, synthetic construct
  source 1..1941: mol_type = other DNA
atggccttaccagtgaccgccttgctcctgccgctggccttgctgctccacgccgccaggccggacatccagatgacacagagccctagcagcctgtctgccagcgtgggagacagagtgaccatcacctgtagagccagccaggacgtgcggaacatcgtcgtgtggttccagcagaagcctggcaaggcccctaagctgctgatctacagcggcagctacagatacagcggcgtgcccagcagattttccggctctggctctggcaccgacttcaccctgacaatatccagcctccagcctgaggacttcgccacctactactgccagcagcactacagccctccatacacattcggccagggcaccaaggtggaaatcaagagactcgagggacagcctaaggccaatcctaccgtgacactgttccctccaagcagcgaagaactccaggccaacaaggccacacttgtgtgcctgatctccgacttctaccctggggctgtgacagtggcttggaaggccgatggatctcctgtgaaagccggcgtggaaaccaccaagccatccaagcagagcaacaacaaatacgccgccagctcctacctgagcctgacacctgagcagtggaagtcccacagatcctacagctgccaagtgacccacgaaggcagcaccgtggaaaagacagtggcccctacagagtgcagccccatcaagaccgatgtgattacaatggaccccaaggacaactgctccaaggacgccaacgataccctgctgctccagctgaccaacaccagcgcctactacatgtacttgttgctgctgctgaagtccgtggtgtacttcgccatcatcacatgctgcctgctgcggagaaccgccttctgctgcaacggcgagaagtctagggccaagcgatctggatctggagcaacaaacttctcactactcaaacaagcaggtgacgtggaggagaatcccgggcctactagtatggactggatttggcgcatccttttccttgtcggcgctgctaccggcgcgcattccttcgaagaagttcagctggtggaatctggccctggcctggtcaagcctagcgagacactgagcctgacctgtaccgtgtccggcttcagcctgaccagatttggcgtgcactgggtccgacagccacctggcaaaggactggaatggctgggagtgatttggagaggcggcagcaccgattacaacgccgccttcatgagccggctgaccatcagcaaggacaacagcaagaaccaggtgtccctgaagctgagcagcgtgacagccgctgataccgccgtgtactactgctccaaccactactacggcagctccgactacgccctggataattggggccagggaaccctggtcaccgtgtcatctacgcgtgcctctacaaagggaccctccgtgtttcctctggctcccagcagcaagtctacaagcggaggaacagccgctctgggctgcctggtcaaggattactttcccgagcctgtgaccgtgtcctggaatagcggagcactgacaagcggcgtgcacacctttccagccgtgctgcaaagcagcggcctgtactctctgagcagcgtggtcacagtgcctagctctagcctgggcacccagacctacatctgcaatgtgaaccacaagcctagcaacaccaaggtggacaagagagtggaacccaagagctgtgaagtgaaaaccgactccaccgaccacgtgaagcccaaagagacagagaacaccaagcagcccagcaagagctgccacaagcccaaggccatcgtgcacaccgagaaagtgaacatgatgagcctgaccgtgctgggcctgcggatgctgttcgccaaaaccgtggccgtgaacttcctgctgaccgccaagctgttcttcctc

SEQ ID NO: 35292 - DNA, 1875 bp, synthetic construct
  source 1..1875: mol_type = other DNA
atggccttaccagtgaccgccttgctcctgccgctggccttgctgctccacgccgccaggccggacatccagatgacacagagccctagcagcctgtctgccagcgtgggagacagagtgaccatcacctgtagagccagccaggacgtgcggaacatcgtcgtgtggttccagcagaagcctggcaaggcccctaagctgctgatctacagcggcagctacagatacagcggcgtgcccagcagattttccggctctggctctggcaccgacttcaccctgacaatatccagcctccagcctgaggacttcgccacctactactgccagcagcactacagccctccatacacattcggccagggcaccaaggtggaaatcaagagactcgagggacagcctaaggccaatcctaccgtgacactgttccctccaagcagcgaagaactccaggccaacaaggccacacttgtgtgcctgatctccgacttctaccctggggctgtgacagtggcttggaaggccgatggatctcctgtgaaagccggcgtggaaaccaccaagccatccaagcagagcaacaacaaatacgccgccagctcctacctgagcctgacacctgagcagtggaagtcccacagatcctacagctgccaagtgacccacgaaggcagcaccgtggaaaagacagtggcccctacagagtgcagcggcagagccgattgcggcatcaccagcgccagctaccaccagggcgtgctgagcgccaccatcctgtacgagatcctgctgggcaaggccaccctgtacgccgtgctggtgtctgccctggtgctgatggctatggtcaagcggaaggacagccggggaagggccaagcgatctggatctggagcaacaaacttctcactactcaaacaagcaggtgacgtggaggagaatcccgggcctactagtatggactggatttggcgcatccttttccttgtcggcgctgctaccggcgcgcattccttcgaagaagttcagctggtggaatctggccctggcctggtcaagcctagcgagacactgagcctgacctgtaccgtgtccggcttcagcctgaccagatttggcgtgcactgggtccgacagccacctggcaaaggactggaatggctgggagtgatttggagaggcggcagcaccgattacaacgccgccttcatgagccggctgaccatcagcaaggacaacagcaagaaccaggtgtccctgaagctgagcagcgtgacagccgctgataccgccgtgtactactgctccaaccactactacggcagctccgactacgccctggataattggggccagggaaccctggtcaccgtgtcatctacgcgtgcctctacaaagggaccctccgtgtttcctctggctcccagcagcaagtctacaagcggaggaacagccgctctgggctgcctggtcaaggattactttcccgagcctgtgaccgtgtcctggaatagcggagcactgacaagcggcgtgcacacctttccagccgtgctgcaaagcagcggcctgtactctctgagcagcgtggtcacagtgcctagctctagcctgggcacccagacctacatctgcaatgtgaaccacaagcctagcaacaccaaggtggacaagagagtggaacccaagagctgtatccccgaggacacattcttcccaagcagcgacgtgccctgcgacgtgaagctggtggaaaagagcttcgagacagacaccaacctgaacttccagaacctgagcgtgatcggcttcagaatcctgctgctgaaagtggccggctttaacctgctgatgaccctgcggctgtggtccagc

SEQ ID NO: 35293 - DNA, 1875 bp, synthetic construct
  source 1..1875: mol_type = other DNA
atggccttaccagtgaccgccttgctcctgccgctggccttgctgctccacgccgccaggccggacatccagatgacacagagccctagcagcctgtctgccagcgtgggagacagagtgaccatcacctgtagagccagccaggacgtgcggaacatcgtcgtgtggttccagcagaagcctggcaaggcccctaagctgctgatctacagcggcagctacagatacagcggcgtgcccagcagattttccggctctggctctggcaccgacttcaccctgacaatatccagcctccagcctgaggacttcgccacctactactgccagcagcactacagccctccatacacattcggccagggcaccaaggtggaaatcaagagactcgagggacagcctaaggccaatcctaccgtgacactgttccctccaagcagcgaagaactccaggccaacaaggccacacttgtgtgcctgatctccgacttctaccctggggctgtgacagtggcttggaaggccgatggatctcctgtgaaagccggcgtggaaaccaccaagccatccaagcagagcaacaacaaatacgccgccagctcctacctgagcctgacacctgagcagtggaagtcccacagatcctacagctgccaagtgacccacgaaggcagcaccgtggaaaagacagtggcccctacagagtgcagcggcagagccgattgcggctttaccagcgagagctaccagcagggcgtgctgagcgccaccatcctgtacgagatcctgctgggcaaggccaccctgtacgccgtgctggtgtctgccctggtgctgatggctatggtcaagcggaaggacagccggggaagggccaagcgatctggatctggagcaacaaacttctcactactcaaacaagcaggtgacgtggaggagaatcccgggcctactagtatggactggatttggcgcatccttttccttgtcggcgctgctaccggcgcgcattccttcgaagaagttcagctggtggaatctggccctggcctggtcaagcctagcgagacactgagcctgacctgtaccgtgtccggcttcagcctgaccagatttggcgtgcactgggtccgacagccacctggcaaaggactggaatggctgggagtgatttggagaggcggcagcaccgattacaacgccgccttcatgagccggctgaccatcagcaaggacaacagcaagaaccaggtgtccctgaagctgagcagcgtgacagccgctgataccgccgtgtactactgctccaaccactactacggcagctccgactacgccctggataattggggccagggaaccctggtcaccgtgtcatctacgcgtgcctctacaaagggaccctccgtgtttcctctggctcccagcagcaagtctacaagcggaggaacagccgctctgggctgcctggtcaaggattactttcccgagcctgtgaccgtgtcctggaatagcggagcactgacaagcggcgtgcacacctttccagccgtgctgcaaagcagcggcctgtactctctgagcagcgtggtcacagtgcctagctctagcctgggcacccagacctacatctgcaatgtgaaccacaagcctagcaacaccaaggtggacaagagagtggaacccaagagctgtatccccgaggacacattcttcccaagccccgagagcagctgcgacgtgaagctggtggaaaagagcttcgagacagacaccaacctgaacttccagaacctgagcgtgatcggcttcagaatcctgctgctgaaagtggccggctttaacctgctgatgaccctgcggctgtggtccagc

SEQ ID NO: 35294 - DNA, 1353 bp, synthetic construct
  source 1..1353: mol_type = other DNA
atggccttaccagtgaccgccttgctcctgccgctggccttgctgctccacgccgccaggccggacatccagatgacacagagccctagcagcctgtctgccagcgtgggagacagagtgaccatcacctgtagagccagccaggacgtgcggaacatcgtcgtgtggttccagcagaagcctggcaaggcccctaagctgctgatctacagcggcagctacagatacagcggcgtgcccagcagattttccggctctggctctggcaccgacttcaccctgacaatatccagcctccagcctgaggacttcgccacctactactgccagcagcactacagccctccatacacattcggccagggcaccaaggtggaaatcaagagaggcggaggcggaagtggaggcggaggatctggcggcggaggctctgaagttcagctggtggaatctggccctggcctggtcaagcctagcgagacactgagcctgacctgtaccgtgtccggcttcagcctgaccagatttggcgtgcactgggtccgacagccacctggcaaaggactggaatggctgggagtgatttggagaggcggcagcaccgattacaacgccgccttcatgagccggctgaccatcagcaaggacaacagcaagaaccaggtgtccctgaagctgagcagcgtgacagccgctgataccgccgtgtactactgctccaaccactactacggcagctccgactacgccctggataattggggccagggaaccctggtcaccgtgtcatctacgcgtgacggtaacgaggagatgggaggaatcactcaaaccccttacaaagtctcaatttcaggaacaactgttatccttacatgtccccagtatcctggcagcgagatcctttggcagcataacgacaagaatatagggggagatgaagacgataagaatatcggatctgacgaggatcacttgagcctgaaagagttctccgagcttgaacaaagcggatattatgtgtgctatccgcgcgggtcaaagccggaagacgctaacttttacctttatctccgagccagagtgtgcgaaaattgcatggaaatggacgttatgtccgttgctacaatagttatcgtagatatatgcatcacgggtggactgcttctgctggtttattattggtccaagaatagaaaggccaaagctaaacccgtgaccagaggcgctggcgcaggcggaaggcaaaggggacaaaacaaagaacggccaccaccagtgccaaatccagattatgagcctattcggaaaggacagagggacctgtactctggcctgaatcagagaagaatc

SEQ ID NO: 35295 - DNA, 1248 bp, synthetic construct
  source 1..1248: mol_type = other DNA
atggccttaccagtgaccgccttgctcctgccgctggccttgctgctccacgccgccaggccggacatccagatgacacagagccctagcagcctgtctgccagcgtgggagacagagtgaccatcacctgtagagccagccaggacgtgcggaacatcgtcgtgtggttccagcagaagcctggcaaggcccctaagctgctgatctacagcggcagctacagatacagcggcgtgcccagcagattttccggctctggctctggcaccgacttcaccctgacaatatccagcctccagcctgaggacttcgccacctactactgccagcagcactacagccctccatacacattcggccagggcaccaaggtggaaatcaagagaggcggaggcggaagtggaggcggaggatctggcggcggaggctctgaagttcagctggtggaatctggccctggcctggtcaagcctagcgagacactgagcctgacctgtaccgtgtccggcttcagcctgaccagatttggcgtgcactgggtccgacagccacctggcaaaggactggaatggctgggagtgatttggagaggcggcagcaccgattacaacgccgccttcatgagccggctgaccatcagcaaggacaacagcaagaaccaggtgtccctgaagctgagcagcgtgacagccgctgataccgccgtgtactactgctccaaccactactacggcagctccgactacgccctggataattggggccagggaaccctggtcaccgtgtcatctacgcgtttcaagatccccatcgaggaactggaagatcgggtgttcgtgaactgcaacacctctatcacctgggtggaaggcaccgtgggaacactgctgagcgacatcaccagactggacctcggcaagcggattctggaccctcggggcatctacagatgcaacggcaccgacatctacaaggacaaagaaagcaccgtgcaggtccactacagaatgtgccagtcctgcgtggaactggaccctgctacagtggccggcatcatcgtgaccgatgtgatcgctactctgctgctggctctgggagtgttctgcttcgccggacacgaaacaggcagactgtctggcgctgccgatacacaggccctgctgagaaacgaccaagtgtatcagcccctgcgcgacagagatgatgcccagtattctcacctcggcggcaactgggctagaaacaag

SEQ ID NO: 35296 - DNA, 1278 bp, synthetic construct
  source 1..1278: mol_type = other DNA
atggccttaccagtgaccgccttgctcctgccgctggccttgctgctccacgccgccaggccggacatccagatgacacagagccctagcagcctgtctgccagcgtgggagacagagtgaccatcacctgtagagccagccaggacgtgcggaacatcgtcgtgtggttccagcagaagcctggcaaggcccctaagctgctgatctacagcggcagctacagatacagcggcgtgcccagcagattttccggctctggctctggcaccgacttcaccctgacaatatccagcctccagcctgaggacttcgccacctactactgccagcagcactacagccctccatacacattcggccagggcaccaaggtggaaatcaagagaggcggaggcggaagtggaggcggaggatctggcggcggaggctctgaagttcagctggtggaatctggccctggcctggtcaagcctagcgagacactgagcctgacctgtaccgtgtccggcttcagcctgaccagatttggcgtgcactgggtccgacagccacctggcaaaggactggaatggctgggagtgatttggagaggcggcagcaccgattacaacgccgccttcatgagccggctgaccatcagcaaggacaacagcaagaaccaggtgtccctgaagctgagcagcgtgacagccgctgataccgccgtgtactactgctccaaccactactacggcagctccgactacgccctggataattggggccagggaaccctggtcaccgtgtcatctacgcgtcagagcatcaagggcaaccacctggtcaaggtgtacgactaccaagaggacggcagcgtgctgctgacatgtgatgccgaggccaagaacatcacctggtttaaggacggcaagatgatcggcttcctgaccgaggacaagaagaagtggaacctgggcagcaacgctaaggaccccagaggcatgtatcagtgcaagggcagccagaacaagagcaagcccctccaggtgtactaccggatgtgccagaactgcatcgagctgaacgccgctaccatcagcggctttctgttcgccgagatcgtgtccatcttcgtgctggccgtgggcgtgtactttatcgctggacaggatggcgtgcggcagagcagagcttccgataagcaaaccctgctgcctaacgaccagctgtaccagcctctgaaggacagagaggacgaccagtacagccacctccagggcaatcagctgagaagaaac

SEQ ID NO: 35297 - DNA, 1227 bp, synthetic construct
  source 1..1227: mol_type = other DNA
atggccttaccagtgaccgccttgctcctgccgctggccttgctgctccacgccgccaggccggacatccagatgacacagagccctagcagcctgtctgccagcgtgggagacagagtgaccatcacctgtagagccagccaggacgtgcggaacatcgtcgtgtggttccagcagaagcctggcaaggcccctaagctgctgatctacagcggcagctacagatacagcggcgtgcccagcagattttccggctctggctctggcaccgacttcaccctgacaatatccagcctccagcctgaggacttcgccacctactactgccagcagcactacagccctccatacacattcggccagggcaccaaggtggaaatcaagagaggcggaggcggaagtggaggcggaggatctggcggcggaggctctgaagttcagctggtggaatctggccctggcctggtcaagcctagcgagacactgagcctgacctgtaccgtgtccggcttcagcctgaccagatttggcgtgcactgggtccgacagccacctggcaaaggactggaatggctgggagtgatttggagaggcggcagcaccgattacaacgccgccttcatgagccggctgaccatcagcaaggacaacagcaagaaccaggtgtccctgaagctgagcagcgtgacagccgctgataccgccgtgtactactgctccaaccactactacggcagctccgactacgccctggataattggggccagggaaccctggtcaccgtgtcatctacgcgtcagagttttgggttgttggaccctaaattgtgctatctgttggacggaatcctgttcatttacggagtgatcctgaccgcattgttcctgcgggttaagttttccagatccgcagacgcacccgcttaccaacaagggcagaaccaactctacaatgaacttaatttggggcggagggaagagtacgacgttctggacaaaaggaggggacgagatcccgagatgggcggaaagcctcagcgaaggaagaatccgcaagaggggctttataacgaactccagaaagataaaatggcagaagcctatagtgagattgggatgaagggagaaaggaggaggggtaaaggtcacgatgggttgtaccaaggattgagcacagccactaaagatacctatgatgcgctccacatgcaggccctgccgccaaga

SEQ ID NO: 35298 - DNA, 1512 bp, synthetic construct
  source 1..1512: mol_type = other DNA
atggccttaccagtgaccgccttgctcctgccgctggccttgctgctccacgccgccaggccggacatccagatgacacagagccctagcagcctgtctgccagcgtgggagacagagtgaccatcacctgtagagccagccaggacgtgcggaacatcgtcgtgtggttccagcagaagcctggcaaggcccctaagctgctgatctacagcggcagctacagatacagcggcgtgcccagcagattttccggctctggctctggcaccgacttcaccctgacaatatccagcctccagcctgaggacttcgccacctactactgccagcagcactacagccctccatacacattcggccagggcaccaaggtggaaatcaagagaggcggaggcggaagtggaggcggaggatctggcggcggaggctctgaagttcagctggtggaatctggccctggcctggtcaagcctagcgagacactgagcctgacctgtaccgtgtccggcttcagcctgaccagatttggcgtgcactgggtccgacagccacctggcaaaggactggaatggctgggagtgatttggagaggcggcagcaccgattacaacgccgccttcatgagccggctgaccatcagcaaggacaacagcaagaaccaggtgtccctgaagctgagcagcgtgacagccgctgataccgccgtgtactactgctccaaccactactacggcagctccgactacgccctggataattggggccagggaaccctggtcaccgtgtcatctacgcgtggaatgaggactgaggatcttcccaaagctgtcgtctttctcgaaccccaatggtatcgggtgctcgaaaaagactctgtgacactgaaatgccaaggggcctactctcccgaggacaactccacacagtggtttcataatgagtccctcatcagctctcaggccagctcttatttcattgatgccgctacagtggacgactccggcgagtatcggtgtcagaccaatctgtctacactgtctgaccccgtgcagcttgaggtccacattggatggttgctcttgcaagccccacgctgggttttcaaagaggaagatccaatccatctgcggtgccacagctggaaaaacaccgctctccacaaagtcacatacctgcaaaatggcaaaggacgcaaatacttccatcacaattccgatttttacattccgaaggctaccctgaaagacagcggcagctatttctgccggggactcgtcggctccaagaatgtgtcctccgaaaccgtgaatatcacgattacccaaggactggctgtgcctacaatctctagcttctttccgcctggataccaagtctccttctgtcttgtgatggtcctcctgtttgctgtggacacaggactgtacttttccgtgaaaacgaacatccgcagctccacacgcgattggaaagatcacaagtttaaatggcgcaaagatccccaggacaag

SEQ ID NO: 35299 - DNA, 1437 bp, synthetic construct
  source 1..1437: mol_type = other DNA
atggccttaccagtgaccgccttgctcctgccgctggccttgctgctccacgccgccaggccggacatccagatgacacagagccctagcagcctgtctgccagcgtgggagacagagtgaccatcacctgtagagccagccaggacgtgcggaacatcgtcgtgtggttccagcagaagcctggcaaggcccctaagctgctgatctacagcggcagctacagatacagcggcgtgcccagcagattttccggctctggctctggcaccgacttcaccctgacaatatccagcctccagcctgaggacttcgccacctactactgccagcagcactacagccctccatacacattcggccagggcaccaaggtggaaatcaagagaggcggaggcggaagtggaggcggaggatctggcggcggaggctctgaagttcagctggtggaatctggccctggcctggtcaagcctagcgagacactgagcctgacctgtaccgtgtccggcttcagcctgaccagatttggcgtgcactgggtccgacagccacctggcaaaggactggaatggctgggagtgatttggagaggcggcagcaccgattacaacgccgccttcatgagccggctgaccatcagcaaggacaacagcaagaaccaggtgtccctgaagctgagcagcgtgacagccgctgataccgccgtgtactactgctccaaccactactacggcagctccgactacgccctggataattggggccagggaaccctggtcaccgtgtcatctacgcgtggaatgaggactgaggatcttcccaaagctgtcgtctttctcgaaccccaatggtatcgggtgctcgaaaaagactctgtgacactgaaatgccaaggggcctactctcccgaggacaactccacacagtggtttcataatgagtccctcatcagctctcaggccagctcttatttcattgatgccgctacagtggacgactccggcgagtatcggtgtcagaccaatctgtctacactgtctgaccccgtgcagcttgaggtccacattggatggttgctcttgcaagccccacgctgggttttcaaagaggaagatccaatccatctgcggtgccacagctggaaaaacaccgctctccacaaagtcacatacctgcaaaatggcaaaggacgcaaatacttccatcacaattccgatttttacattccgaaggctaccctgaaagacagcggcagctatttctgccggggactcgtcggctccaagaatgtgtcctccgaaaccgtgaatatcacgattacccaaggactggctgtgcctacaatctctagcttctttccgcctggataccaagtctccttctgtcttgtgatggtcctcctgtttgctgtggacacaggactgtacttttccgtg

SEQ ID NO: 35300 - DNA, 1440 bp, synthetic construct
  source 1..1440: mol_type = other DNA
atggccttaccagtgaccgccttgctcctgccgctggccttgctgctccacgccgccaggccggacatccagatgacacagagccctagcagcctgtctgccagcgtgggagacagagtgaccatcacctgtagagccagccaggacgtgcggaacatcgtcgtgtggttccagcagaagcctggcaaggcccctaagctgctgatctacagcggcagctacagatacagcggcgtgcccagcagattttccggctctggctctggcaccgacttcaccctgacaatatccagcctccagcctgaggacttcgccacctactactgccagcagcactacagccctccatacacattcggccagggcaccaaggtggaaatcaagagaggcggaggcggaagtggaggcggaggatctggcggcggaggctctgaagttcagctggtggaatctggccctggcctggtcaagcctagcgagacactgagcctgacctgtaccgtgtccggcttcagcctgaccagatttggcgtgcactgggtccgacagccacctggcaaaggactggaatggctgggagtgatttggagaggcggcagcaccgattacaacgccgccttcatgagccggctgaccatcagcaaggacaacagcaagaaccaggtgtccctgaagctgagcagcgtgacagccgctgataccgccgtgtactactgctccaaccactactacggcagctccgactacgccctggataattggggccagggaaccctggtcaccgtgtcatctacgcgtggaatgaggactgaggatcttcccaaagctgtcgtctttctcgaaccccaatggtatcgggtgctcgaaaaagactctgtgacactgaaatgccaaggggcctactctcccgaggacaactccacacagtggtttcataatgagtccctcatcagctctcaggccagctcttatttcattgatgccgctacagtggacgactccggcgagtatcggtgtcagaccaatctgtctacactgtctgaccccgtgcagcttgaggtccacattggatggttgctcttgcaagccccacgctgggttttcaaagaggaagatccaatccatctgcggtgccacagctggaaaaacaccgctctccacaaagtcacatacctgcaaaatggcaaaggacgcaaatacttccatcacaattccgatttttacattccgaaggctaccctgaaagacagcggcagctatttctgccggggactcgtcggctccaagaatgtgtcctccgaaaccgtgaatatcacgattacccaaggactggctgtgcctacaatctctagcttctttccgcctggataccaagtctccttctgtcttgtgatggtcctcctgtttgctgtggacacaggactgtacttttccgtgaaa

SEQ ID NO: 35301 - DNA, 2172 bp, synthetic construct
  source 1..2172: mol_type = other DNA
atggccttaccagtgaccgccttgctcctgccgctggccttgctgctccacgccgccaggccggacatccagatgacacagagccctagcagcctgtctgccagcgtgggagacagagtgaccatcacctgtagagccagccaggacgtgcggaacatcgtcgtgtggttccagcagaagcctggcaaggcccctaagctgctgatctacagcggcagctacagatacagcggcgtgcccagcagattttccggctctggctctggcaccgacttcaccctgacaatatccagcctccagcctgaggacttcgccacctactactgccagcagcactacagccctccatacacattcggccagggcaccaaggtggaaatcaagagactcgagggacagcctaaggccaatcctaccgtgacactgttccctccaagcagcgaagaactccaggccaacaaggccacacttgtgtgcctgatctccgacttctaccctggggctgtgacagtggcttggaaggccgatggatctcctgtgaaagccggcgtggaaaccaccaagccatccaagcagagcaacaacaaatacgccgccagctcctacctgagcctgacacctgagcagtggaagtcccacagatcctacagctgccaagtgacccacgaaggcagcaccgtggaaaagacagtggcccctacagagtgcagcggatcccagagcttcggcctgctggaccccaagctgtgctacctgctggatggcatcctgttcatctacggcgtgatcctgaccgccctgttcctgagagtgaagttcagcagaagcgccgacgcccctgcctaccagcagggacagaaccaactgtacaacgagctgaacctgggcagacgggaagagtacgacgtgctggacaagcggagaggcagggaccctgagatgggcggaaagccccagcggagaaagaacccccaggaaggactgtataacgaactccagaaagacaagatggccgaagcctacagcgagatcggcatgaagggcgagcggagaagaggcaagggccacgatggcctgtaccagggcctgagcaccgccaccaaggacacctatgacgccctgcacatgcaggccctgcctccaagaagggccaagcgatctggatctggagcaacaaacttctcactactcaaacaagcaggtgacgtggaggagaatcccgggcctactagtatggactggatttggcgcatccttttccttgtcggcgctgctaccggcgcgcattccttcgaagaagttcagctggtggaatctggccctggcctggtcaagcctagcgagacactgagcctgacctgtaccgtgtccggcttcagcctgaccagatttggcgtgcactgggtccgacagccacctggcaaaggactggaatggctgggagtgatttggagaggcggcagcaccgattacaacgccgccttcatgagccggctgaccatcagcaaggacaacagcaagaaccaggtgtccctgaagctgagcagcgtgacagccgctgataccgccgtgtactactgctccaaccactactacggcagctccgactacgccctggataattggggccagggaaccctggtcaccgtgtcatctacgcgtgcctctacaaagggaccctccgtgtttcctctggctcccagcagcaagtctacaagcggaggaacagccgctctgggctgcctggtcaaggattactttcccgagcctgtgaccgtgtcctggaatagcggagcactgacaagcggcgtgcacacctttccagccgtgctgcaaagcagcggcctgtactctctgagcagcgtggtcacagtgcctagctctagcctgggcacccagacctacatctgcaatgtgaaccacaagcctagcaacaccaaggtggacaagagagtggaacccaagagctgtggtaccatcactcaaggtttggcagtgtcaaccatctcatcattctttccacctggctaccaagtgtccttctgcctggtcatggtgctgctgttcgccgtggataccggcctgtacttcagcgtcaagaccaacatccggtccagcaccagagactggaaggaccacaagttcaagtggcggaaggaccctcaggacaag

SEQ ID NO: 35302 - DNA, 2217 bp, synthetic construct
  source 1..2217: mol_type = other DNA
atggccttaccagtgaccgccttgctcctgccgctggccttgctgctccacgccgccaggccggacatccagatgacacagagccctagcagcctgtctgccagcgtgggagacagagtgaccatcacctgtagagccagccaggacgtgcggaacatcgtcgtgtggttccagcagaagcctggcaaggcccctaagctgctgatctacagcggcagctacagatacagcggcgtgcccagcagattttccggctctggctctggcaccgacttcaccctgacaatatccagcctccagcctgaggacttcgccacctactactgccagcagcactacagccctccatacacattcggccagggcaccaaggtggaaatcaagagactcgaggacctgaagaacgtgttcccacctgaggtggccgtgttcgagcctagcgaggccgagatcagccacacccagaaagccaccctcgtgtgcctggctaccggcttctaccccgaccatgtggaactgtcttggtgggtcaacggcaaagaggtgcacagcggcgtgtctaccgacccccagccactgaaagaacagcccgccctgaacgacagccggtactgcctgagcagcagactgagagtgtccgccaccttctggcagaacccccggaaccacttcagatgccaggtgcagttctacggcctgagcgagaacgacgagtggacccaggacagagccaagcccgtgacccagatcgtgtctgccgaagcctggggcagagccgattgcggatcccagagcttcggcctgctggaccccaagctgtgctacctgctggatggcatcctgttcatctacggcgtgatcctgaccgccctgttcctgagagtgaagttcagcagaagcgccgacgcccctgcctaccagcagggacagaaccaactgtacaacgagctgaacctgggcagacgggaagagtacgacgtgctggacaagcggagaggcagggaccctgagatgggcggaaagccccagcggagaaagaacccccaggaaggactgtataacgaactccagaaagacaagatggccgaagcctacagcgagatcggcatgaagggcgagcggagaagaggcaagggccacgatggcctgtaccagggcctgagcaccgccaccaaggacacctatgacgccctgcacatgcaggccctgcctccaagaagggccaagcgatctggatctggagcaacaaacttctcactactcaaacaagcaggtgacgtggaggagaatcccgggcctactagtatggactggatttggcgcatccttttccttgtcggcgctgctaccggcgcgcattccttcgaagaagttcagctggtggaatctggccctggcctggtcaagcctagcgagacactgagcctgacctgtaccgtgtccggcttcagcctgaccagatttggcgtgcactgggtccgacagccacctggcaaaggactggaatggctgggagtgatttggagaggcggcagcaccgattacaacgccgccttcatgagccggctgaccatcagcaaggacaacagcaagaaccaggtgtccctgaagctgagcagcgtgacagccgctgataccgccgtgtactactgctccaaccactactacggcagctccgactacgccctggataattggggccagggaaccctggtcaccgtgtcatctacgcgtatccagaaccctgatcctgccgtgtaccagctgcgggatagcaagagcagcgacaagagcgtgtgtctgttcaccgacttcgacagccagaccaacgtgtcccagagcaaggactccgacgtgtacatcaccgataagaccgtgctggacatgcggagcatggacttcaagagcaactccgccgtggcctggtccaacaagtccgatttcgcctgcgccaacgccttcaacaacagcattatccccgaggacacattcttcccaagccccgagagcagctgcggtaccatcactcaaggtttggcagtgtcaaccatctcatcattctttccacctggctaccaagtgtccttctgcctggtcatggtgctgctgttcgccgtggataccggcctgtacttcagcgtcaagaccaacatccggtccagcaccagagactggaaggaccacaagttcaagtggcggaaggaccctcaggacaag

SEQ ID NO: 35303 - DNA, 2142 bp, synthetic construct
  source 1..2142: mol_type = other DNA
atggccttaccagtgaccgccttgctcctgccgctggccttgctgctccacgccgccaggccggacatccagatgacacagagccctagcagcctgtctgccagcgtgggagacagagtgaccatcacctgtagagccagccaggacgtgcggaacatcgtcgtgtggttccagcagaagcctggcaaggcccctaagctgctgatctacagcggcagctacagatacagcggcgtgcccagcagattttccggctctggctctggcaccgacttcaccctgacaatatccagcctccagcctgaggacttcgccacctactactgccagcagcactacagccctccatacacattcggccagggcaccaaggtggaaatcaagagactcgaggacctgaagaacgtgttcccacctgaggtggccgtgttcgagcctagcgaggccgagatcagccacacccagaaagccaccctcgtgtgcctggctaccggcttctaccccgaccatgtggaactgtcttggtgggtcaacggcaaagaggtgcacagcggcgtgtctaccgacccccagccactgaaagaacagcccgccctgaacgacagccggtactgcctgagcagcagactgagagtgtccgccaccttctggcagaacccccggaaccacttcagatgccaggtgcagttctacggcctgagcgagaacgacgagtggacccaggacagagccaagcccgtgacccagatcgtgtctgccgaagcctggggcagagccgattgcggatcccagagcttcggcctgctggaccccaagctgtgctacctgctggatggcatcctgttcatctacggcgtgatcctgaccgccctgttcctgagagtgaagttcagcagaagcgccgacgcccctgcctaccagcagggacagaaccaactgtacaacgagctgaacctgggcagacgggaagagtacgacgtgctggacaagcggagaggcagggaccctgagatgggcggaaagccccagcggagaaagaacccccaggaaggactgtataacgaactccagaaagacaagatggccgaagcctacagcgagatcggcatgaagggcgagcggagaagaggcaagggccacgatggcctgtaccagggcctgagcaccgccaccaaggacacctatgacgccctgcacatgcaggccctgcctccaagaagggccaagcgatctggatctggagcaacaaacttctcactactcaaacaagcaggtgacgtggaggagaatcccgggcctactagtatggactggatttggcgcatccttttccttgtcggcgctgctaccggcgcgcattccttcgaagaagttcagctggtggaatctggccctggcctggtcaagcctagcgagacactgagcctgacctgtaccgtgtccggcttcagcctgaccagatttggcgtgcactgggtccgacagccacctggcaaaggactggaatggctgggagtgatttggagaggcggcagcaccgattacaacgccgccttcatgagccggctgaccatcagcaaggacaacagcaagaaccaggtgtccctgaagctgagcagcgtgacagccgctgataccgccgtgtactactgctccaaccactactacggcagctccgactacgccctggataattggggccagggaaccctggtcaccgtgtcatctacgcgtatccagaaccctgatcctgccgtgtaccagctgcgggatagcaagagcagcgacaagagcgtgtgtctgttcaccgacttcgacagccagaccaacgtgtcccagagcaaggactccgacgtgtacatcaccgataagaccgtgctggacatgcggagcatggacttcaagagcaactccgccgtggcctggtccaacaagtccgatttcgcctgcgccaacgccttcaacaacagcattatccccgaggacacattcttcccaagccccgagagcagctgcggtaccatcactcaaggtttggcagtgtcaaccatctcatcattctttccacctggctaccaagtgtccttctgcctggtcatggtgctgctgttcgccgtggataccggcctgtacttcagcgtc

SEQ ID NO: 35304 - DNA, 2145 bp, synthetic construct
  source 1..2145: mol_type = other DNA
atggccttaccagtgaccgccttgctcctgccgctggccttgctgctccacgccgccaggccggacatccagatgacacagagccctagcagcctgtctgccagcgtgggagacagagtgaccatcacctgtagagccagccaggacgtgcggaacatcgtcgtgtggttccagcagaagcctggcaaggcccctaagctgctgatctacagcggcagctacagatacagcggcgtgcccagcagattttccggctctggctctggcaccgacttcaccctgacaatatccagcctccagcctgaggacttcgccacctactactgccagcagcactacagccctccatacacattcggccagggcaccaaggtggaaatcaagagactcgaggacctgaagaacgtgttcccacctgaggtggccgtgttcgagcctagcgaggccgagatcagccacacccagaaagccaccctcgtgtgcctggctaccggcttctaccccgaccatgtggaactgtcttggtgggtcaacggcaaagaggtgcacagcggcgtgtctaccgacccccagccactgaaagaacagcccgccctgaacgacagccggtactgcctgagcagcagactgagagtgtccgccaccttctggcagaacccccggaaccacttcagatgccaggtgcagttctacggcctgagcgagaacgacgagtggacccaggacagagccaagcccgtgacccagatcgtgtctgccgaagcctggggcagagccgattgcggatcccagagcttcggcctgctggaccccaagctgtgctacctgctggatggcatcctgttcatctacggcgtgatcctgaccgccctgttcctgagagtgaagttcagcagaagcgccgacgcccctgcctaccagcagggacagaaccaactgtacaacgagctgaacctgggcagacgggaagagtacgacgtgctggacaagcggagaggcagggaccctgagatgggcggaaagccccagcggagaaagaacccccaggaaggactgtataacgaactccagaaagacaagatggccgaagcctacagcgagatcggcatgaagggcgagcggagaagaggcaagggccacgatggcctgtaccagggcctgagcaccgccaccaaggacacctatgacgccctgcacatgcaggccctgcctccaagaagggccaagcgatctggatctggagcaacaaacttctcactactcaaacaagcaggtgacgtggaggagaatcccgggcctactagtatggactggatttggcgcatccttttccttgtcggcgctgctaccggcgcgcattccttcgaagaagttcagctggtggaatctggccctggcctggtcaagcctagcgagacactgagcctgacctgtaccgtgtccggcttcagcctgaccagatttggcgtgcactgggtccgacagccacctggcaaaggactggaatggctgggagtgatttggagaggcggcagcaccgattacaacgccgccttcatgagccggctgaccatcagcaaggacaacagcaagaaccaggtgtccctgaagctgagcagcgtgacagccgctgataccgccgtgtactactgctccaaccactactacggcagctccgactacgccctggataattggggccagggaaccctggtcaccgtgtcatctacgcgtatccagaaccctgatcctgccgtgtaccagctgcgggatagcaagagcagcgacaagagcgtgtgtctgttcaccgacttcgacagccagaccaacgtgtcccagagcaaggactccgacgtgtacatcaccgataagaccgtgctggacatgcggagcatggacttcaagagcaactccgccgtggcctggtccaacaagtccgatttcgcctgcgccaacgccttcaacaacagcattatccccgaggacacattcttcccaagccccgagagcagctgcggtaccatcactcaaggtttggcagtgtcaaccatctcatcattctttccacctggctaccaagtgtccttctgcctggtcatggtgctgctgttcgccgtggataccggcctgtacttcagcgtcaag

SEQ ID NO: 35305 - DNA, 2148 bp, synthetic construct
  source 1..2148: mol_type = other DNA
atggccttaccagtgaccgccttgctcctgccgctggccttgctgctccacgccgccaggccggacatccagatgacacagagccctagcagcctgtctgccagcgtgggagacagagtgaccatcacctgtagagccagccaggacgtgcggaacatcgtcgtgtggttccagcagaagcctggcaaggcccctaagctgctgatctacagcggcagctacagatacagcggcgtgcccagcagattttccggctctggctctggcaccgacttcaccctgacaatatccagcctccagcctgaggacttcgccacctactactgccagcagcactacagccctccatacacattcggccagggcaccaaggtggaaatcaagagactcgaggacctgaagaacgtgttcccacctgaggtggccgtgttcgagcctagcgaggccgagatcagccacacccagaaagccaccctcgtgtgcctggctaccggcttctaccccgaccatgtggaactgtcttggtgggtcaacggcaaagaggtgcacagcggcgtgtctaccgacccccagccactgaaagaacagcccgccctgaacgacagccggtactgcctgagcagcagactgagagtgtccgccaccttctggcagaacccccggaaccacttcagatgccaggtgcagttctacggcctgagcgagaacgacgagtggacccaggacagagccaagcccgtgacccagatcgtgtctgccgaagcctggggcagagccgattgcggatcccagagcttcggcctgctggaccccaagctgtgctacctgctggatggcatcctgttcatctacggcgtgatcctgaccgccctgttcctgagagtgaagttcagcagaagcgccgacgcccctgcctaccagcagggacagaaccaactgtacaacgagctgaacctgggcagacgggaagagtacgacgtgctggacaagcggagaggcagggaccctgagatgggcggaaagccccagcggagaaagaacccccaggaaggactgtataacgaactccagaaagacaagatggccgaagcctacagcgagatcggcatgaagggcgagcggagaagaggcaagggccacgatggcctgtaccagggcctgagcaccgccaccaaggacacctatgacgccctgcacatgcaggccctgcctccaagaagggccaagcgatctggatctggagcaacaaacttctcactactcaaacaagcaggtgacgtggaggagaatcccgggcctactagtatggactggatttggcgcatccttttccttgtcggcgctgctaccggcgcgcattccttcgaagaagttcagctggtggaatctggccctggcctggtcaagcctagcgagacactgagcctgacctgtaccgtgtccggcttcagcctgaccagatttggcgtgcactgggtccgacagccacctggcaaaggactggaatggctgggagtgatttggagaggcggcagcaccgattacaacgccgccttcatgagccggctgaccatcagcaaggacaacagcaagaaccaggtgtccctgaagctgagcagcgtgacagccgctgataccgccgtgtactactgctccaaccactactacggcagctccgactacgccctggataattggggccagggaaccctggtcaccgtgtcatctacgcgtatccagaaccctgatcctgccgtgtaccagctgcgggatagcaagagcagcgacaagagcgtgtgtctgttcaccgacttcgacagccagaccaacgtgtcccagagcaaggactccgacgtgtacatcaccgataagaccgtgctggacatgcggagcatggacttcaagagcaactccgccgtggcctggtccaacaagtccgatttcgcctgcgccaacgccttcaacaacagcattatccccgaggacacattcttcccaagccccgagagcagctgcggtaccatcactcaaggtttggcagtgtcaaccatctcatcattctttccacctggctaccaagtgtccttctgcctggtcatggtgctgctgttcgccgtggataccggcctgtacttcagcgtcaagacc

SEQ ID NO: 35306 - DNA, 1959 bp, synthetic construct
  source 1..1959: mol_type = other DNA
atggccttaccagtgaccgccttgctcctgccgctggccttgctgctccacgccgccaggccggacatccagatgacacagagccctagcagcctgtctgccagcgtgggagacagagtgaccatcacctgtagagccagccaggacgtgcggaacatcgtcgtgtggttccagcagaagcctggcaaggcccctaagctgctgatctacagcggcagctacagatacagcggcgtgcccagcagattttccggctctggctctggcaccgacttcaccctgacaatatccagcctccagcctgaggacttcgccacctactactgccagcagcactacagccctccatacacattcggccagggcaccaaggtggaaatcaagagactcgagggacagcctaaggccaatcctaccgtgacactgttccctccaagcagcgaagaactccaggccaacaaggccacacttgtgtgcctgatctccgacttctaccctggggctgtgacagtggcttggaaggccgatggatctcctgtgaaagccggcgtggaaaccaccaagccatccaagcagagcaacaacaaatacgccgccagctcctacctgagcctgacacctgagcagtggaagtcccacagatcctacagctgccaagtgacccacgaaggcagcaccgtggaaaagacagtggcccctacagagtgcagcggatccctgggagagcctcagctgtgctatatcctggacgccatcctgtttctgtacggcatcgtgctgaccctgctgtactgccggctgaagatccaagtgcggaaggccgccatcaccagctacgagaaatccgacggcgtgtacaccggcctgagcaccagaaatcaagagacatacgagacactgaagcacgaaaagcctccacaaagggccaagcgatctggatctggagcaacaaacttctcactactcaaacaagcaggtgacgtggaggagaatcccgggcctactagtatggactggatttggcgcatccttttccttgtcggcgctgctaccggcgcgcattccttcgaagaagttcagctggtggaatctggccctggcctggtcaagcctagcgagacactgagcctgacctgtaccgtgtccggcttcagcctgaccagatttggcgtgcactgggtccgacagccacctggcaaaggactggaatggctgggagtgatttggagaggcggcagcaccgattacaacgccgccttcatgagccggctgaccatcagcaaggacaacagcaagaaccaggtgtccctgaagctgagcagcgtgacagccgctgataccgccgtgtactactgctccaaccactactacggcagctccgactacgccctggataattggggccagggaaccctggtcaccgtgtcatctacgcgtgcctctacaaagggaccctccgtgtttcctctggctcccagcagcaagtctacaagcggaggaacagccgctctgggctgcctggtcaaggattactttcccgagcctgtgaccgtgtcctggaatagcggagcactgacaagcggcgtgcacacctttccagccgtgctgcaaagcagcggcctgtactctctgagcagcgtggtcacagtgcctagctctagcctgggcacccagacctacatctgcaatgtgaaccacaagcctagcaacaccaaggtggacaagagagtggaacccaagagctgtggtaccctcggagaaccacagctctgttacattctggatgctatcctgttcctctatgggatcgtcctgacactcctgtattgcagactcaaaattcaagttcgcaaagccgccattacctcttacgagaagagtgatggggtgtacacaggactgtctacccggaatcaagaaacctacgaaaccctcaaacatgagaagccacctcagtaa

SEQ ID NO: 35307 - DNA, 1866 bp, synthetic construct
  source 1..1866: mol_type = other DNA
atggccttaccagtgaccgccttgctcctgccgctggccttgctgctccacgccgccaggccggacatccagatgacacagagccctagcagcctgtctgccagcgtgggagacagagtgaccatcacctgtagagccagccaggacgtgcggaacatcgtcgtgtggttccagcagaagcctggcaaggcccctaagctgctgatctacagcggcagctacagatacagcggcgtgcccagcagattttccggctctggctctggcaccgacttcaccctgacaatatccagcctccagcctgaggacttcgccacctactactgccagcagcactacagccctccatacacattcggccagggcaccaaggtggaaatcaagagactcgaggacctgaagaacgtgttcccacctgaggtggccgtgttcgagcctagcgaggccgagatcagccacacccagaaagccaccctcgtgtgcctggctaccggcttctaccccgaccatgtggaactgtcttggtgggtcaacggcaaagaggtgcacagcggcgtgtgtaccgacccccagccactgaaagaacagcccgccctgaacgacagccggtactgcctgagcagcagactgagagtgtccgccaccttctggcagaacccccggaaccacttcagatgccaggtgcagttctacggcctgagcgagaacgacgagtggacccaggacagagccaagcccgtgacccagatcgtgtctgccgaagcctggggcagagccgattgcggctttaccagcgagagctaccagcagggcgtgctgagcgcctactacatgtacttgttgctgctgctgaagtccgtggtgtacttcgccatcatcacatgctgcctgctgcggagaaccgccttctgctgcaacggcgagaagtctagggccaagcgatctggatctggagcaacaaacttctcactactcaaacaagcaggtgacgtggaggagaatcccgggcctactagtatggactggatttggcgcatccttttccttgtcggcgctgctaccggcgcgcattccttcgaagaagttcagctggtggaatctggccctggcctggtcaagcctagcgagacactgagcctgacctgtaccgtgtccggcttcagcctgaccagatttggcgtgcactgggtccgacagccacctggcaaaggactggaatggctgggagtgatttggagaggcggcagcaccgattacaacgccgccttcatgagccggctgaccatcagcaaggacaacagcaagaaccaggtgtccctgaagctgagcagcgtgacagccgctgataccgccgtgtactactgctccaaccactactacggcagctccgactacgccctggataattggggccagggaaccctggtcaccgtgtcatctacgcgtatccagaaccctgatcctgccgtgtaccagctgcgggatagcaagagcagcgacaagagcgtgtgtctgttcaccgacttcgacagccagaccaacgtgtcccagagcaaggactccgacgtgtacatcaccgataagtgcgtgctggacatgcggagcatggacttcaagagcaactccgccgtggcctggtccaacaagtccgatttcgcctgcgccaacgccttcaacaacagcattatccccgaggacacattcttcccaagccccgagagcagctgcgacgtgaagctggtggaaaagagcttcgagacagacaccaacctgaacttccagaacctgagcgtgatcggcttcagaatcctgctgctgaaagtggccggctttaacctgctgatgaccctgcggctgtggtccagc

SEQ ID NO: 35308 - DNA, 1887 bp, synthetic construct
  source 1..1887: mol_type = other DNA
atggccttaccagtgaccgccttgctcctgccgctggccttgctgctccacgccgccaggccggacatccagatgacacagagccctagcagcctgtctgccagcgtgggagacagagtgaccatcacctgtagagccagccaggacgtgcggaacatcgtcgtgtggttccagcagaagcctggcaaggcccctaagctgctgatctacagcggcagctacagatacagcggcgtgcccagcagattttccggctctggctctggcaccgacttcaccctgacaatatccagcctccagcctgaggacttcgccacctactactgccagcagcactacagccctccatacacattcggccagggcaccaaggtggaaatcaagagactcgaggacaagcagctggacgccgacgtgtcccccaagcctaccatcttcctgccctctatcgccgagacaaagctccagaaggccggcacctacctgtgcctgctggaaaagttcttcccagatgtgattaagatccactggcaggaaaagaagtccaacaccatcctgggcagccaggaaggcaacaccatgaagaccaacgacacctacatgaagttcagctggctgaccgtgcccgagaagtccctggacaaagaacacagatgcatcgtgcggcacgaaaacaacaagaacggcgtggaccaggaaatcatcttcccacccatcaagaccgatgtgattacaatggaccccaaggacaactgctccaaggacgccaacgataccctgctgctccagctgaccaacaccagcgcctactacatgtacgagatcctgctgggcaaggccaccctgtacgccgtgctggtgtctgccctggtgctgatggctatggtcaagcggaaggacagccggggaagggccaagcgatctggatctggagcaacaaacttctcactactcaaacaagcaggtgacgtggaggagaatcccgggcctactagtatggactggatttggcgcatccttttccttgtcggcgctgctaccggcgcgcattccttcgaagaagttcagctggtggaatctggccctggcctggtcaagcctagcgagacactgagcctgacctgtaccgtgtccggcttcagcctgaccagatttggcgtgcactgggtccgacagccacctggcaaaggactggaatggctgggagtgatttggagaggcggcagcaccgattacaacgccgccttcatgagccggctgaccatcagcaaggacaacagcaagaaccaggtgtccctgaagctgagcagcgtgacagccgctgataccgccgtgtactactgctccaaccactactacggcagctccgactacgccctggataattggggccagggaaccctggtcaccgtgtcatctacgcgtagccagcctcacaccaagcccagcgtgttcgtgatgaagaacggcaccaacgtggcctgcctcgtgaaagagttctaccccaaggacatcaggatcaacctggtgtccagcaagaagatcaccgagttcgaccccgccatcgtgatctcccccagcggcaagtacaacgccgtgaagctggggaagtatgaggacagcaacagcgtgacctgctccgtgcagcacgacaacaagaccgtgcacagcaccgactttgaagtgaaaaccgactccaccgaccacgtgaagcccaaagagacagagaacaccaagcagcccagcaagagctgccacaagcccaaggccatcgtgcacaccgagaaagtgaacatgatgagcctgaccgtgatcggcttcagaatcctgctgctgaaagtggccggctttaacctgctgatgaccctgcggctgtggtccagctaa

SEQ ID NO: 35309 - DNA, 1887 bp, synthetic construct
  source 1..1887: mol_type = other DNA
atggccttaccagtgaccgccttgctcctgccgctggccttgctgctccacgccgccaggccggacatccagatgacacagagccctagcagcctgtctgccagcgtgggagacagagtgaccatcacctgtagagccagccaggacgtgcggaacatcgtcgtgtggttccagcagaagcctggcaaggcccctaagctgctgatctacagcggcagctacagatacagcggcgtgcccagcagattttccggctctggctctggcaccgacttcaccctgacaatatccagcctccagcctgaggacttcgccacctactactgccagcagcactacagccctccatacacattcggccagggcaccaaggtggaaatcaagagactcgaggacaagcagctggacgccgacgtgtcccccaagcctaccatcttcctgccctctatcgccgagacaaagctccagaaggccggcacctacctgtgcctgctggaaaagttcttcccagatgtgattaagatccactggcaggaaaagaagtccaacaccatcctgggcagccaggaaggcaacaccatgaagaccaacgacacctacatgaagttcagctggctgaccgtgcccgagaagtccctggacaaagaacacagatgcatcgtgcggcacgaaaacaacaagaacggcgtggaccaggaaatcatcttcccacccatcaagaccgatgtgattacaatggaccccaaggacaactgctccaaggacgccaacgataccctgctgctccagctgaccaacaccagcgccaccatcctgtacgagatcctgctgggcaaggccaccctgtacgccgtgctggtgtctgccctggtgctgatggctatggtcaagcggaaggacagccggggaagggccaagcgatctggatctggagcaacaaacttctcactactcaaacaagcaggtgacgtggaggagaatcccgggcctactagtatggactggatttggcgcatccttttccttgtcggcgctgctaccggcgcgcattccttcgaagaagttcagctggtggaatctggccctggcctggtcaagcctagcgagacactgagcctgacctgtaccgtgtccggcttcagcctgaccagatttggcgtgcactgggtccgacagccacctggcaaaggactggaatggctgggagtgatttggagaggcggcagcaccgattacaacgccgccttcatgagccggctgaccatcagcaaggacaacagcaagaaccaggtgtccctgaagctgagcagcgtgacagccgctgataccgccgtgtactactgctccaaccactactacggcagctccgactacgccctggataattggggccagggaaccctggtcaccgtgtcatctacgcgtagccagcctcacaccaagcccagcgtgttcgtgatgaagaacggcaccaacgtggcctgcctcgtgaaagagttctaccccaaggacatcaggatcaacctggtgtccagcaagaagatcaccgagttcgaccccgccatcgtgatctcccccagcggcaagtacaacgccgtgaagctggggaagtatgaggacagcaacagcgtgacctgctccgtgcagcacgacaacaagaccgtgcacagcaccgactttgaagtgaaaaccgactccaccgaccacgtgaagcccaaagagacagagaacaccaagcagcccagcaagagctgccacaagcccaaggccatcgtgcacaccgagaaagtgaacatgatgagcctgaccgtgatcggcttcagaatcctgctgctgaaagtggccggctttaacctgctgatgaccctgcggctgtggtccagctaa

SEQ ID NO: 35310 - DNA, 1887 bp, synthetic construct
  source 1..1887: mol_type = other DNA
atggccttaccagtgaccgccttgctcctgccgctggccttgctgctccacgccgccaggccggacatccagatgacacagagccctagcagcctgtctgccagcgtgggagacagagtgaccatcacctgtagagccagccaggacgtgcggaacatcgtcgtgtggttccagcagaagcctggcaaggcccctaagctgctgatctacagcggcagctacagatacagcggcgtgcccagcagattttccggctctggctctggcaccgacttcaccctgacaatatccagcctccagcctgaggacttcgccacctactactgccagcagcactacagccctccatacacattcggccagggcaccaaggtggaaatcaagagactcgaggacaagcagctggacgccgacgtgtcccccaagcctaccatcttcctgccctctatcgccgagacaaagctccagaaggccggcacctacctgtgcctgctggaaaagttcttcccagatgtgattaagatccactggcaggaaaagaagtccaacaccatcctgggcagccaggaaggcaacaccatgaagaccaacgacacctacatgaagttcagctggctgaccgtgcccgagaagtccctggacaaagaacacagatgcatcgtgcggcacgaaaacaacaagaacggcgtggaccaggaaatcatcttcccacccatcaagaccgatgtgattacaatggaccccaaggacaactgctccaaggacgccaacgataccctgctgctccagctgaccaacaccagcgcctactacatgtacgagatcctgctgggcaaggccaccctgtacgccgtgctggtgtctgccctggtgctgatggctatggtcaagcggaaggacagccggggaagggccaagcgatctggatctggagcaacaaacttctcactactcaaacaagcaggtgacgtggaggagaatcccgggcctactagtatggactggatttggcgcatccttttccttgtcggcgctgctaccggcgcgcattccttcgaagaagttcagctggtggaatctggccctggcctggtcaagcctagcgagacactgagcctgacctgtaccgtgtccggcttcagcctgaccagatttggcgtgcactgggtccgacagccacctggcaaaggactggaatggctgggagtgatttggagaggcggcagcaccgattacaacgccgccttcatgagccggctgaccatcagcaaggacaacagcaagaaccaggtgtccctgaagctgagcagcgtgacagccgctgataccgccgtgtactactgctccaaccactactacggcagctccgactacgccctggataattggggccagggaaccctggtcaccgtgtcatctacgcgtagccagcctcacaccaagcccagcgtgttcgtgatgaagaacggcaccaacgtggcctgcctcgtgaaagagttctaccccaaggacatcaggatcaacctggtgtccagcaagaagatcaccgagttcgaccccgccatcgtgatctcccccagcggcaagtacaacgccgtgaagctggggaagtacgaggacagcaacagcgtgacctgctccgtgcagcacgacaacaagaccgtgcacagcaccgactttgaagtgaaaaccgactccaccgaccacgtgaagcccaaagagacagagaacaccaagcagcccagcaagagctgccacaagcccaaggccatcgtgcacaccgagaaagtgaacatgatgagcctgaccgtgctgggcttcagaatcctgctgctgaaagtggccggctttaacctgctgatgaccctgcggctgtggtccagctaa

SEQ ID NO: 35311 - DNA, 1887 bp, synthetic construct
  source 1..1887: mol_type = other DNA
atggccttaccagtgaccgccttgctcctgccgctggccttgctgctccacgccgccaggccggacatccagatgacacagagccctagcagcctgtctgccagcgtgggagacagagtgaccatcacctgtagagccagccaggacgtgcggaacatcgtcgtgtggttccagcagaagcctggcaaggcccctaagctgctgatctacagcggcagctacagatacagcggcgtgcccagcagattttccggctctggctctggcaccgacttcaccctgacaatatccagcctccagcctgaggacttcgccacctactactgccagcagcactacagccctccatacacattcggccagggcaccaaggtggaaatcaagagactcgaggacaagcagctggacgccgacgtgtcccccaagcctaccatcttcctgccctctatcgccgagacaaagctccagaaggccggcacctacctgtgcctgctggaaaagttcttcccagatgtgattaagatccactggcaggaaaagaagtccaacaccatcctgggcagccaggaaggcaacaccatgaagaccaacgacacctacatgaagttcagctggctgaccgtgcccgagaagtccctggacaaagaacacagatgcatcgtgcggcacgaaaacaacaagaacggcgtggaccaggaaatcatcttcccacccatcaagaccgatgtgattacaatggaccccaaggacaactgctccaaggacgccaacgataccctgctgctccagctgaccaacaccagcgccaccatcctgtacgagatcctgctgggcaaggccaccctgtacgccgtgctggtgtctgccctggtgctgatggctatggtcaagcggaaggacagccggggaagggccaagcgatctggatctggagcaacaaacttctcactactcaaacaagcaggtgacgtggaggagaatcccgggcctactagtatggactggatttggcgcatccttttccttgtcggcgctgctaccggcgcgcattccttcgaagaagttcagctggtggaatctggccctggcctggtcaagcctagcgagacactgagcctgacctgtaccgtgtccggcttcagcctgaccagatttggcgtgcactgggtccgacagccacctggcaaaggactggaatggctgggagtgatttggagaggcggcagcaccgattacaacgccgccttcatgagccggctgaccatcagcaaggacaacagcaagaaccaggtgtccctgaagctgagcagcgtgacagccgctgataccgccgtgtactactgctccaaccactactacggcagctccgactacgccctggataattggggccagggaaccctggtcaccgtgtcatctacgcgtagccagcctcacaccaagcccagcgtgttcgtgatgaagaacggcaccaacgtggcctgcctcgtgaaagagttctaccccaaggacatcaggatcaacctggtgtccagcaagaagatcaccgagttcgaccccgccatcgtgatctcccccagcggcaagtacaacgccgtgaagctggggaagtacgaggacagcaacagcgtgacctgctccgtgcagcacgacaacaagaccgtgcacagcaccgactttgaagtgaaaaccgactccaccgaccacgtgaagcccaaagagacagagaacaccaagcagcccagcaagagctgccacaagcccaaggccatcgtgcacaccgagaaagtgaacatgatgagcctgaccgtgctgggcttcagaatcctgctgctgaaagtggccggctttaacctgctgatgaccctgcggctgtggtccagctaa

SEQ ID NO: 35312 - DNA, 1869 bp, synthetic construct
  source 1..1869: mol_type = other DNA
atggccttaccagtgaccgccttgctcctgccgctggccttgctgctccacgccgccaggccggacatccagatgacacagagccctagcagcctgtctgccagcgtgggagacagagtgaccatcacctgtagagccagccaggacgtgcggaacatcgtcgtgtggttccagcagaagcctggcaaggcccctaagctgctgatctacagcggcagctacagatacagcggcgtgcccagcagattttccggctctggctctggcaccgacttcaccctgacaatatccagcctccagcctgaggacttcgccacctactactgccagcagcactacagccctccatacacattcggccagggcaccaaggtggaaatcaagagactcgaggacctgaagaacgtgttcccacctgaggtggccgtgttcgagcctagcgaggccgagatcagccacacccagaaagccaccctcgtgtgcctggctaccggcttctaccccgaccatgtggaactgtcttggtgggtcaacggcaaagaggtgcacagcggcgtgtgtaccgacccccagccactgaaagaacagcccgccctgaacgacagccggtactgcctgagcagcagactgagagtgtccgccaccttctggcagaacccccggaaccacttcagatgccaggtgcagttctacggcctgagcgagaacgacgagtggacccaggacagagccaagcccgtgacccagatcgtgtctgccgaagcctggggcagagccgattgcggctttaccagcgagagctaccagcagggcgtgctgagcgccaccatcctgtacttgttgctgctgctgaagtccgtggtgtacttcgccatcatcacatgctgcctgctgcggagaaccgccttctgctgcaacggcgagaagtctagggccaagcgatctggatctggagcaacaaacttctcactactcaaacaagcaggtgacgtggaggagaatcccgggcctactagtatggactggatttggcgcatccttttccttgtcggcgctgctaccggcgcgcattccttcgaagaagttcagctggtggaatctggccctggcctggtcaagcctagcgagacactgagcctgacctgtaccgtgtccggcttcagcctgaccagatttggcgtgcactgggtccgacagccacctggcaaaggactggaatggctgggagtgatttggagaggcggcagcaccgattacaacgccgccttcatgagccggctgaccatcagcaaggacaacagcaagaaccaggtgtccctgaagctgagcagcgtgacagccgctgataccgccgtgtactactgctccaaccactactacggcagctccgactacgccctggataattggggccagggaaccctggtcaccgtgtcatctacgcgtatccagaaccctgatcctgccgtgtaccagctgcgggatagcaagagcagcgacaagagcgtgtgtctgttcaccgacttcgacagccagaccaacgtgtcccagagcaaggactccgacgtgtacatcaccgataagtgcgtgctggacatgcggagcatggacttcaagagcaactccgccgtggcctggtccaacaagtccgatttcgcctgcgccaacgccttcaacaacagcattatccccgaggacacattcttcccaagccccgagagcagctgcgacgtgaagctggtggaaaagagcttcgagacagacaccaacctgaacttccagaacctgagcgtgatcggcctgcggatgctgttcgccaaaaccgtggccgtgaacttcctgctgaccgccaagctgttcttcctctaa

SEQ ID NO: 35313 - DNA, 1956 bp, synthetic construct
  source 1..1956: mol_type = other DNA
atggccttaccagtgaccgccttgctcctgccgctggccttgctgctccacgccgccaggccggacatccagatgacacagagccctagcagcctgtctgccagcgtgggagacagagtgaccatcacctgtagagccagccaggacgtgcggaacatcgtcgtgtggttccagcagaagcctggcaaggcccctaagctgctgatctacagcggcagctacagatacagcggcgtgcccagcagattttccggctctggctctggcaccgacttcaccctgacaatatccagcctccagcctgaggacttcgccacctactactgccagcagcactacagccctccatacacattcggccagggcaccaaggtggaaatcaagagactcgaggacctgaagaacgtgttcccacctgaggtggccgtgttcgagcctagcgaggccgagatcagccacacccagaaagccaccctcgtgtgcctggctaccggcttctaccccgaccatgtggaactgtcttggtgggtcaacggcaaagaggtgcacagcggcgtgtctaccgacccccagccactgaaagaacagcccgccctgaacgacagccggtactgcctgagcagcagactgagagtgtccgccaccttctggcagaacccccggaaccacttcagatgccaggtgcagttctacggcctgagcgagaacgacgagtggacccaggacagagccaagcccgtgacccagatcgtgtctgccgaagcctggggcagagccgattgcggatcctccaaggacgccaacgataccctgctgctccagctgaccaacaccagcgcctactacatgtacttgttgctgctgctgaagtccgtggtgtacttcgccatcatcacatgctgcctgctgcggagaaccgccttctgctgcaacggcgagaagtctagggccaagcgatctggatctggagcaacaaacttctcactactcaaacaagcaggtgacgtggaggagaatcccgggcctactagtatggactggatttggcgcatccttttccttgtcggcgctgctaccggcgcgcattccttcgaagaagttcagctggtggaatctggccctggcctggtcaagcctagcgagacactgagcctgacctgtaccgtgtccggcttcagcctgaccagatttggcgtgcactgggtccgacagccacctggcaaaggactggaatggctgggagtgatttggagaggcggcagcaccgattacaacgccgccttcatgagccggctgaccatcagcaaggacaacagcaagaaccaggtgtccctgaagctgagcagcgtgacagccgctgataccgccgtgtactactgctccaaccactactacggcagctccgactacgccctggataattggggccagggaaccctggtcaccgtgtcatctacgcgtatccagaaccctgatcctgccgtgtaccagctgcgggatagcaagagcagcgacaagagcgtgtgtctgttcaccgacttcgacagccagaccaacgtgtcccagagcaaggactccgacgtgtacatcaccgataagaccgtgctggacatgcggagcatggacttcaagagcaactccgccgtggcctggtccaacaagtccgatttcgcctgcgccaacgccttcaacaacagcattatccccgaggacacattcttcccaagccccgagagcagctgcggtaccgaagtgaaaaccgactccaccgaccacgtgaagcccaaagagacagagaacaccaagcagcccagcaagagctgccacaagcccaaggccatcgtgcacaccgagaaagtgaacatgatgagcctgaccgtgctgggcctgcggatgctgttcgccaaaaccgtggccgtgaacttcctgctgaccgccaagctgttcttcctctaa

SEQ ID NO: 35314 - DNA, 1866 bp, synthetic construct
  source 1..1866: mol_type = other DNA
atggccttaccagtgaccgccttgctcctgccgctggccttgctgctccacgccgccaggccggacatccagatgacacagagccctagcagcctgtctgccagcgtgggagacagagtgaccatcacctgtagagccagccaggacgtgcggaacatcgtcgtgtggttccagcagaagcctggcaaggcccctaagctgctgatctacagcggcagctacagatacagcggcgtgcccagcagattttccggctctggctctggcaccgacttcaccctgacaatatccagcctccagcctgaggacttcgccacctactactgccagcagcactacagccctccatacacattcggccagggcaccaaggtggaaatcaagagactcgaggacctgaagaacgtgttcccacctgaggtggccgtgttcgagcctagcgaggccgagatcagccacacccagaaagccaccctcgtgtgcctggctaccggcttctaccccgaccatgtggaactgtcttggtgggtcaacggcaaagaggtgcacagcggcgtgtgtaccgacccccagccactgaaagaacagcccgccctgaacgacagccggtactgcctgagcagcagactgagagtgtccgccaccttctggcagaacccccggaaccacttcagatgccaggtgcagttctacggcctgagcgagaacgacgagtggacccaggacagagccaagcccgtgacccagatcgtgtctgccgaagcctggggcagagccgattgcgacgtgaagctggtggaaaagagcttcgagacagacaccaacctgaacttccagaacctgagcgtgatcggcttcagaatcctgctgctgaaagtggccggctttaacctgctgatgaccctgcggctgtggtccagcagggccaagcgatctggatctggagcaacaaacttctcactactcaaacaagcaggtgacgtggaggagaatcccgggcctactagtatggactggatttggcgcatccttttccttgtcggcgctgctaccggcgcgcattccttcgaagaagttcagctggtggaatctggccctggcctggtcaagcctagcgagacactgagcctgacctgtaccgtgtccggcttcagcctgaccagatttggcgtgcactgggtccgacagccacctggcaaaggactggaatggctgggagtgatttggagaggcggcagcaccgattacaacgccgccttcatgagccggctgaccatcagcaaggacaacagcaagaaccaggtgtccctgaagctgagcagcgtgacagccgctgataccgccgtgtactactgctccaaccactactacggcagctccgactacgccctggataattggggccagggaaccctggtcaccgtgtcatctacgcgtatccagaaccctgatcctgccgtgtaccagctgcgggatagcaagagcagcgacaagagcgtgtgtctgttcaccgacttcgacagccagaccaacgtgtcccagagcaaggactccgacgtgtacatcaccgataagtgcgtgctggacatgcggagcatggacttcaagagcaactccgccgtggcctggtccaacaagtccgatttcgcctgcgccaacgccttcaacaacagcattatccccgaggacacattcttcccaagccccgagagcagctgcggctttaccagcgagagctaccagcagggcgtgctgagcgccaccatcctgtacgagatcctgctgggcaaggccaccctgtacgccgtgctggtgtctgccctggtgctgatggctatggtcaagcggaaggacagccggggataa

SEQ ID NO: 35315 - DNA, 1866 bp, synthetic construct
  source 1..1866: mol_type = other DNA
atggccttaccagtgaccgccttgctcctgccgctggccttgctgctccacgccgccaggccggacatccagatgacacagagccctagcagcctgtctgccagcgtgggagacagagtgaccatcacctgtagagccagccaggacgtgcggaacatcgtcgtgtggttccagcagaagcctggcaaggcccctaagctgctgatctacagcggcagctacagatacagcggcgtgcccagcagattttccggctctggctctggcaccgacttcaccctgacaatatccagcctccagcctgaggacttcgccacctactactgccagcagcactacagccctccatacacattcggccagggcaccaaggtggaaatcaagagactcgaggacctgaagaacgtgttcccacctgaggtggccgtgttcgagcctagcgaggccgagatcagccacacccagaaagccaccctcgtgtgcctggctaccggcttctaccccgaccatgtggaactgtcttggtgggtcaacggcaaagaggtgcacagcggcgtgtgtaccgacccccagccactgaaagaacagcccgccctgaacgacagccggtactgcctgagcagcagactgagagtgtccgccaccttctggcagaacccccggaaccacttcagatgccaggtgcagttctacggcctgagcgagaacgacgagtggacccaggacagagccaagcccgtgacccagatcgtgtctgccgaagcctggggcagagccgattgcggctttaccagcgagagctaccagcagggcgtgctgagcgccaccaacctgagcgtgatcggcttcagaatcctgctgctgaaagtggccggctttaacctgctgatgaccctgcggctgtggtccagcagggccaagcgatctggatctggagcaacaaacttctcactactcaaacaagcaggtgacgtggaggagaatcccgggcctactagtatggactggatttggcgcatccttttccttgtcggcgctgctaccggcgcgcattccttcgaagaagttcagctggtggaatctggccctggcctggtcaagcctagcgagacactgagcctgacctgtaccgtgtccggcttcagcctgaccagatttggcgtgcactgggtccgacagccacctggcaaaggactggaatggctgggagtgatttggagaggcggcagcaccgattacaacgccgccttcatgagccggctgaccatcagcaaggacaacagcaagaaccaggtgtccctgaagctgagcagcgtgacagccgctgataccgccgtgtactactgctccaaccactactacggcagctccgactacgccctggataattggggccagggaaccctggtcaccgtgtcatctacgcgtatccagaaccctgatcctgccgtgtaccagctgcgggatagcaagagcagcgacaagagcgtgtgtctgttcaccgacttcgacagccagaccaacgtgtcccagagcaaggactccgacgtgtacatcaccgataagtgcgtgctggacatgcggagcatggacttcaagagcaactccgccgtggcctggtccaacaagtccgatttcgcctgcgccaacgccttcaacaacagcattatccccgaggacacattcttcccaagccccgagagcagctgcgacgtgaagctggtggaaaagagcttcgagacagacaccaacctgaacttccagatcctgtacgagatcctgctgggcaaggccaccctgtacgccgtgctggtgtctgccctggtgctgatggctatggtcaagcggaaggacagccggggataa

SEQ ID NO: 35316 - DNA, 1866 bp, synthetic construct; identical to SEQ ID NO: 35314
  source 1..1866: mol_type = other DNA

SEQ ID NO: 35317 - DNA, 1866 bp, synthetic construct; identical to SEQ ID NO: 35315
  source 1..1866: mol_type = other DNA

SEQ ID NO: 35318 - DNA, 1863 bp, synthetic construct
  source 1..1863: mol_type = other DNA
atggccttaccagtgaccgccttgctcctgccgctggccttgctgctccacgccgccaggccggacatccagatgacacagagccctagcagcctgtctgccagcgtgggagacagagtgaccatcacctgtagagccagccaggacgtgcggaacatcgtcgtgtggttccagcagaagcctggcaaggcccctaagctgctgatctacagcggcagctacagatacagcggcgtgcccagcagattttccggctctggctctggcaccgacttcaccctgacaatatccagcctccagcctgaggacttcgccacctactactgccagcagcactacagccctccatacacattcggccagggcaccaaggtggaaatcaagagactcgaggacctgaagaacgtgttcccacctgaggtggccgtgttcgagcctagcgaggccgagatcagccacacccagaaagccaccctcgtgtgcctggctaccggcttctaccccgaccatgtggaactgtcttggtgggtcaacggcaaagaggtgcacagcggcgtgtgtaccgacccccagccactgaaagaacagcccgccctgaacgacagccggtactgcctgagcagcagactgagagtgtccgccaccttctggcagaacccccggaaccacttcagatgccaggtgcagttctacggcctgagcgagaacgacgagtggacccaggacagagccaagcccgtgacccagatcgtgtctgccgaagcctggggcagagccgattgcgacgtgaagctggtggaaaagagcttcgagacagacaccaacctgaacttccagaacctgagcgtgatcggcttcagaatcctgctgctgaaagtggccggctttaacctgctgatgaccctgcggctgtggtccagcagggccaagcgatctggatctggagcaacaaacttctcactactcaaacaagcaggtgacgtggaggagaatcccgggcctactagtatggactggatttggcgcatccttttccttgtcggcgctgctaccggcgcgcattccttcgaagaagttcagctggtggaatctggccctggcctggtcaagcctagcgagacactgagcctgacctgtaccgtgtccggcttcagcctgaccagatttggcgtgcactgggtccgacagccacctggcaaaggactggaatggctgggagtgatttggagaggcggcagcaccgattacaacgccgccttcatgagccggctgaccatcagcaaggacaacagcaagaaccaggtgtccctgaagctgagcagcgtgacagccgctgataccgccgtgtactactgctccaaccactactacggcagctccgactacgccctggataattggggccagggaaccctggtcaccgtgtcatctacgcgtatccagaaccctgatcctgccgtgtaccagctgcgggatagcaagagcagcgacaagagcgtgtgtctgttcaccgacttcgacagccagaccaacgtgtcccagagcaaggactccgacgtgtacatcaccgataagtgcgtgctggacatgcggagcatggacttcaagagcaactccgccgtggcctggtccaacaagtccgatttcgcctgcgccaacgccttcaacaacagcattatccccgaggacacattcttcccaagccccgagagcagctgcggctttaccagcgagagctaccagcagggcgtgctgagcgccaccatcctgtacgagatcctgctgggcaaggccaccctgtacgccgtgctggtgtctgccctggtgctgatggctatggtcaagcggaaggacagccgggga

SEQ ID NO: 35319 - DNA, 1875 bp, synthetic construct
  source 1..1875: mol_type = other DNA
atggccttaccagtgaccgccttgctcctgccgctggccttgctgctccacgccgccaggccggacatccagatgacacagagccctagcagcctgtctgccagcgtgggagacagagtgaccatcacctgtagagccagccaggacgtgcggaacatcgtcgtgtggttccagcagaagcctggcaaggcccctaagctgctgatctacagcggcagctacagatacagcggcgtgcccagcagattttccggctctggctctggcaccgacttcaccctgacaatatccagcctccagcctgaggacttcgccacctactactgccagcagcactacagccctccatacacattcggccagggcaccaaggtggaaatcaagagactcgaggccgacgtgtcccccaagcctaccatcttcctgccctctatcgccgagacaaagctccagaaggccggcacctacctgtgcctgctggaaaagttcttcccagatgtgattaagatccactggcaggaaaagaagtccaacaccatcctgggcagccaggaaggcaacaccatgaagaccaacgacacctacatgaagttcagctggctgaccgtgcccgagaagtccctggacaaagaacacagatgcatcgtgcggcacgaaaacaacaagaacggcgtggaccaggaaatcatcttcccacccatcaagaccgatgtgattacaatggaccccaaggacaactgctccaaggacgccaacgataccctgctgctccagctgaccaacaccagcgcctactacatgtacttgttgctgctgctgaagtccgtggtgtacttcgccatcatcacatgctgcctgctgcggagaaccgccttctgctgcaacggcgagaagtctagggccaagcgatctggatctggagcaacaaacttctcactactcaaacaagcaggtgacgtggaggagaatcccgggcctactagtatggactggatttggcgcatccttttccttgtcggcgctgctaccggcgcgcattccttcgaagaagttcagctggtggaatctggccctggcctggtcaagcctagcgagacactgagcctgacctgtaccgtgtccggcttcagcctgaccagatttggcgtgcactgggtccgacagccacctggcaaaggactggaatggctgggagtgatttggagaggcggcagcaccgattacaacgccgccttcatgagccggctgaccatcagcaaggacaacagcaagaaccaggtgtccctgaagctgagcagcgtgacagccgctgataccgccgtgtactactgctccaaccactactacggcagctccgactacgccctggataattggggccagggaaccctggtcaccgtgtcatctacgcgtagccagcctcacaccaagcccagcgtgttcgtgatgaagaacggcaccaacgtggcctgcctcgtgaaagagttctaccccaaggacatcaggatcaacctggtgtccagcaagaagatcaccgagttcgaccccgccatcgtgatctcccccagcggcaagtacaacgccgtgaagctggggaagtatgaggacagcaacagcgtgacctgctccgtgcagcacgacaacaagaccgtgcacagcaccgactttgaagtgaaaaccgactccaccgaccacgtgaagcccaaagagacagagaacaccaagcagcccagcaagagctgccacaagcccaaggccatcgtgcacaccgagaaagtgaacatgatgagcctgaccgtgatcggcttcagaatcctgctgctgaaagtggccggctttaacctgctgatgaccctgcggctgtggtccagctaa

SEQ ID NO: 35320 - DNA, 1875 bp, synthetic construct
  source 1..1875: mol_type = other DNA
atggccttaccagtgaccgccttgctcctgccgctggccttgctgctccacgccgccaggccggacatccagatgacacagagccctagcagcctgtctgccagcgtgggagacagagtgaccatcacctgtagagccagccaggacgtgcggaacatcgtcgtgtggttccagcagaagcctggcaaggcccctaagctgctgatctacagcggcagctacagatacagcggcgtgcccagcagattttccggctctggctctggcaccgacttcaccctgacaatatccagcctccagcctgaggacttcgccacctactactgccagcagcactacagccctccatacacattcggccagggcaccaaggtggaaatcaagagactcgaggccgacgtgtcccccaagcctaccatcttcctgccctctatcgccgagacaaagctccagaaggccggcacctacctgtgcctgctggaaaagttcttcccagatgtgattaagatccactggcaggaaaagaagtccaacaccatcctgggcagccaggaaggcaacaccatgaagaccaacgacacctacatgaagttcagctggctgaccgtgcccgagaagtccctggacaaagaacacagatgcatcgtgcggcacgaaaacaacaagaacggcgtggaccaggaaatcatcttcccacccatcaagaccgatgtgattacaatggaccccaaggacaactgctccaaggacgccaacgataccctgctgctccagctgaccaacaccagcgcctactacatgtacttgttgctgctgctgaagtccgtggtgtacttcgccatcatcacatgctgcctgctgcggagaaccgccttctgctgcaacggcgagaagtctagggccaagcgatctggatctggagcaacaaacttctcactactcaaacaagcaggtgacgtggaggagaatcccgggcctactagtatggactggatttggcgcatccttttccttgtcggcgctgctaccggcgcgcattccttcgaagaagttcagctggtggaatctggccctggcctggtcaagcctagcgagacactgagcctgacctgtaccgtgtccggcttcagcctgaccagatttggcgtgcactgggtccgacagccacctggcaaaggactggaatggctgggagtgatttggagaggcggcagcaccgattacaacgccgccttcatgagccggctgaccatcagcaaggacaacagcaagaaccaggtgtccctgaagctgagcagcgtgacagccgctgataccgccgtgtactactgctccaaccactactacggcagctccgactacgccctggataattggggccagggaaccctggtcaccgtgtcatctacgcgtagccagcctcacaccaagcccagcgtgttcgtgatgaagaacggcaccaacgtggcctgcctcgtgaaagagttctaccccaaggacatcaggatcaacctggtgtccagcaagaagatcaccgagttcgaccccgccatcgtgatctcccccagcggcaagtacaacgccgtgaagctggggaagtacgaggacagcaacagcgtgacctgctccgtgcagcacgacaacaagaccgtgcacagcaccgactttgaagtgaaaaccgactccaccgaccacgtgaagcccaaagagacagagaacaccaagcagcccagcaagagctgccacaagcccaaggccatcgtgcacaccgagaaagtgaacatgatgagcctgaccgtgctgggcttcagaatcctgctgctgaaagtggccggctttaacctgctgatgaccctgcggctgtggtccagctaa

SEQ ID NO: 35321 - DNA, 1863 bp, synthetic construct; identical to SEQ ID NO: 35318
  source 1..1863: mol_type = other DNA

SEQ ID NO: 35322 - DNA, 1875 bp, synthetic construct
  source 1..1875: mol_type = other DNA
atggccttaccagtgaccgccttgctcctgccgctggccttgctgctccacgccgccaggccggacatccagatgacacagagccctagcagcctgtctgccagcgtgggagacagagtgaccatcacctgtagagccagccaggacgtgcggaacatcgtcgtgtggttccagcagaagcctggcaaggcccctaagctgctgatctacagcggcagctacagatacagcggcgtgcccagcagattttccggctctggctctggcaccgacttcaccctgacaatatccagcctccagcctgaggacttcgccacctactactgccagcagcactacagccctccatacacattcggccagggcaccaaggtggaaatcaagagactcgagatccagaaccctgatcctgccgtgtaccagctgcgggatagcaagagcagcgacaagagcgtgtgtctgttcaccgacttcgacagccagaccaacgtgtcccagagcaaggactccgacgtgtacatcaccgataagtgcgtgctggacatgcggagcatggacttcaagagcaactccgccgtggcctggtccaacaagtccgatttcgcctgcgccaacgccttcaacaacagcattatccccgaggacacattcttcccaagccccgagagcagctgcggctttaccagcgagagctaccagcagggcgtgctgagcgccaccatcctgtacgagatcctgctgggcaaggccaccctgtacgccgtgctggtgtctgccctggtgctgatggctatggtcaagcggaaggacagccggggacgcgccaagagaagcggatctggcgtgaagcagaccctgaatttcgacctgctgaagctggctggcgacgtggaatccaacccaggccctactagtatggactggatttggcgcatccttttccttgtcggcgctgctaccggcgcgcattccttcgaagaagttcagctggtggaatctggccctggcctggtcaagcctagcgagacactgagcctgacctgtaccgtgtccggcttcagcctgaccagatttggcgtgcactgggtccgacagccacctggcaaaggactggaatggctgggagtgatttggagaggcggcagcaccgattacaacgccgccttcatgagccggctgaccatcagcaaggacaacagcaagaaccaggtgtccctgaagctgagcagcgtgacagccgctgataccgccgtgtactactgctccaaccactactacggcagctccgactacgccctggataattggggccagggaaccctggtcaccgtgtcatctacgcgtgaggacctgaagaacgtgttcccacctgaggtggccgtgttcgagcctagcgaggccgagatcagccacacccagaaagccaccctcgtgtgcctggctaccggcttctaccccgaccatgtggaactgtcttggtgggtcaacggcaaagaggtgcacagcggcgtgtgtaccgacccccagccactgaaagaacagcccgccctgaacgacagccggtactgcctgagcagcagactgagagtgtccgccaccttctggcagaacccccggaaccacttcagatgccaggtgcagttctacggcctgagcgagaacgacgagtggacccaggacagagccaagcccgtgacccagatcgtgtctgccgaagcctggggcagagccgattgcgacgtgaagctggtggaaaagagcttcgagacagacaccaacctgaacttccagaacctgagcgtgatcggcttcagaatcctgctgctgaaagtggccggctttaacctgctgatgaccctgcggctgtggtccagc

SEQ ID NO: 35323 - DNA, 2268 bp, synthetic construct
  source 1..2268: mol_type = other DNA
atggccttaccagtgaccgccttgctcctgccgctggccttgctgctccacgccgccaggccggaagtgcagctggttgaatctggcggaggactggttcagcctggcggatctctgagactgtcttgtgccgccagcggcttcagcttcagcgacttttggatgagctgggtccgacaggcccctggcaaaggacttgaatgggtcgccacaatcagccaggccggcagcgagaaggactacgtggactctgtgaagggcagattcaccatcagccgggacaacgccaagaagtccctgtacctccagatgaacagcctgagagccgaggacaccgccgtgtactattgtgcctctggcgtgtacagcttcgactacagaggccagggcaccctggtcacagtctcttctggtaccggcggaggcggatctggcggcggaggtagcggtggcggaggatctgaattcgacatccagatgacacagagccctagcagcctgtctgccagcgtgggagacagagtgaccatcacctgtagagccagccaggacgtgcggaacatcgtcgtgtggttccagcagaagcctggcaaggcccctaagctgctgatctacagcggcagctacagatacagcggcgtgcccagcagattttccggctctggctctggcaccgacttcaccctgacaatatccagcctccagcctgaggacttcgccacctactactgccagcagcactacagccctccatacacattcggccagggcaccaaggtggaaatcaagagactcgaggacctgaagaacgtgttcccacctgaggtggccgtgttcgagcctagcgaggccgagatcagccacacccagaaagccaccctcgtgtgcctggctaccggcttctaccccgaccatgtggaactgtcttggtgggtcaacggcaaagaggtgcacagcggcgtgtgtaccgacccccagccactgaaagaacagcccgccctgaacgacagccggtactgcctgagcagcagactgagagtgtccgccaccttctggcagaacccccggaaccacttcagatgccaggtgcagttctacggcctgagcgagaacgacgagtggacccaggacagagccaagcccgtgacccagatcgtgtctgccgaagcctggggcagagccgattgcgacgtgaagctggtggaaaagagcttcgagacagacaccaacctgaacttccagaacctgagcgtgatcggcttcagaatcctgctgctgaaagtggccggctttaacctgctgatgaccctgcggctgtggtccagcagggccaagcgatctggatctggagcaacaaacttctcactactcaaacaagcaggtgacgtggaggagaatcccgggcctactagtatggactggatttggcgcatccttttccttgtcggcgctgctaccggcgcgcattccttcgaagaagttcagctggtggaatctggccctggcctggtcaagcctagcgagacactgagcctgacctgtaccgtgtccggcttcagcctgaccagatttggcgtgcactgggtccgacagccacctggcaaaggactggaatggctgggagtgatttggagaggcggcagcaccgattacaacgccgccttcatgagccggctgaccatcagcaaggacaacagcaagaaccaggtgtccctgaagctgagcagcgtgacagccgctgataccgccgtgtactactgctccaaccactactacggcagctccgactacgccctggataattggggccagggaaccctggtcaccgtgtcatctacgcgtatccagaaccctgatcctgccgtgtaccagctgcgggatagcaagagcagcgacaagagcgtgtgtctgttcaccgacttcgacagccagaccaacgtgtcccagagcaaggactccgacgtgtacatcaccgataagtgcgtgctggacatgcggagcatggacttcaagagcaactccgccgtggcctggtccaacaagtccgatttcgcctgcgccaacgccttcaacaacagcattatccccgaggacacattcttcccaagccccgagagcagctgcggctttaccagcgagagctaccagcagggcgtgctgagcgccaccatcctgtacgagatcctgctgggcaaggccaccctgtacgccgtgctggtgtctgccctggtgctgatggctatggtcaagcggaaggacagccgggga

SEQ ID NO: 35324 - DNA, 2280 bp, synthetic construct
  source 1..2280: mol_type = other DNA
atggccttaccagtgaccgccttgctcctgccgctggccttgctgctccacgccgccaggccggaagtgcagctggttgaatctggcggaggactggttcagcctggcggatctctgagactgtcttgtgccgccagcggcttcagcttcagcgacttttggatgagctgggtccgacaggcccctggcaaaggacttgaatgggtcgccacaatcagccaggccggcagcgagaaggactacgtggactctgtgaagggcagattcaccatcagccgggacaacgccaagaagtccctgtacctccagatgaacagcctgagagccgaggacaccgccgtgtactattgtgcctctggcgtgtacagcttcgactacagaggccagggcaccctggtcacagtctcttctggtaccggcggaggcggatctggcggcggaggtagcggtggcggaggatctgaattcgacatccagatgacacagagccctagcagcctgtctgccagcgtgggagacagagtgaccatcacctgtagagccagccaggacgtgcggaacatcgtcgtgtggttccagcagaagcctggcaaggcccctaagctgctgatctacagcggcagctacagatacagcggcgtgcccagcagattttccggctctggctctggcaccgacttcaccctgacaatatccagcctccagcctgaggacttcgccacctactactgccagcagcactacagccctccatacacattcggccagggcaccaaggtggaaatcaagagactcgagatccagaaccctgatcctgccgtgtaccagctgcgggatagcaagagcagcgacaagagcgtgtgtctgttcaccgacttcgacagccagaccaacgtgtcccagagcaaggactccgacgtgtacatcaccgataagtgcgtgctggacatgcggagcatggacttcaagagcaactccgccgtggcctggtccaacaagtccgatttcgcctgcgccaacgccttcaacaacagcattatccccgaggacacattcttcccaagccccgagagcagctgcggctttaccagcgagagctaccagcagggcgtgctgagcgccaccatcctgtacgagatcctgctgggcaaggccaccctgtacgccgtgctggtgtctgccctggtgctgatggctatggtcaagcggaaggacagccggggacgcgccaagagaagcggatctggcgtgaagcagaccctgaatttcgacctgctgaagctggctggcgacgtggaatccaacccaggccctactagtatggactggatttggcgcatccttttccttgtcggcgctgctaccggcgcgcattccttcgaagaagttcagctggtggaatctggccctggcctggtcaagcctagcgagacactgagcctgacctgtaccgtgtccggcttcagcctgaccagatttggcgtgcactgggtccgacagccacctggcaaaggactggaatggctgggagtgatttggagaggcggcagcaccgattacaacgccgccttcatgagccggctgaccatcagcaaggacaacagcaagaaccaggtgtccctgaagctgagcagcgtgacagccgctgataccgccgtgtactactgctccaaccactactacggcagctccgactacgccctggataattggggccagggaaccctggtcaccgtgtcatctacgcgtgaggacctgaagaacgtgttcccacctgaggtggccgtgttcgagcctagcgaggccgagatcagccacacccagaaagccaccctcgtgtgcctggctaccggcttctaccccgaccatgtggaactgtcttggtgggtcaacggcaaagaggtgcacagcggcgtgtgtaccgacccccagccactgaaagaacagcccgccctgaacgacagccggtactgcctgagcagcagactgagagtgtccgccaccttctggcagaacccccggaaccacttcagatgccaggtgcagttctacggcctgagcgagaacgacgagtggacccaggacagagccaagcccgtgacccagatcgtgtctgccgaagcctggggcagagccgattgcgacgtgaagctggtggaaaagagcttcgagacagacaccaacctgaacttccagaacctgagcgtgatcggcttcagaatcctgctgctgaaagtggccggctttaacctgctgatgaccctgcggctgtggtccagc

SEQ ID NO: 35325 - DNA, 2679 bp, synthetic construct
  source 1..2679: mol_type = other DNA
atggccttaccagtgaccgccttgctcctgccgctggccttgctgctccacgccgccaggccggaagtgcagctggttgaatctggcggaggactggttcagcctggcggatctctgagactgtcttgtgccgccagcggcttcagcttcagcgacttttggatgagctgggtccgacaggcccctggcaaaggacttgaatgggtcgccacaatcagccaggccggcagcgagaaggactacgtggactctgtgaagggcagattcaccatcagccgggacaacgccaagaagtccctgtacctccagatgaacagcctgagagccgaggacaccgccgtgtactattgtgcctctggcgtgtacagcttcgactacagaggccagggcaccctggtcacagtctcttctggtaccggcggaggcggatctggcggcggaggtagcggtggcggaggatctgaattcgacatccagatgacacagagccctagcagcctgtctgccagcgtgggagacagagtgaccatcacctgtagagccagccaggacgtgcggaacatcgtcgtgtggttccagcagaagcctggcaaggcccctaagctgctgatctacagcggcagctacagatacagcggcgtgcccagcagattttccggctctggctctggcaccgacttcaccctgacaatatccagcctccagcctgaggacttcgccacctactactgccagcagcactacagccctccatacacattcggccagggcaccaaggtggaaatcaagagactcgaggacctgaagaacgtgttcccacctgaggtggccgtgttcgagcctagcgaggccgagatcagccacacccagaaagccaccctcgtgtgcctggctaccggcttctaccccgaccatgtggaactgtcttggtgggtcaacggcaaagaggtgcacagcggcgtgtgtaccgacccccagccactgaaagaacagcccgccctgaacgacagccggtactgcctgagcagcagactgagagtgtccgccaccttctggcagaacccccggaaccacttcagatgccaggtgcagttctacggcctgagcgagaacgacgagtggacccaggacagagccaagcccgtgacccagatcgtgtctgccgaagcctggggcagagccgattgcgacgtgaagctggtggaaaagagcttcgagacagacaccaacctgaacttccagaacctgagcgtgatcggcttcagaatcctgctgctgaaagtggccggctttaacctgctgatgaccctgcggctgtggtccagcagggccaagcgatctggatctggagcaacaaacttctcactactcaaacaagcaggtgacgtggaggagaatcccgggcctactagtatggactggatttggcgcatccttttccttgtcggcgctgctaccggcgcgcattccgggccccagctccagctgcaagagtctggacctggcctggtcaagcctagcgagacactgagcctgacctgtaccgtgtccggcgatagcatcagcagcggcgattactactggggctggatcagacagcctcctggcaaaggactggaatggatcggccacatctactacagcggcgtgacctactacaaccccagcctgaagtccagagtgaccatcagcgtggacaccagccggaaccagttctccctgaagctgtctagcgtgacagccgccgataccgccgtgtactactgcaccagagaggacagcagcaactggcggagtagaggccagggaacactggtcacagttagctctggatccggcggaggcggaagtggaggcggaggatctggcggcggaggctctttcgaagaagttcagctggtggaatctggccctggcctggtcaagcctagcgagacactgagcctgacctgtaccgtgtccggcttcagcctgaccagatttggcgtgcactgggtccgacagccacctggcaaaggactggaatggctgggagtgatttggagaggcggcagcaccgattacaacgccgccttcatgagccggctgaccatcagcaaggacaacagcaagaaccaggtgtccctgaagctgagcagcgtgacagccgctgataccgccgtgtactactgctccaaccactactacggcagctccgactacgccctggataattggggccagggaaccctggtcaccgtgtcatctacgcgtatccagaaccctgatcctgccgtgtaccagctgcgggatagcaagagcagcgacaagagcgtgtgtctgttcaccgacttcgacagccagaccaacgtgtcccagagcaaggactccgacgtgtacatcaccgataagtgcgtgctggacatgcggagcatggacttcaagagcaactccgccgtggcctggtccaacaagtccgatttcgcctgcgccaacgccttcaacaacagcattatccccgaggacacattcttcccaagccccgagagcagctgcggctttaccagcgagagctaccagcagggcgtgctgagcgccaccatcctgtacgagatcctgctgggcaaggccaccctgtacgccgtgctggtgtctgccctggtgctgatggctatggtcaagcggaaggacagccgggga

SEQ ID NO: 35326 - DNA, 2691 bp, synthetic construct
  source 1..2691: mol_type = other DNA
atggccttaccagtgaccgccttgctcctgccgctggccttgctgctccacgccgccaggccggaagtgcagctggttgaatctggcggaggactggttcagcctggcggatctctgagactgtcttgtgccgccagcggcttcagcttcagcgacttttggatgagctgggtccgacaggcccctggcaaaggacttgaatgggtcgccacaatcagccaggccggcagcgagaaggactacgtggactctgtgaagggcagattcaccatcagccgggacaacgccaagaagtccctgtacctccagatgaacagcctgagagccgaggacaccgccgtgtactattgtgcctctggcgtgtacagcttcgactacagaggccagggcaccctggtcacagtctcttctggtaccggcggaggcggatctggcggcggaggtagcggtggcggaggatctgaattcgacatccagatgacacagagccctagcagcctgtctgccagcgtgggagacagagtgaccatcacctgtagagccagccaggacgtgcggaacatcgtcgtgtggttccagcagaagcctggcaaggcccctaagctgctgatctacagcggcagctacagatacagcggcgtgcccagcagattttccggctctggctctggcaccgacttcaccctgacaatatccagcctccagcctgaggacttcgccacctactactgccagcagcactacagccctccatacacattcggccagggcaccaaggtggaaatcaagagactcgagatccagaaccctgatcctgccgtgtaccagctgcgggatagcaagagcagcgacaagagcgtgtgtctgttcaccgacttcgacagccagaccaacgtgtcccagagcaaggactccgacgtgtacatcaccgataagtgcgtgctggacatgcggagcatggacttcaagagcaactccgccgtggcctggtccaacaagtccgatttcgcctgcgccaacgccttcaacaacagcattatccccgaggacacattcttcccaagccccgagagcagctgcggctttaccagcgagagctaccagcagggcgtgctgagcgccaccatcctgtacgagatcctgctgggcaaggccaccctgtacgccgtgctggtgtctgccctggtgctgatggctatggtcaagcggaaggacagccggggacgcgccaagagaagcggatctggcgtgaagcagaccctgaatttcgacctgctgaagctggctggcgacgtggaatccaacccaggccctactagtatggactggatttggcgcatccttttccttgtcggcgctgctaccggcgcgcattccgggccccagctccagctgcaagagtctggacctggcctggtcaagcctagcgagacactgagcctgacctgtaccgtgtccggcgatagcatcagcagcggcgattactactggggctggatcagacagcctcctggcaaaggactggaatggatcggccacatctactacagcggcgtgacctactacaaccccagcctgaagtccagagtgaccatcagcgtggacaccagccggaaccagttctccctgaagctgtctagcgtgacagccgccgataccgccgtgtactactgcaccagagaggacagcagcaactggcggagtagaggccagggaacactggtcacagttagctctggatccggcggaggcggaagtggaggcggaggatctggcggcggaggctctttcgaagaagttcagctggtggaatctggccctggcctggtcaagcctagcgagacactgagcctgacctgtaccgtgtccggcttcagcctgaccagatttggcgtgcactgggtccgacagccacctggcaaaggactggaatggctgggagtgatttggagaggcggcagcaccgattacaacgccgccttcatgagccggctgaccatcagcaaggacaacagcaagaaccaggtgtccctgaagctgagcagcgtgacagccgctgataccgccgtgtactactgctccaaccactactacggcagctccgactacgccctggataattggggccagggaaccctggtcaccgtgtcatctacgcgtgaggacctgaagaacgtgttcccacctgaggtggccgtgttcgagcctagcgaggccgagatcagccacacccagaaagccaccctcgtgtgcctggctaccggcttctaccccgaccatgtggaactgtcttggtgggtcaacggcaaagaggtgcacagcggcgtgtgtaccgacccccagccactgaaagaacagcccgccctgaacgacagccggtactgcctgagcagcagactgagagtgtccgccaccttctggcagaacccccggaaccacttcagatgccaggtgcagttctacggcctgagcgagaacgacgagtggacccaggacagagccaagcccgtgacccagatcgtgtctgccgaagcctggggcagagccgattgcgacgtgaagctggtggaaaagagcttcgagacagacaccaacctgaacttccagaacctgagcgtgatcggcttcagaatcctgctgctgaaagtggccggctttaacctgctgatgaccctgcggctgtggtccagc

SEQ ID NO: 35327 - DNA, 2073 bp, synthetic construct
  source 1..2073: mol_type = other DNA
atggccttaccagtgaccgccttgctcctgccgctggccttgctgctccacgccgccaggccggacatccagatgacacagagccctagcagcctgtctgccagcgtgggagacagagtgaccatcacctgtagagccagccaggacgtgcggaacatcgtcgtgtggttccagcagaagcctggcaaggcccctaagctgctgatctacagcggcagctacagatacagcggcgtgcccagcagattttccggctctggctctggcaccgacttcaccctgacaatatccagcctccagcctgaggacttcgccacctactactgccagcagcactacagccctccatacacattcggccagggcaccaaggtggaaatcaagagactcgaggacctgaagaacgtgttcccacctgaggtggccgtgttcgagcctagcgaggccgagatcagccacacccagaaagccaccctcgtgtgcctggctaccggcttctaccccgaccatgtggaactgtcttggtgggtcaacggcaaagaggtgcacagcggcgtgtgtaccgacccccagccactgaaagaacagcccgccctgaacgacagccggtactgcctgagcagcagactgagagtgtccgccaccttctggcagaacccccggaaccacttcagatgccaggtgcagttctacggcctgagcgagaacgacgagtggacccaggacagagccaagcccgtgacccagatcgtgtctgccgaagcctggggcagagccgattgcgacgtgaagctggtggaaaagagcttcgagacagacaccaacctgaacttccagaacctgagcgtgatcggcttcagaatcctgctgctgaaagtggccggctttaacctgctgatgaccctgcggctgtggtccagcagggccaagcgatctggatctggagcaacaaacttctcactactcaaacaagcaggtgacgtggaggagaatcccgggcctactagtatggactggatttggcgcatccttttccttgtcggcgctgctaccggcgcccattccgggcccatggaccccgacctggaaatcagagccgccttcctgcggcagagaaacacagccctgagaacagaggtggccgagctggaacaagaggtgcagcggctggaaaacgaggtgtcccagtacgagacaagatacggccctctcggaggcggaaaaggatccggcggcggaggatctggcggaggcggatctgggggcggaggctctttcgaagaagttcagctggtggaatctggccctggcctggtcaagcctagcgagacactgagcctgacctgtaccgtgtccggcttcagcctgaccagatttggcgtgcactgggtccgacagccacctggcaaaggactggaatggctgggagtgatttggagaggcggcagcaccgattacaacgccgccttcatgagccggctgaccatcagcaaggacaacagcaagaaccaggtgtccctgaagctgagcagcgtgacagccgctgataccgccgtgtactactgctccaaccactactacggcagctccgactacgccctggataattggggccagggaaccctggtcaccgtgtcatctacgcgtatccagaaccctgatcctgccgtgtaccagctgcgggatagcaagagcagcgacaagagcgtgtgtctgttcaccgacttcgacagccagaccaacgtgtcccagagcaaggactccgacgtgtacatcaccgataagtgcgtgctggacatgcggagcatggacttcaagagcaactccgccgtggcctggtccaacaagtccgatttcgcctgcgccaacgccttcaacaacagcattatccccgaggacacattcttcccaagccccgagagcagctgcggctttaccagcgagagctaccagcagggcgtgctgagcgccaccatcctgtacgagatcctgctgggcaaggccaccctgtacgccgtgctggtgtctgccctggtgctgatggctatggtcaagcggaaggacagccgggga

SEQ ID NO: 35328 - DNA, 2085 bp, synthetic construct
  source 1..2085: mol_type = other DNA
atggccttaccagtgaccgccttgctcctgccgctggccttgctgctccacgccgccaggccggacatccagatgacacagagccctagcagcctgtctgccagcgtgggagacagagtgaccatcacctgtagagccagccaggacgtgcggaacatcgtcgtgtggttccagcagaagcctggcaaggcccctaagctgctgatctacagcggcagctacagatacagcggcgtgcccagcagattttccggctctggctctggcaccgacttcaccctgacaatatccagcctccagcctgaggacttcgccacctactactgccagcagcactacagccctccatacacattcggccagggcaccaaggtggaaatcaagagactcgagatccagaaccctgatcctgccgtgtaccagctgcgggatagcaagagcagcgacaagagcgtgtgtctgttcaccgacttcgacagccagaccaacgtgtcccagagcaaggactccgacgtgtacatcaccgataagtgcgtgctggacatgcggagcatggacttcaagagcaactccgccgtggcctggtccaacaagtccgatttcgcctgcgccaacgccttcaacaacagcattatccccgaggacacattcttcccaagccccgagagcagctgcggctttaccagcgagagctaccagcagggcgtgctgagcgccaccatcctgtacgagatcctgctgggcaaggccaccctgtacgccgtgctggtgtctgccctggtgctgatggctatggtcaagcggaaggacagccggggacgcgccaagagaagcggatctggcgtgaagcagaccctgaatttcgacctgctgaagctggctggcgacgtggaatccaacccaggccctactagtatggactggatttggcgcatccttttccttgtcggcgctgctaccggcgcccattccgggcccatggaccccgacctggaaatcagagccgccttcctgcggcagagaaacacagccctgagaacagaggtggccgagctggaacaagaggtgcagcggctggaaaacgaggtgtcccagtacgagacaagatacggccctctcggaggcggaaaaggatccggcggcggaggatctggcggaggcggatctgggggcggaggctctttcgaagaagttcagctggtggaatctggccctggcctggtcaagcctagcgagacactgagcctgacctgtaccgtgtccggcttcagcctgaccagatttggcgtgcactgggtccgacagccacctggcaaaggactggaatggctgggagtgatttggagaggcggcagcaccgattacaacgccgccttcatgagccggctgaccatcagcaaggacaacagcaagaaccaggtgtccctgaagctgagcagcgtgacagccgctgataccgccgtgtactactgctccaaccactactacggcagctccgactacgccctggataattggggccagggaaccctggtcaccgtgtcatctacgcgtgaggacctgaagaacgtgttcccacctgaggtggccgtgttcgagcctagcgaggccgagatcagccacacccagaaagccaccctcgtgtgcctggctaccggcttctaccccgaccatgtggaactgtcttggtgggtcaacggcaaagaggtgcacagcggcgtgtgtaccgacccccagccactgaaagaacagcccgccctgaacgacagccggtactgcctgagcagcagactgagagtgtccgccaccttctggcagaacccccggaaccacttcagatgccaggtgcagttctacggcctgagcgagaacgacgagtggacccaggacagagccaagcccgtgacccagatcgtgtctgccgaagcctggggcagagccgattgcgacgtgaagctggtggaaaagagcttcgagacagacaccaacctgaacttccagaacctgagcgtgatcggcttcagaatcctgctgctgaaagtggccggctttaacctgctgatgaccctgcggctgtggtccagc

SEQ ID NO: 35329 - DNA, 2004 bp, synthetic construct
  source 1..2004: mol_type = other DNA
atggccttaccagtgaccgccttgctcctgccgctggccttgctgctccacgccgccaggccggacatccagatgacacagagccctagcagcctgtctgccagcgtgggagacagagtgaccatcacctgtagagccagccaggacgtgcggaacatcgtcgtgtggttccagcagaagcctggcaaggcccctaagctgctgatctacagcggcagctacagatacagcggcgtgcccagcagattttccggctctggctctggcaccgacttcaccctgacaatatccagcctccagcctgaggacttcgccacctactactgccagcagcactacagccctccatacacattcggccagggcaccaaggtggaaatcaagagactcgaggacctgaagaacgtgttcccacctgaggtggccgtgttcgagcctagcgaggccgagatcagccacacccagaaagccaccctcgtgtgcctggctaccggcttctaccccgaccatgtggaactgtcttggtgggtcaacggcaaagaggtgcacagcggcgtgtgtaccgacccccagccactgaaagaacagcccgccctgaacgacagccggtactgcctgagcagcagactgagagtgtccgccaccttctggcagaacccccggaaccacttcagatgccaggtgcagttctacggcctgagcgagaacgacgagtggacccaggacagagccaagcccgtgacccagatcgtgtctgccgaagcctggggcagagccgattgcgacgtgaagctggtggaaaagagcttcgagacagacaccaacctgaacttccagaacctgagcgtgatcggcttcagaatcctgctgctgaaagtggccggctttaacctgctgatgaccctgcggctgtggtccagcagggccaagcgatctggatctggagcaacaaacttctcactactcaaacaagcaggtgacgtggaggagaatcccgggcctactagtatggactggatttggcgcatccttttccttgtcggcgctgctaccggcgcccattccgggcccgaagttgctgccctcgagaaggaggtagcagctttggaaaaagaagtcgcagcccttgagaaagaagttgcggctctggagaagggatccggcggcggaggatctggcggaggcggatctgggggcggaggctctttcgaagaagttcagctggtggaatctggccctggcctggtcaagcctagcgagacactgagcctgacctgtaccgtgtccggcttcagcctgaccagatttggcgtgcactgggtccgacagccacctggcaaaggactggaatggctgggagtgatttggagaggcggcagcaccgattacaacgccgccttcatgagccggctgaccatcagcaaggacaacagcaagaaccaggtgtccctgaagctgagcagcgtgacagccgctgataccgccgtgtactactgctccaaccactactacggcagctccgactacgccctggataattggggccagggaaccctggtcaccgtgtcatctacgcgtatccagaaccctgatcctgccgtgtaccagctgcgggatagcaagagcagcgacaagagcgtgtgtctgttcaccgacttcgacagccagaccaacgtgtcccagagcaaggactccgacgtgtacatcaccgataagtgcgtgctggacatgcggagcatggacttcaagagcaactccgccgtggcctggtccaacaagtccgatttcgcctgcgccaacgccttcaacaacagcattatccccgaggacacattcttcccaagccccgagagcagctgcggctttaccagcgagagctaccagcagggcgtgctgagcgccaccatcctgtacgagatcctgctgggcaaggccaccctgtacgccgtgctggtgtctgccctggtgctgatggctatggtcaagcggaaggacagccgggga

SEQ ID NO: 35330 - DNA, 2016 bp, synthetic construct
  source 1..2016: mol_type = other DNA
atggccttaccagtgaccgccttgctcctgccgctggccttgctgctccacgccgccaggccggacatccagatgacacagagccctagcagcctgtctgccagcgtgggagacagagtgaccatcacctgtagagccagccaggacgtgcggaacatcgtcgtgtggttccagcagaagcctggcaaggcccctaagctgctgatctacagcggcagctacagatacagcggcgtgcccagcagattttccggctctggctctggcaccgacttcaccctgacaatatccagcctccagcctgaggacttcgccacctactactgccagcagcactacagccctccatacacattcggccagggcaccaaggtggaaatcaagagactcgagatccagaaccctgatcctgccgtgtaccagctgcgggatagcaagagcagcgacaagagcgtgtgtctgttcaccgacttcgacagccagaccaacgtgtcccagagcaaggactccgacgtgtacatcaccgataagtgcgtgctggacatgcggagcatggacttcaagagcaactccgccgtggcctggtccaacaagtccgatttcgcctgcgccaacgccttcaacaacagcattatccccgaggacacattcttcccaagccccgagagcagctgcggctttaccagcgagagctaccagcagggcgtgctgagcgccaccatcctgtacgagatcctgctgggcaaggccaccctgtacgccgtgctggtgtctgccctggtgctgatggctatggtcaagcggaaggacagccggggacgcgccaagagaagcggatctggcgtgaagcagaccctgaatttcgacctgctgaagctggctggcgacgtggaatccaacccaggccctactagtatggactggatttggcgcatccttttccttgtcggcgctgctaccggcgcccattccgggcccgaagttgctgccctcgagaaggaggtagcagctttggaaaaagaagtcgcagcccttgagaaagaagttgcggctctggagaagggatccggcggcggaggatctggcggaggcggatctgggggcggaggctctttcgaagaagttcagctggtggaatctggccctggcctggtcaagcctagcgagacactgagcctgacctgtaccgtgtccggcttcagcctgaccagatttggcgtgcactgggtccgacagccacctggcaaaggactggaatggctgggagtgatttggagaggcggcagcaccgattacaacgccgccttcatgagccggctgaccatcagcaaggacaacagcaagaaccaggtgtccctgaagctgagcagcgtgacagccgctgataccgccgtgtactactgctccaaccactactacggcagctccgactacgccctggataattggggccagggaaccctggtcaccgtgtcatctacgcgtgaggacctgaagaacgtgttcccacctgaggtggccgtgttcgagcctagcgaggccgagatcagccacacccagaaagccaccctcgtgtgcctggctaccggcttctaccccgaccatgtggaactgtcttggtgggtcaacggcaaagaggtgcacagcggcgtgtgtaccgacccccagccactgaaagaacagcccgccctgaacgacagccggtactgcctgagcagcagactgagagtgtccgccaccttctggcagaacccccggaaccacttcagatgccaggtgcagttctacggcctgagcgagaacgacgagtggacccaggacagagccaagcccgtgacccagatcgtgtctgccgaagcctggggcagagccgattgcgacgtgaagctggtggaaaagagcttcgagacagacaccaacctgaacttccagaacctgagcgtgatcggcttcagaatcctgctgctgaaagtggccggctttaacctgctgatgaccctgcggctgtggtccagc

SEQ ID NO: 35331 - DNA, 2274 bp, synthetic construct
  source 1..2274: mol_type = other DNA
atggccttaccagtgaccgccttgctcctgccgctggccttgctgctccacgccgccaggccggacatccagatgacacagagccctagcagcctgtctgccagcgtgggagacagagtgaccatcacctgtagagccagccaggacgtgcggaacatcgtcgtgtggttccagcagaagcctggcaaggcccctaagctgctgatctacagcggcagctacagatacagcggcgtgcccagcagattttccggctctggctctggcaccgacttcaccctgacaatatccagcctccagcctgaggacttcgccacctactactgccagcagcactacagccctccatacacattcggccagggcaccaaggtggaaatcaagagactcgaggacctgaagaacgtgttcccacctgaggtggccgtgttcgagcctagcgaggccgagatcagccacacccagaaagccaccctcgtgtgcctggctaccggcttctaccccgaccatgtggaactgtcttggtgggtcaacggcaaagaggtgcacagcggcgtgtgtaccgacccccagccactgaaagaacagcccgccctgaacgacagccggtactgcctgagcagcagactgagagtgtccgccaccttctggcagaacccccggaaccacttcagatgccaggtgcagttctacggcctgagcgagaacgacgagtggacccaggacagagccaagcccgtgacccagatcgtgtctgccgaagcctggggcagagccgattgcgacgtgaagctggtggaaaagagcttcgagacagacaccaacctgaacttccagaacctgagcgtgatcggcttcagaatcctgctgctgaaagtggccggctttaacctgctgatgaccctgcggctgtggtccagcagggccaagcgatctggatctggagcaacaaacttctcactactcaaacaagcaggtgacgtggaggagaatcccgggcctactagtatggactggatttggcgcatccttttccttgtcggcgctgctaccggcgcccattccgggccccaggttcagctgcaagagtctggcggaggacttgctcaagctggcggaagcctgagactgtcttgtgccgcctctggcagaaccttcagcatgggctggtttagacaggcccctggcaaagagagagagttcgtcgccgccatcacatacagcggcggcagcccttactacgcctcttctgtcagaggccggttcaccatcagccgggacaacgccaagaacaccgtgtacctccagatgaacagcctgaagccagaggacaccgccgtgtactactgtgccgccaatccaacctacggcagcgactggaatgccgagaattggggccagggcacccaagtgacagtgtctagtggatccggcggcggaggatctggcggaggcggatctgggggcggaggctctttcgaagaagttcagctggtggaatctggccctggcctggtcaagcctagcgagacactgagcctgacctgtaccgtgtccggcttcagcctgaccagatttggcgtgcactgggtccgacagccacctggcaaaggactggaatggctgggagtgatttggagaggcggcagcaccgattacaacgccgccttcatgagccggctgaccatcagcaaggacaacagcaagaaccaggtgtccctgaagctgagcagcgtgacagccgctgataccgccgtgtactactgctccaaccactactacggcagctccgactacgccctggataattggggccagggaaccctggtcaccgtgtcatctacgcgtatccagaaccctgatcctgccgtgtaccagctgcgggatagcaagagcagcgacaagagcgtgtgtctgttcaccgacttcgacagccagaccaacgtgtcccagagcaaggactccgacgtgtacatcaccgataagtgcgtgctggacatgcggagcatggacttcaagagcaactccgccgtggcctggtccaacaagtccgatttcgcctgcgccaacgccttcaacaacagcattatccccgaggacacattcttcccaagccccgagagcagctgcggctttaccagcgagagctaccagcagggcgtgctgagcgccaccatcctgtacgagatcctgctgggcaaggccaccctgtacgccgtgctggtgtctgccctggtgctgatggctatggtcaagcggaaggacagccgggga

SEQ ID NO: 35332 - DNA, 2286 bp, synthetic construct
  source 1..2286: mol_type = other DNA
atggccttaccagtgaccgccttgctcctgccgctggccttgctgctccacgccgccaggccggacatccagatgacacagagccctagcagcctgtctgccagcgtgggagacagagtgaccatcacctgtagagccagccaggacgtgcggaacatcgtcgtgtggttccagcagaagcctggcaaggcccctaagctgctgatctacagcggcagctacagatacagcggcgtgcccagcagattttccggctctggctctggcaccgacttcaccctgacaatatccagcctccagcctgaggacttcgccacctactactgccagcagcactacagccctccatacacattcggccagggcaccaaggtggaaatcaagagactcgagatccagaaccctgatcctgccgtgtaccagctgcgggatagcaagagcagcgacaagagcgtgtgtctgttcaccgacttcgacagccagaccaacgtgtcccagagcaaggactccgacgtgtacatcaccgataagtgcgtgctggacatgcggagcatggacttcaagagcaactccgccgtggcctggtccaacaagtccgatttcgcctgcgccaacgccttcaacaacagcattatccccgaggacacattcttcccaagccccgagagcagctgcggctttaccagcgagagctaccagcagggcgtgctgagcgccaccatcctgtacgagatcctgctgggcaaggccaccctgtacgccgtgctggtgtctgccctggtgctgatggctatggtcaagcggaaggacagccggggacgcgccaagagaagcggatctggcgtgaagcagaccctgaatttcgacctgctgaagctggctggcgacgtggaatccaacccaggccctactagtatggactggatttggcgcatccttttccttgtcggcgctgctaccggcgcccattccgggccccaggttcagctgcaagagtctggcggaggacttgctcaagctggcggaagcctgagactgtcttgtgccgcctctggcagaaccttcagcatgggctggtttagacaggcccctggcaaagagagagagttcgtcgccgccatcacatacagcggcggcagcccttactacgcctcttctgtcagaggccggttcaccatcagccgggacaacgccaagaacaccgtgtacctccagatgaacagcctgaagccagaggacaccgccgtgtactactgtgccgccaatccaacctacggcagcgactggaatgccgagaattggggccagggcacccaagtgacagtgtctagtggatccggcggcggaggatctggcggaggcggatctgggggcggaggctctttcgaagaagttcagctggtggaatctggccctggcctggtcaagcctagcgagacactgagcctgacctgtaccgtgtccggcttcagcctgaccagatttggcgtgcactgggtccgacagccacctggcaaaggactggaatggctgggagtgatttggagaggcggcagcaccgattacaacgccgccttcatgagccggctgaccatcagcaaggacaacagcaagaaccaggtgtccctgaagctgagcagcgtgacagccgctgataccgccgtgtactactgctccaaccactactacggcagctccgactacgccctggataattggggccagggaaccctggtcaccgtgtcatctacgcgtgaggacctgaagaacgtgttcccacctgaggtggccgtgttcgagcctagcgaggccgagatcagccacacccagaaagccaccctcgtgtgcctggctaccggcttctaccccgaccatgtggaactgtcttggtgggtcaacggcaaagaggtgcacagcggcgtgtgtaccgacccccagccactgaaagaacagcccgccctgaacgacagccggtactgcctgagcagcagactgagagtgtccgccaccttctggcagaacccccggaaccacttcagatgccaggtgcagttctacggcctgagcgagaacgacgagtggacccaggacagagccaagcccgtgacccagatcgtgtctgccgaagcctggggcagagccgattgcgacgtgaagctggtggaaaagagcttcgagacagacaccaacctgaacttccagaacctgagcgtgatcggcttcagaatcctgctgctgaaagtggccggctttaacctgctgatgaccctgcggctgtggtccagc

SEQ ID NO: 35333 - DNA, 2292 bp, synthetic construct
  source 1..2292: mol_type = other DNA
atggccttaccagtgaccgccttgctcctgccgctggccttgctgctccacgccgccaggccggaagtgcaactggtggaatctggaggctctctggtgcagccagggggaagcctgagactgtcttgtgccgcttccggcttcaccttcgacgactacgccatgagctgggtgcgccaggtgccaggcaaaggcctggaatgggtgtccagcatcaactggagcggcacccacaccgattacgccgactccgtgaaaggcagattcacaatcagcagaaacaacgccaacaataccctgtacctgcagatgaactccctgaagtctgaggatacagcagtgtattattgcgccaagaactggcgggacgccggcaccacttggtttgagaaaagcggctctgccggacagggaacccaagtgacagtgtcctccggtaccggcggaggcggatctggcggcggaggtagcggtggcggaggatctgaattcgacatccagatgacacagagccctagcagcctgtctgccagcgtgggagacagagtgaccatcacctgtagagccagccaggacgtgcggaacatcgtcgtgtggttccagcagaagcctggcaaggcccctaagctgctgatctacagcggcagctacagatacagcggcgtgcccagcagattttccggctctggctctggcaccgacttcaccctgacaatatccagcctccagcctgaggacttcgccacctactactgccagcagcactacagccctccatacacattcggccagggcaccaaggtggaaatcaagagactcgaggacctgaagaacgtgttcccacctgaggtggccgtgttcgagcctagcgaggccgagatcagccacacccagaaagccaccctcgtgtgcctggctaccggcttctaccccgaccatgtggaactgtcttggtgggtcaacggcaaagaggtgcacagcggcgtgtgtaccgacccccagccactgaaagaacagcccgccctgaacgacagccggtactgcctgagcagcagactgagagtgtccgccaccttctggcagaacccccggaaccacttcagatgccaggtgcagttctacggcctgagcgagaacgacgagtggacccaggacagagccaagcccgtgacccagatcgtgtctgccgaagcctggggcagagccgattgcgacgtgaagctggtggaaaagagcttcgagacagacaccaacctgaacttccagaacctgagcgtgatcggcttcagaatcctgctgctgaaagtggccggctttaacctgctgatgaccctgcggctgtggtccagcagggccaagcgatctggatctggagcaacaaacttctcactactcaaacaagcaggtgacgtggaggagaatcccgggcctactagtatggactggatttggcgcatccttttccttgtcggcgctgctaccggcgcgcattccttcgaagaagttcagctggtggaatctggccctggcctggtcaagcctagcgagacactgagcctgacctgtaccgtgtccggcttcagcctgaccagatttggcgtgcactgggtccgacagccacctggcaaaggactggaatggctgggagtgatttggagaggcggcagcaccgattacaacgccgccttcatgagccggctgaccatcagcaaggacaacagcaagaaccaggtgtccctgaagctgagcagcgtgacagccgctgataccgccgtgtactactgctccaaccactactacggcagctccgactacgccctggataattggggccagggaaccctggtcaccgtgtcatctacgcgtatccagaaccctgatcctgccgtgtaccagctgcgggatagcaagagcagcgacaagagcgtgtgtctgttcaccgacttcgacagccagaccaacgtgtcccagagcaaggactccgacgtgtacatcaccgataagtgcgtgctggacatgcggagcatggacttcaagagcaactccgccgtggcctggtccaacaagtccgatttcgcctgcgccaacgccttcaacaacagcattatccccgaggacacattcttcccaagccccgagagcagctgcggctttaccagcgagagctaccagcagggcgtgctgagcgccaccatcctgtacgagatcctgctgggcaaggccaccctgtacgccgtgctggtgtctgccctggtgctgatggctatggtcaagcggaaggacagccgggga

SEQ ID NO: 35334 - DNA, 2304 bp, synthetic construct
  source 1..2304: mol_type = other DNA
atggccttaccagtgaccgccttgctcctgccgctggccttgctgctccacgccgccaggccggaagtgcaactggtggaatctggaggctctctggtgcagccagggggaagcctgagactgtcttgtgccgcttccggcttcaccttcgacgactacgccatgagctgggtgcgccaggtgccaggcaaaggcctggaatgggtgtccagcatcaactggagcggcacccacaccgattacgccgactccgtgaaaggcagattcacaatcagcagaaacaacgccaacaataccctgtacctgcagatgaactccctgaagtctgaggatacagcagtgtattattgcgccaagaactggcgggacgccggcaccacttggtttgagaaaagcggctctgccggacagggaacccaagtgacagtgtcctccggtaccggcggaggcggatctggcggcggaggtagcggtggcggaggatctgaattcgacatccagatgacacagagccctagcagcctgtctgccagcgtgggagacagagtgaccatcacctgtagagccagccaggacgtgcggaacatcgtcgtgtggttccagcagaagcctggcaaggcccctaagctgctgatctacagcggcagctacagatacagcggcgtgcccagcagattttccggctctggctctggcaccgacttcaccctgacaatatccagcctccagcctgaggacttcgccacctactactgccagcagcactacagccctccatacacattcggccagggcaccaaggtggaaatcaagagactcgagatccagaaccctgatcctgccgtgtaccagctgcgggatagcaagagcagcgacaagagcgtgtgtctgttcaccgacttcgacagccagaccaacgtgtcccagagcaaggactccgacgtgtacatcaccgataagtgcgtgctggacatgcggagcatggacttcaagagcaactccgccgtggcctggtccaacaagtccgatttcgcctgcgccaacgccttcaacaacagcattatccccgaggacacattcttcccaagccccgagagcagctgcggctttaccagcgagagctaccagcagggcgtgctgagcgccaccatcctgtacgagatcctgctgggcaaggccaccctgtacgccgtgctggtgtctgccctggtgctgatggctatggtcaagcggaaggacagccggggacgcgccaagagaagcggatctggcgtgaagcagaccctgaatttcgacctgctgaagctggctggcgacgtggaatccaacccaggccctactagtatggactggatttggcgcatccttttccttgtcggcgctgctaccggcgcgcattccttcgaagaagttcagctggtggaatctggccctggcctggtcaagcctagcgagacactgagcctgacctgtaccgtgtccggcttcagcctgaccagatttggcgtgcactgggtccgacagccacctggcaaaggactggaatggctgggagtgatttggagaggcggcagcaccgattacaacgccgccttcatgagccggctgaccatcagcaaggacaacagcaagaaccaggtgtccctgaagctgagcagcgtgacagccgctgataccgccgtgtactactgctccaaccactactacggcagctccgactacgccctggataattggggccagggaaccctggtcaccgtgtcatctacgcgtgaggacctgaagaacgtgttcccacctgaggtggccgtgttcgagcctagcgaggccgagatcagccacacccagaaagccaccctcgtgtgcctggctaccggcttctaccccgaccatgtggaactgtcttggtgggtcaacggcaaagaggtgcacagcggcgtgtgtaccgacccccagccactgaaagaacagcccgccctgaacgacagccggtactgcctgagcagcagactgagagtgtccgccaccttctggcagaacccccggaaccacttcagatgccaggtgcagttctacggcctgagcgagaacgacgagtggacccaggacagagccaagcccgtgacccagatcgtgtctgccgaagcctggggcagagccgattgcgacgtgaagctggtggaaaagagcttcgagacagacaccaacctgaacttccagaacctgagcgtgatcggcttcagaatcctgctgctgaaagtggccggctttaacctgctgatgaccctgcggctgtggtccagc

SEQ ID NO: 35335 - DNA, 2286 bp, synthetic construct
  source 1..2286: mol_type = other DNA
atggccttaccagtgaccgccttgctcctgccgctggccttgctgctccacgccgccaggccggaagttcagctgcttgagtctggcggaggactggttcaacctggcggaagcctgagactgtcttgtgccgccagcggcttcatcttcagcagctacgccatgagctgggtccgacaggctcctggaaagggccaagaatgggtttccggcgttagcggcacaggcgtgaacacctactacgccgatagcgtgaagggcagattcaccatcagccgggacaacagcaagaacaccctgtacctccagatgaacagcctgagagccgaggacaccgccgtgtactattgtgcctctggcaaaggctgggacagcggctcttggtacgaggactatagaggccagggcaccctggtcacagtttcttcaggtaccggcggaggcggatctggcggcggaggtagcggtggcggaggatctgaattcgacatccagatgacacagagccctagcagcctgtctgccagcgtgggagacagagtgaccatcacctgtagagccagccaggacgtgcggaacatcgtcgtgtggttccagcagaagcctggcaaggcccctaagctgctgatctacagcggcagctacagatacagcggcgtgcccagcagattttccggctctggctctggcaccgacttcaccctgacaatatccagcctccagcctgaggacttcgccacctactactgccagcagcactacagccctccatacacattcggccagggcaccaaggtggaaatcaagagactcgaggacctgaagaacgtgttcccacctgaggtggccgtgttcgagcctagcgaggccgagatcagccacacccagaaagccaccctcgtgtgcctggctaccggcttctaccccgaccatgtggaactgtcttggtgggtcaacggcaaagaggtgcacagcggcgtgtgtaccgacccccagccactgaaagaacagcccgccctgaacgacagccggtactgcctgagcagcagactgagagtgtccgccaccttctggcagaacccccggaaccacttcagatgccaggtgcagttctacggcctgagcgagaacgacgagtggacccaggacagagccaagcccgtgacccagatcgtgtctgccgaagcctggggcagagccgattgcgacgtgaagctggtggaaaagagcttcgagacagacaccaacctgaacttccagaacctgagcgtgatcggcttcagaatcctgctgctgaaagtggccggctttaacctgctgatgaccctgcggctgtggtccagcagggccaagcgatctggatctggagcaacaaacttctcactactcaaacaagcaggtgacgtggaggagaatcccgggcctactagtatggactggatttggcgcatccttttccttgtcggcgctgctaccggcgcgcattccttcgaagaagttcagctggtggaatctggccctggcctggtcaagcctagcgagacactgagcctgacctgtaccgtgtccggcttcagcctgaccagatttggcgtgcactgggtccgacagccacctggcaaaggactggaatggctgggagtgatttggagaggcggcagcaccgattacaacgccgccttcatgagccggctgaccatcagcaaggacaacagcaagaaccaggtgtccctgaagctgagcagcgtgacagccgctgataccgccgtgtactactgctccaaccactactacggcagctccgactacgccctggataattggggccagggaaccctggtcaccgtgtcatctacgcgtatccagaaccctgatcctgccgtgtaccagctgcgggatagcaagagcagcgacaagagcgtgtgtctgttcaccgacttcgacagccagaccaacgtgtcccagagcaaggactccgacgtgtacatcaccgataagtgcgtgctggacatgcggagcatggacttcaagagcaactccgccgtggcctggtccaacaagtccgatttcgcctgcgccaacgccttcaacaacagcattatccccgaggacacattcttcccaagccccgagagcagctgcggctttaccagcgagagctaccagcagggcgtgctgagcgccaccatcctgtacgagatcctgctgggcaaggccaccctgtacgccgtgctggtgtctgccctggtgctgatggctatggtcaagcggaaggacagccgggga

SEQ ID NO: 35336 - DNA, 2298 bp, synthetic construct
  source 1..2298: mol_type = other DNA
atggccttaccagtgaccgccttgctcctgccgctggccttgctgctccacgccgccaggccggaagttcagctgcttgagtctggcggaggactggttcaacctggcggaagcctgagactgtcttgtgccgccagcggcttcatcttcagcagctacgccatgagctgggtccgacaggctcctggaaagggccaagaatgggtttccggcgttagcggcacaggcgtgaacacctactacgccgatagcgtgaagggcagattcaccatcagccgggacaacagcaagaacaccctgtacctccagatgaacagcctgagagccgaggacaccgccgtgtactattgtgcctctggcaaaggctgggacagcggctcttggtacgaggactatagaggccagggcaccctggtcacagtttcttcaggtaccggcggaggcggatctggcggcggaggtagcggtggcggaggatctgaattcgacatccagatgacacagagccctagcagcctgtctgccagcgtgggagacagagtgaccatcacctgtagagccagccaggacgtgcggaacatcgtcgtgtggttccagcagaagcctggcaaggcccctaagctgctgatctacagcggcagctacagatacagcggcgtgcccagcagattttccggctctggctctggcaccgacttcaccctgacaatatccagcctccagcctgaggacttcgccacctactactgccagcagcactacagccctccatacacattcggccagggcaccaaggtggaaatcaagagactcgagatccagaaccctgatcctgccgtgtaccagctgcgggatagcaagagcagcgacaagagcgtgtgtctgttcaccgacttcgacagccagaccaacgtgtcccagagcaaggactccgacgtgtacatcaccgataagtgcgtgctggacatgcggagcatggacttcaagagcaactccgccgtggcctggtccaacaagtccgatttcgcctgcgccaacgccttcaacaacagcattatccccgaggacacattcttcccaagccccgagagcagctgcggctttaccagcgagagctaccagcagggcgtgctgagcgccaccatcctgtacgagatcctgctgggcaaggccaccctgtacgccgtgctggtgtctgccctggtgctgatggctatggtcaagcggaaggacagccggggacgcgccaagagaagcggatctggcgtgaagcagaccctgaatttcgacctgctgaagctggctggcgacgtggaatccaacccaggccctactagtatggactggatttggcgcatccttttccttgtcggcgctgctaccggcgcgcattccttcgaagaagttcagctggtggaatctggccctggcctggtcaagcctagcgagacactgagcctgacctgtaccgtgtccggcttcagcctgaccagatttggcgtgcactgggtccgacagccacctggcaaaggactggaatggctgggagtgatttggagaggcggcagcaccgattacaacgccgccttcatgagccggctgaccatcagcaaggacaacagcaagaaccaggtgtccctgaagctgagcagcgtgacagccgctgataccgccgtgtactactgctccaaccactactacggcagctccgactacgccctggataattggggccagggaaccctggtcaccgtgtcatctacgcgtgaggacctgaagaacgtgttcccacctgaggtggccgtgttcgagcctagcgaggccgagatcagccacacccagaaagccaccctcgtgtgcctggctaccggcttctaccccgaccatgtggaactgtcttggtgggtcaacggcaaagaggtgcacagcggcgtgtgtaccgacccccagccactgaaagaacagcccgccctgaacgacagccggtactgcctgagcagcagactgagagtgtccgccaccttctggcagaacccccggaaccacttcagatgccaggtgcagttctacggcctgagcgagaacgacgagtggacccaggacagagccaagcccgtgacccagatcgtgtctgccgaagcctggggcagagccgattgcgacgtgaagctggtggaaaagagcttcgagacagacaccaacctgaacttccagaacctgagcgtgatcggcttcagaatcctgctgctgaaagtggccggctttaacctgctgatgaccctgcggctgtggtccagc

SEQ ID NO: 35337 - DNA, 2190 bp, synthetic construct
  source 1..2190: mol_type = other DNA
atggccttaccagtgaccgccttgctcctgccgctggccttgctgctccacgccgccaggccgatgctgcccgctcctaagaatctggtggtgtccagaatcaccgaggacagcgccagactgtcttggacagctcctgatgccgccttcgacagcttccccatccggtacatcgagacactgatctggggcgaagccatctggctggatgtgcctggaagcgagagaagctacgacctgaccggactgaagcctggcacagagtatgccgtggtcatcaccggcgtgaaaggcggcagattctctagccctctggtggcctctttcaccaccggtaccggcggaggcggatctggcggcggaggtagcggtggcggaggatctgaattcgacatccagatgacacagagccctagcagcctgtctgccagcgtgggagacagagtgaccatcacctgtagagccagccaggacgtgcggaacatcgtcgtgtggttccagcagaagcctggcaaggcccctaagctgctgatctacagcggcagctacagatacagcggcgtgcccagcagattttccggctctggctctggcaccgacttcaccctgacaatatccagcctccagcctgaggacttcgccacctactactgccagcagcactacagccctccatacacattcggccagggcaccaaggtggaaatcaagagactcgaggacctgaagaacgtgttcccacctgaggtggccgtgttcgagcctagcgaggccgagatcagccacacccagaaagccaccctcgtgtgcctggctaccggcttctaccccgaccatgtggaactgtcttggtgggtcaacggcaaagaggtgcacagcggcgtgtgtaccgacccccagccactgaaagaacagcccgccctgaacgacagccggtactgcctgagcagcagactgagagtgtccgccaccttctggcagaacccccggaaccacttcagatgccaggtgcagttctacggcctgagcgagaacgacgagtggacccaggacagagccaagcccgtgacccagatcgtgtctgccgaagcctggggcagagccgattgcgacgtgaagctggtggaaaagagcttcgagacagacaccaacctgaacttccagaacctgagcgtgatcggcttcagaatcctgctgctgaaagtggccggctttaacctgctgatgaccctgcggctgtggtccagcagggccaagcgatctggatctggagcaacaaacttctcactactcaaacaagcaggtgacgtggaggagaatcccgggcctactagtatggactggatttggcgcatccttttccttgtcggcgctgctaccggcgcgcattccttcgaagaagttcagctggtggaatctggccctggcctggtcaagcctagcgagacactgagcctgacctgtaccgtgtccggcttcagcctgaccagatttggcgtgcactgggtccgacagccacctggcaaaggactggaatggctgggagtgatttggagaggcggcagcaccgattacaacgccgccttcatgagccggctgaccatcagcaaggacaacagcaagaaccaggtgtccctgaagctgagcagcgtgacagccgctgataccgccgtgtactactgctccaaccactactacggcagctccgactacgccctggataattggggccagggaaccctggtcaccgtgtcatctacgcgtatccagaaccctgatcctgccgtgtaccagctgcgggatagcaagagcagcgacaagagcgtgtgtctgttcaccgacttcgacagccagaccaacgtgtcccagagcaaggactccgacgtgtacatcaccgataagtgcgtgctggacatgcggagcatggacttcaagagcaactccgccgtggcctggtccaacaagtccgatttcgcctgcgccaacgccttcaacaacagcattatccccgaggacacattcttcccaagccccgagagcagctgcggctttaccagcgagagctaccagcagggcgtgctgagcgccaccatcctgtacgagatcctgctgggcaaggccaccctgtacgccgtgctggtgtctgccctggtgctgatggctatggtcaagcggaaggacagccgggga

SEQ ID NO: 35338 - DNA, 2202 bp, synthetic construct
  source 1..2202: mol_type = other DNA
atggccttaccagtgaccgccttgctcctgccgctggccttgctgctccacgccgccaggccgatgctgcccgctcctaagaatctggtggtgtccagaatcaccgaggacagcgccagactgtcttggacagctcctgatgccgccttcgacagcttccccatccggtacatcgagacactgatctggggcgaagccatctggctggatgtgcctggaagcgagagaagctacgacctgaccggactgaagcctggcacagagtatgccgtggtcatcaccggcgtgaaaggcggcagattctctagccctctggtggcctctttcaccaccggtaccggcggaggcggatctggcggcggaggtagcggtggcggaggatctgaattcgacatccagatgacacagagccctagcagcctgtctgccagcgtgggagacagagtgaccatcacctgtagagccagccaggacgtgcggaacatcgtcgtgtggttccagcagaagcctggcaaggcccctaagctgctgatctacagcggcagctacagatacagcggcgtgcccagcagattttccggctctggctctggcaccgacttcaccctgacaatatccagcctccagcctgaggacttcgccacctactactgccagcagcactacagccctccatacacattcggccagggcaccaaggtggaaatcaagagactcgagatccagaaccctgatcctgccgtgtaccagctgcgggatagcaagagcagcgacaagagcgtgtgtctgttcaccgacttcgacagccagaccaacgtgtcccagagcaaggactccgacgtgtacatcaccgataagtgcgtgctggacatgcggagcatggacttcaagagcaactccgccgtggcctggtccaacaagtccgatttcgcctgcgccaacgccttcaacaacagcattatccccgaggacacattcttcccaagccccgagagcagctgcggctttaccagcgagagctaccagcagggcgtgctgagcgccaccatcctgtacgagatcctgctgggcaaggccaccctgtacgccgtgctggtgtctgccctggtgctgatggctatggtcaagcggaaggacagccggggacgcgccaagagaagcggatctggcgtgaagcagaccctgaatttcgacctgctgaagctggctggcgacgtggaatccaacccaggccctactagtatggactggatttggcgcatccttttccttgtcggcgctgctaccggcgcgcattccttcgaagaagttcagctggtggaatctggccctggcctggtcaagcctagcgagacactgagcctgacctgtaccgtgtccggcttcagcctgaccagatttggcgtgcactgggtccgacagccacctggcaaaggactggaatggctgggagtgatttggagaggcggcagcaccgattacaacgccgccttcatgagccggctgaccatcagcaaggacaacagcaagaaccaggtgtccctgaagctgagcagcgtgacagccgctgataccgccgtgtactactgctccaaccactactacggcagctccgactacgccctggataattggggccagggaaccctggtcaccgtgtcatctacgcgtgaggacctgaagaacgtgttcccacctgaggtggccgtgttcgagcctagcgaggccgagatcagccacacccagaaagccaccctcgtgtgcctggctaccggcttctaccccgaccatgtggaactgtcttggtgggtcaacggcaaagaggtgcacagcggcgtgtgtaccgacccccagccactgaaagaacagcccgccctgaacgacagccggtactgcctgagcagcagactgagagtgtccgccaccttctggcagaacccccggaaccacttcagatgccaggtgcagttctacggcctgagcgagaacgacgagtggacccaggacagagccaagcccgtgacccagatcgtgtctgccgaagcctggggcagagccgattgcgacgtgaagctggtggaaaagagcttcgagacagacaccaacctgaacttccagaacctgagcgtgatcggcttcagaatcctgctgctgaaagtggccggctttaacctgctgatgaccctgcggctgtggtccagc

SEQ ID NO: 35339 - DNA, 2277 bp, synthetic construct
  source 1..2277: mol_type = other DNA
atggccttaccagtgaccgccttgctcctgccgctggccttgctgctccacgccgccaggccggaggtgcagctggttgaatctggcggaggactggttcagcctggcggatctctgagactgtcttgtgccgccagcggcttcaacatcaaggatacctgtatcggctgggttcgcagagcccctggcaaagaggaagaactggtcgccaaaatctgcaagtacagcggccacaccagatacgccgacagcgtgaagggcagattcaccatcagcgccgacaccagcaagaacaccgcctacctccagatgaacagcctgagagccgaggacaccgccgtgtactattgtgccgctgtgtccgtcagagatgggcactacaattactggggccagggcaccaccgtgaccgtttcttcaggtaccggcggaggcggatctggcggcggaggtagcggtggcggaggatctgaattcgacatccagatgacacagagccctagcagcctgtctgccagcgtgggagacagagtgaccatcacctgtagagccagccaggacgtgcggaacatcgtcgtgtggttccagcagaagcctggcaaggcccctaagctgctgatctacagcggcagctacagatacagcggcgtgcccagcagattttccggctctggctctggcaccgacttcaccctgacaatatccagcctccagcctgaggacttcgccacctactactgccagcagcactacagccctccatacacattcggccagggcaccaaggtggaaatcaagagactcgaggacctgaagaacgtgttcccacctgaggtggccgtgttcgagcctagcgaggccgagatcagccacacccagaaagccaccctcgtgtgcctggctaccggcttctaccccgaccatgtggaactgtcttggtgggtcaacggcaaagaggtgcacagcggcgtgtgtaccgacccccagccactgaaagaacagcccgccctgaacgacagccggtactgcctgagcagcagactgagagtgtccgccaccttctggcagaacccccggaaccacttcagatgccaggtgcagttctacggcctgagcgagaacgacgagtggacccaggacagagccaagcccgtgacccagatcgtgtctgccgaagcctggggcagagccgattgcgacgtgaagctggtggaaaagagcttcgagacagacaccaacctgaacttccagaacctgagcgtgatcggcttcagaatcctgctgctgaaagtggccggctttaacctgctgatgaccctgcggctgtggtccagcagggccaagcgatctggatctggagcaacaaacttctcactactcaaacaagcaggtgacgtggaggagaatcccgggcctactagtatggactggatttggcgcatccttttccttgtcggcgctgctaccggcgcgcattccttcgaagaagttcagctggtggaatctggccctggcctggtcaagcctagcgagacactgagcctgacctgtaccgtgtccggcttcagcctgaccagatttggcgtgcactgggtccgacagccacctggcaaaggactggaatggctgggagtgatttggagaggcggcagcaccgattacaacgccgccttcatgagccggctgaccatcagcaaggacaacagcaagaaccaggtgtccctgaagctgagcagcgtgacagccgctgataccgccgtgtactactgctccaaccactactacggcagctccgactacgccctggataattggggccagggaaccctggtcaccgtgtcatctacgcgtatccagaaccctgatcctgccgtgtaccagctgcgggatagcaagagcagcgacaagagcgtgtgtctgttcaccgacttcgacagccagaccaacgtgtcccagagcaaggactccgacgtgtacatcaccgataagtgcgtgctggacatgcggagcatggacttcaagagcaactccgccgtggcctggtccaacaagtccgatttcgcctgcgccaacgccttcaacaacagcattatccccgaggacacattcttcccaagccccgagagcagctgcggctttaccagcgagagctaccagcagggcgtgctgagcgccaccatcctgtacgagatcctgctgggcaaggccaccctgtacgccgtgctggtgtctgccctggtgctgatggctatggtcaagcggaaggacagccgggga

SEQ ID NO: 35340 - DNA, 2289 bp, synthetic construct
  source 1..2289: mol_type = other DNA
atggccttaccagtgaccgccttgctcctgccgctggccttgctgctccacgccgccaggccggaggtgcagctggttgaatctggcggaggactggttcagcctggcggatctctgagactgtcttgtgccgccagcggcttcaacatcaaggatacctgtatcggctgggttcgcagagcccctggcaaagaggaagaactggtcgccaaaatctgcaagtacagcggccacaccagatacgccgacagcgtgaagggcagattcaccatcagcgccgacaccagcaagaacaccgcctacctccagatgaacagcctgagagccgaggacaccgccgtgtactattgtgccgctgtgtccgtcagagatgggcactacaattactggggccagggcaccaccgtgaccgtttcttcaggtaccggcggaggcggatctggcggcggaggtagcggtggcggaggatctgaattcgacatccagatgacacagagccctagcagcctgtctgccagcgtgggagacagagtgaccatcacctgtagagccagccaggacgtgcggaacatcgtcgtgtggttccagcagaagcctggcaaggcccctaagctgctgatctacagcggcagctacagatacagcggcgtgcccagcagattttccggctctggctctggcaccgacttcaccctgacaatatccagcctccagcctgaggacttcgccacctactactgccagcagcactacagccctccatacacattcggccagggcaccaaggtggaaatcaagagactcgagatccagaaccctgatcctgccgtgtaccagctgcgggatagcaagagcagcgacaagagcgtgtgtctgttcaccgacttcgacagccagaccaacgtgtcccagagcaaggactccgacgtgtacatcaccgataagtgcgtgctggacatgcggagcatggacttcaagagcaactccgccgtggcctggtccaacaagtccgatttcgcctgcgccaacgccttcaacaacagcattatccccgaggacacattcttcccaagccccgagagcagctgcggctttaccagcgagagctaccagcagggcgtgctgagcgccaccatcctgtacgagatcctgctgggcaaggccaccctgtacgccgtgctggtgtctgccctggtgctgatggctatggtcaagcggaaggacagccggggacgcgccaagagaagcggatctggcgtgaagcagaccctgaatttcgacctgctgaagctggctggcgacgtggaatccaacccaggccctactagtatggactggatttggcgcatccttttccttgtcggcgctgctaccggcgcgcattccttcgaagaagttcagctggtggaatctggccctggcctggtcaagcctagcgagacactgagcctgacctgtaccgtgtccggcttcagcctgaccagatttggcgtgcactgggtccgacagccacctggcaaaggactggaatggctgggagtgatttggagaggcggcagcaccgattacaacgccgccttcatgagccggctgaccatcagcaaggacaacagcaagaaccaggtgtccctgaagctgagcagcgtgacagccgctgataccgccgtgtactactgctccaaccactactacggcagctccgactacgccctggataattggggccagggaaccctggtcaccgtgtcatctacgcgtgaggacctgaagaacgtgttcccacctgaggtggccgtgttcgagcctagcgaggccgagatcagccacacccagaaagccaccctcgtgtgcctggctaccggcttctaccccgaccatgtggaactgtcttggtgggtcaacggcaaagaggtgcacagcggcgtgtgtaccgacccccagccactgaaagaacagcccgccctgaacgacagccggtactgcctgagcagcagactgagagtgtccgccaccttctggcagaacccccggaaccacttcagatgccaggtgcagttctacggcctgagcgagaacgacgagtggacccaggacagagccaagcccgtgacccagatcgtgtctgccgaagcctggggcagagccgattgcgacgtgaagctggtggaaaagagcttcgagacagacaccaacctgaacttccagaacctgagcgtgatcggcttcagaatcctgctgctgaaagtggccggctttaacctgctgatgaccctgcggctgtggtccagc

SEQ ID NO: 35341 - DNA, 3393 bp, synthetic construct
  source 1..3393: mol_type = other DNA
atggccttaccagtgaccgccttgctcctgccgctggccttgctgctccacgccgccaggccggaagtgcagctggttgaatctggcggaggactggttcaggctggcggatctctgagactgtcttgtgccgccagcggcagaacctttagcatgggctggtttagacaggcccctggcaaagagagagagttcgtcgccgccatcacatactctggcggcagcccttactacgccgactctgtgaagggcagattcaccatcagccgggacaacgccaagaacaccgtgtacctccagatgaacagcctgaagcctgaggacaccgccgtgtactactgcgccgccaatccaacatacggcagcgactggaacgccgagaattggggccagggaacccaagtgacagtgtctagcggtaccggcggaggcggatctggcggcggaggtagcggtggcggaggatctgaattcgacatccagatgacacagagccctagcagcctgtctgccagcgtgggagacagagtgaccatcacctgtagagccagccaggacgtgcggaacatcgtcgtgtggttccagcagaagcctggcaaggcccctaagctgctgatctacagcggcagctacagatacagcggcgtgcccagcagattttccggctctggctctggcaccgacttcaccctgacaatatccagcctccagcctgaggacttcgccacctactactgccagcagcactacagccctccatacacattcggccagggcaccaaggtggaaatcaagagactcgaggacctgaagaacgtgttcccacctgaggtggccgtgttcgagcctagcgaggccgagatcagccacacccagaaagccaccctcgtgtgcctggctaccggcttctaccccgaccatgtggaactgtcttggtgggtcaacggcaaagaggtgcacagcggcgtgtgtaccgacccccagccactgaaagaacagcccgccctgaacgacagccggtactgcctgagcagcagactgagagtgtccgccaccttctggcagaacccccggaaccacttcagatgccaggtgcagttctacggcctgagcgagaacgacgagtggacccaggacagagccaagcccgtgacccagatcgtgtctgccgaagcctggggcagagccgattgcgacgtgaagctggtggaaaagagcttcgagacagacaccaacctgaacttccagaacctgagcgtgatcggcttcagaatcctgctgctgaaagtggccggctttaacctgctgatgaccctgcggctgtggtccagcagggccaagcgatctggatctggagcaacaaacttctcactactcaaacaagcaggtgacgtggaggagaatcccgggcctactagtgccaccatggactggatttggcgcatccttttccttgtcggcgctgctaccggcgcccattccgggcccgaagtgcaactggttgaatccggtggcggcctggtgcaagcaggcggatctctcagacttagctgtgccgcctccggcagaaccttcacaatgggatggtttaggcaggctccagggaaagagagagagttcgtcgccgccatctctctgtctcccacactggcctactacgccgactctgtgaaaggccggttcaccatctccagagataatgccaagaacaccgtggtgctgcaaatgaactctctgaaacccgaggatacagccctgtactattgtgccgctgaccggaagtccgtgatgagcatcagacccgattactggggacagggcacacaagtcacagtgtcctctggatccggcggcggaggatctggcggaggcggatctgggggcggaggctctttcgaagaagttcagctggtggaatctggccctggcctggtcaagcctagcgagacactgagcctgacctgtaccgtgtccggcttcagcctgaccagatttggcgtgcactgggtccgacagccacctggcaaaggactggaatggctgggagtgatttggagaggcggcagcaccgattacaacgccgccttcatgagccggctgaccatcagcaaggacaacagcaagaaccaggtgtccctgaagctgagcagcgtgacagccgctgataccgccgtgtactactgctccaaccactactacggcagctccgactacgccctggataattggggccagggaaccctggtcaccgtgtcatctacgcgtatccagaaccctgatcctgccgtgtaccagctgcgggatagcaagagcagcgacaagagcgtgtgtctgttcaccgacttcgacagccagaccaacgtgtcccagagcaaggactccgacgtgtacatcaccgataagtgcgtgctggacatgcggagcatggacttcaagagcaactccgccgtggcctggtccaacaagtccgatttcgcctgcgccaacgccttcaacaacagcattatccccgaggacacattcttcccaagccccgagagcagctgcggctttaccagcgagagctaccagcagggcgtgctgagcgccaccatcctgtacgagatcctgctgggcaaggccaccctgtacgccgtgctggtgtctgccctggtgctgatggctatggtcaagcggaaggacagccggggacgcgccaagagaagcggatctggcgtgaagcagaccctgaatttcgacctgctgaagctggctggcgacgtggaatccaacccaggcccttctagaggccatatgaccgagtacaagcccacggtgcgcctcgccacccgcgacgacgtccccagggccgtacgcaccctcgccgccgcgttcgccgactaccccgccacgcgccacaccgtcgatccggaccgccacatcgagcgggtcaccgagctgcaagaactcttcctcacgcgcgtcgggctcgacatcggcaaggtgtgggtcgcggacgacggcgccgcggtggcggtctggaccacgccggagagcgtcgaagcgggggcggtgttcgccgagatcggcccgcgcatggccgagttgagcggttcccggctggccgcgcagcaacagatggaaggcctcctggcgccgcaccggcccaaggagcccgcgtggttcctggccaccgtcggcgtctcgcccgaccaccagggcaagggtctgggcagcgccgtcgtgctccccggagtggaggcggccgagcgcgccggggtgcccgccttcctggagacctccgcgccccgcaacctccccttctacgagcggctcggcttcaccgtcaccgccgacgtcgaggtgcccgaaggaccgcgcacctggtgcatgacccgcaagcccggtgcctga

SEQ ID NO: 35342 - DNA, 2307 bp, synthetic construct
  source 1..2307: mol_type = other DNA
atggccttaccagtgaccgccttgctcctgccgctggccttgctgctccacgccgccaggccggaagtgcagctggttgaatctggcggaggactggttcagcctggcggatctctgagactgtcttgtgccgcctctggcttcgccagcgactactatatcatcggctggttcagacaggcccctggcaaagagagagagggcgtcagctgtatcagcagcagatacgccaacaccaactacgccgacagcgtgaagggcagattcaccatcagccgggacaacgccaagaacaccgtgtacctccagatgaacagcctgaagcctgaggacaccgccgtgtactactgtgccgccgacaccagaagatacacctgtcctgacattgccaccatgcaccggaacttcgattcttggggccagggcacactggtcaccgtttcttctggtaccggcggaggcggatctggcggcggaggtagcggtggcggaggatctgaattcgacatccagatgacacagagccctagcagcctgtctgccagcgtgggagacagagtgaccatcacctgtagagccagccaggacgtgcggaacatcgtcgtgtggttccagcagaagcctggcaaggcccctaagctgctgatctacagcggcagctacagatacagcggcgtgcccagcagattttccggctctggctctggcaccgacttcaccctgacaatatccagcctccagcctgaggacttcgccacctactactgccagcagcactacagccctccatacacattcggccagggcaccaaggtggaaatcaagagactcgaggacctgaagaacgtgttcccacctgaggtggccgtgttcgagcctagcgaggccgagatcagccacacccagaaagccaccctcgtgtgcctggctaccggcttctaccccgaccatgtggaactgtcttggtgggtcaacggcaaagaggtgcacagcggcgtgtgtaccgacccccagccactgaaagaacagcccgccctgaacgacagccggtactgcctgagcagcagactgagagtgtccgccaccttctggcagaacccccggaaccacttcagatgccaggtgcagttctacggcctgagcgagaacgacgagtggacccaggacagagccaagcccgtgacccagatcgtgtctgccgaagcctggggcagagccgattgcgacgtgaagctggtggaaaagagcttcgagacagacaccaacctgaacttccagaacctgagcgtgatcggcttcagaatcctgctgctgaaagtggccggctttaacctgctgatgaccctgcggctgtggtccagcagggccaagcgatctggatctggagcaacaaacttctcactactcaaacaagcaggtgacgtggaggagaatcccgggcctactagtatggactggatttggcgcatccttttccttgtcggcgctgctaccggcgcgcattccttcgaagaagttcagctggtggaatctggccctggcctggtcaagcctagcgagacactgagcctgacctgtaccgtgtccggcttcagcctgaccagatttggcgtgcactgggtccgacagccacctggcaaaggactggaatggctgggagtgatttggagaggcggcagcaccgattacaacgccgccttcatgagccggctgaccatcagcaaggacaacagcaagaaccaggtgtccctgaagctgagcagcgtgacagccgctgataccgccgtgtactactgctccaaccactactacggcagctccgactacgccctggataattggggccagggaaccctggtcaccgtgtcatctacgcgtatccagaaccctgatcctgccgtgtaccagctgcgggatagcaagagcagcgacaagagcgtgtgtctgttcaccgacttcgacagccagaccaacgtgtcccagagcaaggactccgacgtgtacatcaccgataagtgcgtgctggacatgcggagcatggacttcaagagcaactccgccgtggcctggtccaacaagtccgatttcgcctgcgccaacgccttcaacaacagcattatccccgaggacacattcttcccaagccccgagagcagctgcggctttaccagcgagagctaccagcagggcgtgctgagcgccaccatcctgtacgagatcctgctgggcaaggccaccctgtacgccgtgctggtgtctgccctggtgctgatggctatggtcaagcggaaggacagccggggataa

SEQ ID NO: 35343 - DNA, 2307 bp, synthetic construct
  source 1..2307: mol_type = other DNA
atggccttaccagtgaccgccttgctcctgccgctggccttgctgctccacgccgccaggccggaagtgcagctggttgaatctggcggaggactggttcagcctggcggatctctgagactgagctgtgaagccagcggcttcgccagcgacgattacatcatcggctggttcagacaggcccctggcaaagagagagagggcgtcagctgcatcagctctaagtacgccaacaccgtgtacaccgacagcgtgaagggcagattcagactgagcagaggcaccgccaagaataccgtgtacctccagatgagcgccctgaagcctgaggataccgccgtgtactactgcgctatggacagccgcagagtgacatgccctgagatcagcaccatgcaccggaacttcgattcttggggccagggcacactggtcacagtgtcatctggtaccggcggaggcggatctggcggcggaggtagcggtggcggaggatctgaattcgacatccagatgacacagagccctagcagcctgtctgccagcgtgggagacagagtgaccatcacctgtagagccagccaggacgtgcggaacatcgtcgtgtggttccagcagaagcctggcaaggcccctaagctgctgatctacagcggcagctacagatacagcggcgtgcccagcagattttccggctctggctctggcaccgacttcaccctgacaatatccagcctccagcctgaggacttcgccacctactactgccagcagcactacagccctccatacacattcggccagggcaccaaggtggaaatcaagagactcgaggacctgaagaacgtgttcccacctgaggtggccgtgttcgagcctagcgaggccgagatcagccacacccagaaagccaccctcgtgtgcctggctaccggcttctaccccgaccatgtggaactgtcttggtgggtcaacggcaaagaggtgcacagcggcgtgtgtaccgacccccagccactgaaagaacagcccgccctgaacgacagccggtactgcctgagcagcagactgagagtgtccgccaccttctggcagaacccccggaaccacttcagatgccaggtgcagttctacggcctgagcgagaacgacgagtggacccaggacagagccaagcccgtgacccagatcgtgtctgccgaagcctggggcagagccgattgcgacgtgaagctggtggaaaagagcttcgagacagacaccaacctgaacttccagaacctgagcgtgatcggcttcagaatcctgctgctgaaagtggccggctttaacctgctgatgaccctgcggctgtggtccagcagggccaagcgatctggatctggagcaacaaacttctcactactcaaacaagcaggtgacgtggaggagaatcccgggcctactagtatggactggatttggcgcatccttttccttgtcggcgctgctaccggcgcgcattccttcgaagaagttcagctggtggaatctggccctggcctggtcaagcctagcgagacactgagcctgacctgtaccgtgtccggcttcagcctgaccagatttggcgtgcactgggtccgacagccacctggcaaaggactggaatggctgggagtgatttggagaggcggcagcaccgattacaacgccgccttcatgagccggctgaccatcagcaaggacaacagcaagaaccaggtgtccctgaagctgagcagcgtgacagccgctgataccgccgtgtactactgctccaaccactactacggcagctccgactacgccctggataattggggccagggaaccctggtcaccgtgtcatctacgcgtatccagaaccctgatcctgccgtgtaccagctgcgggatagcaagagcagcgacaagagcgtgtgtctgttcaccgacttcgacagccagaccaacgtgtcccagagcaaggactccgacgtgtacatcaccgataagtgcgtgctggacatgcggagcatggacttcaagagcaactccgccgtggcctggtccaacaagtccgatttcgcctgcgccaacgccttcaacaacagcattatccccgaggacacattcttcccaagccccgagagcagctgcggctttaccagcgagagctaccagcagggcgtgctgagcgccaccatcctgtacgagatcctgctgggcaaggccaccctgtacgccgtgctggtgtctgccctggtgctgatggctatggtcaagcggaaggacagccggggataa

SEQ ID NO: 35344 - DNA, 2304 bp, synthetic construct
  source 1..2304: mol_type = other DNA
atggccttaccagtgaccgccttgctcctgccgctggccttgctgctccacgccgccaggccggaagtgcagctggttgaatctggcggaggactggttcagcctggcggatctctgagactgtcttgtgccgcctctggcttcgccagcgactactatatcatcggctggttcagacaggcccctggcaaagagagagagggcgtcagctgtatcagcagcagatacgccaacaccaactacgccgacagcgtgaagggcagattcaccatcagccgggacaacgccaagaacaccgtgtacctccagatgaacagcctgaagcctgaggacaccgccgtgtactactgtgccgccgacaccagaagatacacctgtcctgacattgccaccatgcaccggaacttcgattcttggggccagggcacactggtcaccgtttcttctggtaccggcggaggcggatctggcggcggaggtagcggtggcggaggatctgaattcgacatccagatgacacagagccctagcagcctgtctgccagcgtgggagacagagtgaccatcacctgtagagccagccaggacgtgcggaacatcgtcgtgtggttccagcagaagcctggcaaggcccctaagctgctgatctacagcggcagctacagatacagcggcgtgcccagcagattttccggctctggctctggcaccgacttcaccctgacaatatccagcctccagcctgaggacttcgccacctactactgccagcagcactacagccctccatacacattcggccagggcaccaaggtggaaatcaagagactcgagatccagaaccctgatcctgccgtgtaccagctgcgggatagcaagagcagcgacaagagcgtgtgtctgttcaccgacttcgacagccagaccaacgtgtcccagagcaaggactccgacgtgtacatcaccgataagtgcgtgctggacatgcggagcatggacttcaagagcaactccgccgtggcctggtccaacaagtccgatttcgcctgcgccaacgccttcaacaacagcattatccccgaggacacattcttcccaagccccgagagcagctgcggctttaccagcgagagctaccagcagggcgtgctgagcgccaccatcctgtacgagatcctgctgggcaaggccaccctgtacgccgtgctggtgtctgccctggtgctgatggctatggtcaagcggaaggacagccggggaagggccaagcgatctggatctggagcaacaaacttctcactactcaaacaagcaggtgacgtggaggagaatcccgggcctactagtatggactggatttggcgcatccttttccttgtcggcgctgctaccggcgcgcattccttcgaagaagttcagctggtggaatctggccctggcctggtcaagcctagcgagacactgagcctgacctgtaccgtgtccggcttcagcctgaccagatttggcgtgcactgggtccgacagccacctggcaaaggactggaatggctgggagtgatttggagaggcggcagcaccgattacaacgccgccttcatgagccggctgaccatcagcaaggacaacagcaagaaccaggtgtccctgaagctgagcagcgtgacagccgctgataccgccgtgtactactgctccaaccactactacggcagctccgactacgccctggataattggggccagggaaccctggtcaccgtgtcatctacgcgtgacctgaagaacgtgttcccacctgaggtggccgtgttcgagcctagcgaggccgagatcagccacacccagaaagccaccctcgtgtgcctggctaccggcttctaccccgaccatgtggaactgtcttggtgggtcaacggcaaagaggtgcacagcggcgtgtgtaccgacccccagccactgaaagaacagcccgccctgaacgacagccggtactgcctgagcagcagactgagagtgtccgccaccttctggcagaacccccggaaccacttcagatgccaggtgcagttctacggcctgagcgagaacgacgagtggacccaggacagagccaagcccgtgacccagatcgtgtctgccgaagcctggggcagagccgattgcgacgtgaagctggtggaaaagagcttcgagacagacaccaacctgaacttccagaacctgagcgtgatcggcttcagaatcctgctgctgaaagtggccggctttaacctgctgatgaccctgcggctgtggtccagc

SEQ ID NO: 35345 - DNA, 2304 bp, synthetic construct
  source 1..2304: mol_type = other DNA
atggccttaccagtgaccgccttgctcctgccgctggccttgctgctccacgccgccaggccggaagtgcagctggttgaatctggcggaggactggttcagcctggcggatctctgagactgagctgtgaagccagcggcttcgccagcgacgattacatcatcggctggttcagacaggcccctggcaaagagagagagggcgtcagctgcatcagctctaagtacgccaacaccgtgtacaccgacagcgtgaagggcagattcagactgagcagaggcaccgccaagaataccgtgtacctccagatgagcgccctgaagcctgaggataccgccgtgtactactgcgctatggacagccgcagagtgacatgccctgagatcagcaccatgcaccggaacttcgattcttggggccagggcacactggtcacagtgtcatctggtaccggcggaggcggatctggcggcggaggtagcggtggcggaggatctgaattcgacatccagatgacacagagccctagcagcctgtctgccagcgtgggagacagagtgaccatcacctgtagagccagccaggacgtgcggaacatcgtcgtgtggttccagcagaagcctggcaaggcccctaagctgctgatctacagcggcagctacagatacagcggcgtgcccagcagattttccggctctggctctggcaccgacttcaccctgacaatatccagcctccagcctgaggacttcgccacctactactgccagcagcactacagccctccatacacattcggccagggcaccaaggtggaaatcaagagactcgagatccagaaccctgatcctgccgtgtaccagctgcgggatagcaagagcagcgacaagagcgtgtgtctgttcaccgacttcgacagccagaccaacgtgtcccagagcaaggactccgacgtgtacatcaccgataagtgcgtgctggacatgcggagcatggacttcaagagcaactccgccgtggcctggtccaacaagtccgatttcgcctgcgccaacgccttcaacaacagcattatccccgaggacacattcttcccaagccccgagagcagctgcggctttaccagcgagagctaccagcagggcgtgctgagcgccaccatcctgtacgagatcctgctgggcaaggccaccctgtacgccgtgctggtgtctgccctggtgctgatggctatggtcaagcggaaggacagccggggaagggccaagcgatctggatctggagcaacaaacttctcactactcaaacaagcaggtgacgtggaggagaatcccgggcctactagtatggactggatttggcgcatccttttccttgtcggcgctgctaccggcgcgcattccttcgaagaagttcagctggtggaatctggccctggcctggtcaagcctagcgagacactgagcctgacctgtaccgtgtccggcttcagcctgaccagatttggcgtgcactgggtccgacagccacctggcaaaggactggaatggctgggagtgatttggagaggcggcagcaccgattacaacgccgccttcatgagccggctgaccatcagcaaggacaacagcaagaaccaggtgtccctgaagctgagcagcgtgacagccgctgataccgccgtgtactactgctccaaccactactacggcagctccgactacgccctggataattggggccagggaaccctggtcaccgtgtcatctacgcgtgacctgaagaacgtgttcccacctgaggtggccgtgttcgagcctagcgaggccgagatcagccacacccagaaagccaccctcgtgtgcctggctaccggcttctaccccgaccatgtggaactgtcttggtgggtcaacggcaaagaggtgcacagcggcgtgtgtaccgacccccagccactgaaagaacagcccgccctgaacgacagccggtactgcctgagcagcagactgagagtgtccgccaccttctggcagaacccccggaaccacttcagatgccaggtgcagttctacggcctgagcgagaacgacgagtggacccaggacagagccaagcccgtgacccagatcgtgtctgccgaagcctggggcagagccgattgcgacgtgaagctggtggaaaagagcttcgagacagacaccaacctgaacttccagaacctgagcgtgatcggcttcagaatcctgctgctgaaagtggccggctttaacctgctgatgaccctgcggctgtggtccagc

SEQ ID NO: 35346 - DNA, 2277 bp, synthetic construct
  source 1..2277: mol_type = other DNA
atggccttaccagtgaccgccttgctcctgccgctggccttgctgctccacgccgccaggccgcaagtcaaactggaagaaagcggtggcggcctggtgcaacctggcgaatctctgagactgagctgtagcgccagcggctccatcttcaaggtgttcagagtgttcgccatgagctggtacaggcaaggccctggcaagcagagagagctggtcgcctctatcagcagcggcgagacaaccacatacgccgaatctgtgaaaggccggttcaccatcagccgggataatgccaagaataccgcctatctccagatggactccctgaagcctgaagatacagctgtgtactactgcaacgccgaccataccttcaccggcgatttttggggccagggaacccaagtgaccgtgtctagtggtaccggcggaggcggatctggcggcggaggtagcggtggcggaggatctgaattcgacatccagatgacacagagccctagcagcctgtctgccagcgtgggagacagagtgaccatcacctgtagagccagccaggacgtgcggaacatcgtcgtgtggttccagcagaagcctggcaaggcccctaagctgctgatctacagcggcagctacagatacagcggcgtgcccagcagattttccggctctggctctggcaccgacttcaccctgacaatatccagcctccagcctgaggacttcgccacctactactgccagcagcactacagccctccatacacattcggccagggcaccaaggtggaaatcaagagactcgagatccagaaccctgatcctgccgtgtaccagctgcgggatagcaagagcagcgacaagagcgtgtgtctgttcaccgacttcgacagccagaccaacgtgtcccagagcaaggactccgacgtgtacatcaccgataagtgcgtgctggacatgcggagcatggacttcaagagcaactccgccgtggcctggtccaacaagtccgatttcgcctgcgccaacgccttcaacaacagcattatccccgaggacacattcttcccaagccccgagagcagctgcggctttaccagcgagagctaccagcagggcgtgctgagcgccaccatcctgtacgagatcctgctgggcaaggccaccctgtacgccgtgctggtgtctgccctggtgctgatggctatggtcaagcggaaggacagccggggaagggccaagcgatctggatctggagcaacaaacttctcactactcaaacaagcaggtgacgtggaggagaatcccgggcctactagtatggactggatttggcgcatccttttccttgtcggcgctgctaccggcgcgcattccttcgaagaagttcagctggtggaatctggccctggcctggtcaagcctagcgagacactgagcctgacctgtaccgtgtccggcttcagcctgaccagatttggcgtgcactgggtccgacagccacctggcaaaggactggaatggctgggagtgatttggagaggcggcagcaccgattacaacgccgccttcatgagccggctgaccatcagcaaggacaacagcaagaaccaggtgtccctgaagctgagcagcgtgacagccgctgataccgccgtgtactactgctccaaccactactacggcagctccgactacgccctggataattggggccagggaaccctggtcaccgtgtcatctacgcgtgacctgaagaacgtgttcccacctgaggtggccgtgttcgagcctagcgaggccgagatcagccacacccagaaagccaccctcgtgtgcctggctaccggcttctaccccgaccatgtggaactgtcttggtgggtcaacggcaaagaggtgcacagcggcgtgtgtaccgacccccagccactgaaagaacagcccgccctgaacgacagccggtactgcctgagcagcagactgagagtgtccgccaccttctggcagaacccccggaaccacttcagatgccaggtgcagttctacggcctgagcgagaacgacgagtggacccaggacagagccaagcccgtgacccagatcgtgtctgccgaagcctggggcagagccgattgcgacgtgaagctggtggaaaagagcttcgagacagacaccaacctgaacttccagaacctgagcgtgatcggcttcagaatcctgctgctgaaagtggccggctttaacctgctgatgaccctgcggctgtggtccagc

SEQ ID NO: 35347 - DNA, 2283 bp, synthetic construct
  source 1..2283: mol_type = other DNA
atggccttaccagtgaccgccttgctcctgccgctggccttgctgctccacgccgccaggccggacatccagatgacacagagccctagcagcctgtctgccagcgtgggagacagagtgaccatcacctgtagagccagccaggacgtgcggaacatcgtcgtgtggttccagcagaagcctggcaaggcccctaagctgctgatctacagcggcagctacagatacagcggcgtgcccagcagattttccggctctggctctggcaccgacttcaccctgacaatatccagcctccagcctgaggacttcgccacctactactgccagcagcactacagccctccatacacattcggccagggcaccaaggtggaaatcaagagactcgaggacctgaagaacgtgttcccacctgaggtggccgtgttcgagcctagcgaggccgagatcagccacacccagaaagccaccctcgtgtgcctggctaccggcttctaccccgaccatgtggaactgtcttggtgggtcaacggcaaagaggtgcacagcggcgtgtgtaccgacccccagccactgaaagaacagcccgccctgaacgacagccggtactgcctgagcagcagactgagagtgtccgccaccttctggcagaacccccggaaccacttcagatgccaggtgcagttctacggcctgagcgagaacgacgagtggacccaggacagagccaagcccgtgacccagatcgtgtctgccgaagcctggggcagagccgattgcgacgtgaagctggtggaaaagagcttcgagacagacaccaacctgaacttccagaacctgagcgtgatcggcttcagaatcctgctgctgaaagtggccggctttaacctgctgatgaccctgcggctgtggtccagcagggccaagcgatctggatctggagcaacaaacttctcactactcaaacaagcaggtgacgtggaggagaatcccgggcctactagtgccaccatggactggatttggcgcatccttttccttgtcggcgctgctaccggcgcccattccgggcccgaagtgcagctggttgaatctggcggaggactggttcaggctggcggatctctgagactgtcttgtgccgccagcggcagaacctttagcatgggctggtttagacaggcccctggcaaagagagagagttcgtcgccgccatcacatactctggcggcagcccttactacgccgactctgtgaagggcagattcaccatcagccgggacaacgccaagaacaccgtgtacctccagatgaacagcctgaagcctgaggacaccgccgtgtactactgcgccgccaatccaacatacggcagcgactggaacgccgagaattggggccagggaacccaagtgacagtgtctagcggatccggcggcggaggatctggcggaggcggatctgggggcggaggctctttcgaagaagttcagctggtggaatctggccctggcctggtcaagcctagcgagacactgagcctgacctgtaccgtgtccggcttcagcctgaccagatttggcgtgcactgggtccgacagccacctggcaaaggactggaatggctgggagtgatttggagaggcggcagcaccgattacaacgccgccttcatgagccggctgaccatcagcaaggacaacagcaagaaccaggtgtccctgaagctgagcagcgtgacagccgctgataccgccgtgtactactgctccaaccactactacggcagctccgactacgccctggataattggggccagggaaccctggtcaccgtgtcatctacgcgtatccagaaccctgatcctgccgtgtaccagctgcgggatagcaagagcagcgacaagagcgtgtgtctgttcaccgacttcgacagccagaccaacgtgtcccagagcaaggactccgacgtgtacatcaccgataagtgcgtgctggacatgcggagcatggacttcaagagcaactccgccgtggcctggtccaacaagtccgatttcgcctgcgccaacgccttcaacaacagcattatccccgaggacacattcttcccaagccccgagagcagctgcggctttaccagcgagagctaccagcagggcgtgctgagcgccaccatcctgtacgagatcctgctgggcaaggccaccctgtacgccgtgctggtgtctgccctggtgctgatggctatggtcaagcggaaggacagccggggataa

SEQ ID NO: 35348 - DNA, 2286 bp, synthetic construct
  source 1..2286: mol_type = other DNA
atggccttaccagtgaccgccttgctcctgccgctggccttgctgctccacgccgccaggccggacatccagatgacacagagccctagcagcctgtctgccagcgtgggagacagagtgaccatcacctgtagagccagccaggacgtgcggaacatcgtcgtgtggttccagcagaagcctggcaaggcccctaagctgctgatctacagcggcagctacagatacagcggcgtgcccagcagattttccggctctggctctggcaccgacttcaccctgacaatatccagcctccagcctgaggacttcgccacctactactgccagcagcactacagccctccatacacattcggccagggcaccaaggtggaaatcaagagactcgaggacctgaagaacgtgttcccacctgaggtggccgtgttcgagcctagcgaggccgagatcagccacacccagaaagccaccctcgtgtgcctggctaccggcttctaccccgaccatgtggaactgtcttggtgggtcaacggcaaagaggtgcacagcggcgtgtgtaccgacccccagccactgaaagaacagcccgccctgaacgacagccggtactgcctgagcagcagactgagagtgtccgccaccttctggcagaacccccggaaccacttcagatgccaggtgcagttctacggcctgagcgagaacgacgagtggacccaggacagagccaagcccgtgacccagatcgtgtctgccgaagcctggggcagagccgattgcgacgtgaagctggtggaaaagagcttcgagacagacaccaacctgaacttccagaacctgagcgtgatcggcttcagaatcctgctgctgaaagtggccggctttaacctgctgatgaccctgcggctgtggtccagcagggccaagcgatctggatctggagcaacaaacttctcactactcaaacaagcaggtgacgtggaggagaatcccgggcctactagtgccaccatggactggatttggcgcatccttttccttgtcggcgctgctaccggcgcccattccgggcccgaagtgcaactggtggaatctgggggcggactggtgcagccaggcggaagtctgaggctgtcttgtgccgcctccggcagcatcttcggcttcaacgacatggcctggtatcggcaggctcccggaaaacagcgcgagctggtggctctgattagcagagtgggcgtgaccagcagcgccgactctgtgaagggcagattcacaatctccagagtgaacgccaaggatacagtgtacctccagatgaactctctgaaacctgaggatacagcagtgtactattgctacatggaccagcggctggacggcagcacactggcctactggggacagggaactcaagtgacagtgtctagcggatccggcggcggaggatctggcggaggcggatctgggggcggaggctctttcgaagaagttcagctggtggaatctggccctggcctggtcaagcctagcgagacactgagcctgacctgtaccgtgtccggcttcagcctgaccagatttggcgtgcactgggtccgacagccacctggcaaaggactggaatggctgggagtgatttggagaggcggcagcaccgattacaacgccgccttcatgagccggctgaccatcagcaaggacaacagcaagaaccaggtgtccctgaagctgagcagcgtgacagccgctgataccgccgtgtactactgctccaaccactactacggcagctccgactacgccctggataattggggccagggaaccctggtcaccgtgtcatctacgcgtatccagaaccctgatcctgccgtgtaccagctgcgggatagcaagagcagcgacaagagcgtgtgtctgttcaccgacttcgacagccagaccaacgtgtcccagagcaaggactccgacgtgtacatcaccgataagtgcgtgctggacatgcggagcatggacttcaagagcaactccgccgtggcctggtccaacaagtccgatttcgcctgcgccaacgccttcaacaacagcattatccccgaggacacattcttcccaagccccgagagcagctgcggctttaccagcgagagctaccagcagggcgtgctgagcgccaccatcctgtacgagatcctgctgggcaaggccaccctgtacgccgtgctggtgtctgccctggtgctgatggctatggtcaagcggaaggacagccggggataa

SEQ ID NO: 35349 - DNA, 2274 bp, synthetic construct
  source 1..2274: mol_type = other DNA
atggccttaccagtgaccgccttgctcctgccgctggccttgctgctccacgccgccaggccggacatccagatgacacagagccctagcagcctgtctgccagcgtgggagacagagtgaccatcacctgtagagccagccaggacgtgcggaacatcgtcgtgtggttccagcagaagcctggcaaggcccctaagctgctgatctacagcggcagctacagatacagcggcgtgcccagcagattttccggctctggctctggcaccgacttcaccctgacaatatccagcctccagcctgaggacttcgccacctactactgccagcagcactacagccctccatacacattcggccagggcaccaaggtggaaatcaagagactcgaggacctgaagaacgtgttcccacctgaggtggccgtgttcgagcctagcgaggccgagatcagccacacccagaaagccaccctcgtgtgcctggctaccggcttctaccccgaccatgtggaactgtcttggtgggtcaacggcaaagaggtgcacagcggcgtgtgtaccgacccccagccactgaaagaacagcccgccctgaacgacagccggtactgcctgagcagcagactgagagtgtccgccaccttctggcagaacccccggaaccacttcagatgccaggtgcagttctacggcctgagcgagaacgacgagtggacccaggacagagccaagcccgtgacccagatcgtgtctgccgaagcctggggcagagccgattgcgacgtgaagctggtggaaaagagcttcgagacagacaccaacctgaacttccagaacctgagcgtgatcggcttcagaatcctgctgctgaaagtggccggctttaacctgctgatgaccctgcggctgtggtccagcagggccaagcgatctggatctggagcaacaaacttctcactactcaaacaagcaggtgacgtggaggagaatcccgggcctactagtgccaccatggactggatttggcgcatccttttccttgtcggcgctgctaccggcgcccattccgggcccgaggtgcagctggttgaatctggcggaggactggttcaggctggcggatctctgagactgtcttgtgccgccagcggctctgtgttcagcggcaatgtgatgggctggtacagacaggcccctggcaaagaaagagagtgggttgccgccattgccagcggcggcagcatctactacagagactctgtgaagggcagattcaccatcagccgggacaacgccaagaacaccgtgtacctccagatgaacagcctgaagcctgaggacaccgccgtgtactactgcaactctcaccctcctacactgccctattggggcctgggaacccaagtgacagtgtcctctggatccggcggcggaggatctggcggaggcggatctgggggcggaggctctttcgaagaagttcagctggtggaatctggccctggcctggtcaagcctagcgagacactgagcctgacctgtaccgtgtccggcttcagcctgaccagatttggcgtgcactgggtccgacagccacctggcaaaggactggaatggctgggagtgatttggagaggcggcagcaccgattacaacgccgccttcatgagccggctgaccatcagcaaggacaacagcaagaaccaggtgtccctgaagctgagcagcgtgacagccgctgataccgccgtgtactactgctccaaccactactacggcagctccgactacgccctggataattggggccagggaaccctggtcaccgtgtcatctacgcgtatccagaaccctgatcctgccgtgtaccagctgcgggatagcaagagcagcgacaagagcgtgtgtctgttcaccgacttcgacagccagaccaacgtgtcccagagcaaggactccgacgtgtacatcaccgataagtgcgtgctggacatgcggagcatggacttcaagagcaactccgccgtggcctggtccaacaagtccgatttcgcctgcgccaacgccttcaacaacagcattatccccgaggacacattcttcccaagccccgagagcagctgcggctttaccagcgagagctaccagcagggcgtgctgagcgccaccatcctgtacgagatcctgctgggcaaggccaccctgtacgccgtgctggtgtctgccctggtgctgatggctatggtcaagcggaaggacagccggggataa

SEQ ID NO: 35350 - DNA, 2268 bp, synthetic construct
  source 1..2268: mol_type = other DNA
atggccttaccagtgaccgccttgctcctgccgctggccttgctgctccacgccgccaggccggacatccagatgacacagagccctagcagcctgtctgccagcgtgggagacagagtgaccatcacctgtagagccagccaggacgtgcggaacatcgtcgtgtggttccagcagaagcctggcaaggcccctaagctgctgatctacagcggcagctacagatacagcggcgtgcccagcagattttccggctctggctctggcaccgacttcaccctgacaatatccagcctccagcctgaggacttcgccacctactactgccagcagcactacagccctccatacacattcggccagggcaccaaggtggaaatcaagagactcgaggacctgaagaacgtgttcccacctgaggtggccgtgttcgagcctagcgaggccgagatcagccacacccagaaagccaccctcgtgtgcctggctaccggcttctaccccgaccatgtggaactgtcttggtgggtcaacggcaaagaggtgcacagcggcgtgtgtaccgacccccagccactgaaagaacagcccgccctgaacgacagccggtactgcctgagcagcagactgagagtgtccgccaccttctggcagaacccccggaaccacttcagatgccaggtgcagttctacggcctgagcgagaacgacgagtggacccaggacagagccaagcccgtgacccagatcgtgtctgccgaagcctggggcagagccgattgcgacgtgaagctggtggaaaagagcttcgagacagacaccaacctgaacttccagaacctgagcgtgatcggcttcagaatcctgctgctgaaagtggccggctttaacctgctgatgaccctgcggctgtggtccagcagggccaagcgatctggatctggagcaacaaacttctcactactcaaacaagcaggtgacgtggaggagaatcccgggcctactagtgccaccatggactggatttggcgcatccttttccttgtcggcgctgctaccggcgcccattccgggcccgaagttcagctgctggaatctggcggaggactcgttcaacctggcggctctctgagactgagctgtgccgcttctggcttcagcttctctagctacgccctgagctgggttcgacaagctcccggaaagggccttgaatgggtgtccagcatcggcgagaatgacggcaccacagactatgccgatgccgtgaaaggccggtttaccatcagcagagacaattccaagaacacgctctatctgcaaatgaactccctgcgcgtggaagatacagccgtgtattattgcgtgaaggacggcatccactggggacagggaaccctggttacagtgtctagcggatccggcggcggaggatctggcggaggcggatctgggggcggaggctctttcgaagaagttcagctggtggaatctggccctggcctggtcaagcctagcgagacactgagcctgacctgtaccgtgtccggcttcagcctgaccagatttggcgtgcactgggtccgacagccacctggcaaaggactggaatggctgggagtgatttggagaggcggcagcaccgattacaacgccgccttcatgagccggctgaccatcagcaaggacaacagcaagaaccaggtgtccctgaagctgagcagcgtgacagccgctgataccgccgtgtactactgctccaaccactactacggcagctccgactacgccctggataattggggccagggaaccctggtcaccgtgtcatctacgcgtatccagaaccctgatcctgccgtgtaccagctgcgggatagcaagagcagcgacaagagcgtgtgtctgttcaccgacttcgacagccagaccaacgtgtcccagagcaaggactccgacgtgtacatcaccgataagtgcgtgctggacatgcggagcatggacttcaagagcaactccgccgtggcctggtccaacaagtccgatttcgcctgcgccaacgccttcaacaacagcattatccccgaggacacattcttcccaagccccgagagcagctgcggctttaccagcgagagctaccagcagggcgtgctgagcgccaccatcctgtacgagatcctgctgggcaaggccaccctgtacgccgtgctggtgtctgccctggtgctgatggctatggtcaagcggaaggacagccggggataa

SEQ ID NO: 35351 - DNA, 3375 bp, synthetic construct
  source 1..3375: mol_type = other DNA
atgggacccagactgctgttttgggctctgctgtgtctgctcggcacaggacctgttgaagctggcgtgacacagagccccacacacctgattaagaccagaggccagcaggccacactgagatgcagccctatcagcggccacaccagcgtgtactggtatcagcaggctctcggactgggcctccagttcctgctttggtacgacgagggcgaagagagaaaccggggcaacttccctcctcggttttccggcagacagttccccaactacagcagcgagctgaacgtgaacgccctggaactggaagatagcgccctgtacctgtgtgcctcttctcttggtggacctcgcggactggctggactgagaggggatgagcagtttttcggccctggcaccagactgaccgtgctggaaggtaccggcggaggcggatctggcggcggagaattcgacatccagatgacacagagccctagcagcctgtctgccagcgtgggagacagagtgaccatcacctgtagagccagccaggacgtgcggaacatcgtcgtgtggttccagcagaagcctggcaaggcccctaagctgctgatctacagcggcagctacagatacagcggcgtgcccagcagattttccggctctggctctggcaccgacttcaccctgacaatatccagcctccagcctgaggacttcgccacctactactgccagcagcactacagccctccatacacattcggccagggcaccaaggtggaaatcaagagactcgaggacctgaagaacgtgttcccacctgaggtggccgtgttcgagcctagcgaggccgagatcagccacacccagaaagccaccctcgtgtgcctggctaccggcttctaccccgaccatgtggaactgtcttggtgggtcaacggcaaagaggtgcacagcggcgtgtgtaccgacccccagccactgaaagaacagcccgccctgaacgacagccggtactgcctgagcagcagactgagagtgtccgccaccttctggcagaacccccggaaccacttcagatgccaggtgcagttctacggcctgagcgagaacgacgagtggacccaggacagagccaagcccgtgacccagatcgtgtctgccgaagcctggggcagagccgattgcgacgtgaagctggtggaaaagagcttcgagacagacaccaacctgaacttccagaacctgagcgtgatcggcttcagaatcctgctgctgaaagtggccggctttaacctgctgatgaccctgcggctgtggtccagcagggccaagcgatctggatctggagcaacaaacttctcactactcaaacaagcaggtgacgtggaggagaatcccgggcctactagtgccaccatggactggatttggcgcatccttttccttgtcggcgctgctaccggcgcccattccgggcccgaagtgcagctggttgaatctggcggaggactggttcaggctggcggatctctgagactgtcttgtgccgccagcggcagaacctttagcatgggctggtttagacaggcccctggcaaagagagagagttcgtcgccgccatcacatactctggcggcagcccttactacgccgactctgtgaagggcagattcaccatcagccgggacaacgccaagaacaccgtgtacctccagatgaacagcctgaagcctgaggacaccgccgtgtactactgcgccgccaatccaacatacggcagcgactggaacgccgagaattggggccagggaacccaagtgacagtgtctagcggatccggcggcggaggatctggcggaggcggatctgggggcggaggctctttcgaagaagttcagctggtggaatctggccctggcctggtcaagcctagcgagacactgagcctgacctgtaccgtgtccggcttcagcctgaccagatttggcgtgcactgggtccgacagccacctggcaaaggactggaatggctgggagtgatttggagaggcggcagcaccgattacaacgccgccttcatgagccggctgaccatcagcaaggacaacagcaagaaccaggtgtccctgaagctgagcagcgtgacagccgctgataccgccgtgtactactgctccaaccactactacggcagctccgactacgccctggataattggggccagggaaccctggtcaccgtgtcatctacgcgtatccagaaccctgatcctgccgtgtaccagctgcgggatagcaagagcagcgacaagagcgtgtgtctgttcaccgacttcgacagccagaccaacgtgtcccagagcaaggactccgacgtgtacatcaccgataagtgcgtgctggacatgcggagcatggacttcaagagcaactccgccgtggcctggtccaacaagtccgatttcgcctgcgccaacgccttcaacaacagcattatccccgaggacacattcttcccaagccccgagagcagctgcggctttaccagcgagagctaccagcagggcgtgctgagcgccaccatcctgtacgagatcctgctgggcaaggccaccctgtacgccgtgctggtgtctgccctggtgctgatggctatggtcaagcggaaggacagccggggacgcgccaagagaagcggatctggcgtgaagcagaccctgaatttcgacctgctgaagctggctggcgacgtggaatccaacccaggcccttctagaggccatatgaccgagtacaagcccacggtgcgcctcgccacccgcgacgacgtccccagggccgtacgcaccctcgccgccgcgttcgccgactaccccgccacgcgccacaccgtcgatccggaccgccacatcgagcgggtcaccgagctgcaagaactcttcctcacgcgcgtcgggctcgacatcggcaaggtgtgggtcgcggacgacggcgccgcggtggcggtctggaccacgccggagagcgtcgaagcgggggcggtgttcgccgagatcggcccgcgcatggccgagttgagcggttcccggctggccgcgcagcaacagatggaaggcctcctggcgccgcaccggcccaaggagcccgcgtggttcctggccaccgtcggcgtctcgcccgaccaccagggcaagggtctgggcagcgccgtcgtgctccccggagtggaggcggccgagcgcgccggggtgcccgccttcctggagacctccgcgccccgcaacctccccttctacgagcggctcggcttcaccgtcaccgccgacgtcgaggtgcccgaaggaccgcgcacctggtgcatgacccgcaagcccggtgcctga

SEQ ID NO: 35352 - DNA, 3372 bp, synthetic construct
  source 1..3372: mol_type = other DNA
atgggacccagactgctgttttgggctctgctgtgtctgctcggcacaggacctgttgaagctggcgtgacacagagccccacacacctgattaagaccagaggccagcaggccacactgagatgcagccctatcagcggccacaccagcgtgtactggtatcagcaggctctcggactgggcctccagttcctgctttggtacgacgagggcgaagagagaaaccggggcaacttccctcctcggttttccggcagacagttccccaactacagcagcgagctgaacgtgaacgccctggaactggaagatagcgccctgtacctgtgtgccagctctctcggcggagatgaactgggagccgatggcaacgagcagttctttggccctggcaccagactgaccgtgctggaaggtaccggcggaggcggatctggcggcggaagcgaattcgacatccagatgacacagagccctagcagcctgtctgccagcgtgggagacagagtgaccatcacctgtagagccagccaggacgtgcggaacatcgtcgtgtggttccagcagaagcctggcaaggcccctaagctgctgatctacagcggcagctacagatacagcggcgtgcccagcagattttccggctctggctctggcaccgacttcaccctgacaatatccagcctccagcctgaggacttcgccacctactactgccagcagcactacagccctccatacacattcggccagggcaccaaggtggaaatcaagagactcgaggacctgaagaacgtgttcccacctgaggtggccgtgttcgagcctagcgaggccgagatcagccacacccagaaagccaccctcgtgtgcctggctaccggcttctaccccgaccatgtggaactgtcttggtgggtcaacggcaaagaggtgcacagcggcgtgtgtaccgacccccagccactgaaagaacagcccgccctgaacgacagccggtactgcctgagcagcagactgagagtgtccgccaccttctggcagaacccccggaaccacttcagatgccaggtgcagttctacggcctgagcgagaacgacgagtggacccaggacagagccaagcccgtgacccagatcgtgtctgccgaagcctggggcagagccgattgcgacgtgaagctggtggaaaagagcttcgagacagacaccaacctgaacttccagaacctgagcgtgatcggcttcagaatcctgctgctgaaagtggccggctttaacctgctgatgaccctgcggctgtggtccagcagggccaagcgatctggatctggagcaacaaacttctcactactcaaacaagcaggtgacgtggaggagaatcccgggcctactagtgccaccatggactggatttggcgcatccttttccttgtcggcgctgctaccggcgcccattccgggcccgaagtgcagctggttgaatctggcggaggactggttcaggctggcggatctctgagactgtcttgtgccgccagcggcagaacctttagcatgggctggtttagacaggcccctggcaaagagagagagttcgtcgccgccatcacatactctggcggcagcccttactacgccgactctgtgaagggcagattcaccatcagccgggacaacgccaagaacaccgtgtacctccagatgaacagcctgaagcctgaggacaccgccgtgtactactgcgccgccaatccaacatacggcagcgactggaacgccgagaattggggccagggaacccaagtgacagtgtctagcggatccggcggcggaggatctggcggaggcggatctgggggcggaggctctttcgaagaagttcagctggtggaatctggccctggcctggtcaagcctagcgagacactgagcctgacctgtaccgtgtccggcttcagcctgaccagatttggcgtgcactgggtccgacagccacctggcaaaggactggaatggctgggagtgatttggagaggcggcagcaccgattacaacgccgccttcatgagccggctgaccatcagcaaggacaacagcaagaaccaggtgtccctgaagctgagcagcgtgacagccgctgataccgccgtgtactactgctccaaccactactacggcagctccgactacgccctggataattggggccagggaaccctggtcaccgtgtcatctacgcgtatccagaaccctgatcctgccgtgtaccagctgcgggatagcaagagcagcgacaagagcgtgtgtctgttcaccgacttcgacagccagaccaacgtgtcccagagcaaggactccgacgtgtacatcaccgataagtgcgtgctggacatgcggagcatggacttcaagagcaactccgccgtggcctggtccaacaagtccgatttcgcctgcgccaacgccttcaacaacagcattatccccgaggacacattcttcccaagccccgagagcagctgcggctttaccagcgagagctaccagcagggcgtgctgagcgccaccatcctgtacgagatcctgctgggcaaggccaccctgtacgccgtgctggtgtctgccctggtgctgatggctatggtcaagcggaaggacagccggggacgcgccaagagaagcggatctggcgtgaagcagaccctgaatttcgacctgctgaagctggctggcgacgtggaatccaacccaggcccttctagaggccatatgaccgagtacaagcccacggtgcgcctcgccacccgcgacgacgtccccagggccgtacgcaccctcgccgccgcgttcgccgactaccccgccacgcgccacaccgtcgatccggaccgccacatcgagcgggtcaccgagctgcaagaactcttcctcacgcgcgtcgggctcgacatcggcaaggtgtgggtcgcggacgacggcgccgcggtggcggtctggaccacgccggagagcgtcgaagcgggggcggtgttcgccgagatcggcccgcgcatggccgagttgagcggttcccggctggccgcgcagcaacagatggaaggcctcctggcgccgcaccggcccaaggagcccgcgtggttcctggccaccgtcggcgtctcgcccgaccaccagggcaagggtctgggcagcgccgtcgtgctccccggagtggaggcggccgagcgcgccggggtgcccgccttcctggagacctccgcgccccgcaacctccccttctacgagcggctcggcttcaccgtcaccgccgacgtcgaggtgcccgaaggaccgcgcacctggtgcatgacccgcaagcccggtgcctga

SEQ ID NO: 35353 - DNA, 2847 bp, synthetic construct
  source 1..2847: mol_type = other DNA
atggccttaccagtgaccgccttgctcctgccgctggccttgctgctccacgccgccaggccggacatccagatgacacagagccctagcagcctgtctgccagcgtgggagacagagtgaccatcacctgtagagccagccaggacgtgcggaacatcgtcgtgtggttccagcagaagcctggcaaggcccctaagctgctgatctacagcggcagctacagatacagcggcgtgcccagcagattttccggctctggctctggcaccgacttcaccctgacaatatccagcctccagcctgaggacttcgccacctactactgccagcagcactacagccctccatacacattcggccagggcaccaaggtggaaatcaagagactcgaggacctgaagaacgtgttcccacctgaggtggccgtgttcgagcctagcgaggccgagatcagccacacccagaaagccaccctcgtgtgcctggctaccggcttctaccccgaccatgtggaactgtcttggtgggtcaacggcaaagaggtgcacagcggcgtgtgtaccgacccccagccactgaaagaacagcccgccctgaacgacagccggtactgcctgagcagcagactgagagtgtccgccaccttctggcagaacccccggaaccacttcagatgccaggtgcagttctacggcctgagcgagaacgacgagtggacccaggacagagccaagcccgtgacccagatcgtgtctgccgaagcctggggcagagccgattgcgacgtgaagctggtggaaaagagcttcgagacagacaccaacctgaacttccagaacctgagcgtgatcggcttcagaatcctgctgctgaaagtggccggctttaacctgctgatgaccctgcggctgtggtccagcagggccaagcgatctggatctggagcaacaaacttctcactactcaaacaagcaggtgacgtggaggagaatcccgggcctactagtgccaccatggactggatttggcgcatccttttccttgtcggcgctgctaccggcgcccattccgggcccatgggaagctggcttgagttctaccacagactcaacgccattgacagcaggctgtgggcacttggcggaagcgaagctgaactcgccgcttttgaaaaagaaattgccgctttcgagtccgagcttcaggcttacaaaggcaaagggaatcctgaggtcgagagcctgagagatcacgctgcccacattagagagtggttgcaggcataccggcacaatggatccggcggcggaggatctggcggaggcggatctgggggcggaggctctttcgaagaagttcagctggtggaatctggccctggcctggtcaagcctagcgagacactgagcctgacctgtaccgtgtccggcttcagcctgaccagatttggcgtgcactgggtccgacagccacctggcaaaggactggaatggctgggagtgatttggagaggcggcagcaccgattacaacgccgccttcatgagccggctgaccatcagcaaggacaacagcaagaaccaggtgtccctgaagctgagcagcgtgacagccgctgataccgccgtgtactactgctccaaccactactacggcagctccgactacgccctggataattggggccagggaaccctggtcaccgtgtcatctacgcgtatccagaaccctgatcctgccgtgtaccagctgcgggatagcaagagcagcgacaagagcgtgtgtctgttcaccgacttcgacagccagaccaacgtgtcccagagcaaggactccgacgtgtacatcaccgataagtgcgtgctggacatgcggagcatggacttcaagagcaactccgccgtggcctggtccaacaagtccgatttcgcctgcgccaacgccttcaacaacagcattatccccgaggacacattcttcccaagccccgagagcagctgcggctttaccagcgagagctaccagcagggcgtgctgagcgccaccatcctgtacgagatcctgctgggcaaggccaccctgtacgccgtgctggtgtctgccctggtgctgatggctatggtcaagcggaaggacagccggggacgcgccaagagaagcggatctggcgtgaagcagaccctgaatttcgacctgctgaagctggctggcgacgtggaatccaacccaggcccttctagaggccatatgaccgagtacaagcccacggtgcgcctcgccacccgcgacgacgtccccagggccgtacgcaccctcgccgccgcgttcgccgactaccccgccacgcgccacaccgtcgatccggaccgccacatcgagcgggtcaccgagctgcaagaactcttcctcacgcgcgtcgggctcgacatcggcaaggtgtgggtcgcggacgacggcgccgcggtggcggtctggaccacgccggagagcgtcgaagcgggggcggtgttcgccgagatcggcccgcgcatggccgagttgagcggttcccggctggccgcgcagcaacagatggaaggcctcctggcgccgcaccggcccaaggagcccgcgtggttcctggccaccgtcggcgtctcgcccgaccaccagggcaagggtctgggcagcgccgtcgtgctccccggagtggaggcggccgagcgcgccggggtgcccgccttcctggagacctccgcgccccgcaacctccccttctacgagcggctcggcttcaccgtcaccgccgacgtcgaggtgcccgaaggaccgcgcacctggtgcatgacccgcaagcccggtgcctga

SEQ ID NO: 35354 - DNA, 2847 bp, synthetic construct
  source 1..2847: mol_type = other DNA
atggccttaccagtgaccgccttgctcctgccgctggccttgctgctccacgccgccaggccggcatgcatgggcagttggttcgagttctacgaccggctgaatgccatcgacgccagactgtgggctctcggaggatctgaagctgagctggccgccttcgagaaagagatcgccgcctttgagagcgagctgcaagcctacaaaggcaagggcaaccccgaggtggaaaacctgagagtgcacgccgctgccatcagagaatggctccaggcttacagacacaacggtaccggcggaggcggatctggcggcggaggtagcggtggcggaggatctgaattcgacatccagatgacacagagccctagcagcctgtctgccagcgtgggagacagagtgaccatcacctgtagagccagccaggacgtgcggaacatcgtcgtgtggttccagcagaagcctggcaaggcccctaagctgctgatctacagcggcagctacagatacagcggcgtgcccagcagattttccggctctggctctggcaccgacttcaccctgacaatatccagcctccagcctgaggacttcgccacctactactgccagcagcactacagccctccatacacattcggccagggcaccaaggtggaaatcaagagactcgaggacctgaagaacgtgttcccacctgaggtggccgtgttcgagcctagcgaggccgagatcagccacacccagaaagccaccctcgtgtgcctggctaccggcttctaccccgaccatgtggaactgtcttggtgggtcaacggcaaagaggtgcacagcggcgtgtgtaccgacccccagccactgaaagaacagcccgccctgaacgacagccggtactgcctgagcagcagactgagagtgtccgccaccttctggcagaacccccggaaccacttcagatgccaggtgcagttctacggcctgagcgagaacgacgagtggacccaggacagagccaagcccgtgacccagatcgtgtctgccgaagcctggggcagagccgattgcgacgtgaagctggtggaaaagagcttcgagacagacaccaacctgaacttccagaacctgagcgtgatcggcttcagaatcctgctgctgaaagtggccggctttaacctgctgatgaccctgcggctgtggtccagcagggccaagcgatctggatctggagcaacaaacttctcactactcaaacaagcaggtgacgtggaggagaatcccgggcctactagtatggactggatttggcgcatccttttccttgtcggcgctgctaccggcgcgcattccttcgaagaagttcagctggtggaatctggccctggcctggtcaagcctagcgagacactgagcctgacctgtaccgtgtccggcttcagcctgaccagatttggcgtgcactgggtccgacagccacctggcaaaggactggaatggctgggagtgatttggagaggcggcagcaccgattacaacgccgccttcatgagccggctgaccatcagcaaggacaacagcaagaaccaggtgtccctgaagctgagcagcgtgacagccgctgataccgccgtgtactactgctccaaccactactacggcagctccgactacgccctggataattggggccagggaaccctggtcaccgtgtcatctacgcgtatccagaaccctgatcctgccgtgtaccagctgcgggatagcaagagcagcgacaagagcgtgtgtctgttcaccgacttcgacagccagaccaacgtgtcccagagcaaggactccgacgtgtacatcaccgataagtgcgtgctggacatgcggagcatggacttcaagagcaactccgccgtggcctggtccaacaagtccgatttcgcctgcgccaacgccttcaacaacagcattatccccgaggacacattcttcccaagccccgagagcagctgcggctttaccagcgagagctaccagcagggcgtgctgagcgccaccatcctgtacgagatcctgctgggcaaggccaccctgtacgccgtgctggtgtctgccctggtgctgatggctatggtcaagcggaaggacagccggggacgcgccaagagaagcggatctggcgtgaagcagaccctgaatttcgacctgctgaagctggctggcgacgtggaatccaacccaggcccttctagaggccatatgaccgagtacaagcccacggtgcgcctcgccacccgcgacgacgtccccagggccgtacgcaccctcgccgccgcgttcgccgactaccccgccacgcgccacaccgtcgatccggaccgccacatcgagcgggtcaccgagctgcaagaactcttcctcacgcgcgtcgggctcgacatcggcaaggtgtgggtcgcggacgacggcgccgcggtggcggtctggaccacgccggagagcgtcgaagcgggggcggtgttcgccgagatcggcccgcgcatggccgagttgagcggttcccggctggccgcgcagcaacagatggaaggcctcctggcgccgcaccggcccaaggagcccgcgtggttcctggccaccgtcggcgtctcgcccgaccaccagggcaagggtctgggcagcgccgtcgtgctccccggagtggaggcggccgagcgcgccggggtgcccgccttcctggagacctccgcgccccgcaacctccccttctacgagcggctcggcttcaccgtcaccgccgacgtcgaggtgcccgaaggaccgcgcacctggtgcatgacccgcaagcccggtgcctga

SEQ ID NO: 35355 - DNA, 3198 bp, synthetic construct
  source 1..3198: mol_type = other DNA
atggccttaccagtgaccgccttgctcctgccgctggccttgctgctccacgccgccaggccggcatgcatggaccccgacctggaaatcagagccgccttcctgcggcagagaaacacagccctgagaacagaggtggccgagctggaacaagaggtgcagcggctggaaaacgaggtgtcccagtacgagacaagatacggccctctcggaggcggaaaaggtaccggcggaggcggatctggcggcggaggtagcggtggcggaggatctgaattcgacatccagatgacacagagccctagcagcctgtctgccagcgtgggagacagagtgaccatcacctgtagagccagccaggacgtgcggaacatcgtcgtgtggttccagcagaagcctggcaaggcccctaagctgctgatctacagcggcagctacagatacagcggcgtgcccagcagattttccggctctggctctggcaccgacttcaccctgacaatatccagcctccagcctgaggacttcgccacctactactgccagcagcactacagccctccatacacattcggccagggcaccaaggtggaaatcaagagactcgaggacctgaagaacgtgttcccacctgaggtggccgtgttcgagcctagcgaggccgagatcagccacacccagaaagccaccctcgtgtgcctggctaccggcttctaccccgaccatgtggaactgtcttggtgggtcaacggcaaagaggtgcacagcggcgtgtgtaccgacccccagccactgaaagaacagcccgccctgaacgacagccggtactgcctgagcagcagactgagagtgtccgccaccttctggcagaacccccggaaccacttcagatgccaggtgcagttctacggcctgagcgagaacgacgagtggacccaggacagagccaagcccgtgacccagatcgtgtctgccgaagcctggggcagagccgattgcgacgtgaagctggtggaaaagagcttcgagacagacaccaacctgaacttccagaacctgagcgtgatcggcttcagaatcctgctgctgaaagtggccggctttaacctgctgatgaccctgcggctgtggtccagcagggccaagcgatctggatctggagcaacaaacttctcactactcaaacaagcaggtgacgtggaggagaatcccgggcctactagtgccaccatggactggatttggcgcatccttttccttgtcggcgctgctaccggcgcccattccgggcccgaagtgcagctggttgaatctggcggaggactggttcaggctggcggatctctgagactgtcttgtgccgccagcggcagaacctttagcatgggctggtttagacaggcccctggcaaagagagagagttcgtcgccgccatcacatactctggcggcagcccttactacgccgactctgtgaagggcagattcaccatcagccgggacaacgccaagaacaccgtgtacctccagatgaacagcctgaagcctgaggacaccgccgtgtactactgcgccgccaatccaacatacggcagcgactggaacgccgagaattggggccagggaacccaagtgacagtgtctagcggatccggcggcggaggatctggcggaggcggatctgggggcggaggctctttcgaagaagttcagctggtggaatctggccctggcctggtcaagcctagcgagacactgagcctgacctgtaccgtgtccggcttcagcctgaccagatttggcgtgcactgggtccgacagccacctggcaaaggactggaatggctgggagtgatttggagaggcggcagcaccgattacaacgccgccttcatgagccggctgaccatcagcaaggacaacagcaagaaccaggtgtccctgaagctgagcagcgtgacagccgctgataccgccgtgtactactgctccaaccactactacggcagctccgactacgccctggataattggggccagggaaccctggtcaccgtgtcatctacgcgtatccagaaccctgatcctgccgtgtaccagctgcgggatagcaagagcagcgacaagagcgtgtgtctgttcaccgacttcgacagccagaccaacgtgtcccagagcaaggactccgacgtgtacatcaccgataagtgcgtgctggacatgcggagcatggacttcaagagcaactccgccgtggcctggtccaacaagtccgatttcgcctgcgccaacgccttcaacaacagcattatccccgaggacacattcttcccaagccccgagagcagctgcggctttaccagcgagagctaccagcagggcgtgctgagcgccaccatcctgtacgagatcctgctgggcaaggccaccctgtacgccgtgctggtgtctgccctggtgctgatggctatggtcaagcggaaggacagccggggacgcgccaagagaagcggatctggcgtgaagcagaccctgaatttcgacctgctgaagctggctggcgacgtggaatccaacccaggcccttctagaggccatatgaccgagtacaagcccacggtgcgcctcgccacccgcgacgacgtccccagggccgtacgcaccctcgccgccgcgttcgccgactaccccgccacgcgccacaccgtcgatccggaccgccacatcgagcgggtcaccgagctgcaagaactcttcctcacgcgcgtcgggctcgacatcggcaaggtgtgggtcgcggacgacggcgccgcggtggcggtctggaccacgccggagagcgtcgaagcgggggcggtgttcgccgagatcggcccgcgcatggccgagttgagcggttcccggctggccgcgcagcaacagatggaaggcctcctggcgccgcaccggcccaaggagcccgcgtggttcctggccaccgtcggcgtctcgcccgaccaccagggcaagggtctgggcagcgccgtcgtgctccccggagtggaggcggccgagcgcgccggggtgcccgccttcctggagacctccgcgccccgcaacctccccttctacgagcggctcggcttcaccgtcaccgccgacgtcgaggtgcccgaaggaccgcgcacctggtgcatgacccgcaagcccggtgcctga

SEQ ID NO: 35356 - DNA, 2847 bp, synthetic construct
  source 1..2847: mol_type = other DNA
atggccttaccagtgaccgccttgctcctgccgctggccttgctgctccacgccgccaggccggacatccagatgacacagagccctagcagcctgtctgccagcgtgggagacagagtgaccatcacctgtagagccagccaggacgtgcggaacatcgtcgtgtggttccagcagaagcctggcaaggcccctaagctgctgatctacagcggcagctacagatacagcggcgtgcccagcagattttccggctctggctctggcaccgacttcaccctgacaatatccagcctccagcctgaggacttcgccacctactactgccagcagcactacagccctccatacacattcggccagggcaccaaggtggaaatcaagagactcgaggacctgaagaacgtgttcccacctgaggtggccgtgttcgagcctagcgaggccgagatcagccacacccagaaagccaccctcgtgtgcctggctaccggcttctaccccgaccatgtggaactgtcttggtgggtcaacggcaaagaggtgcacagcggcgtgtgtaccgacccccagccactgaaagaacagcccgccctgaacgacagccggtactgcctgagcagcagactgagagtgtccgccaccttctggcagaacccccggaaccacttcagatgccaggtgcagttctacggcctgagcgagaacgacgagtggacccaggacagagccaagcccgtgacccagatcgtgtctgccgaagcctggggcagagccgattgcgacgtgaagctggtggaaaagagcttcgagacagacaccaacctgaacttccagaacctgagcgtgatcggcttcagaatcctgctgctgaaagtggccggctttaacctgctgatgaccctgcggctgtggtccagcagggccaagcgatctggatctggagcaacaaacttctcactactcaaacaagcaggtgacgtggaggagaatcccgggcctactagtgccaccatggactggatttggcgcatccttttccttgtcggcgctgctaccggcgcccattccgggcccatgggatcttggagcgagttttacgatcggctgcacgccattcaccaccggctgtatgctctcggaggaagcgaagctgagctggccgcttttgaaaaagaaattgccgctttcgagtccgagcttcaggcttacaaaggcaaagggaatcctgaggtcgaggccctgagagataccgccgccttcatcagaacccggttgcaggcataccggcacaacggatccggcggcggaggatctggcggaggcggatctgggggcggaggctctttcgaagaagttcagctggtggaatctggccctggcctggtcaagcctagcgagacactgagcctgacctgtaccgtgtccggcttcagcctgaccagatttggcgtgcactgggtccgacagccacctggcaaaggactggaatggctgggagtgatttggagaggcggcagcaccgattacaacgccgccttcatgagccggctgaccatcagcaaggacaacagcaagaaccaggtgtccctgaagctgagcagcgtgacagccgctgataccgccgtgtactactgctccaaccactactacggcagctccgactacgccctggataattggggccagggaaccctggtcaccgtgtcatctacgcgtatccagaaccctgatcctgccgtgtaccagctgcgggatagcaagagcagcgacaagagcgtgtgtctgttcaccgacttcgacagccagaccaacgtgtcccagagcaaggactccgacgtgtacatcaccgataagtgcgtgctggacatgcggagcatggacttcaagagcaactccgccgtggcctggtccaacaagtccgatttcgcctgcgccaacgccttcaacaacagcattatccccgaggacacattcttcccaagccccgagagcagctgcggctttaccagcgagagctaccagcagggcgtgctgagcgccaccatcctgtacgagatcctgctgggcaaggccaccctgtacgccgtgctggtgtctgccctggtgctgatggctatggtcaagcggaaggacagccggggacgcgccaagagaagcggatctggcgtgaagcagaccctgaatttcgacctgctgaagctggctggcgacgtggaatccaacccaggcccttctagaggccatatgaccgagtacaagcccacggtgcgcctcgccacccgcgacgacgtccccagggccgtacgcaccctcgccgccgcgttcgccgactaccccgccacgcgccacaccgtcgatccggaccgccacatcgagcgggtcaccgagctgcaagaactcttcctcacgcgcgtcgggctcgacatcggcaaggtgtgggtcgcggacgacggcgccgcggtggcggtctggaccacgccggagagcgtcgaagcgggggcggtgttcgccgagatcggcccgcgcatggccgagttgagcggttcccggctggccgcgcagcaacagatggaaggcctcctggcgccgcaccggcccaaggagcccgcgtggttcctggccaccgtcggcgtctcgcccgaccaccagggcaagggtctgggcagcgccgtcgtgctccccggagtggaggcggccgagcgcgccggggtgcccgccttcctggagacctccgcgccccgcaacctccccttctacgagcggctcggcttcaccgtcaccgccgacgtcgaggtgcccgaaggaccgcgcacctggtgcatgacccgcaagcccggtgcctga

SEQ ID NO: 35357 - DNA, 3477 bp, synthetic construct
  source 1..3477: mol_type = other DNA
atggccttaccagtgaccgccttgctcctgccgctggccttgctgctccacgccgccaggccggacatccagatgacacagagccctagcagcctgtctgccagcgtgggagacagagtgaccatcacctgtagagccagccaggacgtgcggaacatcgtcgtgtggttccagcagaagcctggcaaggcccctaagctgctgatctacagcggcagctacagatacagcggcgtgcccagcagattttccggctctggctctggcaccgacttcaccctgacaatatccagcctccagcctgaggacttcgccacctactactgccagcagcactacagccctccatacacattcggccagggcaccaaggtggaaatcaagagactcgaggacctgaagaacgtgttcccacctgaggtggccgtgttcgagcctagcgaggccgagatcagccacacccagaaagccaccctcgtgtgcctggctaccggcttctaccccgaccatgtggaactgtcttggtgggtcaacggcaaagaggtgcacagcggcgtgtgtaccgacccccagccactgaaagaacagcccgccctgaacgacagccggtactgcctgagcagcagactgagagtgtccgccaccttctggcagaacccccggaaccacttcagatgccaggtgcagttctacggcctgagcgagaacgacgagtggacccaggacagagccaagcccgtgacccagatcgtgtctgccgaagcctggggcagagccgattgcgacgtgaagctggtggaaaagagcttcgagacagacaccaacctgaacttccagaacctgagcgtgatcggcttcagaatcctgctgctgaaagtggccggctttaacctgctgatgaccctgcggctgtggtccagcagggccaagcgatctggatctggagcaacaaacttctcactactcaaacaagcaggtgacgtggaggagaatcccgggcctactagtaccatggactggatttggcgcatccttttccttgtcggcgctgctaccggcgcccattccctgttcaatcaagaggtgcagatccctctgaccgagagctactgtggcccctgtcctaagaactggatctgctacaagaacaactgctaccagttcttcgacgagagcaagaattggtacgagagccaggccagctgcatgagccagaatgccagcctgctgaaggtgtacagcaaagaggaccaggacctgctgaaactggtcaagagcgcccactggatgggccttgtgcacatccccaccaatggctcttggcagtgggaggacggcagcattctgagccctaacctgctgaccatcatcgagatgcagaagggcgactgcgccctgtacgccagcagctttaagggctacatcgagaattgcagcaccccgaacacctacatctgtatgcagagaaccgtttctggcggaggcggctctggaggaggcggaagtggcggcggaggcgacctctttaatcaagaagtccagattccactcaccgaatcctactgcggaccttgtccaaaaaattggatttgttataagaacaactgttatcaattctttgatgagtctaaaaattggtatgagtcccaggcttcctgcatgtctcagaacgcttctctgctgaaagtctactctaaagaagatcaggatctcctgaagctcgtcaagtctgcccattggatggggctcgtccacattcctaccaacggaagctggcaatgggaagatggctccatcctgtctccaaatctgctcacgattattgaaatgcagaaaggggattgtgctctctacgccagctccttcaagggatatattgagaactgtagcacgcccaatacttatatctgtatgcaacggaccgtgggatccggcggcggaggatctggcggaggcggatctgggggcggaggctctttcgaagaagttcagctggtggaatctggccctggcctggtcaagcctagcgagacactgagcctgacctgtaccgtgtccggcttcagcctgaccagatttggcgtgcactgggtccgacagccacctggcaaaggactggaatggctgggagtgatttggagaggcggcagcaccgattacaacgccgccttcatgagccggctgaccatcagcaaggacaacagcaagaaccaggtgtccctgaagctgagcagcgtgacagccgctgataccgccgtgtactactgctccaaccactactacggcagctccgactacgccctggataattggggccagggaaccctggtcaccgtgtcatctacgcgtatccagaaccctgatcctgccgtgtaccagctgcgggatagcaagagcagcgacaagagcgtgtgtctgttcaccgacttcgacagccagaccaacgtgtcccagagcaaggactccgacgtgtacatcaccgataagtgcgtgctggacatgcggagcatggacttcaagagcaactccgccgtggcctggtccaacaagtccgatttcgcctgcgccaacgccttcaacaacagcattatccccgaggacacattcttcccaagccccgagagcagctgcggctttaccagcgagagctaccagcagggcgtgctgagcgccaccatcctgtacgagatcctgctgggcaaggccaccctgtacgccgtgctggtgtctgccctggtgctgatggctatggtcaagcggaaggacagccggggacgcgccaagagaagcggatctggcgtgaagcagaccctgaatttcgacctgctgaagctggctggcgacgtggaatccaacccaggcccttctagaggccatatgaccgagtacaagcccacggtgcgcctcgccacccgcgacgacgtccccagggccgtacgcaccctcgccgccgcgttcgccgactaccccgccacgcgccacaccgtcgatccggaccgccacatcgagcgggtcaccgagctgcaagaactcttcctcacgcgcgtcgggctcgacatcggcaaggtgtgggtcgcggacgacggcgccgcggtggcggtctggaccacgccggagagcgtcgaagcgggggcggtgttcgccgagatcggcccgcgcatggccgagttgagcggttcccggctggccgcgcagcaacagatggaaggcctcctggcgccgcaccggcccaaggagcccgcgtggttcctggccaccgtcggcgtctcgcccgaccaccagggcaagggtctgggcagcgccgtcgtgctccccggagtggaggcggccgagcgcgccggggtgcccgccttcctggagacctccgcgccccgcaacctccccttctacgagcggctcggcttcaccgtcaccgccgacgtcgaggtgcccgaaggaccgcgcacctggtgcatgacccgcaagcccggtgcctga

SEQ ID NO: 35358 - DNA, 1863 bp, synthetic construct
  source 1..1863: mol_type = other DNA
atggccttaccagtgaccgccttgctcctgccgctggccttgctgctccacgccgccaggccggacatccagatgacacagagccctagcagcctgtctgccagcgtgggagacagagtgaccatcacctgtagagccagccaggacgtgcggaacatcgtcgtgtggttccagcagaagcctggcaaggcccctaagctgctgatctacagcggcagctacagatacagcggcgtgcccagcagattttccggctctggctctggcaccgacttcaccctgacaatatccagcctccagcctgaggacttcgccacctactactgccagcagcactacagccctccatacacattcggccagggcaccaaggtggaaatcaagagactcgaggacctgaagaacgtgttcccacctgaggtggccgtgttcgagcctagcgaggccgagatcagccacacccagaaagccaccctcgtgtgcctggctaccggcttctaccccgaccatgtggaactgtcttggtgggtcaacggcaaagaggtgcacagcggcgtgtgtaccgacccccagccactgaaagaacagcccgccctgaacgacagccggtactgcctgagcagcagactgagagtgtccgccaccttctggcagaacccccggaaccacttcagatgccaggtgcagttctacggcctgagcgagaacgacgagtggacccaggacagagccaagcccgtgacccagatcgtgtctgccgaagcctggggcagagccgattgcggctttaccagcgagagctaccagcagggcgtgctgagcgccaccaacctgagcgtgatcggcttcagaatcctgctgctgaaagtggccggctttaacctgctgatgaccctgcggctgtggtccagcagggccaagcgatctggatctggagcaacaaacttctcactactcaaacaagcaggtgacgtggaggagaatcccgggcctactagtatggactggatttggcgcatccttttccttgtcggcgctgctaccggcgcgcattccttcgaagaagttcagctggtggaatctggccctggcctggtcaagcctagcgagacactgagcctgacctgtaccgtgtccggcttcagcctgaccagatttggcgtgcactgggtccgacagccacctggcaaaggactggaatggctgggagtgatttggagaggcggcagcaccgattacaacgccgccttcatgagccggctgaccatcagcaaggacaacagcaagaaccaggtgtccctgaagctgagcagcgtgacagccgctgataccgccgtgtactactgctccaaccactactacggcagctccgactacgccctggataattggggccagggaaccctggtcaccgtgtcatctacgcgtatccagaaccctgatcctgccgtgtaccagctgcgggatagcaagagcagcgacaagagcgtgtgtctgttcaccgacttcgacagccagaccaacgtgtcccagagcaaggactccgacgtgtacatcaccgataagtgcgtgctggacatgcggagcatggacttcaagagcaactccgccgtggcctggtccaacaagtccgatttcgcctgcgccaacgccttcaacaacagcattatccccgaggacacattcttcccaagccccgagagcagctgcgacgtgaagctggtggaaaagagcttcgagacagacaccaacctgaacttccagatcctgtacgagatcctgctgggcaaggccaccctgtacgccgtgctggtgtctgccctggtgctgatggctatggtcaagcggaaggacagccgggga

SEQ ID NO: 35359 - DNA, 1875 bp, synthetic construct
  source 1..1875: mol_type = other DNA
atggccttaccagtgaccgccttgctcctgccgctggccttgctgctccacgccgccaggccggacatccagatgacacagagccctagcagcctgtctgccagcgtgggagacagagtgaccatcacctgtagagccagccaggacgtgcggaacatcgtcgtgtggttccagcagaagcctggcaaggcccctaagctgctgatctacagcggcagctacagatacagcggcgtgcccagcagattttccggctctggctctggcaccgacttcaccctgacaatatccagcctccagcctgaggacttcgccacctactactgccagcagcactacagccctccatacacattcggccagggcaccaaggtggaaatcaagagactcgagatccagaaccctgatcctgccgtgtaccagctgcgggatagcaagagcagcgacaagagcgtgtgtctgttcaccgacttcgacagccagaccaacgtgtcccagagcaaggactccgacgtgtacatcaccgataagtgcgtgctggacatgcggagcatggacttcaagagcaactccgccgtggcctggtccaacaagtccgatttcgcctgcgccaacgccttcaacaacagcattatccccgaggacacattcttcccaagccccgagagcagctgcgacgtgaagctggtggaaaagagcttcgagacagacaccaacctgaacttccagatcctgtacgagatcctgctgggcaaggccaccctgtacgccgtgctggtgtctgccctggtgctgatggctatggtcaagcggaaggacagccggggacgcgccaagagaagcggatctggcgtgaagcagaccctgaatttcgacctgctgaagctggctggcgacgtggaatccaacccaggccctactagtatggactggatttggcgcatccttttccttgtcggcgctgctaccggcgcgcattccttcgaagaagttcagctggtggaatctggccctggcctggtcaagcctagcgagacactgagcctgacctgtaccgtgtccggcttcagcctgaccagatttggcgtgcactgggtccgacagccacctggcaaaggactggaatggctgggagtgatttggagaggcggcagcaccgattacaacgccgccttcatgagccggctgaccatcagcaaggacaacagcaagaaccaggtgtccctgaagctgagcagcgtgacagccgctgataccgccgtgtactactgctccaaccactactacggcagctccgactacgccctggataattggggccagggaaccctggtcaccgtgtcatctacgcgtgaggacctgaagaacgtgttcccacctgaggtggccgtgttcgagcctagcgaggccgagatcagccacacccagaaagccaccctcgtgtgcctggctaccggcttctaccccgaccatgtggaactgtcttggtgggtcaacggcaaagaggtgcacagcggcgtgtgtaccgacccccagccactgaaagaacagcccgccctgaacgacagccggtactgcctgagcagcagactgagagtgtccgccaccttctggcagaacccccggaaccacttcagatgccaggtgcagttctacggcctgagcgagaacgacgagtggacccaggacagagccaagcccgtgacccagatcgtgtctgccgaagcctggggcagagccgattgcggctttaccagcgagagctaccagcagggcgtgctgagcgccaccaacctgagcgtgatcggcttcagaatcctgctgctgaaagtggccggctttaacctgctgatgaccctgcggctgtggtccagc

SEQ ID NO: 35360 - DNA, 2268 bp, synthetic construct
  source 1..2268: mol_type = other DNA
atggccttaccagtgaccgccttgctcctgccgctggccttgctgctccacgccgccaggccggaagtgcagctggttgaatctggcggaggactggttcagcctggcggatctctgagactgtcttgtgccgccagcggcttcagcttcagcgacttttggatgagctgggtccgacaggcccctggcaaaggacttgaatgggtcgccacaatcagccaggccggcagcgagaaggactacgtggactctgtgaagggcagattcaccatcagccgggacaacgccaagaagtccctgtacctccagatgaacagcctgagagccgaggacaccgccgtgtactattgtgcctctggcgtgtacagcttcgactacagaggccagggcaccctggtcacagtctcttctggtaccggcggaggcggatctggcggcggaggtagcggtggcggaggatctgaattcgacatccagatgacacagagccctagcagcctgtctgccagcgtgggagacagagtgaccatcacctgtagagccagccaggacgtgcggaacatcgtcgtgtggttccagcagaagcctggcaaggcccctaagctgctgatctacagcggcagctacagatacagcggcgtgcccagcagattttccggctctggctctggcaccgacttcaccctgacaatatccagcctccagcctgaggacttcgccacctactactgccagcagcactacagccctccatacacattcggccagggcaccaaggtggaaatcaagagactcgaggacctgaagaacgtgttcccacctgaggtggccgtgttcgagcctagcgaggccgagatcagccacacccagaaagccaccctcgtgtgcctggctaccggcttctaccccgaccatgtggaactgtcttggtgggtcaacggcaaagaggtgcacagcggcgtgtgtaccgacccccagccactgaaagaacagcccgccctgaacgacagccggtactgcctgagcagcagactgagagtgtccgccaccttctggcagaacccccggaaccacttcagatgccaggtgcagttctacggcctgagcgagaacgacgagtggacccaggacagagccaagcccgtgacccagatcgtgtctgccgaagcctggggcagagccgattgcggctttaccagcgagagctaccagcagggcgtgctgagcgccaccaacctgagcgtgatcggcttcagaatcctgctgctgaaagtggccggctttaacctgctgatgaccctgcggctgtggtccagcagggccaagcgatctggatctggagcaacaaacttctcactactcaaacaagcaggtgacgtggaggagaatcccgggcctactagtatggactggatttggcgcatccttttccttgtcggcgctgctaccggcgcgcattccttcgaagaagttcagctggtggaatctggccctggcctggtcaagcctagcgagacactgagcctgacctgtaccgtgtccggcttcagcctgaccagatttggcgtgcactgggtccgacagccacctggcaaaggactggaatggctgggagtgatttggagaggcggcagcaccgattacaacgccgccttcatgagccggctgaccatcagcaaggacaacagcaagaaccaggtgtccctgaagctgagcagcgtgacagccgctgataccgccgtgtactactgctccaaccactactacggcagctccgactacgccctggataattggggccagggaaccctggtcaccgtgtcatctacgcgtatccagaaccctgatcctgccgtgtaccagctgcgggatagcaagagcagcgacaagagcgtgtgtctgttcaccgacttcgacagccagaccaacgtgtcccagagcaaggactccgacgtgtacatcaccgataagtgcgtgctggacatgcggagcatggacttcaagagcaactccgccgtggcctggtccaacaagtccgatttcgcctgcgccaacgccttcaacaacagcattatccccgaggacacattcttcccaagccccgagagcagctgcgacgtgaagctggtggaaaagagcttcgagacagacaccaacctgaacttccagatcctgtacgagatcctgctgggcaaggccaccctgtacgccgtgctggtgtctgccctggtgctgatggctatggtcaagcggaaggacagccgggga

SEQ ID NO: 35361 - DNA, 2280 bp, synthetic construct
  source 1..2280: mol_type = other DNA
atggccttaccagtgaccgccttgctcctgccgctggccttgctgctccacgccgccaggccggaagtgcagctggttgaatctggcggaggactggttcagcctggcggatctctgagactgtcttgtgccgccagcggcttcagcttcagcgacttttggatgagctgggtccgacaggcccctggcaaaggacttgaatgggtcgccacaatcagccaggccggcagcgagaaggactacgtggactctgtgaagggcagattcaccatcagccgggacaacgccaagaagtccctgtacctccagatgaacagcctgagagccgaggacaccgccgtgtactattgtgcctctggcgtgtacagcttcgactacagaggccagggcaccctggtcacagtctcttctggtaccggcggaggcggatctggcggcggaggtagcggtggcggaggatctgaattcgacatccagatgacacagagccctagcagcctgtctgccagcgtgggagacagagtgaccatcacctgtagagccagccaggacgtgcggaacatcgtcgtgtggttccagcagaagcctggcaaggcccctaagctgctgatctacagcggcagctacagatacagcggcgtgcccagcagattttccggctctggctctggcaccgacttcaccctgacaatatccagcctccagcctgaggacttcgccacctactactgccagcagcactacagccctccatacacattcggccagggcaccaaggtggaaatcaagagactcgagatccagaaccctgatcctgccgtgtaccagctgcgggatagcaagagcagcgacaagagcgtgtgtctgttcaccgacttcgacagccagaccaacgtgtcccagagcaaggactccgacgtgtacatcaccgataagtgcgtgctggacatgcggagcatggacttcaagagcaactccgccgtggcctggtccaacaagtccgatttcgcctgcgccaacgccttcaacaacagcattatccccgaggacacattcttcccaagccccgagagcagctgcgacgtgaagctggtggaaaagagcttcgagacagacaccaacctgaacttccagatcctgtacgagatcctgctgggcaaggccaccctgtacgccgtgctggtgtctgccctggtgctgatggctatggtcaagcggaaggacagccggggacgcgccaagagaagcggatctggcgtgaagcagaccctgaatttcgacctgctgaagctggctggcgacgtggaatccaacccaggccctactagtatggactggatttggcgcatccttttccttgtcggcgctgctaccggcgcgcattccttcgaagaagttcagctggtggaatctggccctggcctggtcaagcctagcgagacactgagcctgacctgtaccgtgtccggcttcagcctgaccagatttggcgtgcactgggtccgacagccacctggcaaaggactggaatggctgggagtgatttggagaggcggcagcaccgattacaacgccgccttcatgagccggctgaccatcagcaaggacaacagcaagaaccaggtgtccctgaagctgagcagcgtgacagccgctgataccgccgtgtactactgctccaaccactactacggcagctccgactacgccctggataattggggccagggaaccctggtcaccgtgtcatctacgcgtgaggacctgaagaacgtgttcccacctgaggtggccgtgttcgagcctagcgaggccgagatcagccacacccagaaagccaccctcgtgtgcctggctaccggcttctaccccgaccatgtggaactgtcttggtgggtcaacggcaaagaggtgcacagcggcgtgtgtaccgacccccagccactgaaagaacagcccgccctgaacgacagccggtactgcctgagcagcagactgagagtgtccgccaccttctggcagaacccccggaaccacttcagatgccaggtgcagttctacggcctgagcgagaacgacgagtggacccaggacagagccaagcccgtgacccagatcgtgtctgccgaagcctggggcagagccgattgcggctttaccagcgagagctaccagcagggcgtgctgagcgccaccaacctgagcgtgatcggcttcagaatcctgctgctgaaagtggccggctttaacctgctgatgaccctgcggctgtggtccagc

SEQ ID NO: 35362 - DNA, 2679 bp, synthetic construct
  source 1..2679: mol_type = other DNA
atggccttaccagtgaccgccttgctcctgccgctggccttgctgctccacgccgccaggccggaagtgcagctggttgaatctggcggaggactggttcagcctggcggatctctgagactgtcttgtgccgccagcggcttcagcttcagcgacttttggatgagctgggtccgacaggcccctggcaaaggacttgaatgggtcgccacaatcagccaggccggcagcgagaaggactacgtggactctgtgaagggcagattcaccatcagccgggacaacgccaagaagtccctgtacctccagatgaacagcctgagagccgaggacaccgccgtgtactattgtgcctctggcgtgtacagcttcgactacagaggccagggcaccctggtcacagtctcttctggtaccggcggaggcggatctggcggcggaggtagcggtggcggaggatctgaattcgacatccagatgacacagagccctagcagcctgtctgccagcgtgggagacagagtgaccatcacctgtagagccagccaggacgtgcggaacatcgtcgtgtggttccagcagaagcctggcaaggcccctaagctgctgatctacagcggcagctacagatacagcggcgtgcccagcagattttccggctctggctctggcaccgacttcaccctgacaatatccagcctccagcctgaggacttcgccacctactactgccagcagcactacagccctccatacacattcggccagggcaccaaggtggaaatcaagagactcgaggacctgaagaacgtgttcccacctgaggtggccgtgttcgagcctagcgaggccgagatcagccacacccagaaagccaccctcgtgtgcctggctaccggcttctaccccgaccatgtggaactgtcttggtgggtcaacggcaaagaggtgcacagcggcgtgtgtaccgacccccagccactgaaagaacagcccgccctgaacgacagccggtactgcctgagcagcagactgagagtgtccgccaccttctggcagaacccccggaaccacttcagatgccaggtgcagttctacggcctgagcgagaacgacgagtggacccaggacagagccaagcccgtgacccagatcgtgtctgccgaagcctggggcagagccgattgcggctttaccagcgagagctaccagcagggcgtgctgagcgccaccaacctgagcgtgatcggcttcagaatcctgctgctgaaagtggccggctttaacctgctgatgaccctgcggctgtggtccagcagggccaagcgatctggatctggagcaacaaacttctcactactcaaacaagcaggtgacgtggaggagaatcccgggcctactagtatggactggatttggcgcatccttttccttgtcggcgctgctaccggcgcgcattccgggccccagctccagctgcaagagtctggacctggcctggtcaagcctagcgagacactgagcctgacctgtaccgtgtccggcgatagcatcagcagcggcgattactactggggctggatcagacagcctcctggcaaaggactggaatggatcggccacatctactacagcggcgtgacctactacaaccccagcctgaagtccagagtgaccatcagcgtggacaccagccggaaccagttctccctgaagctgtctagcgtgacagccgccgataccgccgtgtactactgcaccagagaggacagcagcaactggcggagtagaggccagggaacactggtcacagttagctctggatccggcggaggcggaagtggaggcggaggatctggcggcggaggctctttcgaagaagttcagctggtggaatctggccctggcctggtcaagcctagcgagacactgagcctgacctgtaccgtgtccggcttcagcctgaccagatttggcgtgcactgggtccgacagccacctggcaaaggactggaatggctgggagtgatttggagaggcggcagcaccgattacaacgccgccttcatgagccggctgaccatcagcaaggacaacagcaagaaccaggtgtccctgaagctgagcagcgtgacagccgctgataccgccgtgtactactgctccaaccactactacggcagctccgactacgccctggataattggggccagggaaccctggtcaccgtgtcatctacgcgtatccagaaccctgatcctgccgtgtaccagctgcgggatagcaagagcagcgacaagagcgtgtgtctgttcaccgacttcgacagccagaccaacgtgtcccagagcaaggactccgacgtgtacatcaccgataagtgcgtgctggacatgcggagcatggacttcaagagcaactccgccgtggcctggtccaacaagtccgatttcgcctgcgccaacgccttcaacaacagcattatccccgaggacacattcttcccaagccccgagagcagctgcgacgtgaagctggtggaaaagagcttcgagacagacaccaacctgaacttccagatcctgtacgagatcctgctgggcaaggccaccctgtacgccgtgctggtgtctgccctggtgctgatggctatggtcaagcggaaggacagccgggga

SEQ ID NO: 35363 - DNA, 2691 bp, synthetic construct
  source 1..2691: mol_type = other DNA
atggccttaccagtgaccgccttgctcctgccgctggccttgctgctccacgccgccaggccggaagtgcagctggttgaatctggcggaggactggttcagcctggcggatctctgagactgtcttgtgccgccagcggcttcagcttcagcgacttttggatgagctgggtccgacaggcccctggcaaaggacttgaatgggtcgccacaatcagccaggccggcagcgagaaggactacgtggactctgtgaagggcagattcaccatcagccgggacaacgccaagaagtccctgtacctccagatgaacagcctgagagccgaggacaccgccgtgtactattgtgcctctggcgtgtacagcttcgactacagaggccagggcaccctggtcacagtctcttctggtaccggcggaggcggatctggcggcggaggtagcggtggcggaggatctgaattcgacatccagatgacacagagccctagcagcctgtctgccagcgtgggagacagagtgaccatcacctgtagagccagccaggacgtgcggaacatcgtcgtgtggttccagcagaagcctggcaaggcccctaagctgctgatctacagcggcagctacagatacagcggcgtgcccagcagattttccggctctggctctggcaccgacttcaccctgacaatatccagcctccagcctgaggacttcgccacctactactgccagcagcactacagccctccatacacattcggccagggcaccaaggtggaaatcaagagactcgagatccagaaccctgatcctgccgtgtaccagctgcgggatagcaagagcagcgacaagagcgtgtgtctgttcaccgacttcgacagccagaccaacgtgtcccagagcaaggactccgacgtgtacatcaccgataagtgcgtgctggacatgcggagcatggacttcaagagcaactccgccgtggcctggtccaacaagtccgatttcgcctgcgccaacgccttcaacaacagcattatccccgaggacacattcttcccaagccccgagagcagctgcgacgtgaagctggtggaaaagagcttcgagacagacaccaacctgaacttccagatcctgtacgagatcctgctgggcaaggccaccctgtacgccgtgctggtgtctgccctggtgctgatggctatggtcaagcggaaggacagccggggacgcgccaagagaagcggatctggcgtgaagcagaccctgaatttcgacctgctgaagctggctggcgacgtggaatccaacccaggccctactagtatggactggatttggcgcatccttttccttgtcggcgctgctaccggcgcgcattccgggccccagctccagctgcaagagtctggacctggcctggtcaagcctagcgagacactgagcctgacctgtaccgtgtccggcgatagcatcagcagcggcgattactactggggctggatcagacagcctcctggcaaaggactggaatggatcggccacatctactacagcggcgtgacctactacaaccccagcctgaagtccagagtgaccatcagcgtggacaccagccggaaccagttctccctgaagctgtctagcgtgacagccgccgataccgccgtgtactactgcaccagagaggacagcagcaactggcggagtagaggccagggaacactggtcacagttagctctggatccggcggaggcggaagtggaggcggaggatctggcggcggaggctctttcgaagaagttcagctggtggaatctggccctggcctggtcaagcctagcgagacactgagcctgacctgtaccgtgtccggcttcagcctgaccagatttggcgtgcactgggtccgacagccacctggcaaaggactggaatggctgggagtgatttggagaggcggcagcaccgattacaacgccgccttcatgagccggctgaccatcagcaaggacaacagcaagaaccaggtgtccctgaagctgagcagcgtgacagccgctgataccgccgtgtactactgctccaaccactactacggcagctccgactacgccctggataattggggccagggaaccctggtcaccgtgtcatctacgcgtgaggacctgaagaacgtgttcccacctgaggtggccgtgttcgagcctagcgaggccgagatcagccacacccagaaagccaccctcgtgtgcctggctaccggcttctaccccgaccatgtggaactgtcttggtgggtcaacggcaaagaggtgcacagcggcgtgtgtaccgacccccagccactgaaagaacagcccgccctgaacgacagccggtactgcctgagcagcagactgagagtgtccgccaccttctggcagaacccccggaaccacttcagatgccaggtgcagttctacggcctgagcgagaacgacgagtggacccaggacagagccaagcccgtgacccagatcgtgtctgccgaagcctggggcagagccgattgcggctttaccagcgagagctaccagcagggcgtgctgagcgccaccaacctgagcgtgatcggcttcagaatcctgctgctgaaagtggccggctttaacctgctgatgaccctgcggctgtggtccagc

SEQ ID NO: 35364 - DNA, 2175 bp, synthetic construct
  source 1..2175: mol_type = other DNA
atggccttaccagtgaccgccttgctcctgccgctggccttgctgctccacgccgccaggccggacatccagatgacacagagccctagcagcctgtctgccagcgtgggagacagagtgaccatcacctgtagagccagccaggacgtgcggaacatcgtcgtgtggttccagcagaagcctggcaaggcccctaagctgctgatctacagcggcagctacagatacagcggcgtgcccagcagattttccggctctggctctggcaccgacttcaccctgacaatatccagcctccagcctgaggacttcgccacctactactgccagcagcactacagccctccatacacattcggccagggcaccaaggtggaaatcaagagactcgaggacctgaagaacgtgttcccacctgaggtggccgtgttcgagcctagcgaggccgagatcagccacacccagaaagccaccctcgtgtgcctggctaccggcttctaccccgaccatgtggaactgtcttggtgggtcaacggcaaagaggtgcacagcggcgtgtgtaccgacccccagccactgaaagaacagcccgccctgaacgacagccggtactgcctgagcagcagactgagagtgtccgccaccttctggcagaacccccggaaccacttcagatgccaggtgcagttctacggcctgagcgagaacgacgagtggacccaggacagagccaagcccgtgacccagatcgtgtctgccgaagcctggggcagagccgatgatgtgattaagatccactggcaggaaaagaagtccaacaccatcctgggcagccaggaaggcaacaccatgaagaccaacgacacctacatgaagttcagctggctgaccgtgcccgagaagtccctggacaaagaacacagatgcatcgtgcggcacgaaaacaacaagaacggcgtggaccaggaaatcatcttcccacccatcaagaccgatgtgattacaatggaccccaaggacaactgctccaaggacgccaacgataccctgctgctccagctgaccaacaccagcgcctactacatgtacttgttgctgctgctgaagtccgtggtgtacttcgccatcatcacatgctgcctgctgatggctatggtcaagcggaaggacagccggggaagggccaagcgatctggatctggagcaacaaacttctcactactcaaacaagcaggtgacgtggaggagaatcccgggcctactagtatggactggatttggcgcatccttttccttgtcggcgctgctaccggcgcgcattccttcgaagaagttcagctggtggaatctggccctggcctggtcaagcctagcgagacactgagcctgacctgtaccgtgtccggcttcagcctgaccagatttggcgtgcactgggtccgacagccacctggcaaaggactggaatggctgggagtgatttggagaggcggcagcaccgattacaacgccgccttcatgagccggctgaccatcagcaaggacaacagcaagaaccaggtgtccctgaagctgagcagcgtgacagccgctgataccgccgtgtactactgctccaaccactactacggcagctccgactacgccctggataattggggccagggaaccctggtcaccgtgtcatctacgcgtatccagaaccctgatcctgccgtgtaccagctgcgggatagcaagagcagcgacaagagcgtgtgtctgttcaccgacttcgacagccagaccaacgtgtcccagagcaaggactccgacgtgtacatcaccgataagtgcgtgctggacatgcggagcatggacttcaagagcaactccgccgtggcctggtccaacaagtccgatttcgcctgcgccaacgccttcaacaacagcattatccccgaggacacattcttcccaagccccgagagcagcgactccaccgaccacgtgaagcccaaagagacagagaacaccaagcagcccagcaagagctgccacaagcccaaggccatcgtgcacaccgagaaagtgaacatgatgagcctgaccgtgctgggcctgcggatgctgttcgccaaaaccgtggccgtgaacttcctgctgaccgccaagctgttcttcctcctcaccgcc

SEQ ID NO: 35365 - DNA, 2187 bp, synthetic construct
  source 1..2187: mol_type = other DNA
atggccttaccagtgaccgccttgctcctgccgctggccttgctgctccacgccgccaggccggacatccagatgacacagagccctagcagcctgtctgccagcgtgggagacagagtgaccatcacctgtagagccagccaggacgtgcggaacatcgtcgtgtggttccagcagaagcctggcaaggcccctaagctgctgatctacagcggcagctacagatacagcggcgtgcccagcagattttccggctctggctctggcaccgacttcaccctgacaatatccagcctccagcctgaggacttcgccacctactactgccagcagcactacagccctccatacacattcggccagggcaccaaggtggaaatcaagagactcgagatccagaaccctgatcctgccgtgtaccagctgcgggatagcaagagcagcgacaagagcgtgtgtctgttcaccgacttcgacagccagaccaacgtgtcccagagcaaggactccgacgtgtacatcaccgataagtgcgtgctggacatgcggagcatggacttcaagagcaactccgccgtggcctggtccaacaagtccgatttcgcctgcgccaacgccttcaacaacagcattatccccgaggacacattcttcccaagccccgagagcagcgactccaccgaccacgtgaagcccaaagagacagagaacaccaagcagcccagcaagagctgccacaagcccaaggccatcgtgcacaccgagaaagtgaacatgatgagcctgaccgtgctgggcctgcggatgctgttcgccaaaaccgtggccgtgaacttcctgctgaccgccaagctgttcttcctcctcaccgcccgcgccaagagaagcggatctggcgtgaagcagaccctgaatttcgacctgctgaagctggctggcgacgtggaatccaacccaggccctactagtatggactggatttggcgcatccttttccttgtcggcgctgctaccggcgcgcattccttcgaagaagttcagctggtggaatctggccctggcctggtcaagcctagcgagacactgagcctgacctgtaccgtgtccggcttcagcctgaccagatttggcgtgcactgggtccgacagccacctggcaaaggactggaatggctgggagtgatttggagaggcggcagcaccgattacaacgccgccttcatgagccggctgaccatcagcaaggacaacagcaagaaccaggtgtccctgaagctgagcagcgtgacagccgctgataccgccgtgtactactgctccaaccactactacggcagctccgactacgccctggataattggggccagggaaccctggtcaccgtgtcatctacgcgtgaggacctgaagaacgtgttcccacctgaggtggccgtgttcgagcctagcgaggccgagatcagccacacccagaaagccaccctcgtgtgcctggctaccggcttctaccccgaccatgtggaactgtcttggtgggtcaacggcaaagaggtgcacagcggcgtgtgtaccgacccccagccactgaaagaacagcccgccctgaacgacagccggtactgcctgagcagcagactgagagtgtccgccaccttctggcagaacccccggaaccacttcagatgccaggtgcagttctacggcctgagcgagaacgacgagtggacccaggacagagccaagcccgtgacccagatcgtgtctgccgaagcctggggcagagccgatgatgtgattaagatccactggcaggaaaagaagtccaacaccatcctgggcagccaggaaggcaacaccatgaagaccaacgacacctacatgaagttcagctggctgaccgtgcccgagaagtccctggacaaagaacacagatgcatcgtgcggcacgaaaacaacaagaacggcgtggaccaggaaatcatcttcccacccatcaagaccgatgtgattacaatggaccccaaggacaactgctccaaggacgccaacgataccctgctgctccagctgaccaacaccagcgcctactacatgtacttgttgctgctgctgaagtccgtggtgtacttcgccatcatcacatgctgcctgctgatggctatggtcaagcggaaggacagccgggga

SEQ ID NO: 35366 - DNA, 2580 bp, synthetic construct
  source 1..2580: mol_type = other DNA
atggccttaccagtgaccgccttgctcctgccgctggccttgctgctccacgccgccaggccggaagtgcagctggttgaatctggcggaggactggttcagcctggcggatctctgagactgtcttgtgccgccagcggcttcagcttcagcgacttttggatgagctgggtccgacaggcccctggcaaaggacttgaatgggtcgccacaatcagccaggccggcagcgagaaggactacgtggactctgtgaagggcagattcaccatcagccgggacaacgccaagaagtccctgtacctccagatgaacagcctgagagccgaggacaccgccgtgtactattgtgcctctggcgtgtacagcttcgactacagaggccagggcaccctggtcacagtctcttctggtaccggcggaggcggatctggcggcggaggtagcggtggcggaggatctgaattcgacatccagatgacacagagccctagcagcctgtctgccagcgtgggagacagagtgaccatcacctgtagagccagccaggacgtgcggaacatcgtcgtgtggttccagcagaagcctggcaaggcccctaagctgctgatctacagcggcagctacagatacagcggcgtgcccagcagattttccggctctggctctggcaccgacttcaccctgacaatatccagcctccagcctgaggacttcgccacctactactgccagcagcactacagccctccatacacattcggccagggcaccaaggtggaaatcaagagactcgaggacctgaagaacgtgttcccacctgaggtggccgtgttcgagcctagcgaggccgagatcagccacacccagaaagccaccctcgtgtgcctggctaccggcttctaccccgaccatgtggaactgtcttggtgggtcaacggcaaagaggtgcacagcggcgtgtgtaccgacccccagccactgaaagaacagcccgccctgaacgacagccggtactgcctgagcagcagactgagagtgtccgccaccttctggcagaacccccggaaccacttcagatgccaggtgcagttctacggcctgagcgagaacgacgagtggacccaggacagagccaagcccgtgacccagatcgtgtctgccgaagcctggggcagagccgatgatgtgattaagatccactggcaggaaaagaagtccaacaccatcctgggcagccaggaaggcaacaccatgaagaccaacgacacctacatgaagttcagctggctgaccgtgcccgagaagtccctggacaaagaacacagatgcatcgtgcggcacgaaaacaacaagaacggcgtggaccaggaaatcatcttcccacccatcaagaccgatgtgattacaatggaccccaaggacaactgctccaaggacgccaacgataccctgctgctccagctgaccaacaccagcgcctactacatgtacttgttgctgctgctgaagtccgtggtgtacttcgccatcatcacatgctgcctgctgatggctatggtcaagcggaaggacagccggggaagggccaagcgatctggatctggagcaacaaacttctcactactcaaacaagcaggtgacgtggaggagaatcccgggcctactagtatggactggatttggcgcatccttttccttgtcggcgctgctaccggcgcgcattccttcgaagaagttcagctggtggaatctggccctggcctggtcaagcctagcgagacactgagcctgacctgtaccgtgtccggcttcagcctgaccagatttggcgtgcactgggtccgacagccacctggcaaaggactggaatggctgggagtgatttggagaggcggcagcaccgattacaacgccgccttcatgagccggctgaccatcagcaaggacaacagcaagaaccaggtgtccctgaagctgagcagcgtgacagccgctgataccgccgtgtactactgctccaaccactactacggcagctccgactacgccctggataattggggccagggaaccctggtcaccgtgtcatctacgcgtatccagaaccctgatcctgccgtgtaccagctgcgggatagcaagagcagcgacaagagcgtgtgtctgttcaccgacttcgacagccagaccaacgtgtcccagagcaaggactccgacgtgtacatcaccgataagtgcgtgctggacatgcggagcatggacttcaagagcaactccgccgtggcctggtccaacaagtccgatttcgcctgcgccaacgccttcaacaacagcattatccccgaggacacattcttcccaagccccgagagcagcgactccaccgaccacgtgaagcccaaagagacagagaacaccaagcagcccagcaagagctgccacaagcccaaggccatcgtgcacaccgagaaagtgaacatgatgagcctgaccgtgctgggcctgcggatgctgttcgccaaaaccgtggccgtgaacttcctgctgaccgccaagctgttcttcctcctcaccgcc

SEQ ID NO: 35367 - DNA, 2592 bp, synthetic construct
  source 1..2592: mol_type = other DNA
atggccttaccagtgaccgccttgctcctgccgctggccttgctgctccacgccgccaggccggaagtgcagctggttgaatctggcggaggactggttcagcctggcggatctctgagactgtcttgtgccgccagcggcttcagcttcagcgacttttggatgagctgggtccgacaggcccctggcaaaggacttgaatgggtcgccacaatcagccaggccggcagcgagaaggactacgtggactctgtgaagggcagattcaccatcagccgggacaacgccaagaagtccctgtacctccagatgaacagcctgagagccgaggacaccgccgtgtactattgtgcctctggcgtgtacagcttcgactacagaggccagggcaccctggtcacagtctcttctggtaccggcggaggcggatctggcggcggaggtagcggtggcggaggatctgaattcgacatccagatgacacagagccctagcagcctgtctgccagcgtgggagacagagtgaccatcacctgtagagccagccaggacgtgcggaacatcgtcgtgtggttccagcagaagcctggcaaggcccctaagctgctgatctacagcggcagctacagatacagcggcgtgcccagcagattttccggctctggctctggcaccgacttcaccctgacaatatccagcctccagcctgaggacttcgccacctactactgccagcagcactacagccctccatacacattcggccagggcaccaaggtggaaatcaagagactcgagatccagaaccctgatcctgccgtgtaccagctgcgggatagcaagagcagcgacaagagcgtgtgtctgttcaccgacttcgacagccagaccaacgtgtcccagagcaaggactccgacgtgtacatcaccgataagtgcgtgctggacatgcggagcatggacttcaagagcaactccgccgtggcctggtccaacaagtccgatttcgcctgcgccaacgccttcaacaacagcattatccccgaggacacattcttcccaagccccgagagcagcgactccaccgaccacgtgaagcccaaagagacagagaacaccaagcagcccagcaagagctgccacaagcccaaggccatcgtgcacaccgagaaagtgaacatgatgagcctgaccgtgctgggcctgcggatgctgttcgccaaaaccgtggccgtgaacttcctgctgaccgccaagctgttcttcctcctcaccgcccgcgccaagagaagcggatctggcgtgaagcagaccctgaatttcgacctgctgaagctggctggcgacgtggaatccaacccaggccctactagtatggactggatttggcgcatccttttccttgtcggcgctgctaccggcgcgcattccttcgaagaagttcagctggtggaatctggccctggcctggtcaagcctagcgagacactgagcctgacctgtaccgtgtccggcttcagcctgaccagatttggcgtgcactgggtccgacagccacctggcaaaggactggaatggctgggagtgatttggagaggcggcagcaccgattacaacgccgccttcatgagccggctgaccatcagcaaggacaacagcaagaaccaggtgtccctgaagctgagcagcgtgacagccgctgataccgccgtgtactactgctccaaccactactacggcagctccgactacgccctggataattggggccagggaaccctggtcaccgtgtcatctacgcgtgaggacctgaagaacgtgttcccacctgaggtggccgtgttcgagcctagcgaggccgagatcagccacacccagaaagccaccctcgtgtgcctggctaccggcttctaccccgaccatgtggaactgtcttggtgggtcaacggcaaagaggtgcacagcggcgtgtgtaccgacccccagccactgaaagaacagcccgccctgaacgacagccggtactgcctgagcagcagactgagagtgtccgccaccttctggcagaacccccggaaccacttcagatgccaggtgcagttctacggcctgagcgagaacgacgagtggacccaggacagagccaagcccgtgacccagatcgtgtctgccgaagcctggggcagagccgatgatgtgattaagatccactggcaggaaaagaagtccaacaccatcctgggcagccaggaaggcaacaccatgaagaccaacgacacctacatgaagttcagctggctgaccgtgcccgagaagtccctggacaaagaacacagatgcatcgtgcggcacgaaaacaacaagaacggcgtggaccaggaaatcatcttcccacccatcaagaccgatgtgattacaatggaccccaaggacaactgctccaaggacgccaacgataccctgctgctccagctgaccaacaccagcgcctactacatgtacttgttgctgctgctgaagtccgtggtgtacttcgccatcatcacatgctgcctgctgatggctatggtcaagcggaaggacagccgggga

SEQ ID NO: 35368 - DNA, 2991 bp, synthetic construct
  source 1..2991: mol_type = other DNA
atggccttaccagtgaccgccttgctcctgccgctggccttgctgctccacgccgccaggccggaagtgcagctggttgaatctggcggaggactggttcagcctggcggatctctgagactgtcttgtgccgccagcggcttcagcttcagcgacttttggatgagctgggtccgacaggcccctggcaaaggacttgaatgggtcgccacaatcagccaggccggcagcgagaaggactacgtggactctgtgaagggcagattcaccatcagccgggacaacgccaagaagtccctgtacctccagatgaacagcctgagagccgaggacaccgccgtgtactattgtgcctctggcgtgtacagcttcgactacagaggccagggcaccctggtcacagtctcttctggtaccggcggaggcggatctggcggcggaggtagcggtggcggaggatctgaattcgacatccagatgacacagagccctagcagcctgtctgccagcgtgggagacagagtgaccatcacctgtagagccagccaggacgtgcggaacatcgtcgtgtggttccagcagaagcctggcaaggcccctaagctgctgatctacagcggcagctacagatacagcggcgtgcccagcagattttccggctctggctctggcaccgacttcaccctgacaatatccagcctccagcctgaggacttcgccacctactactgccagcagcactacagccctccatacacattcggccagggcaccaaggtggaaatcaagagactcgaggacctgaagaacgtgttcccacctgaggtggccgtgttcgagcctagcgaggccgagatcagccacacccagaaagccaccctcgtgtgcctggctaccggcttctaccccgaccatgtggaactgtcttggtgggtcaacggcaaagaggtgcacagcggcgtgtgtaccgacccccagccactgaaagaacagcccgccctgaacgacagccggtactgcctgagcagcagactgagagtgtccgccaccttctggcagaacccccggaaccacttcagatgccaggtgcagttctacggcctgagcgagaacgacgagtggacccaggacagagccaagcccgtgacccagatcgtgtctgccgaagcctggggcagagccgatgatgtgattaagatccactggcaggaaaagaagtccaacaccatcctgggcagccaggaaggcaacaccatgaagaccaacgacacctacatgaagttcagctggctgaccgtgcccgagaagtccctggacaaagaacacagatgcatcgtgcggcacgaaaacaacaagaacggcgtggaccaggaaatcatcttcccacccatcaagaccgatgtgattacaatggaccccaaggacaactgctccaaggacgccaacgataccctgctgctccagctgaccaacaccagcgcctactacatgtacttgttgctgctgctgaagtccgtggtgtacttcgccatcatcacatgctgcctgctgatggctatggtcaagcggaaggacagccggggaagggccaagcgatctggatctggagcaacaaacttctcactactcaaacaagcaggtgacgtggaggagaatcccgggcctactagtatggactggatttggcgcatccttttccttgtcggcgctgctaccggcgcgcattccgggccccagctccagctgcaagagtctggacctggcctggtcaagcctagcgagacactgagcctgacctgtaccgtgtccggcgatagcatcagcagcggcgattactactggggctggatcagacagcctcctggcaaaggactggaatggatcggccacatctactacagcggcgtgacctactacaaccccagcctgaagtccagagtgaccatcagcgtggacaccagccggaaccagttctccctgaagctgtctagcgtgacagccgccgataccgccgtgtactactgcaccagagaggacagcagcaactggcggagtagaggccagggaacactggtcacagttagctctggatccggcggaggcggaagtggaggcggaggatctggcggcggaggctctttcgaagaagttcagctggtggaatctggccctggcctggtcaagcctagcgagacactgagcctgacctgtaccgtgtccggcttcagcctgaccagatttggcgtgcactgggtccgacagccacctggcaaaggactggaatggctgggagtgatttggagaggcggcagcaccgattacaacgccgccttcatgagccggctgaccatcagcaaggacaacagcaagaaccaggtgtccctgaagctgagcagcgtgacagccgctgataccgccgtgtactactgctccaaccactactacggcagctccgactacgccctggataattggggccagggaaccctggtcaccgtgtcatctacgcgtatccagaaccctgatcctgccgtgtaccagctgcgggatagcaagagcagcgacaagagcgtgtgtctgttcaccgacttcgacagccagaccaacgtgtcccagagcaaggactccgacgtgtacatcaccgataagtgcgtgctggacatgcggagcatggacttcaagagcaactccgccgtggcctggtccaacaagtccgatttcgcctgcgccaacgccttcaacaacagcattatccccgaggacacattcttcccaagccccgagagcagcgactccaccgaccacgtgaagcccaaagagacagagaacaccaagcagcccagcaagagctgccacaagcccaaggccatcgtgcacaccgagaaagtgaacatgatgagcctgaccgtgctgggcctgcggatgctgttcgccaaaaccgtggccgtgaacttcctgctgaccgccaagctgttcttcctcctcaccgcc

SEQ ID NO: 35369 - DNA, 3003 bp, synthetic construct
  source 1..3003: mol_type = other DNA
atggccttaccagtgaccgccttgctcctgccgctggccttgctgctccacgccgccaggccggaagtgcagctggttgaatctggcggaggactggttcagcctggcggatctctgagactgtcttgtgccgccagcggcttcagcttcagcgacttttggatgagctgggtccgacaggcccctggcaaaggacttgaatgggtcgccacaatcagccaggccggcagcgagaaggactacgtggactctgtgaagggcagattcaccatcagccgggacaacgccaagaagtccctgtacctccagatgaacagcctgagagccgaggacaccgccgtgtactattgtgcctctggcgtgtacagcttcgactacagaggccagggcaccctggtcacagtctcttctggtaccggcggaggcggatctggcggcggaggtagcggtggcggaggatctgaattcgacatccagatgacacagagccctagcagcctgtctgccagcgtgggagacagagtgaccatcacctgtagagccagccaggacgtgcggaacatcgtcgtgtggttccagcagaagcctggcaaggcccctaagctgctgatctacagcggcagctacagatacagcggcgtgcccagcagattttccggctctggctctggcaccgacttcaccctgacaatatccagcctccagcctgaggacttcgccacctactactgccagcagcactacagccctccatacacattcggccagggcaccaaggtggaaatcaagagactcgagatccagaaccctgatcctgccgtgtaccagctgcgggatagcaagagcagcgacaagagcgtgtgtctgttcaccgacttcgacagccagaccaacgtgtcccagagcaaggactccgacgtgtacatcaccgataagtgcgtgctggacatgcggagcatggacttcaagagcaactccgccgtggcctggtccaacaagtccgatttcgcctgcgccaacgccttcaacaacagcattatccccgaggacacattcttcccaagccccgagagcagcgactccaccgaccacgtgaagcccaaagagacagagaacaccaagcagcccagcaagagctgccacaagcccaaggccatcgtgcacaccgagaaagtgaacatgatgagcctgaccgtgctgggcctgcggatgctgttcgccaaaaccgtggccgtgaacttcctgctgaccgccaagctgttcttcctcctcaccgcccgcgccaagagaagcggatctggcgtgaagcagaccctgaatttcgacctgctgaagctggctggcgacgtggaatccaacccaggccctactagtatggactggatttggcgcatccttttccttgtcggcgctgctaccggcgcgcattccgggccccagctccagctgcaagagtctggacctggcctggtcaagcctagcgagacactgagcctgacctgtaccgtgtccggcgatagcatcagcagcggcgattactactggggctggatcagacagcctcctggcaaaggactggaatggatcggccacatctactacagcggcgtgacctactacaaccccagcctgaagtccagagtgaccatcagcgtggacaccagccggaaccagttctccctgaagctgtctagcgtgacagccgccgataccgccgtgtactactgcaccagagaggacagcagcaactggcggagtagaggccagggaacactggtcacagttagctctggatccggcggaggcggaagtggaggcggaggatctggcggcggaggctctttcgaagaagttcagctggtggaatctggccctggcctggtcaagcctagcgagacactgagcctgacctgtaccgtgtccggcttcagcctgaccagatttggcgtgcactgggtccgacagccacctggcaaaggactggaatggctgggagtgatttggagaggcggcagcaccgattacaacgccgccttcatgagccggctgaccatcagcaaggacaacagcaagaaccaggtgtccctgaagctgagcagcgtgacagccgctgataccgccgtgtactactgctccaaccactactacggcagctccgactacgccctggataattggggccagggaaccctggtcaccgtgtcatctacgcgtgaggacctgaagaacgtgttcccacctgaggtggccgtgttcgagcctagcgaggccgagatcagccacacccagaaagccaccctcgtgtgcctggctaccggcttctaccccgaccatgtggaactgtcttggtgggtcaacggcaaagaggtgcacagcggcgtgtgtaccgacccccagccactgaaagaacagcccgccctgaacgacagccggtactgcctgagcagcagactgagagtgtccgccaccttctggcagaacccccggaaccacttcagatgccaggtgcagttctacggcctgagcgagaacgacgagtggacccaggacagagccaagcccgtgacccagatcgtgtctgccgaagcctggggcagagccgatgatgtgattaagatccactggcaggaaaagaagtccaacaccatcctgggcagccaggaaggcaacaccatgaagaccaacgacacctacatgaagttcagctggctgaccgtgcccgagaagtccctggacaaagaacacagatgcatcgtgcggcacgaaaacaacaagaacggcgtggaccaggaaatcatcttcccacccatcaagaccgatgtgattacaatggaccccaaggacaactgctccaaggacgccaacgataccctgctgctccagctgaccaacaccagcgcctactacatgtacttgttgctgctgctgaagtccgtggtgtacttcgccatcatcacatgctgcctgctgatggctatggtcaagcggaaggacagccgggga

SEQ ID NO: 35370 - DNA, 2169 bp, synthetic construct
  source 1..2169: mol_type = other DNA
atggccttaccagtgaccgccttgctcctgccgctggccttgctgctccacgccgccaggccggacatccagatgacacagagccctagcagcctgtctgccagcgtgggagacagagtgaccatcacctgtagagccagccaggacgtgcggaacatcgtcgtgtggttccagcagaagcctggcaaggcccctaagctgctgatctacagcggcagctacagatacagcggcgtgcccagcagattttccggctctggctctggcaccgacttcaccctgacaatatccagcctccagcctgaggacttcgccacctactactgccagcagcactacagccctccatacacattcggccagggcaccaaggtggaaatcaagagactcgaggacctgaagaacgtgttcccacctgaggtggccgtgttcgagcctagcgaggccgagatcagccacacccagaaagccaccctcgtgtgcctggctaccggcttctaccccgaccatgtggaactgtcttggtgggtcaacggcaaagaggtgcacagcggcgtgtgtaccgacccccagccactgaaagaacagcccgccctgaacgacagccggtactgcctgagcagcagactgagagtgtccgccaccttctggcagaacccccggaaccacttcagatgccaggtgcagttctacggcctgagcgagaacgacgagtggacccaggacagagccaagcccgtgacccagatcgtgtctgccgaagcctggggcagagccgatgatgtgattaagatccactggcaggaaaagaagtccaacaccatcctgggcagccaggaaggcaacaccatgaagaccaacgacacctacatgaagttcagctggctgaccgtgcccgagaagtccctggacaaagaacacagatgcatcgtgcggcacgaaaacaacaagaacggcgtggaccaggaaatcatcttcccacccatcaagaccgatgtgattacaatggaccccaaggacaactgctccaaggacgccaacgataccctgctgctccagctgaccaacaccagcgcctactacatgtacttgttgctgctgctgaagtccgtggtgtacttcgccatcatcacatgctgcctgctgcggagaaccgccttctgctgcaacggcgagaagtctagggccaagcgatctggatctggagcaacaaacttctcactactcaaacaagcaggtgacgtggaggagaatcccgggcctactagtatggactggatttggcgcatccttttccttgtcggcgctgctaccggcgcgcattccttcgaagaagttcagctggtggaatctggccctggcctggtcaagcctagcgagacactgagcctgacctgtaccgtgtccggcttcagcctgaccagatttggcgtgcactgggtccgacagccacctggcaaaggactggaatggctgggagtgatttggagaggcggcagcaccgattacaacgccgccttcatgagccggctgaccatcagcaaggacaacagcaagaaccaggtgtccctgaagctgagcagcgtgacagccgctgataccgccgtgtactactgctccaaccactactacggcagctccgactacgccctggataattggggccagggaaccctggtcaccgtgtcatctacgcgtatccagaaccctgatcctgccgtgtaccagctgcgggatagcaagagcagcgacaagagcgtgtgtctgttcaccgacttcgacagccagaccaacgtgtcccagagcaaggactccgacgtgtacatcaccgataagtgcgtgctggacatgcggagcatggacttcaagagcaactccgccgtggcctggtccaacaagtccgatttcgcctgcgccaacgccttcaacaacagcattatccccgaggacacattcttcccaagccccgagagcagcgactccaccgaccacgtgaagcccaaagagacagagaacaccaagcagcccagcaagagctgccacaagcccaaggccatcgtgcacaccgagaaagtgaacatgatgagcctgaccgtgctgggcctgcggatgctgttcgccaaaaccgtggccgtgaacttcctgctgaccgccaagctgttcttcctc

SEQ ID NO: 35371 - DNA, 2181 bp, synthetic construct
  source 1..2181: mol_type = other DNA
atggccttaccagtgaccgccttgctcctgccgctggccttgctgctccacgccgccaggccggacatccagatgacacagagccctagcagcctgtctgccagcgtgggagacagagtgaccatcacctgtagagccagccaggacgtgcggaacatcgtcgtgtggttccagcagaagcctggcaaggcccctaagctgctgatctacagcggcagctacagatacagcggcgtgcccagcagattttccggctctggctctggcaccgacttcaccctgacaatatccagcctccagcctgaggacttcgccacctactactgccagcagcactacagccctccatacacattcggccagggcaccaaggtggaaatcaagagactcgagatccagaaccctgatcctgccgtgtaccagctgcgggatagcaagagcagcgacaagagcgtgtgtctgttcaccgacttcgacagccagaccaacgtgtcccagagcaaggactccgacgtgtacatcaccgataagtgcgtgctggacatgcggagcatggacttcaagagcaactccgccgtggcctggtccaacaagtccgatttcgcctgcgccaacgccttcaacaacagcattatccccgaggacacattcttcccaagccccgagagcagcgactccaccgaccacgtgaagcccaaagagacagagaacaccaagcagcccagcaagagctgccacaagcccaaggccatcgtgcacaccgagaaagtgaacatgatgagcctgaccgtgctgggcctgcggatgctgttcgccaaaaccgtggccgtgaacttcctgctgaccgccaagctgttcttcctccgcgccaagagaagcggatctggcgtgaagcagaccctgaatttcgacctgctgaagctggctggcgacgtggaatccaacccaggccctactagtatggactggatttggcgcatccttttccttgtcggcgctgctaccggcgcgcattccttcgaagaagttcagctggtggaatctggccctggcctggtcaagcctagcgagacactgagcctgacctgtaccgtgtccggcttcagcctgaccagatttggcgtgcactgggtccgacagccacctggcaaaggactggaatggctgggagtgatttggagaggcggcagcaccgattacaacgccgccttcatgagccggctgaccatcagcaaggacaacagcaagaaccaggtgtccctgaagctgagcagcgtgacagccgctgataccgccgtgtactactgctccaaccactactacggcagctccgactacgccctggataattggggccagggaaccctggtcaccgtgtcatctacgcgtgaggacctgaagaacgtgttcccacctgaggtggccgtgttcgagcctagcgaggccgagatcagccacacccagaaagccaccctcgtgtgcctggctaccggcttctaccccgaccatgtggaactgtcttggtgggtcaacggcaaagaggtgcacagcggcgtgtgtaccgacccccagccactgaaagaacagcccgccctgaacgacagccggtactgcctgagcagcagactgagagtgtccgccaccttctggcagaacccccggaaccacttcagatgccaggtgcagttctacggcctgagcgagaacgacgagtggacccaggacagagccaagcccgtgacccagatcgtgtctgccgaagcctggggcagagccgatgatgtgattaagatccactggcaggaaaagaagtccaacaccatcctgggcagccaggaaggcaacaccatgaagaccaacgacacctacatgaagttcagctggctgaccgtgcccgagaagtccctggacaaagaacacagatgcatcgtgcggcacgaaaacaacaagaacggcgtggaccaggaaatcatcttcccacccatcaagaccgatgtgattacaatggaccccaaggacaactgctccaaggacgccaacgataccctgctgctccagctgaccaacaccagcgcctactacatgtacttgttgctgctgctgaagtccgtggtgtacttcgccatcatcacatgctgcctgctgcggagaaccgccttctgctgcaacggcgagaagtct

SEQ ID NO: 35372 - DNA, 2574 bp, synthetic construct
  source 1..2574: mol_type = other DNA
atggccttaccagtgaccgccttgctcctgccgctggccttgctgctccacgccgccaggccggaagtgcagctggttgaatctggcggaggactggttcagcctggcggatctctgagactgtcttgtgccgccagcggcttcagcttcagcgacttttggatgagctgggtccgacaggcccctggcaaaggacttgaatgggtcgccacaatcagccaggccggcagcgagaaggactacgtggactctgtgaagggcagattcaccatcagccgggacaacgccaagaagtccctgtacctccagatgaacagcctgagagccgaggacaccgccgtgtactattgtgcctctggcgtgtacagcttcgactacagaggccagggcaccctggtcacagtctcttctggtaccggcggaggcggatctggcggcggaggtagcggtggcggaggatctgaattcgacatccagatgacacagagccctagcagcctgtctgccagcgtgggagacagagtgaccatcacctgtagagccagccaggacgtgcggaacatcgtcgtgtggttccagcagaagcctggcaaggcccctaagctgctgatctacagcggcagctacagatacagcggcgtgcccagcagattttccggctctggctctggcaccgacttcaccctgacaatatccagcctccagcctgaggacttcgccacctactactgccagcagcactacagccctccatacacattcggccagggcaccaaggtggaaatcaagagactcgaggacctgaagaacgtgttcccacctgaggtggccgtgttcgagcctagcgaggccgagatcagccacacccagaaagccaccctcgtgtgcctggctaccggcttctaccccgaccatgtggaactgtcttggtgggtcaacggcaaagaggtgcacagcggcgtgtgtaccgacccccagccactgaaagaacagcccgccctgaacgacagccggtactgcctgagcagcagactgagagtgtccgccaccttctggcagaacccccggaaccacttcagatgccaggtgcagttctacggcctgagcgagaacgacgagtggacccaggacagagccaagcccgtgacccagatcgtgtctgccgaagcctggggcagagccgatgatgtgattaagatccactggcaggaaaagaagtccaacaccatcctgggcagccaggaaggcaacaccatgaagaccaacgacacctacatgaagttcagctggctgaccgtgcccgagaagtccctggacaaagaacacagatgcatcgtgcggcacgaaaacaacaagaacggcgtggaccaggaaatcatcttcccacccatcaagaccgatgtgattacaatggaccccaaggacaactgctccaaggacgccaacgataccctgctgctccagctgaccaacaccagcgcctactacatgtacttgttgctgctgctgaagtccgtggtgtacttcgccatcatcacatgctgcctgctgcggagaaccgccttctgctgcaacggcgagaagtctagggccaagcgatctggatctggagcaacaaacttctcactactcaaacaagcaggtgacgtggaggagaatcccgggcctactagtatggactggatttggcgcatccttttccttgtcggcgctgctaccggcgcgcattccttcgaagaagttcagctggtggaatctggccctggcctggtcaagcctagcgagacactgagcctgacctgtaccgtgtccggcttcagcctgaccagatttggcgtgcactgggtccgacagccacctggcaaaggactggaatggctgggagtgatttggagaggcggcagcaccgattacaacgccgccttcatgagccggctgaccatcagcaaggacaacagcaagaaccaggtgtccctgaagctgagcagcgtgacagccgctgataccgccgtgtactactgctccaaccactactacggcagctccgactacgccctggataattggggccagggaaccctggtcaccgtgtcatctacgcgtatccagaaccctgatcctgccgtgtaccagctgcgggatagcaagagcagcgacaagagcgtgtgtctgttcaccgacttcgacagccagaccaacgtgtcccagagcaaggactccgacgtgtacatcaccgataagtgcgtgctggacatgcggagcatggacttcaagagcaactccgccgtggcctggtccaacaagtccgatttcgcctgcgccaacgccttcaacaacagcattatccccgaggacacattcttcccaagccccgagagcagcgactccaccgaccacgtgaagcccaaagagacagagaacaccaagcagcccagcaagagctgccacaagcccaaggccatcgtgcacaccgagaaagtgaacatgatgagcctgaccgtgctgggcctgcggatgctgttcgccaaaaccgtggccgtgaacttcctgctgaccgccaagctgttcttcctc

SEQ ID NO: 35373 - DNA, 2985 bp, synthetic construct
  source 1..2985: mol_type = other DNA
atggccttaccagtgaccgccttgctcctgccgctggccttgctgctccacgccgccaggccggaagtgcagctggttgaatctggcggaggactggttcagcctggcggatctctgagactgtcttgtgccgccagcggcttcagcttcagcgacttttggatgagctgggtccgacaggcccctggcaaaggacttgaatgggtcgccacaatcagccaggccggcagcgagaaggactacgtggactctgtgaagggcagattcaccatcagccgggacaacgccaagaagtccctgtacctccagatgaacagcctgagagccgaggacaccgccgtgtactattgtgcctctggcgtgtacagcttcgactacagaggccagggcaccctggtcacagtctcttctggtaccggcggaggcggatctggcggcggaggtagcggtggcggaggatctgaattcgacatccagatgacacagagccctagcagcctgtctgccagcgtgggagacagagtgaccatcacctgtagagccagccaggacgtgcggaacatcgtcgtgtggttccagcagaagcctggcaaggcccctaagctgctgatctacagcggcagctacagatacagcggcgtgcccagcagattttccggctctggctctggcaccgacttcaccctgacaatatccagcctccagcctgaggacttcgccacctactactgccagcagcactacagccctccatacacattcggccagggcaccaaggtggaaatcaagagactcgaggacctgaagaacgtgttcccacctgaggtggccgtgttcgagcctagcgaggccgagatcagccacacccagaaagccaccctcgtgtgcctggctaccggcttctaccccgaccatgtggaactgtcttggtgggtcaacggcaaagaggtgcacagcggcgtgtgtaccgacccccagccactgaaagaacagcccgccctgaacgacagccggtactgcctgagcagcagactgagagtgtccgccaccttctggcagaacccccggaaccacttcagatgccaggtgcagttctacggcctgagcgagaacgacgagtggacccaggacagagccaagcccgtgacccagatcgtgtctgccgaagcctggggcagagccgatgatgtgattaagatccactggcaggaaaagaagtccaacaccatcctgggcagccaggaaggcaacaccatgaagaccaacgacacctacatgaagttcagctggctgaccgtgcccgagaagtccctggacaaagaacacagatgcatcgtgcggcacgaaaacaacaagaacggcgtggaccaggaaatcatcttcccacccatcaagaccgatgtgattacaatggaccccaaggacaactgctccaaggacgccaacgataccctgctgctccagctgaccaacaccagcgcctactacatgtacttgttgctgctgctgaagtccgtggtgtacttcgccatcatcacatgctgcctgctgcggagaaccgccttctgctgcaacggcgagaagtctagggccaagcgatctggatctggagcaacaaacttctcactactcaaacaagcaggtgacgtggaggagaatcccgggcctactagtatggactggatttggcgcatccttttccttgtcggcgctgctaccggcgcgcattccgggccccagctccagctgcaagagtctggacctggcctggtcaagcctagcgagacactgagcctgacctgtaccgtgtccggcgatagcatcagcagcggcgattactactggggctggatcagacagcctcctggcaaaggactggaatggatcggccacatctactacagcggcgtgacctactacaaccccagcctgaagtccagagtgaccatcagcgtggacaccagccggaaccagttctccctgaagctgtctagcgtgacagccgccgataccgccgtgtactactgcaccagagaggacagcagcaactggcggagtagaggccagggaacactggtcacagttagctctggatccggcggaggcggaagtggaggcggaggatctggcggcggaggctctttcgaagaagttcagctggtggaatctggccctggcctggtcaagcctagcgagacactgagcctgacctgtaccgtgtccggcttcagcctgaccagatttggcgtgcactgggtccgacagccacctggcaaaggactggaatggctgggagtgatttggagaggcggcagcaccgattacaacgccgccttcatgagccggctgaccatcagcaaggacaacagcaagaaccaggtgtccctgaagctgagcagcgtgacagccgctgataccgccgtgtactactgctccaaccactactacggcagctccgactacgccctggataattggggccagggaaccctggtcaccgtgtcatctacgcgtatccagaaccctgatcctgccgtgtaccagctgcgggatagcaagagcagcgacaagagcgtgtgtctgttcaccgacttcgacagccagaccaacgtgtcccagagcaaggactccgacgtgtacatcaccgataagtgcgtgctggacatgcggagcatggacttcaagagcaactccgccgtggcctggtccaacaagtccgatttcgcctgcgccaacgccttcaacaacagcattatccccgaggacacattcttcccaagccccgagagcagcgactccaccgaccacgtgaagcccaaagagacagagaacaccaagcagcccagcaagagctgccacaagcccaaggccatcgtgcacaccgagaaagtgaacatgatgagcctgaccgtgctgggcctgcggatgctgttcgccaaaaccgtggccgtgaacttcctgctgaccgccaagctgttcttcctc

SEQ ID NO: 35374 - DNA, 1863 bp, synthetic construct
  source 1..1863: mol_type = other DNA
atggccttaccagtgaccgccttgctcctgccgctggccttgctgctccacgccgccaggccggacatccagatgacacagagccctagcagcctgtctgccagcgtgggagacagagtgaccatcacctgtagagccagccaggacgtgcggaacatcgtcgtgtggttccagcagaagcctggcaaggcccctaagctgctgatctacagcggcagctacagatacagcggcgtgcccagcagattttccggctctggctctggcaccgacttcaccctgacaatatccagcctccagcctgaggacttcgccacctactactgccagcagcactacagccctccatacacattcggccagggcaccaaggtggaaatcaagagactcgaggacctgaagaacgtgttcccacctgaggtggccgtgttcgagcctagcgaggccgagatcagccacacccagaaagccaccctcgtgtgcctggctaccggcttctaccccgaccatgtggaactgtcttggtgggtcaacggcaaagaggtgcacagcggcgtgtctaccgacccccagccactgaaagaacagcccgccctgaacgacagccggtactgcctgagcagcagactgagagtgtccgccaccttctggcagaacccccggaaccacttcagatgccaggtgcagttctacggcctgagcgagaacgacgagtggacccaggacagagccaagcccgtgacccagatcgtgtctgccgaagcctggggcagagccgattgcgacgtgaagctggtggaaaagagcttcgagacagacaccaacctgaacttccagaacctgagcgtgatcggcttcagaatcctgctgctgaaagtggccggctttaacctgctgatgaccctgcggctgtggtccagcagggccaagcgatctggatctggagcaacaaacttctcactactcaaacaagcaggtgacgtggaggagaatcccgggcctactagtatggactggatttggcgcatccttttccttgtcggcgctgctaccggcgcgcattccttcgaagaagttcagctggtggaatctggccctggcctggtcaagcctagcgagacactgagcctgacctgtaccgtgtccggcttcagcctgaccagatttggcgtgcactgggtccgacagccacctggcaaaggactggaatggctgggagtgatttggagaggcggcagcaccgattacaacgccgccttcatgagccggctgaccatcagcaaggacaacagcaagaaccaggtgtccctgaagctgagcagcgtgacagccgctgataccgccgtgtactactgctccaaccactactacggcagctccgactacgccctggataattggggccagggaaccctggtcaccgtgtcatctacgcgtatccagaaccctgatcctgccgtgtaccagctgcgggatagcaagagcagcgacaagagcgtgtgtctgttcaccgacttcgacagccagaccaacgtgtcccagagcaaggactccgacgtgtacatcaccgataagaccgtgctggacatgcggagcatggacttcaagagcaactccgccgtggcctggtccaacaagtccgatttcgcctgcgccaacgccttcaacaacagcattatccccgaggacacattcttcccaagccccgagagcagctgcggctttaccagcgagagctaccagcagggcgtgctgagcgccaccatcctgtacgagatcctgctgggcaaggccaccctgtacgccgtgctggtgtctgccctggtgctgatggctatggtcaagcggaaggacagccgggga

SEQ ID NO: 35375 - DNA, 1863 bp, synthetic construct
  source 1..1863: mol_type = other DNA
atggccttaccagtgaccgccttgctcctgccgctggccttgctgctccacgccgccaggccggacatccagatgacacagagccctagcagcctgtctgccagcgtgggagacagagtgaccatcacctgtagagccagccaggacgtgcggaacatcgtcgtgtggttccagcagaagcctggcaaggcccctaagctgctgatctacagcggcagctacagatacagcggcgtgcccagcagattttccggctctggctctggcaccgacttcaccctgacaatatccagcctccagcctgaggacttcgccacctactactgccagcagcactacagccctccatacacattcggccagggcaccaaggtggaaatcaagagactcgaggacctgaagaacgtgttcccacctgaggtggccgtgttcgagcctagcgaggccgagatcagccacacccagaaagccaccctcgtgtgcctggctaccggcttctaccccgaccatgtggaactgtcttggtgggtcaacggcaaagaggtgcacagcggcgtgtctaccgacccccagccactgaaagaacagcccgccctgaacgacagccggtactgcctgagcagcagactgagagtgtccgccaccttctggcagaacccccggaaccacttcagatgccaggtgcagttctacggcctgagcgagaacgacgagtggacccaggacagagccaagcccgtgacccagatcgtgtctgccgaagcctggggcagagccgattgcggctttaccagcgagagctaccagcagggcgtgctgagcgccaccaacctgagcgtgatcggcttcagaatcctgctgctgaaagtggccggctttaacctgctgatgaccctgcggctgtggtccagcagggccaagcgatctggatctggagcaacaaacttctcactactcaaacaagcaggtgacgtggaggagaatcccgggcctactagtatggactggatttggcgcatccttttccttgtcggcgctgctaccggcgcgcattccttcgaagaagttcagctggtggaatctggccctggcctggtcaagcctagcgagacactgagcctgacctgtaccgtgtccggcttcagcctgaccagatttggcgtgcactgggtccgacagccacctggcaaaggactggaatggctgggagtgatttggagaggcggcagcaccgattacaacgccgccttcatgagccggctgaccatcagcaaggacaacagcaagaaccaggtgtccctgaagctgagcagcgtgacagccgctgataccgccgtgtactactgctccaaccactactacggcagctccgactacgccctggataattggggccagggaaccctggtcaccgtgtcatctacgcgtatccagaaccctgatcctgccgtgtaccagctgcgggatagcaagagcagcgacaagagcgtgtgtctgttcaccgacttcgacagccagaccaacgtgtcccagagcaaggactccgacgtgtacatcaccgataagaccgtgctggacatgcggagcatggacttcaagagcaactccgccgtggcctggtccaacaagtccgatttcgcctgcgccaacgccttcaacaacagcattatccccgaggacacattcttcccaagccccgagagcagctgcgacgtgaagctggtggaaaagagcttcgagacagacaccaacctgaacttccagatcctgtacgagatcctgctgggcaaggccaccctgtacgccgtgctggtgtctgccctggtgctgatggctatggtcaagcggaaggacagccgggga

SEQ ID NO: 35376 - DNA, 2175 bp, synthetic construct
  source 1..2175: mol_type = other DNA
atggccttaccagtgaccgccttgctcctgccgctggccttgctgctccacgccgccaggccggacatccagatgacacagagccctagcagcctgtctgccagcgtgggagacagagtgaccatcacctgtagagccagccaggacgtgcggaacatcgtcgtgtggttccagcagaagcctggcaaggcccctaagctgctgatctacagcggcagctacagatacagcggcgtgcccagcagattttccggctctggctctggcaccgacttcaccctgacaatatccagcctccagcctgaggacttcgccacctactactgccagcagcactacagccctccatacacattcggccagggcaccaaggtggaaatcaagagactcgaggacctgaagaacgtgttcccacctgaggtggccgtgttcgagcctagcgaggccgagatcagccacacccagaaagccaccctcgtgtgcctggctaccggcttctaccccgaccatgtggaactgtcttggtgggtcaacggcaaagaggtgcacagcggcgtgtctaccgacccccagccactgaaagaacagcccgccctgaacgacagccggtactgcctgagcagcagactgagagtgtccgccaccttctggcagaacccccggaaccacttcagatgccaggtgcagttctacggcctgagcgagaacgacgagtggacccaggacagagccaagcccgtgacccagatcgtgtctgccgaagcctggggcagagccgatgatgtgattaagatccactggcaggaaaagaagtccaacaccatcctgggcagccaggaaggcaacaccatgaagaccaacgacacctacatgaagttcagctggctgaccgtgcccgagaagtccctggacaaagaacacagatgcatcgtgcggcacgaaaacaacaagaacggcgtggaccaggaaatcatcttcccacccatcaagaccgatgtgattacaatggaccccaaggacaactgctccaaggacgccaacgataccctgctgctccagctgaccaacaccagcgcctactacatgtacttgttgctgctgctgaagtccgtggtgtacttcgccatcatcacatgctgcctgctgatggctatggtcaagcggaaggacagccggggaagggccaagcgatctggatctggagcaacaaacttctcactactcaaacaagcaggtgacgtggaggagaatcccgggcctactagtatggactggatttggcgcatccttttccttgtcggcgctgctaccggcgcgcattccttcgaagaagttcagctggtggaatctggccctggcctggtcaagcctagcgagacactgagcctgacctgtaccgtgtccggcttcagcctgaccagatttggcgtgcactgggtccgacagccacctggcaaaggactggaatggctgggagtgatttggagaggcggcagcaccgattacaacgccgccttcatgagccggctgaccatcagcaaggacaacagcaagaaccaggtgtccctgaagctgagcagcgtgacagccgctgataccgccgtgtactactgctccaaccactactacggcagctccgactacgccctggataattggggccagggaaccctggtcaccgtgtcatctacgcgtatccagaaccctgatcctgccgtgtaccagctgcgggatagcaagagcagcgacaagagcgtgtgtctgttcaccgacttcgacagccagaccaacgtgtcccagagcaaggactccgacgtgtacatcaccgataagaccgtgctggacatgcggagcatggacttcaagagcaactccgccgtggcctggtccaacaagtccgatttcgcctgcgccaacgccttcaacaacagcattatccccgaggacacattcttcccaagccccgagagcagcgactccaccgaccacgtgaagcccaaagagacagagaacaccaagcagcccagcaagagctgccacaagcccaaggccatcgtgcacaccgagaaagtgaacatgatgagcctgaccgtgctgggcctgcggatgctgttcgccaaaaccgtggccgtgaacttcctgctgaccgccaagctgttcttcctcctcaccgcc

SEQ ID NO: 35377 - DNA, 2169 bp, synthetic construct
  source 1..2169: mol_type = other DNA
atggccttaccagtgaccgccttgctcctgccgctggccttgctgctccacgccgccaggccggacatccagatgacacagagccctagcagcctgtctgccagcgtgggagacagagtgaccatcacctgtagagccagccaggacgtgcggaacatcgtcgtgtggttccagcagaagcctggcaaggcccctaagctgctgatctacagcggcagctacagatacagcggcgtgcccagcagattttccggctctggctctggcaccgacttcaccctgacaatatccagcctccagcctgaggacttcgccacctactactgccagcagcactacagccctccatacacattcggccagggcaccaaggtggaaatcaagagactcgaggacctgaagaacgtgttcccacctgaggtggccgtgttcgagcctagcgaggccgagatcagccacacccagaaagccaccctcgtgtgcctggctaccggcttctaccccgaccatgtggaactgtcttggtgggtcaacggcaaagaggtgcacagcggcgtgtctaccgacccccagccactgaaagaacagcccgccctgaacgacagccggtactgcctgagcagcagactgagagtgtccgccaccttctggcagaacccccggaaccacttcagatgccaggtgcagttctacggcctgagcgagaacgacgagtggacccaggacagagccaagcccgtgacccagatcgtgtctgccgaagcctggggcagagccgatgatgtgattaagatccactggcaggaaaagaagtccaacaccatcctgggcagccaggaaggcaacaccatgaagaccaacgacacctacatgaagttcagctggctgaccgtgcccgagaagtccctggacaaagaacacagatgcatcgtgcggcacgaaaacaacaagaacggcgtggaccaggaaatcatcttcccacccatcaagaccgatgtgattacaatggaccccaaggacaactgctccaaggacgccaacgataccctgctgctccagctgaccaacaccagcgcctactacatgtacttgttgctgctgctgaagtccgtggtgtacttcgccatcatcacatgctgcctgctgcggagaaccgccttctgctgcaacggcgagaagtctagggccaagcgatctggatctggagcaacaaacttctcactactcaaacaagcaggtgacgtggaggagaatcccgggcctactagtatggactggatttggcgcatccttttccttgtcggcgctgctaccggcgcgcattccttcgaagaagttcagctggtggaatctggccctggcctggtcaagcctagcgagacactgagcctgacctgtaccgtgtccggcttcagcctgaccagatttggcgtgcactgggtccgacagccacctggcaaaggactggaatggctgggagtgatttggagaggcggcagcaccgattacaacgccgccttcatgagccggctgaccatcagcaaggacaacagcaagaaccaggtgtccctgaagctgagcagcgtgacagccgctgataccgccgtgtactactgctccaaccactactacggcagctccgactacgccctggataattggggccagggaaccctggtcaccgtgtcatctacgcgtatccagaaccctgatcctgccgtgtaccagctgcgggatagcaagagcagcgacaagagcgtgtgtctgttcaccgacttcgacagccagaccaacgtgtcccagagcaaggactccgacgtgtacatcaccgataagaccgtgctggacatgcggagcatggacttcaagagcaactccgccgtggcctggtccaacaagtccgatttcgcctgcgccaacgccttcaacaacagcattatccccgaggacacattcttcccaagccccgagagcagcgactccaccgaccacgtgaagcccaaagagacagagaacaccaagcagcccagcaagagctgccacaagcccaaggccatcgtgcacaccgagaaagtgaacatgatgagcctgaccgtgctgggcctgcggatgctgttcgccaaaaccgtggccgtgaacttcctgctgaccgccaagctgttcttcctc

SEQ ID NO: 35378 - DNA, 2601 bp, synthetic construct
  source 1..2601: mol_type = other DNA
atggccttaccagtgaccgccttgctcctgccgctggccttgctgctccacgccgccaggccgctcgaggaggacctgaagaacgtgttcccacctgaggtggccgtgttcgagcctagcgaggccgagatcagccacacccagaaagccaccctcgtgtgcctggctaccggcttctaccccgaccatgtggaactgtcttggtgggtcaacggcaaagaggtgcacagcggcgtgtgtaccgacccccagccactgaaagaacagcccgccctgaacgacagccggtactgcctgagcagcagactgagagtgtccgccaccttctggcagaacccccggaaccacttcagatgccaggtgcagttctacggcctgagcgagaacgacgagtggacccaggacagagccaagcccgtgacccagatcgtgtctgccgaagcctggggcagagccgattgcggctttaccagcgagagctaccagcagggcgtgctgagcgccaccaacctgagcgtgatcggcttcagaatcctgctgctgaaagtggccggctttaacctgctgatgaccctgcggctgtggtccagcagggccaagcgatctggatctggagcaacaaacttctcactactcaaacaagcaggtgacgtggaggagaatcccgggcctactagcatggccttaccagtgaccgccttgctcctgccgctggccttgctgctccacgccgccaggccggacatccagatgacacagagccctagcagcctgtctgccagcgtgggagacagagtgaccatcacctgtagagccagccaggacgtgcggaacatcgtcgtgtggttccagcagaagcctggcaaggcccctaagctgctgatctacagcggcagctacagatacagcggcgtgcccagcagattttccggctctggctctggcaccgacttcaccctgacaatatccagcctccagcctgaggacttcgccacctactactgccagcagcactacagccctccatacacattcggccagggcaccaaggtggaaatcaagagaggcggaggcggaagtggaggcggaggatctggcggcggaggctctgaagttcagctggtggaatctggccctggcctggtcaagcctagcgagacactgagcctgacctgtaccgtgtccggcttcagcctgaccagatttggcgtgcactgggtccgacagccacctggcaaaggactggaatggctgggagtgatttggagaggcggcagcaccgattacaacgccgccttcatgagccggctgaccatcagcaaggacaacagcaagaaccaggtgtccctgaagctgagcagcgtgacagccgctgataccgccgtgtactactgctccaaccactactacggcagctccgactacgccctggataattggggccagggaaccctggtcaccgtgtcatctacgcgtatccagaaccctgatcctgccgtgtaccagctgcgggatagcaagagcagcgacaagagcgtgtgtctgttcaccgacttcgacagccagaccaacgtgtcccagagcaaggactccgacgtgtacatcaccgataagtgcgtgctggacatgcggagcatggacttcaagagcaactccgccgtggcctggtccaacaagtccgatttcgcctgcgccaacgccttcaacaacagcattatccccgaggacacattcttcccaagccccgagagcagctgcgacgtgaagctggtggaaaagagcttcgagacagacaccaacctgaacttccagatcctgtacgaggtgatcggcttcagaatcctgctgctgaaagtggccggctttaacctgctgatgaccctgcggctgtggtccagccgcgccaagagaagcggatctggcgtgaagcagaccctgaatttcgacctgctgaagctggctggcgacgtggaatccaacccaggcccttctagaggccatatgaccgagtacaagcccacggtgcgcctcgccacccgcgacgacgtccccagggccgtacgcaccctcgccgccgcgttcgccgactaccccgccacgcgccacaccgtcgatccggaccgccacatcgagcgggtcaccgagctgcaagaactcttcctcacgcgcgtcgggctcgacatcggcaaggtgtgggtcgcggacgacggcgccgcggtggcggtctggaccacgccggagagcgtcgaagcgggggcggtgttcgccgagatcggcccgcgcatggccgagttgagcggttcccggctggccgcgcagcaacagatggaaggcctcctggcgccgcaccggcccaaggagcccgcgtggttcctggccaccgtcggcgtctcgcccgaccaccagggcaagggtctgggcagcgccgtcgtgctccccggagtggaggcggccgagcgcgccggggtgcccgccttcctggagacctccgcgccccgcaacctccccttctacgagcggctcggcttcaccgtcaccgccgacgtcgaggtgcccgaaggaccgcgcacctggtgcatgacccgcaagcccggtgcctga

SEQ ID NO: 35379 - DNA, 2601 bp, synthetic construct
  source 1..2601: mol_type = other DNA
atggccttaccagtgaccgccttgctcctgccgctggccttgctgctccacgccgccaggccgctcgagatccagaaccctgatcctgccgtgtaccagctgcgggatagcaagagcagcgacaagagcgtgtgtctgttcaccgacttcgacagccagaccaacgtgtcccagagcaaggactccgacgtgtacatcaccgataagtgcgtgctggacatgcggagcatggacttcaagagcaactccgccgtggcctggtccaacaagtccgatttcgcctgcgccaacgccttcaacaacagcattatccccgaggacacattcttcccaagccccgagagcagctgcgacgtgaagctggtggaaaagagcttcgagacagacaccaacctgaacttccagatcctgtacgaggtgatcggcttcagaatcctgctgctgaaagtggccggctttaacctgctgatgaccctgcggctgtggtccagcagggccaagcgatctggatctggagcaacaaacttctcactactcaaacaagcaggtgacgtggaggagaatcccgggcctactagcatggccttaccagtgaccgccttgctcctgccgctggccttgctgctccacgccgccaggccggacatccagatgacacagagccctagcagcctgtctgccagcgtgggagacagagtgaccatcacctgtagagccagccaggacgtgcggaacatcgtcgtgtggttccagcagaagcctggcaaggcccctaagctgctgatctacagcggcagctacagatacagcggcgtgcccagcagattttccggctctggctctggcaccgacttcaccctgacaatatccagcctccagcctgaggacttcgccacctactactgccagcagcactacagccctccatacacattcggccagggcaccaaggtggaaatcaagagaggcggaggcggaagtggaggcggaggatctggcggcggaggctctgaagttcagctggtggaatctggccctggcctggtcaagcctagcgagacactgagcctgacctgtaccgtgtccggcttcagcctgaccagatttggcgtgcactgggtccgacagccacctggcaaaggactggaatggctgggagtgatttggagaggcggcagcaccgattacaacgccgccttcatgagccggctgaccatcagcaaggacaacagcaagaaccaggtgtccctgaagctgagcagcgtgacagccgctgataccgccgtgtactactgctccaaccactactacggcagctccgactacgccctggataattggggccagggaaccctggtcaccgtgtcatctacgcgtgaggacctgaagaacgtgttcccacctgaggtggccgtgttcgagcctagcgaggccgagatcagccacacccagaaagccaccctcgtgtgcctggctaccggcttctaccccgaccatgtggaactgtcttggtgggtcaacggcaaagaggtgcacagcggcgtgtgtaccgacccccagccactgaaagaacagcccgccctgaacgacagccggtactgcctgagcagcagactgagagtgtccgccaccttctggcagaacccccggaaccacttcagatgccaggtgcagttctacggcctgagcgagaacgacgagtggacccaggacagagccaagcccgtgacccagatcgtgtctgccgaagcctggggcagagccgattgcggctttaccagcgagagctaccagcagggcgtgctgagcgccaccaacctgagcgtgatcggcttcagaatcctgctgctgaaagtggccggctttaacctgctgatgaccctgcggctgtggtccagccgcgccaagagaagcggatctggcgtgaagcagaccctgaatttcgacctgctgaagctggctggcgacgtggaatccaacccaggcccttctagaggccatatgaccgagtacaagcccacggtgcgcctcgccacccgcgacgacgtccccagggccgtacgcaccctcgccgccgcgttcgccgactaccccgccacgcgccacaccgtcgatccggaccgccacatcgagcgggtcaccgagctgcaagaactcttcctcacgcgcgtcgggctcgacatcggcaaggtgtgggtcgcggacgacggcgccgcggtggcggtctggaccacgccggagagcgtcgaagcgggggcggtgttcgccgagatcggcccgcgcatggccgagttgagcggttcccggctggccgcgcagcaacagatggaaggcctcctggcgccgcaccggcccaaggagcccgcgtggttcctggccaccgtcggcgtctcgcccgaccaccagggcaagggtctgggcagcgccgtcgtgctccccggagtggaggcggccgagcgcgccggggtgcccgccttcctggagacctccgcgccccgcaacctccccttctacgagcggctcggcttcaccgtcaccgccgacgtcgaggtgcccgaaggaccgcgcacctggtgcatgacccgcaagcccggtgcctga

SEQ ID NO: 35380 - DNA, 2601 bp, synthetic construct; identical to SEQ ID NO: 35378
  source 1..2601: mol_type = other DNA

SEQ ID NO: 35381 - DNA, 2925 bp, synthetic construct
  source 1..2925: mol_type = other DNA
atggccttaccagtgaccgccttgctcctgccgctggccttgctgctccacgccgccaggccgctcgaggaggacctgaagaacgtgttcccacctgaggtggccgtgttcgagcctagcgaggccgagatcagccacacccagaaagccaccctcgtgtgcctggctaccggcttctaccccgaccatgtggaactgtcttggtgggtcaacggcaaagaggtgcacagcggcgtgtctaccgacccccagccactgaaagaacagcccgccctgaacgacagccggtactgcctgagcagcagactgagagtgtccgccaccttctggcagaacccccggaaccacttcagatgccaggtgcagttctacggcctgagcgagaacgacgagtggacccaggacagagccaagcccgtgacccagatcgtgtctgccgaagcctggggcagagccgatgatgtgattaagatccactggcaggaaaagaagtccaacaccatcctgggcagccaggaaggcaacaccatgaagaccaacgacacctacatgaagttcagctggctgaccgtgcccgagaagtccctggacaaagaacacagatgcatcgtgcggcacgaaaacaacaagaacggcgtggaccaggaaatcatcttcccacccatcaagaccgatgtgattacaatggaccccaaggacaactgctccaaggacgccaacgataccctgctgctccagctgaccaacaccagcgcctactacatgtacttgttgctgctgctgaagtccgtggtgtacttcgccatcatcacatgctgcctgctgatggctatggtcaagcggaaggacagccggggaagggccaagcgatctggatctggagcaacaaacttctcactactcaaacaagcaggtgacgtggaggagaatcccgggcctactagcatggccttaccagtgaccgccttgctcctgccgctggccttgctgctccacgccgccaggccggacatccagatgacacagagccctagcagcctgtctgccagcgtgggagacagagtgaccatcacctgtagagccagccaggacgtgcggaacatcgtcgtgtggttccagcagaagcctggcaaggcccctaagctgctgatctacagcggcagctacagatacagcggcgtgcccagcagattttccggctctggctctggcaccgacttcaccctgacaatatccagcctccagcctgaggacttcgccacctactactgccagcagcactacagccctccatacacattcggccagggcaccaaggtggaaatcaagagaggcggaggcggaagtggaggcggaggatctggcggcggaggctctgaagttcagctggtggaatctggccctggcctggtcaagcctagcgagacactgagcctgacctgtaccgtgtccggcttcagcctgaccagatttggcgtgcactgggtccgacagccacctggcaaaggactggaatggctgggagtgatttggagaggcggcagcaccgattacaacgccgccttcatgagccggctgaccatcagcaaggacaacagcaagaaccaggtgtccctgaagctgagcagcgtgacagccgctgataccgccgtgtactactgctccaaccactactacggcagctccgactacgccctggataattggggccagggaaccctggtcaccgtgtcatctacgcgtatccagaaccctgatcctgccgtgtaccagctgcgggatagcaagagcagcgacaagagcgtgtgtctgttcaccgacttcgacagccagaccaacgtgtcccagagcaaggactccgacgtgtacatcaccgataagaccgtgctggacatgcggagcatggacttcaagagcaactccgccgtggcctggtccaacaagtccgatttcgcctgcgccaacgccttcaacaacagcattatccccgaggacacattcttcccaagccccgagagcagcgactccaccgaccacgtgaagcccaaagagacagagaacaccaagcagcccagcaagagctgccacaagcccaaggccatcgtgcacaccgagaaagtgaacatgatgagcctgaccgtgctgggcctgcggatgctgttcgccaaaaccgtggccgtgaacttcctgctgaccgccaagctgttcttcctcctcaccgcccgcgccaagagaagcggatctggcgtgaagcagaccctgaatttcgacctgctgaagctggctggcgacgtggaatccaacccaggcccttctagaggccatatgaccgagtacaagcccacggtgcgcctcgccacccgcgacgacgtccccagggccgtacgcaccctcgccgccgcgttcgccgactaccccgccacgcgccacaccgtcgatccggaccgccacatcgagcgggtcaccgagctgcaagaactcttcctcacgcgcgtcgggctcgacatcggcaaggtgtgggtcgcggacgacggcgccgcggtggcggtctggaccacgccggagagcgtcgaagcgggggcggtgttcgccgagatcggcccgcgcatggccgagttgagcggttcccggctggccgcgcagcaacagatggaaggcctcctggcgccgcaccggcccaaggagcccgcgtggttcctggccaccgtcggcgtctcgcccgaccaccagggcaagggtctgggcagcgccgtcgtgctccccggagtggaggcggccgagcgcgccggggtgcccgccttcctggagacctccgcgccccgcaacctccccttctacgagcggctcggcttcaccgtcaccgccgacgtcgaggtgcccgaaggaccgcgcacctggtgcatgacccgcaagcccggtgcctga

SEQ ID NO: 35382 - DNA, 2925 bp, synthetic construct
  source 1..2925: mol_type = other DNA
atggccttaccagtgaccgccttgctcctgccgctggccttgctgctccacgccgccaggccgctcgagatccagaaccctgatcctgccgtgtaccagctgcgggatagcaagagcagcgacaagagcgtgtgtctgttcaccgacttcgacagccagaccaacgtgtcccagagcaaggactccgacgtgtacatcaccgataagaccgtgctggacatgcggagcatggacttcaagagcaactccgccgtggcctggtccaacaagtccgatttcgcctgcgccaacgccttcaacaacagcattatccccgaggacacattcttcccaagccccgagagcagcgactccaccgaccacgtgaagcccaaagagacagagaacaccaagcagcccagcaagagctgccacaagcccaaggccatcgtgcacaccgagaaagtgaacatgatgagcctgaccgtgctgggcctgcggatgctgttcgccaaaaccgtggccgtgaacttcctgctgaccgccaagctgttcttcctcctcaccgccagggccaagcgatctggatctggagcaacaaacttctcactactcaaacaagcaggtgacgtggaggagaatcccgggcctactagcatggccttaccagtgaccgccttgctcctgccgctggccttgctgctccacgccgccaggccggacatccagatgacacagagccctagcagcctgtctgccagcgtgggagacagagtgaccatcacctgtagagccagccaggacgtgcggaacatcgtcgtgtggttccagcagaagcctggcaaggcccctaagctgctgatctacagcggcagctacagatacagcggcgtgcccagcagattttccggctctggctctggcaccgacttcaccctgacaatatccagcctccagcctgaggacttcgccacctactactgccagcagcactacagccctccatacacattcggccagggcaccaaggtggaaatcaagagaggcggaggcggaagtggaggcggaggatctggcggcggaggctctgaagttcagctggtggaatctggccctggcctggtcaagcctagcgagacactgagcctgacctgtaccgtgtccggcttcagcctgaccagatttggcgtgcactgggtccgacagccacctggcaaaggactggaatggctgggagtgatttggagaggcggcagcaccgattacaacgccgccttcatgagccggctgaccatcagcaaggacaacagcaagaaccaggtgtccctgaagctgagcagcgtgacagccgctgataccgccgtgtactactgctccaaccactactacggcagctccgactacgccctggataattggggccagggaaccctggtcaccgtgtcatctacgcgtgaggacctgaagaacgtgttcccacctgaggtggccgtgttcgagcctagcgaggccgagatcagccacacccagaaagccaccctcgtgtgcctggctaccggcttctaccccgaccatgtggaactgtcttggtgggtcaacggcaaagaggtgcacagcggcgtgtctaccgacccccagccactgaaagaacagcccgccctgaacgacagccggtactgcctgagcagcagactgagagtgtccgccaccttctggcagaacccccggaaccacttcagatgccaggtgcagttctacggcctgagcgagaacgacgagtggacccaggacagagccaagcccgtgacccagatcgtgtctgccgaagcctggggcagagccgatgatgtgattaagatccactggcaggaaaagaagtccaacaccatcctgggcagccaggaaggcaacaccatgaagaccaacgacacctacatgaagttcagctggctgaccgtgcccgagaagtccctggacaaagaacacagatgcatcgtgcggcacgaaaacaacaagaacggcgtggaccaggaaatcatcttcccacccatcaagaccgatgtgattacaatggaccccaaggacaactgctccaaggacgccaacgataccctgctgctccagctgaccaacaccagcgcctactacatgtacttgttgctgctgctgaagtccgtggtgtacttcgccatcatcacatgctgcctgctgatggctatggtcaagcggaaggacagccggggacgcgccaagagaagcggatctggcgtgaagcagaccctgaatttcgacctgctgaagctggctggcgacgtggaatccaacccaggcccttctagaggccatatgaccgagtacaagcccacggtgcgcctcgccacccgcgacgacgtccccagggccgtacgcaccctcgccgccgcgttcgccgactaccccgccacgcgccacaccgtcgatccggaccgccacatcgagcgggtcaccgagctgcaagaactcttcctcacgcgcgtcgggctcgacatcggcaaggtgtgggtcgcggacgacggcgccgcggtggcggtctggaccacgccggagagcgtcgaagcgggggcggtgttcgccgagatcggcccgcgcatggccgagttgagcggttcccggctggccgcgcagcaacagatggaaggcctcctggcgccgcaccggcccaaggagcccgcgtggttcctggccaccgtcggcgtctcgcccgaccaccagggcaagggtctgggcagcgccgtcgtgctccccggagtggaggcggccgagcgcgccggggtgcccgccttcctggagacctccgcgccccgcaacctccccttctacgagcggctcggcttcaccgtcaccgccgacgtcgaggtgcccgaaggaccgcgcacctggtgcatgacccgcaagcccggtgcctga

SEQ ID NO: 35383 - DNA, 2919 bp, synthetic construct
  source 1..2919: mol_type = other DNA
atggccttaccagtgaccgccttgctcctgccgctggccttgctgctccacgccgccaggccgctcgaggaggacctgaagaacgtgttcccacctgaggtggccgtgttcgagcctagcgaggccgagatcagccacacccagaaagccaccctcgtgtgcctggctaccggcttctaccccgaccatgtggaactgtcttggtgggtcaacggcaaagaggtgcacagcggcgtgtgtaccgacccccagccactgaaagaacagcccgccctgaacgacagccggtactgcctgagcagcagactgagagtgtccgccaccttctggcagaacccccggaaccacttcagatgccaggtgcagttctacggcctgagcgagaacgacgagtggacccaggacagagccaagcccgtgacccagatcgtgtctgccgaagcctggggcagagccgatgatgtgattaagatccactggcaggaaaagaagtccaacaccatcctgggcagccaggaaggcaacaccatgaagaccaacgacacctacatgaagttcagctggctgaccgtgcccgagaagtccctggacaaagaacacagatgcatcgtgcggcacgaaaacaacaagaacggcgtggaccaggaaatcatcttcccacccatcaagaccgatgtgattacaatggaccccaaggacaactgctccaaggacgccaacgataccctgctgctccagctgaccaacaccagcgcctactacatgtacttgttgctgctgctgaagtccgtggtgtacttcgccatcatcacatgctgcctgctgcggagaaccgccttctgctgcaacggcgagaagtctagggccaagcgatctggatctggagcaacaaacttctcactactcaaacaagcaggtgacgtggaggagaatcccgggcctactagcatggccttaccagtgaccgccttgctcctgccgctggccttgctgctccacgccgccaggccggacatccagatgacacagagccctagcagcctgtctgccagcgtgggagacagagtgaccatcacctgtagagccagccaggacgtgcggaacatcgtcgtgtggttccagcagaagcctggcaaggcccctaagctgctgatctacagcggcagctacagatacagcggcgtgcccagcagattttccggctctggctctggcaccgacttcaccctgacaatatccagcctccagcctgaggacttcgccacctactactgccagcagcactacagccctccatacacattcggccagggcaccaaggtggaaatcaagagaggcggaggcggaagtggaggcggaggatctggcggcggaggctctgaagttcagctggtggaatctggccctggcctggtcaagcctagcgagacactgagcctgacctgtaccgtgtccggcttcagcctgaccagatttggcgtgcactgggtccgacagccacctggcaaaggactggaatggctgggagtgatttggagaggcggcagcaccgattacaacgccgccttcatgagccggctgaccatcagcaaggacaacagcaagaaccaggtgtccctgaagctgagcagcgtgacagccgctgataccgccgtgtactactgctccaaccactactacggcagctccgactacgccctggataattggggccagggaaccctggtcaccgtgtcatctacgcgtatccagaaccctgatcctgccgtgtaccagctgcgggatagcaagagcagcgacaagagcgtgtgtctgttcaccgacttcgacagccagaccaacgtgtcccagagcaaggactccgacgtgtacatcaccgataagtgcgtgctggacatgcggagcatggacttcaagagcaactccgccgtggcctggtccaacaagtccgatttcgcctgcgccaacgccttcaacaacagcattatccccgaggacacattcttcccaagccccgagagcagcgactccaccgaccacgtgaagcccaaagagacagagaacaccaagcagcccagcaagagctgccacaagcccaaggccatcgtgcacaccgagaaagtgaacatgatgagcctgaccgtgctgggcctgcggatgctgttcgccaaaaccgtggccgtgaacttcctgctgaccgccaagctgttcttcctccgcgccaagagaagcggatctggcgtgaagcagaccctgaatttcgacctgctgaagctggctggcgacgtggaatccaacccaggcccttctagaggccatatgaccgagtacaagcccacggtgcgcctcgccacccgcgacgacgtccccagggccgtacgcaccctcgccgccgcgttcgccgactaccccgccacgcgccacaccgtcgatccggaccgccacatcgagcgggtcaccgagctgcaagaactcttcctcacgcgcgtcgggctcgacatcggcaaggtgtgggtcgcggacgacggcgccgcggtggcggtctggaccacgccggagagcgtcgaagcgggggcggtgttcgccgagatcggcccgcgcatggccgagttgagcggttcccggctggccgcgcagcaacagatggaaggcctcctggcgccgcaccggcccaaggagcccgcgtggttcctggccaccgtcggcgtctcgcccgaccaccagggcaagggtctgggcagcgccgtcgtgctccccggagtggaggcggccgagcgcgccggggtgcccgccttcctggagacctccgcgccccgcaacctccccttctacgagcggctcggcttcaccgtcaccgccgacgtcgaggtgcccgaaggaccgcgcacctggtgcatgacccgcaagcccggtgcctga

SEQ ID NO: 35384 - DNA, 2919 bp, synthetic construct
  source 1..2919: mol_type = other DNA
atggccttaccagtgaccgccttgctcctgccgctggccttgctgctccacgccgccaggccgctcgagatccagaaccctgatcctgccgtgtaccagctgcgggatagcaagagcagcgacaagagcgtgtgtctgttcaccgacttcgacagccagaccaacgtgtcccagagcaaggactccgacgtgtacatcaccgataagtgcgtgctggacatgcggagcatggacttcaagagcaactccgccgtggcctggtccaacaagtccgatttcgcctgcgccaacgccttcaacaacagcattatccccgaggacacattcttcccaagccccgagagcagcgactccaccgaccacgtgaagcccaaagagacagagaacaccaagcagcccagcaagagctgccacaagcccaaggccatcgtgcacaccgagaaagtgaacatgatgagcctgaccgtgctgggcctgcggatgctgttcgccaaaaccgtggccgtgaacttcctgctgaccgccaagctgttcttcctcagggccaagcgatctggatctggagcaacaaacttctcactactcaaacaagcaggtgacgtggaggagaatcccgggcctactagcatggccttaccagtgaccgccttgctcctgccgctggccttgctgctccacgccgccaggccggacatccagatgacacagagccctagcagcctgtctgccagcgtgggagacagagtgaccatcacctgtagagccagccaggacgtgcggaacatcgtcgtgtggttccagcagaagcctggcaaggcccctaagctgctgatctacagcggcagctacagatacagcggcgtgcccagcagattttccggctctggctctggcaccgacttcaccctgacaatatccagcctccagcctgaggacttcgccacctactactgccagcagcactacagccctccatacacattcggccagggcaccaaggtggaaatcaagagaggcggaggcggaagtggaggcggaggatctggcggcggaggctctgaagttcagctggtggaatctggccctggcctggtcaagcctagcgagacactgagcctgacctgtaccgtgtccggcttcagcctgaccagatttggcgtgcactgggtccgacagccacctggcaaaggactggaatggctgggagtgatttggagaggcggcagcaccgattacaacgccgccttcatgagccggctgaccatcagcaaggacaacagcaagaaccaggtgtccctgaagctgagcagcgtgacagccgctgataccgccgtgtactactgctccaaccactactacggcagctccgactacgccctggataattggggccagggaaccctggtcaccgtgtcatctacgcgtgaggacctgaagaacgtgttcccacctgaggtggccgtgttcgagcctagcgaggccgagatcagccacacccagaaagccaccctcgtgtgcctggctaccggcttctaccccgaccatgtggaactgtcttggtgggtcaacggcaaagaggtgcacagcggcgtgtgtaccgacccccagccactgaaagaacagcccgccctgaacgacagccggtactgcctgagcagcagactgagagtgtccgccaccttctggcagaacccccggaaccacttcagatgccaggtgcagttctacggcctgagcgagaacgacgagtggacccaggacagagccaagcccgtgacccagatcgtgtctgccgaagcctggggcagagccgatgatgtgattaagatccactggcaggaaaagaagtccaacaccatcctgggcagccaggaaggcaacaccatgaagaccaacgacacctacatgaagttcagctggctgaccgtgcccgagaagtccctggacaaagaacacagatgcatcgtgcggcacgaaaacaacaagaacggcgtggaccaggaaatcatcttcccacccatcaagaccgatgtgattacaatggaccccaaggacaactgctccaaggacgccaacgataccctgctgctccagctgaccaacaccagcgcctactacatgtacttgttgctgctgctgaagtccgtggtgtacttcgccatcatcacatgctgcctgctgcggagaaccgccttctgctgcaacggcgagaagtctcgcgccaagagaagcggatctggcgtgaagcagaccctgaatttcgacctgctgaagctggctggcgacgtggaatccaacccaggcccttctagaggccatatgaccgagtacaagcccacggtgcgcctcgccacccgcgacgacgtccccagggccgtacgcaccctcgccgccgcgttcgccgactaccccgccacgcgccacaccgtcgatccggaccgccacatcgagcgggtcaccgagctgcaagaactcttcctcacgcgcgtcgggctcgacatcggcaaggtgtgggtcgcggacgacggcgccgcggtggcggtctggaccacgccggagagcgtcgaagcgggggcggtgttcgccgagatcggcccgcgcatggccgagttgagcggttcccggctggccgcgcagcaacagatggaaggcctcctggcgccgcaccggcccaaggagcccgcgtggttcctggccaccgtcggcgtctcgcccgaccaccagggcaagggtctgggcagcgccgtcgtgctccccggagtggaggcggccgagcgcgccggggtgcccgccttcctggagacctccgcgccccgcaacctccccttctacgagcggctcggcttcaccgtcaccgccgacgtcgaggtgcccgaaggaccgcgcacctggtgcatgacccgcaagcccggtgcctga

SEQ ID NO: 35385 - DNA, 2919 bp, synthetic construct
  source 1..2919: mol_type = other DNA
atggccttaccagtgaccgccttgctcctgccgctggccttgctgctccacgccgccaggccgctcgaggaggacctgaagaacgtgttcccacctgaggtggccgtgttcgagcctagcgaggccgagatcagccacacccagaaagccaccctcgtgtgcctggctaccggcttctaccccgaccatgtggaactgtcttggtgggtcaacggcaaagaggtgcacagcggcgtgtctaccgacccccagccactgaaagaacagcccgccctgaacgacagccggtactgcctgagcagcagactgagagtgtccgccaccttctggcagaacccccggaaccacttcagatgccaggtgcagttctacggcctgagcgagaacgacgagtggacccaggacagagccaagcccgtgacccagatcgtgtctgccgaagcctggggcagagccgatgatgtgattaagatccactggcaggaaaagaagtccaacaccatcctgggcagccaggaaggcaacaccatgaagaccaacgacacctacatgaagttcagctggctgaccgtgcccgagaagtccctggacaaagaacacagatgcatcgtgcggcacgaaaacaacaagaacggcgtggaccaggaaatcatcttcccacccatcaagaccgatgtgattacaatggaccccaaggacaactgctccaaggacgccaacgataccctgctgctccagctgaccaacaccagcgcctactacatgtacttgttgctgctgctgaagtccgtggtgtacttcgccatcatcacatgctgcctgctgcggagaaccgccttctgctgcaacggcgagaagtctagggccaagcgatctggatctggagcaacaaacttctcactactcaaacaagcaggtgacgtggaggagaatcccgggcctactagcatggccttaccagtgaccgccttgctcctgccgctggccttgctgctccacgccgccaggccggacatccagatgacacagagccctagcagcctgtctgccagcgtgggagacagagtgaccatcacctgtagagccagccaggacgtgcggaacatcgtcgtgtggttccagcagaagcctggcaaggcccctaagctgctgatctacagcggcagctacagatacagcggcgtgcccagcagattttccggctctggctctggcaccgacttcaccctgacaatatccagcctccagcctgaggacttcgccacctactactgccagcagcactacagccctccatacacattcggccagggcaccaaggtggaaatcaagagaggcggaggcggaagtggaggcggaggatctggcggcggaggctctgaagttcagctggtggaatctggccctggcctggtcaagcctagcgagacactgagcctgacctgtaccgtgtccggcttcagcctgaccagatttggcgtgcactgggtccgacagccacctggcaaaggactggaatggctgggagtgatttggagaggcggcagcaccgattacaacgccgccttcatgagccggctgaccatcagcaaggacaacagcaagaaccaggtgtccctgaagctgagcagcgtgacagccgctgataccgccgtgtactactgctccaaccactactacggcagctccgactacgccctggataattggggccagggaaccctggtcaccgtgtcatctacgcgtatccagaaccctgatcctgccgtgtaccagctgcgggatagcaagagcagcgacaagagcgtgtgtctgttcaccgacttcgacagccagaccaacgtgtcccagagcaaggactccgacgtgtacatcaccgataagaccgtgctggacatgcggagcatggacttcaagagcaactccgccgtggcctggtccaacaagtccgatttcgcctgcgccaacgccttcaacaacagcattatccccgaggacacattcttcccaagccccgagagcagcgactccaccgaccacgtgaagcccaaagagacagagaacaccaagcagcccagcaagagctgccacaagcccaaggccatcgtgcacaccgagaaagtgaacatgatgagcctgaccgtgctgggcctgcggatgctgttcgccaaaaccgtggccgtgaacttcctgctgaccgccaagctgttcttcctccgcgccaagagaagcggatctggcgtgaagcagaccctgaatttcgacctgctgaagctggctggcgacgtggaatccaacccaggcccttctagaggccatatgaccgagtacaagcccacggtgcgcctcgccacccgcgacgacgtccccagggccgtacgcaccctcgccgccgcgttcgccgactaccccgccacgcgccacaccgtcgatccggaccgccacatcgagcgggtcaccgagctgcaagaactcttcctcacgcgcgtcgggctcgacatcggcaaggtgtgggtcgcggacgacggcgccgcggtggcggtctggaccacgccggagagcgtcgaagcgggggcggtgttcgccgagatcggcccgcgcatggccgagttgagcggttcccggctggccgcgcagcaacagatggaaggcctcctggcgccgcaccggcccaaggagcccgcgtggttcctggccaccgtcggcgtctcgcccgaccaccagggcaagggtctgggcagcgccgtcgtgctccccggagtggaggcggccgagcgcgccggggtgcccgccttcctggagacctccgcgccccgcaacctccccttctacgagcggctcggcttcaccgtcaccgccgacgtcgaggtgcccgaaggaccgcgcacctggtgcatgacccgcaagcccggtgcctga

SEQ ID NO: 35386 - DNA, 2919 bp, synthetic construct
  source 1..2919: mol_type = other DNA
atggccttaccagtgaccgccttgctcctgccgctggccttgctgctccacgccgccaggccgctcgagatccagaaccctgatcctgccgtgtaccagctgcgggatagcaagagcagcgacaagagcgtgtgtctgttcaccgacttcgacagccagaccaacgtgtcccagagcaaggactccgacgtgtacatcaccgataagaccgtgctggacatgcggagcatggacttcaagagcaactccgccgtggcctggtccaacaagtccgatttcgcctgcgccaacgccttcaacaacagcattatccccgaggacacattcttcccaagccccgagagcagcgactccaccgaccacgtgaagcccaaagagacagagaacaccaagcagcccagcaagagctgccacaagcccaaggccatcgtgcacaccgagaaagtgaacatgatgagcctgaccgtgctgggcctgcggatgctgttcgccaaaaccgtggccgtgaacttcctgctgaccgccaagctgttcttcctcagggccaagcgatctggatctggagcaacaaacttctcactactcaaacaagcaggtgacgtggaggagaatcccgggcctactagcatggccttaccagtgaccgccttgctcctgccgctggccttgctgctccacgccgccaggccggacatccagatgacacagagccctagcagcctgtctgccagcgtgggagacagagtgaccatcacctgtagagccagccaggacgtgcggaacatcgtcgtgtggttccagcagaagcctggcaaggcccctaagctgctgatctacagcggcagctacagatacagcggcgtgcccagcagattttccggctctggctctggcaccgacttcaccctgacaatatccagcctccagcctgaggacttcgccacctactactgccagcagcactacagccctccatacacattcggccagggcaccaaggtggaaatcaagagaggcggaggcggaagtggaggcggaggatctggcggcggaggctctgaagttcagctggtggaatctggccctggcctggtcaagcctagcgagacactgagcctgacctgtaccgtgtccggcttcagcctgaccagatttggcgtgcactgggtccgacagccacctggcaaaggactggaatggctgggagtgatttggagaggcggcagcaccgattacaacgccgccttcatgagccggctgaccatcagcaaggacaacagcaagaaccaggtgtccctgaagctgagcagcgtgacagccgctgataccgccgtgtactactgctccaaccactactacggcagctccgactacgccctggataattggggccagggaaccctggtcaccgtgtcatctacgcgtgaggacctgaagaacgtgttcccacctgaggtggccgtgttcgagcctagcgaggccgagatcagccacacccagaaagccaccctcgtgtgcctggctaccggcttctaccccgaccatgtggaactgtcttggtgggtcaacggcaaagaggtgcacagcggcgtgtctaccgacccccagccactgaaagaacagcccgccctgaacgacagccggtactgcctgagcagcagactgagagtgtccgccaccttctggcagaacccccggaaccacttcagatgccaggtgcagttctacggcctgagcgagaacgacgagtggacccaggacagagccaagcccgtgacccagatcgtgtctgccgaagcctggggcagagccgatgatgtgattaagatccactggcaggaaaagaagtccaacaccatcctgggcagccaggaaggcaacaccatgaagaccaacgacacctacatgaagttcagctggctgaccgtgcccgagaagtccctggacaaagaacacagatgcatcgtgcggcacgaaaacaacaagaacggcgtggaccaggaaatcatcttcccacccatcaagaccgatgtgattacaatggaccccaaggacaactgctccaaggacgccaacgataccctgctgctccagctgaccaacaccagcgcctactacatgtacttgttgctgctgctgaagtccgtggtgtacttcgccatcatcacatgctgcctgctgcggagaaccgccttctgctgcaacggcgagaagtctcgcgccaagagaagcggatctggcgtgaagcagaccctgaatttcgacctgctgaagctggctggcgacgtggaatccaacccaggcccttctagaggccatatgaccgagtacaagcccacggtgcgcctcgccacccgcgacgacgtccccagggccgtacgcaccctcgccgccgcgttcgccgactaccccgccacgcgccacaccgtcgatccggaccgccacatcgagcgggtcaccgagctgcaagaactcttcctcacgcgcgtcgggctcgacatcggcaaggtgtgggtcgcggacgacggcgccgcggtggcggtctggaccacgccggagagcgtcgaagcgggggcggtgttcgccgagatcggcccgcgcatggccgagttgagcggttcccggctggccgcgcagcaacagatggaaggcctcctggcgccgcaccggcccaaggagcccgcgtggttcctggccaccgtcggcgtctcgcccgaccaccagggcaagggtctgggcagcgccgtcgtgctccccggagtggaggcggccgagcgcgccggggtgcccgccttcctggagacctccgcgccccgcaacctccccttctacgagcggctcggcttcaccgtcaccgccgacgtcgaggtgcccgaaggaccgcgcacctggtgcatgacccgcaagcccggtgcctga

SEQ ID NO: 35387 - DNA, 2613 bp, synthetic construct
  source 1..2613: mol_type = other DNA
atggccttaccagtgaccgccttgctcctgccgctggccttgctgctccacgccgccaggccgctcgaggaggacctgaagaacgtgttcccacctgaggtggccgtgttcgagcctagcaaggccgagatcgcccacacccagaaagccaccctcgtgtgcctggctaccggcttctaccccgaccatgtggaactgtcttggtgggtcaacggcaaagaggtgcacagcggcgtgtgtaccgacccccagccactgaaagaacagcccgccctgaacgacagccggtactgcctgagcagcagactgagagtgtccgccaccttctggcagaacccccggaaccacttcagatgccaggtgcagttctacggcctgagcgagaacgacgagtggacccaggacagagccaagcccgtgacccagatcgtgtctgccgaagcctggggcagagccgattgcggcatcaccagcgccagctaccaccagggcgtgctgagcgccaccatcctgtacgagatcctgctgggcaaggccaccctgtacgccgtgctggtgtctgccctggtgctgatggctatggtcaagcggaaggacagccggggaagggccaagcgatctggatctggagcaacaaacttctcactactcaaacaagcaggtgacgtggaggagaatcccgggcctactagcatggccttaccagtgaccgccttgctcctgccgctggccttgctgctccacgccgccaggccggacatccagatgacacagagccctagcagcctgtctgccagcgtgggagacagagtgaccatcacctgtagagccagccaggacgtgcggaacatcgtcgtgtggttccagcagaagcctggcaaggcccctaagctgctgatctacagcggcagctacagatacagcggcgtgcccagcagattttccggctctggctctggcaccgacttcaccctgacaatatccagcctccagcctgaggacttcgccacctactactgccagcagcactacagccctccatacacattcggccagggcaccaaggtggaaatcaagagaggcggaggcggaagtggaggcggaggatctggcggcggaggctctgaagttcagctggtggaatctggccctggcctggtcaagcctagcgagacactgagcctgacctgtaccgtgtccggcttcagcctgaccagatttggcgtgcactgggtccgacagccacctggcaaaggactggaatggctgggagtgatttggagaggcggcagcaccgattacaacgccgccttcatgagccggctgaccatcagcaaggacaacagcaagaaccaggtgtccctgaagctgagcagcgtgacagccgctgataccgccgtgtactactgctccaaccactactacggcagctccgactacgccctggataattggggccagggaaccctggtcaccgtgtcatctacgcgtatccagaaccctgatcctgccgtgtaccagctgcgggatagcaagagcagcgacaagagcgtgtgtctgttcaccgacttcgacagccagaccaacgtgtcccagagcaaggactccgacgtgtacatcaccgataagtgcgtgctggacatgcggagcatggacttcaagagcaactccgccgtggcctggtccaacaagtccgatttcgcctgcgccaacgccttcaacaacagcattatccccgaggacacattcttcccaagcagcgacgtgccctgcgacgtgaagctggtggaaaagagcttcgagacagacaccaacctgaacttccagaacctgagcgtgatcggcttcagaatcctgctgctgaaagtggccggctttaacctgctgatgaccctgcggctgtggtccagccgcgccaagagaagcggatctggcgtgaagcagaccctgaatttcgacctgctgaagctggctggcgacgtggaatccaacccaggcccttctagaggccatatgaccgagtacaagcccacggtgcgcctcgccacccgcgacgacgtccccagggccgtacgcaccctcgccgccgcgttcgccgactaccccgccacgcgccacaccgtcgatccggaccgccacatcgagcgggtcaccgagctgcaagaactcttcctcacgcgcgtcgggctcgacatcggcaaggtgtgggtcgcggacgacggcgccgcggtggcggtctggaccacgccggagagcgtcgaagcgggggcggtgttcgccgagatcggcccgcgcatggccgagttgagcggttcccggctggccgcgcagcaacagatggaaggcctcctggcgccgcaccggcccaaggagcccgcgtggttcctggccaccgtcggcgtctcgcccgaccaccagggcaagggtctgggcagcgccgtcgtgctccccggagtggaggcggccgagcgcgccggggtgcccgccttcctggagacctccgcgccccgcaacctccccttctacgagcggctcggcttcaccgtcaccgccgacgtcgaggtgcccgaaggaccgcgcacctggtgcatgacccgcaagcccggtgcctga

SEQ ID NO: 35388 - DNA, 2613 bp, synthetic construct
  source 1..2613: mol_type = other DNA
atggccttaccagtgaccgccttgctcctgccgctggccttgctgctccacgccgccaggccgctcgagatccagaaccctgatcctgccgtgtaccagctgcgggatagcaagagcagcgacaagagcgtgtgtctgttcaccgacttcgacagccagaccaacgtgtcccagagcaaggactccgacgtgtacatcaccgataagtgcgtgctggacatgcggagcatggacttcaagagcaactccgccgtggcctggtccaacaagtccgatttcgcctgcgccaacgccttcaacaacagcattatccccgaggacacattcttcccaagcagcgacgtgccctgcgacgtgaagctggtggaaaagagcttcgagacagacaccaacctgaacttccagaacctgagcgtgatcggcttcagaatcctgctgctgaaagtggccggctttaacctgctgatgaccctgcggctgtggtccagcagggccaagcgatctggatctggagcaacaaacttctcactactcaaacaagcaggtgacgtggaggagaatcccgggcctactagcatggccttaccagtgaccgccttgctcctgccgctggccttgctgctccacgccgccaggccggacatccagatgacacagagccctagcagcctgtctgccagcgtgggagacagagtgaccatcacctgtagagccagccaggacgtgcggaacatcgtcgtgtggttccagcagaagcctggcaaggcccctaagctgctgatctacagcggcagctacagatacagcggcgtgcccagcagattttccggctctggctctggcaccgacttcaccctgacaatatccagcctccagcctgaggacttcgccacctactactgccagcagcactacagccctccatacacattcggccagggcaccaaggtggaaatcaagagaggcggaggcggaagtggaggcggaggatctggcggcggaggctctgaagttcagctggtggaatctggccctggcctggtcaagcctagcgagacactgagcctgacctgtaccgtgtccggcttcagcctgaccagatttggcgtgcactgggtccgacagccacctggcaaaggactggaatggctgggagtgatttggagaggcggcagcaccgattacaacgccgccttcatgagccggctgaccatcagcaaggacaacagcaagaaccaggtgtccctgaagctgagcagcgtgacagccgctgataccgccgtgtactactgctccaaccactactacggcagctccgactacgccctggataattggggccagggaaccctggtcaccgtgtcatctacgcgtgaggacctgaagaacgtgttcccacctgaggtggccgtgttcgagcctagcaaggccgagatcgcccacacccagaaagccaccctcgtgtgcctggctaccggcttctaccccgaccatgtggaactgtcttggtgggtcaacggcaaagaggtgcacagcggcgtgtgtaccgacccccagccactgaaagaacagcccgccctgaacgacagccggtactgcctgagcagcagactgagagtgtccgccaccttctggcagaacccccggaaccacttcagatgccaggtgcagttctacggcctgagcgagaacgacgagtggacccaggacagagccaagcccgtgacccagatcgtgtctgccgaagcctggggcagagccgattgcggcatcaccagcgccagctaccaccagggcgtgctgagcgccaccatcctgtacgagatcctgctgggcaaggccaccctgtacgccgtgctggtgtctgccctggtgctgatggctatggtcaagcggaaggacagccggggacgcgccaagagaagcggatctggcgtgaagcagaccctgaatttcgacctgctgaagctggctggcgacgtggaatccaacccaggcccttctagaggccatatgaccgagtacaagcccacggtgcgcctcgccacccgcgacgacgtccccagggccgtacgcaccctcgccgccgcgttcgccgactaccccgccacgcgccacaccgtcgatccggaccgccacatcgagcgggtcaccgagctgcaagaactcttcctcacgcgcgtcgggctcgacatcggcaaggtgtgggtcgcggacgacggcgccgcggtggcggtctggaccacgccggagagcgtcgaagcgggggcggtgttcgccgagatcggcccgcgcatggccgagttgagcggttcccggctggccgcgcagcaacagatggaaggcctcctggcgccgcaccggcccaaggagcccgcgtggttcctggccaccgtcggcgtctcgcccgaccaccagggcaagggtctgggcagcgccgtcgtgctccccggagtggaggcggccgagcgcgccggggtgcccgccttcctggagacctccgcgccccgcaacctccccttctacgagcggctcggcttcaccgtcaccgccgacgtcgaggtgcccgaaggaccgcgcacctggtgcatgacccgcaagcccggtgcctga

SEQ ID NO: 35389 - DNA, 2292 bp, synthetic construct
  source 1..2292: mol_type = other DNA
atggccttaccagtgaccgccttgctcctgccgctggccttgctgctccacgccgccaggccgctcgagcagagttttgggttgttggaccctaaattgtgctatctgttggacggaatcctgttcatttacggagtgatcctgaccgcattgttcctgcgggttaagttttccagatccgcagacgcacccgcttaccaacaagggcagaaccaactctacaatgaacttaatttggggcggagggaagagtacgacgttctggacaaaaggaggggacgagatcccgagatgggcggaaagcctcagcgaaggaagaatccgcaagaggggctttataacgaactccagaaagataaaatggcagaagcctatagtgagattgggatgaagggagaaaggaggaggggtaaaggtcacgatgggttgtaccaaggattgagcacagccactaaagatacctatgatgcgctccacatgcaggccctgccgccaagaagggccaagcgatctggatctggagcaacaaacttctcactactcaaacaagcaggtgacgtggaggagaatcccgggcctactagcatggccttaccagtgaccgccttgctcctgccgctggccttgctgctccacgccgccaggccggacatccagatgacacagagccctagcagcctgtctgccagcgtgggagacagagtgaccatcacctgtagagccagccaggacgtgcggaacatcgtcgtgtggttccagcagaagcctggcaaggcccctaagctgctgatctacagcggcagctacagatacagcggcgtgcccagcagattttccggctctggctctggcaccgacttcaccctgacaatatccagcctccagcctgaggacttcgccacctactactgccagcagcactacagccctccatacacattcggccagggcaccaaggtggaaatcaagagaggcggaggcggaagtggaggcggaggatctggcggcggaggctctgaagttcagctggtggaatctggccctggcctggtcaagcctagcgagacactgagcctgacctgtaccgtgtccggcttcagcctgaccagatttggcgtgcactgggtccgacagccacctggcaaaggactggaatggctgggagtgatttggagaggcggcagcaccgattacaacgccgccttcatgagccggctgaccatcagcaaggacaacagcaagaaccaggtgtccctgaagctgagcagcgtgacagccgctgataccgccgtgtactactgctccaaccactactacggcagctccgactacgccctggataattggggccagggaaccctggtcaccgtgtcatctacgcgtgagctgggagagcctcagctgtgctatatcctggacgccatcctgtttctgtacggcatcgtgctgaccctgctgtactgccggctgaagatccaagtgcggaaggccgccatcaccagctacgagaaatccgacggcgtgtacaccggcctgagcaccagaaatcaagagacatacgagacactgaagcacgaaaagcctccacaacgcgccaagagaagcggatctggcgtgaagcagaccctgaatttcgacctgctgaagctggctggcgacgtggaatccaacccaggcccttctagaggccatatgaccgagtacaagcccacggtgcgcctcgccacccgcgacgacgtccccagggccgtacgcaccctcgccgccgcgttcgccgactaccccgccacgcgccacaccgtcgatccggaccgccacatcgagcgggtcaccgagctgcaagaactcttcctcacgcgcgtcgggctcgacatcggcaaggtgtgggtcgcggacgacggcgccgcggtggcggtctggaccacgccggagagcgtcgaagcgggggcggtgttcgccgagatcggcccgcgcatggccgagttgagcggttcccggctggccgcgcagcaacagatggaaggcctcctggcgccgcaccggcccaaggagcccgcgtggttcctggccaccgtcggcgtctcgcccgaccaccagggcaagggtctgggcagcgccgtcgtgctccccggagtggaggcggccgagcgcgccggggtgcccgccttcctggagacctccgcgccccgcaacctccccttctacgagcggctcggcttcaccgtcaccgccgacgtcgaggtgcccgaaggaccgcgcacctggtgcatgacccgcaagcccggtgcctga

SEQ ID NO: 35390 - DNA, 2925 bp, synthetic construct; identical to SEQ ID NO: 35381
  source 1..2925: mol_type = other DNA

SEQ ID NO: 35391 - DNA, 2925 bp, synthetic construct; identical to SEQ ID NO: 35382
  source 1..2925: mol_type = other DNA

SEQ ID NO: 35392 - DNA, 2922 bp, synthetic construct
  source 1..2922: mol_type = other DNA
atggccttaccagtgaccgccttgctcctgccgctggccttgctgctccacgccgccaggccgctcgaggaggaggacctgaagaacgtgttcccacctgaggtggccgtgttcgagcctagcgaggccgagatcagccacacccagaaagccaccctcgtgtgcctggctaccggcttctaccccgaccatgtggaactgtcttggtgggtcaacggcaaagaggtgcacagcggcgtgtgtaccgacccccagccactgaaagaacagcccgccctgaacgacagccggtactgcctgagcagcagactgagagtgtccgccaccttctggcagaacccccggaaccacttcagatgccaggtgcagttctacggcctgagcgagaacgacgagtggacccaggacagagccaagcccgtgacccagatcgtgtctgccgaagcctggggcagagccgatgatgtgattaagatccactggcaggaaaagaagtccaacaccatcctgggcagccaggaaggcaacaccatgaagaccaacgacacctacatgaagttcagctggctgaccgtgcccgagaagtccctggacaaagaacacagatgcatcgtgcggcacgaaaacaacaagaacggcgtggaccaggaaatcatcttcccacccatcaagaccgatgtgattacaatggaccccaaggacaactgctccaaggacgccaacgataccctgctgctccagctgaccaacaccagcgcctactacatgtacttgttgctgctgctgaagtccgtggtgtacttcgccatcatcacatgctgcctgctgcggagaaccgccttctgctgcaacggcgagaagtctagggccaagcgatctggatctggagcaacaaacttctcactactcaaacaagcaggtgacgtggaggagaatcccgggcctactagcatggccttaccagtgaccgccttgctcctgccgctggccttgctgctccacgccgccaggccggacatccagatgacacagagccctagcagcctgtctgccagcgtgggagacagagtgaccatcacctgtagagccagccaggacgtgcggaacatcgtcgtgtggttccagcagaagcctggcaaggcccctaagctgctgatctacagcggcagctacagatacagcggcgtgcccagcagattttccggctctggctctggcaccgacttcaccctgacaatatccagcctccagcctgaggacttcgccacctactactgccagcagcactacagccctccatacacattcggccagggcaccaaggtggaaatcaagagaggcggaggcggaagtggaggcggaggatctggcggcggaggctctgaagttcagctggtggaatctggccctggcctggtcaagcctagcgagacactgagcctgacctgtaccgtgtccggcttcagcctgaccagatttggcgtgcactgggtccgacagccacctggcaaaggactggaatggctgggagtgatttggagaggcggcagcaccgattacaacgccgccttcatgagccggctgaccatcagcaaggacaacagcaagaaccaggtgtccctgaagctgagcagcgtgacagccgctgataccgccgtgtactactgctccaaccactactacggcagctccgactacgccctggataattggggccagggaaccctggtcaccgtgtcatctacgcgtatccagaaccctgatcctgccgtgtaccagctgcgggatagcaagagcagcgacaagagcgtgtgtctgttcaccgacttcgacagccagaccaacgtgtcccagagcaaggactccgacgtgtacatcaccgataagtgcgtgctggacatgcggagcatggacttcaagagcaactccgccgtggcctggtccaacaagtccgatttcgcctgcgccaacgccttcaacaacagcattatccccgaggacacattcttcccaagccccgagagcagcgactccaccgaccacgtgaagcccaaagagacagagaacaccaagcagcccagcaagagctgccacaagcccaaggccatcgtgcacaccgagaaagtgaacatgatgagcctgaccgtgctgggcctgcggatgctgttcgccaaaaccgtggccgtgaacttcctgctgaccgccaagctgttcttcctccgcgccaagagaagcggatctggcgtgaagcagaccctgaatttcgacctgctgaagctggctggcgacgtggaatccaacccaggcccttctagaggccatatgaccgagtacaagcccacggtgcgcctcgccacccgcgacgacgtccccagggccgtacgcaccctcgccgccgcgttcgccgactaccccgccacgcgccacaccgtcgatccggaccgccacatcgagcgggtcaccgagctgcaagaactcttcctcacgcgcgtcgggctcgacatcggcaaggtgtgggtcgcggacgacggcgccgcggtggcggtctggaccacgccggagagcgtcgaagcgggggcggtgttcgccgagatcggcccgcgcatggccgagttgagcggttcccggctggccgcgcagcaacagatggaaggcctcctggcgccgcaccggcccaaggagcccgcgtggttcctggccaccgtcggcgtctcgcccgaccaccagggcaagggtctgggcagcgccgtcgtgctccccggagtggaggcggccgagcgcgccggggtgcccgccttcctggagacctccgcgccccgcaacctccccttctacgagcggctcggcttcaccgtcaccgccgacgtcgaggtgcccgaaggaccgcgcacctggtgcatgacccgcaagcccggtgcctga
